(19) United States
(12) Patent Application Publication
(10) Pub. No.: US 2015/0240253 A1
(43) Pub. Date: Aug. 27, 2015

(54) LONG INTERGENIC NON-CODING RNAS IN MAIZE

(71) Applicant: E. I. DU PONT DE NEMOURS AND COMPANY, Wilmington, DE (US)

(72) Inventors: Brian McGonigle, Wilmington, DE (US); Thomas D. Moloshok, Ambler, PA (US)

(21) Appl. No.: 14/424,206

(22) PCT Filed: Aug. 28, 2013
(86) PCT No.: PCT/US13/56931

§ 371 Date: Feb. 26, 2015

Related U.S. Application Data
(60) Provisional application No. 61/694,811, filed on Aug. 30, 2012.

(51) Int. Cl. C12N 15/82

(52) U.S. Cl. CPC C12N 15/8218; C12N 15/8279; C12N 15/8274; C12N 15/8286; C12N 15/8245; C12N 15/8247; C12N 15/8251; C12N 15/8261; C12N 15/8273

(57) ABSTRACT

The invention provides methods and compositions useful in altering gene expression. The invention provides polynucleotide constructs comprising useful for altering gene expression, as well as cells, plants and seeds comprising the polynucleotides. The invention also provides methods for using lincRNAs to alter gene expression.

[0001] This application claims the benefit of U.S. Provisional Application No. 61/694811, filed Aug. 30, 2012, the entire content of which is herein incorporated by reference.

### FIELD OF THE INVENTION

[0002] The field of the present invention relates generally to plant molecular biology. More specifically it relates to compositions, constructs and methods of altering gene expression.

### BACKGROUND

[0003] Recent data obtained using whole-genome tiling arrays and RNA sequencing have shown that the transcription landscape in eukaryotes is much more complex than was previously anticipated, with a high proportion of novel transcripts generated from intergenic regions and promoters of annotated genes (Zhu et al. 2012, Genes 3:176-190; Jacquier et al. 2009, Nat. Rev. Genet. 10:833-844).

[0004] A large proportion of the eukaryotic genome produces RNA molecules that have no protein-coding capacity, namely non-coding RNAs (ncRNAs) (Zhu and Wang, 2012, Genes 3:176-190). ncRNAs are arbitrarily grouped into short (<200 nt) and long ncRNAs (IncRNAs; >200 nt). Long non-coding RNAs that are transcribed from non-coding DNA sequences between protein-coding genes are referred to as long intergenic non-coding RNAs (lincRNA).The importance of short ncRNAs, including siRNAs, miRNAs and piRNAs, in transcriptional and posttranscriptional regulation of gene expression has been well recognized. In contrast, the regulatory roles of InRNAs are beginning to be recognized (Zhu et al. 2012, Genes 3:176-190).

[0005] Recent studies of IncRNAs in mammalian systems have shown that they are key regulators of a variety of biological processes. In comparison to animals, plants have fewer IncRNAs identified and functionally characterized. However, the regulatory functions of plant IncRNAs appear largely similar to animal IncRNAs (Zhu and Wang, 2012, Genes 3:176-190). LincRNAs have been shown to act as transcriptional regulators and competing endogenous RNAs (ceRNAs), to serve as molecular cargos for protein re-localization and as modular scaffolds to recruit the assembly of multiple protein complexes for chromatin modifications. Some of these functions have been found to be conserved in plants. (Zhu et al. 2012, Genes 3:176-190).

[0006] Although some IncRNAs have been discovered from plants and characterized, there is an ongoing interest in the isolation of more novel IncRNAs given the important role they play in diverse array of biological processes.

### SUMMARY OF THE INVENTION

[0007] The present invention relates, inter alia, to an isolated polynucleotide comprising (a) a nucleotide sequence selected from the group consisting of SEQ ID NOs:1-203,370; or, (b) a full-length complement of (a); or, (c) a nucleotide sequence comprising a sequence having at least 95% sequence identity, based on the Clustal V method of alignment with pairwise alignment default parameters (KTUPLE=2, GAP PENALTY=5, WINDOW=4 and DIAGONALS SAVED=4), when compared to the nucleotide sequence of (a); wherein said nucleotide sequence is a long intergenic non-coding RNA (lincRNA).

[0008] In a second embodiment, the invention relates to an isolated polynucleotide of embodiment 1, comprising a nucleotide sequence having at least 98% sequence identity, based on the Clustal V method of alignment with pairwise alignment default parameters (KTUPLE=2, GAP PENALTY=5, WINDOW=4 and DIAGONALS SAVED=4), when compared to the nucleotide sequence of (a).

[0009] In a third embodiment, the invention relates to a recombinant DNA construct comprising any of the isolated polynucleotides discussed herein operably linked to at least one regulatory sequence.

[0010] In a fourth embodiment, the invention relates to a plant comprising in its genome the DNA expression constructs discussed herein. Such plants can be selected from the group consisting of corn, rice, sorghum, sunflower, millet, soybean, canola, wheat, barley, oat, beans, and nuts.

[0011] In a fifth embodiment, the invention relates to transgenic seeds obtained from a plant comprising in its genome the recombinant DNA constructs discussed herein. Also within the scope of the invention are transformed plant tissues or a plant cell comprising in its genome recombinant DNA constructs discussed herein.

[0012] In a sixth embodiment, the invention relates to a method of expressing a lincRNA in a plant comprising:
[0013] a) introducing the recombinant DNA construct of the instant invention into the plant, wherein the at least one heterologous nucleotide sequence comprises a lincRNA;
[0014] b) growing the plant of step a); and,
[0015] c) selecting a plant displaying expression of the lincRNA.

### BRIEF DESCRIPTION OF THE DRAWINGS AND SEQUENCE LISTINGS

[0016] The invention can be more fully understood from the following detailed description and the Sequence Listing that form a part of this application. A Sequence Listing and Table are provided herewith on Compact Disk. The contents of the Compact Disk containing the Sequence Listing and Table are hereby incorporated by reference in compliance with 37 CFR 1.52(e). The Compact Disks are submitted in duplicate and are identical to one another. The disks are labeled “Copy 1—Sequence Listing and Table”, “Copy 2—Sequence Listing and Table”, and CRF. The disks contain the following files: BB2041 US PSP Sequence Listing having the following size: 174,979,072 bytes and BB2041 US PSP Table 1 having the following size: 10,672,128 bytes which were created Aug. 29, 2012.

[0017] The sequence descriptions summarize the Sequence Listing attached hereto. The Sequence Listing contains one letter codes for nucleotide sequence characters and the single and three letter codes for amino acids as defined in the IUPAC-IUB standards described in Nucleic Acids Research 13:3021-3030 (1985) and in the Biochemical Journal 219(2):345-373 (1984).

[0018] SEQ ID NOs: 1-203,370 represent individual long intergenic non-coding RNAs (lincRNAs) from maize (Zea mays). SEQ ID NOs: 1-203,370 are shown as DNA sequences and represent a conversion of the RNA nucleotide “U” to the DNA nucleotide “T”. The SEQ ID NO:s are described in Table 1 listing the SEQ ID NO in column 1, and the description of the lincRNA in column 2.

[0019] Table 1 lists the sequence number of the lincRNA in column one followed by a description in column two. For example, SEQ ID NO:1 represents the DNA sequence of the A1710005-ZmChr8-90483850-90484319 lincRNA. A1710005-ZmChr8-90483850-90484319 refers to genotype A1710005 on the Zea mays chromosome 8 at base pair location 90483850-90484319.

LENGTHY TABLES
The patent application contains a lengthy table section. A copy of the table is available in electronic form from the USPTO web site (http://seqdata.uspto.gov/?pageRequest=docDetail&DocID=US20150240253A1). An electronic copy of the table will also be available from the USPTO upon request and payment of the fee set forth in 37 CFR 1.19(b)(3).

### DETAILED DESCRIPTION

[0020] The disclosure of all patents, patent applications, and publications cited herein are incorporated by reference in their entirety.

[0021] As used herein and in the appended claims, the singular forms “a”, “an”, and “the” include plural reference unless the context clearly dictates otherwise. Thus, for example, reference to “a plant” includes a plurality of such plants; reference to “a cell” includes one or more cells and equivalents thereof known to those skilled in the art, and so forth.

[0022] In the context of this disclosure, a number of terms shall be utilized. As used herein “contiguous” sequences or domains refer to sequences that are sequentially linked without added nucleotides intervening between the domains.

[0023] As used herein, “domain” or “functional domain” refers to nucleic acid sequence(s) that are capable of eliciting a biological response in plants. The present invention concerns lincRNAs composed of at least 200 nucleotide sequences acting either individually, or in concert with other nucleotide sequences, therefore a domain could refer to either individual lincRNAs or groups of lincRNAs. As used herein, “subdomains” or “functional subdomains” refer to subsequences of domains that are capable of eliciting a biological response in plants

[0024] As used herein, “encodes” or “encoding” refers to a DNA sequence which can be processed to generate an RNA and/or polypeptide.

[0025] As used herein, “expression” or “expressing” refers to production of a functional product, such as, the generation of an RNA transcript from an introduced construct, an endogenous DNA sequence, or a stably incorporated heterologous DNA sequence. The term may also refer to a polypeptide produced from an mRNA generated from any of the above DNA precursors. Thus, expression of a nucleic acid fragment may refer to transcription of the nucleic acid fragment (e.g., transcription resulting in mRNA or other functional RNA) and/or translation of RNA into a precursor or mature protein (polypeptide).

[0026] A “functional fragment” refers to a portion or subsequence of the nucleotide sequence of the present invention in which the ability to function as a lincRNA is maintained. Fragments can be obtained via methods such as site-directed mutagenesis and synthetic construction.

[0027] The term “genome” refers to the following: (1) the entire complement of genetic material (genes and non-coding sequences) present in each cell of an organism, or virus or organelle; (2) a complete set of chromosomes inherited as a (haploid) unit from one parent. “Genome” as it applies to plant cells encompasses not only chromosomal DNA found within the nucleus, but organelle DNA found within subcellular components (e.g., mitochondrial, plastid) of the cell.

[0028] As used herein, “heterologous” with respect to a sequence means a sequence that originates from a foreign species, or, if from the same species, is substantially modified from its native form in composition and/or genomic locus by deliberate human intervention. For example, with respect to a nucleic acid, it can be a nucleic acid that originates from a foreign species, or is synthetically designed, or, if from the same species, is substantially modified from its native form in composition and/or genomic locus by deliberate human intervention. A heterologous protein may originate from a foreign species or, if from the same species, is substantially modified from its original form by deliberate human intervention.

[0029] A “heterologous nucleotide sequence” refers to a sequence that is not naturally occurring with the nucleotide sequence of the invention. While this nucleotide sequence is heterologous to the nucleotide sequence of the invention, it may be homologous, or native, or heterologous, or foreign, to the plant host. The terms “heterologous nucleotide sequence”, “heterologous sequence”, “heterologous nucleic acid fragment”, and “heterologous nucleic acid sequence” are used interchangeably herein.

[0030] The term “host cell” refers to a cell which contains or into which is introduced a nucleic acid construct and supports the replication and/or expression of the construct. Host cells may be prokaryotic cells such as E. coli, or eukaryotic cells such as fungi, yeast, insect, amphibian, nematode, or mammalian cells. Alternatively, the host cells are monocotyledonous or dicotyledonous plant cells. An example of a monocotyledonous host cell is a maize host cell.

[0031] The term “introduced” means providing a nucleic acid (e.g., expression construct) or protein into a cell. Introduced includes reference to the incorporation of a nucleic acid into a eukaryotic or prokaryotic cell where the nucleic acid may be incorporated into the genome of the cell, and includes reference to the transient provision of a nucleic acid or protein to the cell. Introduced includes reference to stable or transient transformation methods, as well as sexually crossing. Thus, “introduced” in the context of inserting a nucleic acid fragment (e.g., a recombinant DNA construct/expression construct) into a cell, means “transfection” or “transformation” or “transduction” and includes reference to the incorporation of a nucleic acid fragment into a eukaryotic or prokaryotic cell where the nucleic acid fragment may be incorporated into the genome of the cell (e.g., chromosome, plasmid, plastid or mitochondrial DNA), converted into an autonomous replicon, or transiently expressed (e.g., transfected mRNA).

[0032] The term “isolated” refers to material, such as a nucleic acid or a protein, which is: (1) substantially or essentially free from components which normally accompany or interact with the material as found in its naturally occurring environment or (2) if the material is in its natural environment, the material has been altered by deliberate human intervention to a composition and/or placed at a locus in the cell other than the locus native to the material.

[0033] As used herein, microRNA or “miRNA” refers to an oligoribonucleic acid, which regulates expression of a polynucleotide comprising the target sequence. A “mature miRNA” refers to the miRNA generated from the processing of a miRNA precursor. A “miRNA template” is an oligonucleotide region, or regions, in a nucleic acid construct which encodes the miRNA. The “backside” region of a miRNA is a portion of a polynucleotide construct which is substantially complementary to the miRNA template and is predicted to base pair with the miRNA template. The miRNA template and backside may form a double-stranded polynucleotide, including a hairpin structure.

[0034] By “nucleic acid library” is meant a collection of isolated DNA or RNA molecules which comprise and substantially represent the entire transcribed fraction of a genome of a specified organism or of a tissue from that organism. Construction of exemplary nucleic acid libraries, such as genomic and cDNA libraries, is taught in standard molecular biology references such as Berger and Kimmel, Guide to Molecular Cloning Techniques, Methods in Enzymology, Vol. 152, Academic Press, Inc., San Diego, Calif. (Berger); Sambrook et al., Molecular Cloning—A Laboratory Manual, 2nd ed., Vol. 1-3 (1989); and Current Protocols in Molecular Biology, F. M. Ausubel et al., Eds., Current Protocols, a joint venture between Greene Publishing Associates, Inc. and John Wiley & Sons, Inc. (1994).

[0035] As used herein “operably linked” includes reference to a functional linkage of at least two sequences. Operably linked includes linkage between a promoter and a second sequence, wherein the promoter sequence initiates and mediates transcription of the DNA sequence corresponding to the second sequence.

[0036] “PCR” or “Polymerase Chain Reaction” is a technique for the synthesis of large quantities of specific DNA segments, consisting of a series of repetitive cycles (Perkin Elmer Cetus Instruments, Norwalk, Conn.). Typically, the double stranded DNA is heat denatured, the two primers complementary to the 3′ boundaries of the target segment are annealed at low temperature and then extended at an intermediate temperature. One set of these three consecutive steps comprises a cycle.

[0037] The terms “plasmid”, “vector” and “cassette” refer a small nucleic acid molecule (plasmid, virus, bacteriophage, artificial or cut DNA molecule) that can be used to deliver a polynucleotide of the invention into a host cell. Vectors are capable of being replicated and contain cloning sites for introduction of a foreign polynucleotide. Thus, expression vectors permit transcription of a nucleic acid inserted therein.

[0038] One aspect of the invention concerns a plant, cell, and seed comprising a recombinant DNA construct expressing a lincRNA and/or a lincRNA of the current disclosure. Typically, the cell will be a cell from a plant, but other prokaryotic or eukaryotic cells are also contemplated, including but not limited to viral, bacterial, fungus, yeast, insect, nematode, or animal cells. Plant cells include cells from monocots and dicots. The invention also provides plants and seeds comprising the recombinant DNA construct and/or a lincRNA of the current disclosure.

[0039] “Plant” includes reference to whole plants, plant organs, plant tissues, seeds and plant cells and progeny of same. Plant cells include, without limitation, cells from seeds, suspension cultures, embryos, meristematic regions, callus tissue, leaves, roots, shoots, gametophytes, sporophytes, pollen, and microspores.

[0040] The terms “monocot” and “monocotyledonous plant” are used interchangeably herein. A monocot of the current invention includes the Gramineae. The terms “dicot” and “dicotyledonous plant” are used interchangeably herein. A dicot of the current invention includes the following families: Asteraceae, Brassicaceae, Leguminosae, and Solanaceae.

[0041] The term “plant parts” includes differentiated and undifferentiated tissues including, but not limited to the following: roots, stems, shoots, leaves, pollen, seeds, tumor tissue and various forms of cells and culture (e.g., single cells, protoplasts, embryos and callus tissue). The plant tissue may be in plant or in a plant organ, plant organelle, tissue culture or cell culture.

[0042] The term “plant organ” refers to plant tissue or group of tissues that constitute a morphologically and functionally distinct part of a plant.

[0043] The terms “polynucleotide”, “polynucleotide sequence”, “nucleic acid sequence”, “nucleic acid fragment”, and “isolated nucleic acid fragment” are used interchangeably herein. These terms encompass nucleotide sequences and the like. A polynucleotide may be a polymer of RNA or DNA that is single- or double-stranded, that optionally contains synthetic, non-natural or altered nucleotide bases. A polynucleotide in the form of a polymer of DNA may be comprised of one or more segments of cDNA, genomic DNA, synthetic DNA, or mixtures thereof. Nucleotides (usually found in their 5′-monophosphate form) are referred to by a single letter designation as follows: “A” for adenylate or deoxyadenylate (for RNA or DNA, respectively), “C” for cytidylate or deoxycytidylate, “G” for guanylate or deoxyguanylate, “U” for uridylate, “T” for deoxythymidylate, “R” for purines (A or G), “Y” for pyrimidines (C or T), “K” for G or T, “H” for A or C or T, “I” for inosine, and “N” for any nucleotide.

[0044] An “isolated polynucleotide” refers to a polymer of ribonucleotides (RNA) or deoxyribonucleotides (DNA) that is single- or double-stranded, optionally containing synthetic, non-natural or altered nucleotide bases. An isolated polynucleotide in the form of DNA may be comprised of one or more segments of cDNA, genomic DNA or synthetic DNA.

[0045] “Progeny” comprises any subsequent generation of a plant. As used herein, “polypeptide” means proteins, protein fragments, modified proteins, amino acid sequences and synthetic amino acid sequences. The polypeptide can be glycosylated or not.

[0046] As used herein, “promoter” refers to a nucleic acid fragment, e.g., a region of DNA, that is involved in recognition and binding of an RNA polymerase and other proteins to initiate transcription. In other words, this nucleic acid fragment is capable of controlling transcription of another nucleic acid fragment.

[0047] A number of promoters can be used, these promoters can be selected based on the desired outcome. It is recognized that different applications will be enhanced by the use of different promoters in plant expression cassettes to modulate the timing, location and/or level of expression of the lincRNA. Such plant expression cassettes may also contain, if desired, a promoter regulatory region (e.g., one conferring inducible, constitutive, environmentally- or developmentally-regulated, or cell- or tissue-specific/selective expression), a transcription initiation start site, a ribosome binding site, an RNA processing signal, a transcription termination site, and/or a polyadenylation signal.

[0048] Constitutive, tissue-preferred or inducible promoters can be employed. Examples of constitutive promoters include the cauliflower mosaic virus (CaMV) 35S transcription initiation region, the 1′- or 2′-promoter derived from T-DNA of Agrobacterium tumefaciens, the ubiquitin 1 promoter, the Smas promoter, the cinnamyl alcohol dehydrogenase promoter (U.S. Pat. No. 5,683,439), the Nos promoter, the pEmu promoter, the rubisco promoter, the GRP1-8 promoter and other transcription initiation regions from various plant genes known to those of skill. If low level expression is desired, weak promoter(s) may be used. Weak constitutive promoters include, for example, the core promoter of the Rsyn7 promoter (WO 99/43838 and U.S. Pat. No. 6,072,050), the core 35S CaMV promoter, and the like. Other constitutive promoters include, for example, U.S. Pat. Nos. 5,608,149; 5,608,144; 5,604,121; 5,569,597; 5,466,785; 5,399,680; 5,268,463; and 5,608,142. See also, U.S. Pat. No. 6,177,611, herein incorporated by reference.

[0049] Examples of inducible promoters are the Adh1 promoter which is inducible by hypoxia or cold stress, the Hsp70 promoter which is inducible by heat stress, the PPDK promoter and the pepcarboxylase promoter which are both inducible by light. Also useful are promoters which are chemically inducible, such as the In2-2 promoter which is safener induced (U.S. Pat. No. 5,364,780), the ERE promoter which is estrogen induced, and the Axig1 promoter which is auxin induced and tapetum specific but also active in callus (PCT U.S.01/22169).

[0050] Examples of promoters under developmental control include promoters that initiate transcription preferentially in certain tissues, such as leaves, roots, fruit, seeds, or flowers. An exemplary promoter is the anther specific promoter 5126 (U.S. Pat. Nos. 5,689,049 and 5,689,051). Examples of seed-preferred promoters include, but are not limited to, 27 kD gamma zein promoter and waxy promoter, Boronat, A. et al. (1986) Plant Sci. 47:95-102; Reina, M. et al. Nucl. Acids Res. 18(21):6426; and Kloesgen, R. B. et al. (1986) Mol. Gen. Genet. 203:237-244. Promoters that express in the embryo, pericarp, and endosperm are disclosed in U.S. Pat. No. 6,225,529 and PCT publication WO 00/12733. The disclosures each of these are incorporated herein by reference in their entirety.

[0051] In some embodiments it will be beneficial to express a gene of interest and/or a lincRNA using an inducible promoter, particularly from a pathogen-inducible promoter. Such promoters include those from pathogenesis-related proteins (PR proteins), which are induced following infection by a pathogen; e.g., PR proteins, SAR proteins, beta-1,3-glucanase, chitinase, etc. See, for example, Redolfi et al. (1983) Neth. J. Plant Pathol. 89:245-254; Uknes et al. (1992) Plant Cell 4:645-656; and Van Loon (1985) Plant Mol. Virol. 4:111-116. See also WO 99/43819, herein incorporated by reference.

[0052] Of interest are promoters that are expressed locally at or near the site of pathogen infection. See, for example, Marineau et al. (1987) Plant Mol. Biol. 9:335-342; Matton et al. (1989) Molecular Plant-Microbe Interactions 2:325-331; Somsisch et al. (1986) Proc. Natl. Acad. Sci. USA 83:2427-2430; Somsisch et al. (1988) Mol. Gen. Genet. 2:93-98; and Yang (1996) Proc. Natl. Acad. Sci. USA 93:14972-14977.

[0053] See also, Chen et al. (1996) Plant J. 10:955-966; Zhang et al. (1994) Proc. Natl. Acad. Sci. USA 91:2507-2511; Warner et al. (1993) Plant J. 3:191-201; Siebertz et al. (1989) Plant Cell 1:961-968; U.S. Pat. No. 5,750,386 (nematode-inducible); and the references cited therein. Of particular interest is the inducible promoter for the maize PRms gene, whose expression is induced by the pathogen Fusarium moniliforme (see, for example, Cordero et al. (1992) Physiol. Mol. Plant Path. 41:189-200).

[0054] Additionally, as pathogens find entry into plants through wounds or insect damage, a wound-inducible promoter may be used in the constructions of the polynucleotides. Such wound-inducible promoters include potato proteinase inhibitor (pin II) gene (Ryan (1990) Ann. Rev. Phytopath. 28:425-449; Duan et al. (1996) Nature Biotech. 14:494-498); wun1 and wun2, U.S. Pat. No. 5,428,148; win1 and win2 (Stanford et al. (1989) Mol. Gen. Genet. 215:200-208); system in (McGurl et al. (1992) Science 225:1570-1573); WIP1 (Rohmeier et al. (1993) Plant Mol. Biol. 22:783-792; Eckelkamp et al. (1993) FEBS Lett. 323:73-76); MPI gene (Corderok et al. (1994) Plant J. 6(2):141-150); and the like, herein incorporated by reference.

[0055] Chemical-regulated promoters can be used to modulate the expression of a gene and/or a lincRNA in a plant through the application of an exogenous chemical regulator. Depending upon the objective, the promoter may be a chemical-inducible promoter, where application of the chemical induces gene expression, or a chemical-repressible promoter, where application of the chemical represses gene expression. Chemical-inducible promoters are known in the art and include, but are not limited to, the maize In2-2 promoter, which is activated by benzenesulfonamide herbicide safeners, the maize GST promoter, which is activated by hydrophobic electrophilic compounds that are used as pre-emergent herbicides, and the tobacco PR-1 a promoter, which is activated by salicylic acid. Other chemical-regulated promoters of interest include steroid-responsive promoters (see, for example, the glucocorticoid-inducible promoter in Schena et al. (1991) Proc. Natl. Acad. Sci. USA 88:10421-10425 and McNellis et al. (1998) Plant J. 14(2):247-257) and tetracycline-inducible and tetracycline-repressible promoters (see, for example, Gatz et al. (1991) Mol. Gen. Genet. 227:229-237, and U.S. Pat. Nos. 5,814,618 and 5,789,156), herein incorporated by reference.

[0056] Tissue-preferred promoters can be utilized to target enhanced expression of a sequence of interest within a particular plant tissue. Tissue-preferred promoters include Yamamoto et al. (1997) Plant J. 12(2):255-265; Kawamata et al. (1997) Plant Cell Physiol. 38(7):792-803; Hansen et al. (1997) Mol. Gen Genet. 254(3):337-343; Russell et al. (1997) Transgenic Res. 6(2):157-168; Rinehart et al. (1996) Plant Physiol. 112(3):1331-1341; Van Camp et al. (1996) Plant Physiol. 112(2):525-535; Canevascini et al. (1996) Plant Physiol. 112(2):513-524; Yamamoto et al. (1994) Plant Cell Physiol. 35(5):773-778; Lam (1994) Results Probl. Cell Differ. 20:181-196; Orozco et al. (1993) Plant Mol Biol. 23(6):1129-1138; Matsuoka et al. (1993) Proc Natl. Acad. Sci. USA 90(20):9586-9590; and Guevara-Garcia et al. (1993) Plant J. 4(3):495-505. Such promoters can be modified, if necessary, for weak expression.

[0057] Leaf-preferred promoters are known in the art. See, for example, Yamamoto et al. (1997) Plant J. 12(2):255-265; Kwon et al. (1994) Plant Physiol. 105:357-67; Yamamoto et al. (1994) Plant Cell Physiol. 35(5):773-778; Gotor et al. (1993) Plant J. 3:509-18; Orozco et al. (1993) Plant Mol. Biol. 23(6):1129-1138; and Matsuoka et al. (1993) Proc. Natl. Acad. Sci. USA 90(20):9586-9590. In addition, the promoters of cab and rubisco can also be used. See, for example, Simpson et al. (1958) EMBO J 4:2723-2729 and Timko et al. (1988) Nature 318:57-58.

[0058] Root-preferred promoters are known and can be selected from the many available from the literature or isolated de novo from various compatible species. See, for example, Hire et al. (1992) Plant Mol. Biol. 20(2):207-218 (soybean root-specific glutamine synthetase gene); Keller and Baumgartner (1991) Plant Cell 3(10):1051-1061 (root-specific control element in the GRP 1.8 gene of French bean); Sanger et al. (1990) Plant Mol. Biol. 14(3):433-443 (root-specific promoter of the mannopine synthase (MAS) gene of Agrobacterium tumefaciens); and Miao et al. (1991) Plant Cell 3(1):11-22 (full-length cDNA clone encoding cytosolic glutamine synthetase (GS), which is expressed in roots and root nodules of soybean). See also Bogusz et al. (1990) Plant Cell 2(7):633-641, where two root-specific promoters isolated from hemoglobin genes from the nitrogen-fixing nonlegume Parasponia andersonii and the related non-nitrogen-fixing nonlegume Trema tomentosa are described. The promoters of these genes were linked to a β-glucuronidase reporter gene and introduced into both the nonlegume Nicotiana tabacum and the legume Lotus corniculatus, and in both instances root-specific promoter activity was preserved. Leach and Aoyagi (1991) describe their analysis of the promoters of the highly expressed roIC and rolD root-inducing genes of Agrobacterium rhizogenes (see Plant Science (Limerick) 79(1):69-76). They concluded that enhancer and tissue-preferred DNA determinants are dissociated in those promoters. Teeri et al. (1989) used gene fusion to lacZ to show that the Agrobacterium T-DNA gene encoding octopine synthase is especially active in the epidermis of the root tip and that the TR2′ gene is root specific in the intact plant and stimulated by wounding in leaf tissue, an especially desirable combination of characteristics for use with an insecticidal or larvicidal gene (see EMBO J. 8(2):343-350). The TR1′ gene, fused to nptII (neomycin phosphotransferase II) showed similar characteristics. Additional root-preferred promoters include the VfENOD-GRP3 gene promoter (Kuster et al. (1995) Plant Mol. Biol. 29(4):759-772); and rolB promoter (Capana et al. (1994) Plant Mol. Biol. 25(4):681-691. See also U.S. Pat. Nos. 5,837,876; 5,750,386; 5,633,363; 5,459,252; 5,401,836; 5,110,732; and 5,023,179. The phaseolin gene (Murai et al. (1983) Science 23:476-482 and Sengopta-Gopalen et al. (1988) PNAS 82:3320-3324.

[0059] The term “recombinant DNA construct” or “recombinant expression construct” is used interchangeably and refers to a discrete polynucleotide into which a nucleic acid sequence or fragment can be moved. Preferably, it is a plasmid vector or a fragment thereof comprising the promoters of the present invention. The choice of plasmid vector is dependent upon the method that will be used to transform host plants. The skilled artisan is well aware of the genetic elements that must be present on the plasmid vector in order to successfully transform, select and propagate host cells containing the chimeric gene. The skilled artisan will also recognize that different independent transformation events will result in different levels and patterns of expression (Jones et al., EMBO J. 4:2411-2418 (1985); De Almeida et al., Mol. Gen. Genetics 218:78-86 (1989)), and thus that multiple events must be screened in order to obtain lines displaying the desired expression level and pattern. Such screening may be accomplished by PCR and Southern analysis of DNA, RT-PCR and Northern analysis of mRNA expression, Western analysis of protein expression, or phenotypic analysis. This recombinant DNA construct may comprise any combination of deoxyribonucleotides, ribonucleotides, and/or modified nucleotides. The construct may be transcribed to form an RNA, wherein the RNA may be capable of forming a double-stranded RNA and/or hairpin structure. This construct may be expressed in the cell, or isolated or synthetically produced. The construct may further comprise a promoter, or other sequences which facilitate manipulation or expression of the construct.

[0060] RNA interference (RNAi) refers to the process of sequence-specific post-transcriptional gene silencing in animals mediated by short interfering RNAs (siRNAs) (Fire et al., Nature 391:806 1998). The corresponding process in plants is commonly referred to as post-transcriptional gene silencing (PTGS) or RNA silencing and is also referred to as quelling in fungi. The process of post-transcriptional gene silencing is thought to be an evolutionarily-conserved cellular defense mechanism used to prevent the expression of foreign genes and is commonly shared by diverse flora and phyla (Fire et al., Trends Genet. 15:358 1999). Such protection from foreign gene expression may have evolved in response to the production of double-stranded RNAs (dsRNAs) derived from viral infection or from the random integration of transposon elements into a host genome via a cellular response that specifically destroys homologous single-stranded RNA of viral genomic RNA. The presence of dsRNA in cells triggers the RNAi response through a mechanism that has yet to be fully characterized.

[0061] The presence of long dsRNAs in cells stimulates the activity of a ribonuclease III enzyme referred to as “dicer”. Dicer is involved in the processing of the dsRNA into short pieces of dsRNA known as short interfering RNAs (siRNAs) (Berstein et al., Nature 409:363 2001) and/or pre miRNAs into miRNAs. Short interfering RNAs derived from dicer activity are typically about 21 to about 23 nucleotides in length and comprise about 19 base pair duplexes (Elbashir et al., Genes Dev. 15:188 2001). Dicer has also been implicated in the excision of 21- and 22-nucleotide small temporal RNAs (stRNAs) from precursor RNA of conserved structure that are implicated in translational control (Hutvagner et al., 2001, Science 293:834). The RNAi response also features an endonuclease complex, commonly referred to as an RNA-induced silencing complex (RISC), which mediates cleavage of single-stranded RNA having sequence complementarity to the antisense strand of the sRNA duplex. Cleavage of the target RNA takes place in the middle of the region complementary to the antisense strand of the sRNA duplex (Elbashir et al., Genes Dev. 15:188 2001). In addition, RNA interference can also involve small RNA (e.g., microRNA, or miRNA) mediated gene silencing, presumably through cellular mechanisms that regulate chromatin structure and thereby prevent transcription of target gene sequences (see, e.g., Allshire, Science 297:1818-1819 2002; Volpe et al., Science 297:1833-1837 2002; Jenuwein, Science 297:2215-2218 2002; and Hall et al., Science 297:2232-2237 2002). As such, miRNA molecules of the invention can be used to mediate gene silencing via interaction with RNA transcripts or alternately by interaction with particular gene sequences, wherein such interaction results in gene silencing either at the transcriptional or post-transcriptional level.

[0062] RNAi has been studied in a variety of systems. Fire et al. (Nature 391:806 1998) were the first to observe RNAi in C. elegans. Wianny and Goetz (Nature Cell Biol. 2:70 1999) describe RNAi mediated by dsRNA in mouse embryos. Hammond et al. (Nature 404:293 2000) describe RNAi in Drosophila cells transfected with dsRNA. Elbashir et al., (Nature 411:494 2001) describe RNAi induced by introduction of duplexes of synthetic 21-nucleotide RNAs in cultured mammalian cells including human embryonic kidney and HeLa cells.

[0063] Small RNAs play an important role in controlling gene expression. Regulation of many developmental processes, including flowering, is controlled by small RNAs. It is now possible to engineer changes in gene expression of plant genes by using transgenic constructs which produce small RNAs in the plant.

[0064] Small RNAs appear to function by base-pairing to complementary RNA or DNA target sequences. When bound to RNA, small RNAs trigger either RNA cleavage or translational inhibition of the target sequence. When bound to DNA target sequences, it is thought that small RNAs can mediate DNA methylation of the target sequence. The consequence of these events, regardless of the specific mechanism, is that gene expression is inhibited.

[0065] MicroRNAs (miRNAs) are noncoding RNAs of about 19 to about 24 nucleotides (nt) in length that have been identified in both animals and plants (Lagos-Quintana et al., Science 294:853-858 2001, Lagos-Quintana et al., Curr. Biol. 12:735-739 2002; Lau et al., Science 294:858-862 2001; Lee and Ambros, Science 294:862-864 2001; Llave et al., Plant Cell 14:1605-1619 2002; Mourelatos et al., Genes. Dev. 16:720-728 2002; Park et al., Curr. Biol. 12:1484-1495 2002; Reinhart et al., Genes. Dev. 16:1616-1626 2002). They are processed from longer precursor transcripts that range in size from approximately 70 to 200 nt, and these precursor transcripts have the ability to form stable hairpin structures. In animals, the enzyme involved in processing miRNA precursors is called Dicer, an RNAse III-like protein (Grishok et al., Cell 106:23-34 2001; Hutvagner et al., Science 293:834-838 2001; Ketting et al., Genes. Dev. 15:2654-2659 2001). Plants also have a Dicer-like enzyme, DCL1 (previously named CARPEL FACTORY/SHORT INTEGUMENTS1/ SUSPENSOR1), and recent evidence indicates that it, like Dicer, is involved in processing the hairpin precursors to generate mature miRNAs (Park et al., Curr. Biol. 12:1484-1495 2002; Reinhart et al., Genes. Dev. 16:1616-1626 2002). Furthermore, it is becoming clear from recent work that at least some miRNA hairpin precursors originate as longer polyadenylated transcripts, and several different miRNAs and associated hairpins can be present in a single transcript (Lagos-Quintana et al., Science 294:853-858 2001; Lee et al., EMBO J 21:4663-4670 2002). Recent work has also examined the selection of the miRNA strand from the dsRNA product arising from processing of the hairpin by DICER (Schwartz et al., 2003, Cell 115:199-208). It appears that the stability (i.e. G:C vs. A:U content, and/or mismatches) of the two ends of the processed dsRNA affects the strand selection, with the low stability end being easier to unwind by a helicase activity. The 5′ end strand at the low stability end is incorporated into the RISC complex, while the other strand is degraded.

[0066] In animals, there is direct evidence indicating a role for specific miRNAs in development. The lin-4 and let-7 miRNAs in C. elegans have been found to control temporal development, based on the phenotypes generated when the genes producing the lin-4 and let-7 miRNAs are mutated (Lee et al., Cell 75:843-854 1993; Reinhart et al., Nature 403-901-906 2000). In addition, both miRNAs display a temporal expression pattern consistent with their roles in developmental timing.

[0067] Other animal miRNAs display developmentally regulated patterns of expression, both temporal and tissue-specific (Lagos-Quintana et al., Science 294:853-853 2001, Lagos-Quintana et al., Curr. Biol. 12:735-739 2002; Lau et al., Science 294:858-862 2001; Lee and Ambros, Science 294:862-864 2001), leading to the hypothesis that miRNAs may, in many cases, be involved in the regulation of important developmental processes. Likewise, in plants, the differential expression patterns of many miRNAs suggests a role in development (Llave et al., Plant Cell 14:1605-1619 2002; Park et al., Curr. Biol. 12:1484-1495 2002; Reinhart et al., Genes. Dev. 16:1616-1626 2002). However, a developmental role for miRNAs has not been directly proven in plants, because to date there has been no report of a developmental phenotype associated with a specific plant miRNA.

[0068] MicroRNAs appear to regulate target genes by binding to complementary sequences located in the transcripts produced by these genes. In the case of lin-4 and let-7, the target sites are located in the 3′ UTRs of the target mRNAs (Lee et al., Cell 75:843-854 1993; Wightman et al., Cell 75:855-862 1993; Reinhart et al., Nature 403:901-906 2000; Slack et al., Mol. Cell 5:659-669 2000), and there are several mismatches between the lin-4 and let-7 miRNAs and their target sites. Binding of the lin-4 or let-7 miRNA appears to cause down-regulation of steady-state levels of the protein encoded by the target mRNA without affecting the transcript itself (Olsen and Ambros, Dev. Biol. 216:671-680 1999). On the other hand, recent evidence suggests that miRNAs can, in some cases, cause specific RNA cleavage of the target transcript within the target site, and this cleavage step appears to require 100% complementarity between the miRNA and the target transcript (Hutvagner and Zamore, Science 297:2056-2060 2002; Llave et al., Plant Cell 14:1605-1619 2002). It seems likely that miRNAs can enter at least two pathways of target gene regulation: Protein down-regulation when target complementarity is <100%, and RNA cleavage when target complementarity is 100%. MicroRNAs entering the RNA cleavage pathway are analogous to the 21-25 nt short interfering RNAs (siRNAs) generated during RNA interference (RNAi) in animals and posttranscriptional gene silencing (PTGS) in plants (Hamilton and Baulcombe 1999; Hammond et al., 2000; Zamore et al., 2000; Elbashir et al., 2001), and likely are incorporated into an RNA-induced silencing complex (RISC) that is similar or identical to that seen for RNAi.

[0069] The term “long non-coding RNAs” refers to non-protein coding transcripts longer than 200 nucleotides. The 200 nucleotide limit distinguishes long ncRNAs from small regulatory RNAs such as microRNAs (miRNAs), short interfering RNAs (siRNAs), Piwi-interacting RNAs (piRNAs) and small nucleolar RNAs (snoRNAs). “long non-coding RNAs”, “long ncRNAs” and “IncRNA” are used interchangeably herein.

[0070] As used herein “long intergenic non-coding RNAs” refer to long non-coding RNAs that are transcribed from non-coding DNA sequences between protein-coding genes. “long intergenic non-coding RNAs” and “lincRNA” are used interchangeably herein.

[0071] LnRNAS and LincRNAs have been shown to be involved in a multitude of biological processes such as, but not limited to, modulation of gene expression, modulation of the function of transcription factors, regulating basal transcription machinery, slicing of mRNA, translation repression, Epigenetic modifications, including histone and DNA methylation, histone acetylation and sumoylation, and controlling various aspects of post-transcriptional mRNA processing. Alteration of lincRNA expression will thus allow modulation of these activities and the associated phenotypes.

[0072] Long ncRNA can also act cooperatively as ligands to modulate the activities of RNA binding proteins. Furthermore, it has been shown that IncRNAs can form extended intramolecular hairpins that may be processed into siRNAs (Czech et al. 2008, Nature 453 (7196): 798-802).

[0073] Some IncRNAs have been functionally annotated in IncRNAdb (a database of literature described IncRNAs) (Amaral, P. P. et al Nucleic Acids Research 39 (Database issue): D146—D151. doi:10.1093/nar/gkq1138. PMC 3013714. PMID 21112873.). Long ncRNAs can play a role in gene-specific transcription where they can target transcriptional activators or repressors, different components of the transcription reaction including RNA polymerase (RNAP) II and even the DNA duplex to regulate gene transcription and expression (Goodrich et al. 2006, Nature Reviews Molecular Cell Biology 7 (8): 612-6.). In combination these ncRNAs may comprise a regulatory network that, including transcription factors, finely control gene expression in complex eukaryotes. Alternation of lincRNA expression will allow modulation of these gene expression patterns.

[0074] Several molecular functions have been attributed to lincRNAs. LincRNA may function as a natural miRNA target mimic, guiding recruitment of chromatin modifiers, and as molecular cargo for protein re-localization (Zhu et al. Genes 2012 3:176-190). Some lincRNAs attach to messenger RNA to block protein production. Many different lincRNAs are needed to prevent an embryonic stem cell from differentiating.

[0075] Standard recombinant DNA and molecular cloning techniques used herein are well known in the art and are described more fully in Sambrook, J. et al., In Molecular Cloning: A Laboratory Manual; 2^{nd} ed.; Cold Spring Harbor Laboratory Press: Cold Spring Harbor, New York, 1989 (hereinafter “Sambrook et al., 1989”) or Ausubel, F. M., Brent, R., Kingston, R. E., Moore, D. D., Seidman, J. G., Smith, J. A. and Struhl, K., Eds.; In Current Protocols in Molecular Biology; John Wiley and Sons: New York, 1990 (hereinafter “Ausubel et al., 1990”).

[0076] The term “suppression” or “silencing” or “inhibition” are used interchangeably to denote the down-regulation of the expression of a product of a target sequence relative to its normal expression level in a wild type organism. Suppression includes expression that is decreased by about 10%, 15%, 20%, 25%, 30%, 35%, 40%, 45%, 50%, 55%, 60%, 65%, 70%, 75%, 80%, 85%, 90%, 95%, or 100% relative to the wild type expression level.

[0077] As used herein, the terms “sequence of interest” or “target sequence” are used interchangeably. Target sequence is used to mean the nucleic acid sequence that is selected for alteration (e.g., suppression) of expression, and is not limited to polynucleotides encoding polypeptides. The target sequence includes, but is not limited to, RNA, DNA, or a polynucleotide comprising the target sequence.

[0078] General categories of sequences of interest include, for example, those genes involved in regulation or information, such as zinc fingers, transcription factors, homeotic genes, or cell cycle and cell death modulators, those involved in communication, such as kinases, and those involved in housekeeping, such as heat shock proteins.

[0079] Target sequences further include coding regions and non-coding regions such as promoters, enhancers, terminators, introns and the like, which may be modified in order to alter the expression of a gene of interest. For example, an intron sequence can be added to the 5′ region to increase the amount of mature message that accumulates (see for example Buchman and Berg, Mol. Cell Biol. 8:4395-4405 (1988); and Callis et al., Genes Dev. 1:1183-1200 (1987)).

[0080] The target sequence may be an endogenous sequence, or may be an introduced heterologous sequence, or transgene. For example, the methods may be used to alter the regulation or expression of a transgene, or to remove a transgene or other introduced sequence such as an introduced site-specific recombination site. The target sequence may also be a sequence from a pathogen, for example, the target sequence may be from a plant pathogen such as a virus, a mold or fungus, an insect, or a nematode. A lincRNA could be expressed in a plant which, upon infection or infestation, would target the pathogen and confer some degree of resistance to the plant.

[0081] In plants, other categories of target sequences include genes affecting agronomic traits, insect resistance, disease resistance, herbicide resistance, sterility, grain characteristics, and commercial products. Genes of interest also included those involved in oil, starch, carbohydrate, or nutrient metabolism as well as those affecting, for example, kernel size, sucrose loading, and the like. The quality of grain is reflected in traits such as levels and types of oils, saturated and unsaturated, quality and quantity of essential amino acids, and levels of cellulose.

[0082] For example, genes of the phytic acid biosynthetic pathway could be suppressed to generate a high available phosphorous phenotype. See, for example, phytic acid biosynthetic enzymes including inositol polyphosphate kinase-2 polynucleotides, disclosed in WO 02/059324, inositol 1,3,4-trisphosphate 5/6-kinase polynucleotides, disclosed in WO 03/027243, and myo-inositol 1-phosphate synthase and other phytate biosynthetic polynucleotides, disclosed in WO 99/05298, all of which are herein incorporated by reference. Genes in the lignification pathway could be suppressed to enhance digestibility or energy availability. Genes affecting cell cycle or cell death could be suppressed to affect growth or stress response. Genes affecting DNA repair and/or recombination could be suppressed to increase genetic variability. Genes affecting flowering time could be suppressed, as well as genes affecting fertility. Any target sequence could be suppressed in order to evaluate or confirm its role in a particular trait or phenotype, or to dissect a molecular, regulatory, biochemical, or proteomic pathway or network.

[0083] Other commercially desirable traits are genes and proteins conferring cold, heat, salt, and drought resistance.

[0084] Disease and/or insect resistance genes may encode resistance to pests that have great yield drag such as for example, anthracnose, soybean mosaic virus, soybean cyst nematode, root-knot nematode, brown leaf spot, Downy mildew, purple seed stain, seed decay and seedling diseases caused commonly by the fungi—Pythium sp., Phytophthora sp., Rhizoctonia sp., Diaporthe sp. Bacterial blight caused by the bacterium Pseudomonas syringae pv. Glycinea. Genes conferring insect resistance include, for example, Bacillus thuringiensis toxic protein genes (U.S. Pat. Nos. 5,366,892; 5,747,450; 5,737,514; 5,723,756; 5,593,881; and Geiser et al (1986) Gene 48:109); lectins (Van Damme et al. (1994) Plant Mol. Biol. 24:825); and the like.

[0085] Herbicide resistance traits may include genes coding for resistance to herbicides that act to inhibit the action of acetolactate synthase (ALS), in particular the sulfonylurea-type herbicides (e.g., the acetolactate synthase ALS gene containing mutations leading to such resistance, in particular the S4 and/or HRA mutations). The ALS-gene mutants encode resistance to the herbicide chlorsulfuron. Glyphosate acetyl transferase (GAT) is an N-acetyltransferase from Bacillus licheniformis that was optimized by gene shuffling for acetylation of the broad spectrum herbicide, glyphosate, forming the basis of a novel mechanism of glyphosate tolerance in transgenic plants (Castle et al. (2004) Science 304, 1151-1154).

[0086] Antibiotic resistance genes include, for example, neomycin phosphotransferase (npt) and hygromycin phosphotransferase (hpt). Two neomycin phosphotransferase genes are used in selection of transformed organisms: the neomycin phosphotransferase I (nptI) gene and the neomycin phosphotransferase II (nptII) gene. The second one is more widely used. It was initially isolated from the transposon Tn5 that was present in the bacterium strain Escherichia coli K12. The gene codes for the aminoglycoside 3′-phosphotransferase (denoted aph(3′)-II or NPTII) enzyme, which inactivates by phosphorylation a range of aminoglycoside antibiotics such as kanamycin, neomycin, geneticin and paroromycin. NPTII is widely used as a selectable marker for plant transformation. It is also used in gene expression and regulation studies in different organisms in part because N-terminal fusions can be constructed that retain enzyme activity. NPTII protein activity can be detected by enzymatic assay. In other detection methods, the modified substrates, the phosphorylated antibiotics, are detected by thin-layer chromatography, dot-blot analysis or polyacrylamide gel electrophoresis. Plants such as maize, cotton, tobacco, Arabidopsis, flax, soybean and many others have been successfully transformed with the nptII gene.

[0087] The hygromycin phosphotransferase (denoted hpt, hph or aphIV) gene was originally derived from Escherichia coli. The gene codes for hygromycin phosphotransferase (HPT), which detoxifies the aminocyclitol antibiotic hygromycin B. A large number of plants have been transformed with the hpt gene and hygromycin B has proved very effective in the selection of a wide range of plants, including monocotyledonous. Most plants exhibit higher sensitivity to hygromycin B than to kanamycin, for instance cereals. Likewise, the hpt gene is used widely in selection of transformed mammalian cells. The sequence of the hpt gene has been modified for its use in plant transformation. Deletions and substitutions of amino acid residues close to the carboxy (C)-terminus of the enzyme have increased the level of resistance in certain plants, such as tobacco. At the same time, the hydrophilic C-terminus of the enzyme has been maintained and may be essential for the strong activity of HPT. HPT activity can be checked using an enzymatic assay. A non-destructive callus induction test can be used to verify hygromycin resistance.

[0088] Genes involved in plant growth and development have been identified in plants. One such gene, which is involved in cytokinin biosynthesis, is isopentenyl transferase (IPT). Cytokinin plays a critical role in plant growth and development by stimulating cell division and cell differentiation (Sun et al. (2003), Plant Physiol. 131: 167-176).

[0089] Calcium-dependent protein kinases (CDPK), a family of serine-threonine kinase found primarily in the plant kingdom, are likely to function as sensor molecules in calcium-mediated signaling pathways. Calcium ions are important second messengers during plant growth and development (Harper et al. Science 252, 951-954 (1993); Roberts et al. Curr. Opin. Cell Biol. 5, 242-246 (1993); Roberts et al. Annu. Rev. Plant Mol. Biol. 43, 375-414 (1992)).

[0090] Nematode responsive protein (NRP) is produced by soybean upon the infection of soybean cyst nematode. NRP has homology to a taste-modifying glycoprotein miraculin and the NF34 protein involved in tumor formation and hyper response induction. NRP is believed to function as a defense-inducer in response to nematode infection (Tenhaken et al. BMC Bioinformatics 6:169 (2005)).

[0091] The quality of seeds and grains is reflected in traits such as levels and types of fatty acids or oils, saturated and unsaturated, quality and quantity of essential amino acids, and levels of carbohydrates. Therefore, commercial traits can also be encoded on a gene or genes that could increase for example methionine and cysteine, two sulfur containing amino acids that are present in low amounts in soybeans. Cystathionine gamma synthase (CGS) and serine acetyl transferase (SAT) are proteins involved in the synthesis of methionine and cysteine, respectively.

[0092] Other commercial traits can encode genes to increase for example monounsaturated fatty acids, such as oleic acid, in oil seeds. Soybean oil for example contains high levels of polyunsaturated fatty acids and is more prone to oxidation than oils with higher levels of monounsaturated and saturated fatty acids. High oleic soybean seeds can be prepared by recombinant manipulation of the activity of oleoyl 12 desaturase (Fad2). High oleic soybean oil can be used in applications that require a high degree of oxidative stability, such as cooking for a long period of time at an elevated temperature.

[0093] Raffinose saccharides accumulate in significant quantities in the edible portion of many economically significant crop species, such as soybean (Glycine max L. Merrill), sugar beet (Beta vulgaris), cotton (Gossypium hirsutum L.), canola (Brassica sp.) and all of the major edible leguminous crops including beans (Phaseolus sp.), chick pea (Cicer arietinum), cowpea (Vigna unguiculata), mung bean (Vigna radiata), peas (Pisum sativum), lentil (Lens culinaris) and lupine (Lupinus sp.). Although abundant in many species, raffinose saccharides are an obstacle to the efficient utilization of some economically important crop species.

[0094] Down regulation of the expression of the enzymes involved in raffinose saccharide synthesis, such as galactinol synthase for example, would be a desirable trait.

[0095] In certain embodiments, the present invention contemplates the transformation of a recipient cell with more than one advantageous transgene. Two or more transgenes can be supplied in a single transformation event using either distinct transgene-encoding vectors, or a single vector incorporating two or more gene coding sequences. Any two or more transgenes of any description, such as those conferring herbicide, insect, disease (viral, bacterial, fungal, and nematode), or drought resistance, oil quantity and quality, or those increasing yield or nutritional quality may be employed as desired.

[0096] The term “selectively hybridizes” includes reference to hybridization, under stringent hybridization conditions, of a nucleic acid sequence to a specified nucleic acid target sequence to a detectably greater degree (e.g., at least 2-fold over background) than its hybridization to non-target nucleic acid sequences and to the substantial exclusion of non-target nucleic acids. Selectively hybridizing sequences typically have about at least 80% sequence identity, or 90% sequence identity, up to and including 100% sequence identity (i.e., fully complementary) with each other.

[0097] The skilled artisan recognizes that substantially similar nucleic acid sequences encompassed by this invention are also defined by their ability to hybridize, under moderately stringent conditions (for example, 0.5×SSC, 0.1% SDS, 60° C.) with the sequences exemplified herein, or to any portion of the nucleotide sequences reported herein and which are functionally equivalent to the lincRNA of the invention. Estimates of such homology are provided by either DNA DNA or DNA RNA hybridization under conditions of stringency as is well understood by those skilled in the art (Hames and Higgins, Eds.; In Nucleic Acid Hybridisation; IRL Press: Oxford, U.K., 1985). Stringency conditions can be adjusted to screen for moderately similar fragments, such as homologous sequences from distantly related organisms, to highly similar fragments, such as genes that duplicate functional enzymes from closely related organisms. Post-hybridization washes partially determine stringency conditions.

[0098] The term “stringent conditions” or “stringent hybridization conditions” includes reference to conditions under which a probe will selectively hybridize to its target sequence. Stringent conditions are sequence-dependent and will be different in different circumstances. By controlling the stringency of the hybridization and/or washing conditions, target sequences can be identified which are 100% complementary to the probe (homologous probing). Alternatively, stringency conditions can be adjusted to allow some mismatching in sequences so that lower degrees of similarity are detected (heterologous probing). Generally, a probe is less than about 1000 nucleotides in length, optionally less than 500 nucleotides in length.

[0099] Typically, stringent conditions will be those in which the salt concentration is less than about 1.5 M Na ion, typically about 0.01 to 1.0 M Na ion concentration (or other salts) at pH 7.0 to 8.3 and the temperature is at least about 30° C. for short probes (e.g., 10 to 50 nucleotides) and at least about 60° C. for long probes (e.g., greater than 50 nucleotides). Stringent conditions may also be achieved with the addition of destabilizing agents such as formamide. Exemplary low stringency conditions include hybridization with a buffer solution of 30 to 35% formamide, 1 M NaCl, 1% SDS (sodium dodecyl sulphate) at 37° C., and a wash in 1× to 2×SSC (20×SSC=3.0 M NaCl/0.3 M trisodium citrate) at 50 to 55° C. Exemplary moderate stringency conditions include hybridization in 40 to 45% formamide, 1 M NaCl, 1% SDS at 37° C., and a wash in 0.5× to 1×SSC at 55 to 60° C. Exemplary high stringency conditions include hybridization in 50% formamide, 1 M NaCl, 1% SDS at 37° C., and a wash in 0.1×SSC at 60 to 65° C.

[0100] Specificity is typically the function of post-hybridization washes, the critical factors being the ionic strength and temperature of the final wash solution. For DNA-DNA hybrids, the Tₘ can be approximated from the equation of Meinkoth and Wahl, Anal. Biochem., 138:267-284 (1984): Tₘ=81.5° C.+16.6 (log M)+0.41 (%GC)−0.61 (% form)−500/L; where M is the molarity of monovalent cations, %GC is the percentage of guanosine and cytosine nucleotides in the DNA, % form is the percentage of formamide in the hybridization solution, and L is the length of the hybrid in base pairs. The Tₘ is the temperature (under defined ionic strength and pH) at which 50% of a complementary target sequence hybridizes to a perfectly matched probe. Tₘ is reduced by about 1° C. for each 1% of mismatching; thus, Tₘ, hybridization and/or wash conditions can be adjusted to hybridize to sequences of the desired identity. For example, if sequences with ≧90% identity are sought, the Tₘ can be decreased 10° C. Generally, stringent conditions are selected to be about 5° C. lower than the thermal melting point (Tₘ) for the specific sequence and its complement at a defined ionic strength and pH. However, severely stringent conditions can utilize a hybridization and/or wash at 1, 2, 3, or 4° C. lower than the thermal melting point (Tₘ); moderately stringent conditions can utilize a hybridization and/or wash at 6, 7, 8, 9, or 10° C. lower than the thermal melting point (Tₘ); low stringency conditions can utilize a hybridization and/or wash at 11, 12, 13, 14, 15, or 20° C. lower than the thermal melting point (Tₘ). Using the equation, hybridization and wash compositions, and desired Tₘ, those of ordinary skill will understand that variations in the stringency of hybridization and/or wash solutions are inherently described. If the desired degree of mismatching results in a Tₘ of less than 45° C. (aqueous solution) or 32° C. (formamide solution) it is preferred to increase the SSC concentration so that a higher temperature can be used. An extensive guide to the hybridization of nucleic acids is found in Tijssen, Laboratory Techniques in Biochemistry and Molecular Biology-Hybridization with Nucleic Acid Probes, Part I, Chapter 2 “Overview of principles of hybridization and the strategy of nucleic acid probe assays”, Elsevier, New York (1993); and Current Protocols in Molecular Biology, Chapter 2, Ausubel et al., Eds., Greene Publishing and Wiley-Interscience, New York (1995). Hybridization and/or wash conditions can be applied for at least 10, 30, 60, 90, 120, or 240 minutes.

[0101] Preferred substantially similar nucleic acid sequences encompassed by this invention are those sequences that are 80% identical to the nucleic acid fragments reported herein or which are 80% identical to any portion of the nucleotide sequences reported herein. More preferred are nucleic acid fragments which are 90% identical to the nucleic acid sequences reported herein, or which are 90% identical to any portion of the nucleotide sequences reported herein. Most preferred are nucleic acid fragments which are 95% identical to the nucleic acid sequences reported herein, or which are 95% identical to any portion of the nucleotide sequences reported herein. It is well understood by one skilled in the art that many levels of sequence identity are useful in identifying related polynucleotide sequences. Useful examples of percent identities are those listed above, or also preferred is any integer percentage from 80% to 100%, such as 80%, 81%, 82%, 83%, 84%, 85%, 86%, 87%, 88%, 89%, 90%, 91%, 92%, 93%, 94%, 95%, 96%, 97%, 98%, 99% and 100%.

[0102] A “substantially homologous sequence” refers to variants of the disclosed sequences such as those that result from site-directed mutagenesis, as well as synthetically derived sequences. A substantially homologous sequence of the present invention also refers to those fragments of a particular promoter nucleotide sequence disclosed herein that operate to promote the constitutive expression of an operably linked heterologous nucleic acid fragment. These promoter fragments will comprise at least about 20 contiguous nucleotides, preferably at least about 50 contiguous nucleotides, more preferably at least about 75 contiguous nucleotides, even more preferably at least about 100 contiguous nucleotides of the particular promoter nucleotide sequence disclosed herein. The nucleotides of such fragments will usually comprise the TATA recognition sequence of the particular promoter sequence. Such fragments may be obtained by use of restriction enzymes to cleave the naturally occurring promoter nucleotide sequences disclosed herein; by synthesizing a nucleotide sequence from the naturally occurring promoter DNA sequence; or may be obtained through the use of PCR technology. See particularly, Mullis et al., Methods Enzymol. 155:335-350 (1987), and Higuchi, R. In PCR Technology: Principles and Applications for DNA Amplifications; Erlich, H. A., Ed.; Stockton Press Inc.: New York, 1989. Again, variants of these promoter fragments, such as those resulting from site-directed mutagenesis, are encompassed by the compositions of the present invention.

[0103] “Codon degeneracy” refers to divergence in the genetic code permitting variation of the nucleotide sequence without affecting the amino acid sequence of an encoded polypeptide. Accordingly, the instant invention relates to any nucleic acid fragment comprising a nucleotide sequence that encodes all or a substantial portion of the amino acid sequences set forth herein. The skilled artisan is well aware of the “codon-bias” exhibited by a specific host cell in usage of nucleotide codons to specify a given amino acid. Therefore, when synthesizing a nucleic acid fragment for improved expression in a host cell, it is desirable to design the nucleic acid fragment such that its frequency of codon usage approaches the frequency of preferred codon usage of the host cell.

[0104] Sequence alignments and percent identity calculations may be determined using a variety of comparison methods designed to detect homologous sequences including, but not limited to, the Megalign® program of the LASERGENE® bioinformatics computing suite (DNASTAR® Inc., Madison, Wis.). Unless stated otherwise, multiple alignment of the sequences provided herein were performed using the Clustal V method of alignment (Higgins and Sharp (1989) CABIOS. 5:151 153) with the default parameters (GAP PENALTY=10, GAP LENGTH PENALTY=10). Default parameters for pairwise alignments and calculation of percent identity of protein sequences using the Clustal V method are KTUPLE=1, GAP PENALTY=3, WINDOW=5 and DIAGONALS SAVED=5. For nucleic acids these parameters are KTUPLE=2, GAP PENALTY=5, WINDOW=4 and DIAGONALS SAVED=4. After alignment of the sequences, using the Clustal V program, it is possible to obtain “percent identity” and “divergence” values by viewing the “sequence distances” table on the same program; unless stated otherwise, percent identities and divergences provided and claimed herein were calculated in this manner.

[0105] Alternatively, the Clustal W method of alignment may be used. The Clustal W method of alignment (described by Higgins and Sharp, CABIOS. 5:151-153 (1989); Higgins, D. G. et al., Comput. Appl. Biosci. 8:189-191 (1992)) can be found in the MegAlign™ v6.1 program of the LASERGENE® bioinformatics computing suite (DNASTAR® Inc., Madison, Wis.). Default parameters for multiple alignment correspond to GAP PENALTY=10, GAP LENGTH PENALTY=0.2, Delay Divergent Sequences=30%, DNA Transition Weight=0.5, Protein Weight Matrix=Gonnet Series, DNA Weight Matrix=IUB. For pairwise alignments the default parameters are Alignment=Slow-Accurate, Gap Penalty=10.0, Gap Length=0.10, Protein Weight Matrix=Gonnet 250 and DNA Weight Matrix=IUB. After alignment of the sequences using the Clustal W program, it is possible to obtain “percent identity” and “divergence” values by viewing the “sequence distances” table in the same program. In one embodiment the % sequence identity is determined over the entire length of the molecule (nucleotide or amino acid).

A “substantial portion” of an amino acid or nucleotide sequence comprises enough of the amino acid sequence of a polypeptide or the nucleotide sequence of a gene to afford putative identification of that polypeptide or gene, either by manual evaluation of the sequence by one skilled in the art, or by computer-automated sequence comparison and identification using algorithms such as BLAST (Altschul, S. F. et al., J. Mol. Biol. 215:403 410 (1993)) and Gapped Blast (Altschul, S. F. et al., Nucleic Acids Res. 25:3389 3402 (1997)). BLASTN refers to a BLAST program that compares a nucleotide query sequence against a nucleotide sequence database.

[0106] “Transgenic” refers to any cell, cell line, callus, tissue, plant part or plant, the genome of which has been altered by the presence of a heterologous nucleic acid, such as a recombinant DNA construct, including those initial transgenic events as well as those created by sexual crosses or asexual propagation from the initial transgenic event. The heterologous polynucleotide may be integrated into the genome alone or as part of a recombinant DNA construct. The term “transgenic” as used herein does not encompass the alteration of the genome (chromosomal or extra-chromosomal) by conventional plant breeding methods or by naturally occurring events such as random cross-fertilization, non-recombinant viral infection, non-recombinant bacterial transformation, non-recombinant transposition, or spontaneous mutation.

[0107] “Transgenic plant” includes reference to a plant which comprises within its genome a heterologous polynucleotide. For example, the heterologous polynucleotide is stably integrated within the genome such that the polynucleotide is passed on to successive generations. The heterologous polynucleotide may be integrated into the genome alone or as part of a recombinant DNA construct.

[0108] “Transient expression” refers to the temporary expression of a gene of interest. These include but are not limited to reporter genes such as β-glucuronidase (GUS), fluorescent protein genes ZS-GREEN1, ZS-YELLOW1 N1, AM-CYAN1, DS-RED in certain cell types of the host organism in which the transgenic gene is introduced temporally by a transformation method.

[0109] Units, prefixes, and symbols may be denoted in their SI accepted form. Unless otherwise indicated, nucleic acids are written left to right in 5′ to 3′ orientation; amino acid sequences are written left to right in amino to carboxyl orientation, respectively. Numeric ranges recited within the specification are inclusive of the numbers defining the range and include each integer within the defined range. Amino acids may be referred to herein by either commonly known three letter symbols or by the one-letter symbols recommended by the IUPAC-IUB Biochemical Nomenclature Commission. Nucleotides, likewise, may be referred to by their commonly accepted single-letter codes. Unless otherwise provided for, software, electrical, and electronics terms as used herein are as defined in The New IEEE Standard Dictionary of Electrical and Electronics Terms (5^{th} edition, 1993). The terms defined below are more fully defined by reference to the specification as a whole.

[0110] The present invention concerns methods and compositions useful in altering gene expression in plants by up or down-regulating lincRNAs to obtain useful phenotypes. Up regulation of a lincRNA, or expressing a lincRNA in a tissue where it is not normally expressed, will enhance the normal effect of that lincRNA. Down-regulationlinc RNAs, through the methods described above, will decrease the normal effect of that lincRNA. Since lincRNAs are involved in multiple plant biochemical or signal transduction pathways, and since individual lincRNAs may impact expression of multiple genes, up or down regulation of lincRNAs will provide a powerful method to alter gene regulation to obtain useful phenotypes such as those described herein.

[0111] In one embodiment, the present invention relates, inter alia, to an isolated polynucleotide comprising an lincRNA selected from the group consisting of SEQ ID NOs:1-203,370.

[0112] In another embodiment, the invention relates to a full-length complement of the lincRNA of selected from the group consisting of SEQ ID NOs:1-203,370 or a nucleotide sequence capable of hybridizing to these a fore mention lincRNA

[0113] Computational identification of lincRNAs was accomplished from RNA sequence analysis of 15 inbred lines of Zea mays. Assembled transcripts similar to known coding RNAs and ncRNAs were removed computationally, retaining only those meeting size criteria (greater than, or equal to, 200 nt in length and incapable of encoding a polypeptide of greater than, or equal to, 100 amino acids in length.

[0114] Transformation protocols as well as protocols for introducing nucleotide sequences into plants may vary depending on the type of plant or plant cell, i.e., monocot or dicot, targeted for transformation. Suitable methods of introducing the DNA construct include microinjection (Crossway et al. (1986) Biotechniques 4:320-334; and U.S. Pat. No. 6,300,543), sexual crossing, electroporation (Riggs et al. (1986) Proc. Natl. Acad. Sci. USA 83:5602-5606), Agrobacterium-mediated transformation (Townsend et al., U.S. Pat No. 5,563,055; and U.S. Pat. No. 5,981,840), direct gene transfer (Paszkowski et al. (1984) EMBO J. 3:2717-2722), and ballistic particle acceleration (see, for example, Sanford et al., U.S. Pat. No. 4,945,050; Tomes et al., U.S. Pat. No. 5,879,918; Tomes et al., U.S. Pat. No. 5,886,244; Bidney et al., U.S. Pat. No. 5,932,782; Tomes et al. (1995) “Direct DNA Transfer into Intact Plant Cells via Microprojectile Bombardment,” in Plant Cell, Tissue, and Organ Culture: Fundamental Methods, ed. Gamborg and Phillips (Springer-Verlag, Berlin); and McCabe et al. (1988) Biotechnology 6:923-926). Also see Weissinger et al. (1988) Ann. Rev. Genet. 22:421-477; Sanford et al. (1987) Particulate Science and Technology 5:27-37 (onion); Christou et al. (1988) Plant Physiol. 87:671-674 (soybean); Finer and McMullen (1991) In Vitro Cell Dev. Biol. 27P:175-182 (soybean); Singh et al. (1998) Theor. Appl. Genet. 96:319-324 (soybean); Datta et al. (1990) Biotechnology 8:736-740 (rice); Klein et al. (1988) Proc. Natl. Acad. Sci. USA 85:4305-4309 (maize); Klein et al. (1988) Biotechnology 6:559-563 (maize); Tomes, U.S. Pat. No. 5,240,855; Buising et al., U.S. Pat. Nos. 5,322,783 and 5,324,646; Klein et al. (1988) Plant Physiol. 91:440-444 (maize); Fromm et al. (1990) Biotechnology 8:833-839 (maize); Hooykaas-Van Slogteren et al. (1984) Nature (London) 311:763-764; Bowen et al., U.S. Pat. No. 5,736,369 (cereals); Bytebier et al. (1987) Proc. Natl. Acad. Sci. USA 84:5345-5349 (Liliaceae); De Wet et al. (1985) in The Experimental Manipulation of Ovule Tissues, ed. Chapman et al. (Longman, New York), pp. 197-209 (pollen); Kaeppler et al. (1990) Plant Cell Reports 9:415-418 and Kaeppler et al. (1992) Theor. Appl. Genet. 84:560-566 (whisker-mediated transformation); D'Halluin et al. (1992) Plant Cell 4:1495-1505 (electroporation); Li et al. (1993) Plant Cell Reports 12:250-255 and Christou and Ford (1995) Annals of Botany 75:407-413 (rice); Osjoda et al. (1996) Nature Biotechnology 14:745-750 (maize via Agrobacterium tumefaciens); and U.S. Pat. No. 5,736,369 (meristem transformation), all of which are herein incorporated by reference.

[0115] The nucleotide constructs may be introduced into plants by contacting plants with a virus or viral nucleic acids. Generally, such methods involve incorporating a nucleotide construct of the invention within a viral DNA or RNA molecule. Further, it is recognized that useful promoters encompass promoters utilized for transcription by viral RNA polymerases. Methods for introducing nucleotide constructs into plants and expressing a protein encoded therein, involving viral DNA or RNA molecules, are known in the art. See, for example, U.S. Pat. Nos. 5,889,191, 5,889,190, 5,866,785, 5,589,367 and 5,316,931; herein incorporated by reference.

[0116] In some embodiments, transient expression may be desired. In those cases, standard transient transformation techniques may be used. Such methods include, but are not limited to viral transformation methods, and microinjection of DNA or RNA, as well other methods well known in the art.

[0117] The cells from the plants that have stably incorporated the nucleotide sequence may be grown into plants in accordance with conventional ways. See, for example, McCormick et al. (1986) Plant Cell Reports 5:81-84. These plants may then be grown, and either pollinated with the same transformed strain or different strains, and the resulting hybrid having constitutive expression of the desired phenotypic characteristic imparted by the nucleotide sequence of interest and/or the genetic markers contained within the target site or transfer cassette. Two or more generations may be grown to ensure that expression of the desired phenotypic characteristic is stably maintained and inherited and then seeds harvested to ensure expression of the desired phenotypic characteristic has been achieved.

[0118] Initial identification and selection of cells and/or plants comprising the recombinant DNA constructs may be facilitated by the use of marker genes. Gene targeting can be performed without selection if there is a sensitive method for identifying recombinants, for example if the targeted gene modification can be easily detected by PCR analysis, or if it results in a certain phenotype. However, in most cases, identification of gene targeting events will be facilitated by the use of markers. Useful markers include positive and negative selectable markers as well as markers that facilitate screening, such as visual markers. Selectable markers include genes carrying resistance to an antibiotic such as spectinomycin (e.g. the aada gene, Svab et al. 1990 Plant Mol. Biol. 14:197), streptomycin (e.g., aada, or SPT, Svab et al. 1990 Plant Mol. Biol. 14:197; Jones et al. 1987 Mol. Gen. Genet. 210:86), kanamycin (e.g., nptII, Fraley et al. 1983 PNAS 80:4803), hygromycin (e.g., HPT, Vanden Elzen et al. 1985 Plant Mol. Biol. 5:299), gentamycin (Hayford et al. 1988 Plant Physiol. 86:1216), phleomycin, zeocin, or bleomycin (Hille et al. 1986 Plant Mol. Biol. 7:171), or resistance to a herbicide such as phosphinothricin (bar gene), or sulfonylurea (acetolactate synthase (ALS)) (Charest et al. (1990) Plant Cell Rep. 8:643), genes that fulfill a growth requirement on an incomplete media such as HIS3, LEU2, URA3, LYS2, and TRP1 genes in yeast, and other such genes known in the art. Negative selectable markers include cytosine deaminase (codA) (Stougaard 1993 Plant J. 3:755-761), tms2 (DePicker et al. 1988 Plant Cell Rep. 7:63-66), nitrate reductase (Nussame et al. 1991 Plant J. 1:267-274), SU1 (O'Keefe et al. 1994 Plant Physiol. 105:473-482), aux-2 from the Ti plasmid of Agrobacterium, and thymidine kinase. Screenable markers include fluorescent proteins such as green fluorescent protein (GFP) (Chalfie et al., 1994 Science 263:802; U.S. Pat. No. 6,146,826; U.S. Pat. No. 5,491,084; and WO 97/41228), reporter enzymes such as -glucuronidase (GUS) (Jefferson R. A. 1987 Plant Mol. Biol. Rep. 5:387; U.S. Pat. No. 5,599,670; and U.S. Pat. No. 5,432,081), -galactosidase (lacZ), alkaline phosphatase (AP), glutathione S-transferase (GST) and luciferase (U.S. Pat. No. 5,674,713; and Ow et al. 1986 Science 234(4778):856-859), visual markers like anthocyanins such as CRC (Ludwig et al. (1990) Science 247(4841):449-450) R gene family (e.g. Lc, P, S), A, C, R-nj, body and/or eye color genes in Drosophila, coat color genes in mammalian systems, and others known in the art.

[0119] One or more markers may be used in order to select and screen for gene targeting events. One common strategy for gene disruption involves using a target modifying polynucleotide in which the target is disrupted by a promoterless selectable marker. Since the selectable marker lacks a promoter, random integration events are unlikely to lead to transcription of the gene. Gene targeting events will put the selectable marker under control of the promoter for the target gene. Gene targeting events are identified by selection for expression of the selectable marker. Another common strategy utilizes a positive-negative selection scheme. This scheme utilizes two selectable markers, one that confers resistance (R+) coupled with one that confers a sensitivity (S+), each with a promoter. When this polynucleotide is randomly inserted, the resulting phenotype is R+/S+. When a gene targeting event is generated, the two markers are uncoupled and the resulting phenotype is R+/S−. Examples of using positive-negative selection are found in Thykjaer et al. (1997) Plant Mol. Biol. 35:523-530; and WO 01/66717, which are herein incorporated by reference.

Non-limiting examples of methods and compositions disclosed herein are as follows:
[0120] 1. An isolated polynucleotide comprising:
   [0121] (a) a nucleotide sequence selected from the group consisting of SEQ ID NOs:1-203,370; or,
   [0122] (b) a full-length complement of (a); or,
   [0123] (c) a nucleotide sequence comprising a sequence having at least 95% sequence identity, based on the Clustal V method of alignment with pairwise alignment default parameters (KTUPLE=2, GAP PENALTY=5, WINDOW=4 and DIAGONALS SAVED=4), when compared to the nucleotide sequence of (a);
wherein said nucleotide sequence is a long intergenic non-coding RNA (lincRNA).
[0124] 2. The isolated polynucleotide of embodiment 1, comprising a nucleotide sequence having at least 98% sequence identity, based on the Clustal V method of alignment with pairwise alignment default parameters (KTUPLE=2, GAP PENALTY=5, WINDOW=4 and DIAGONALS SAVED=4), when compared to the nucleotide sequence of (a);
[0125] 3. A recombinant DNA construct comprising the isolated polynucleotide of Embodiment 1 operably linked to at least one regulatory sequence.
[0126] 4. A vector comprising the recombinant DNA construct of embodiment 3.
[0127] 5. A cell comprising the recombinant DNA construct of embodiment 3.
[0128] 6. The cell of embodiment 5 wherein the cell is a plant cell.
[0129] 7. A transgenic plant comprising the recombinant DNA construct of embodiment 3.
[0130] 8. The transgenic plant of embodiment 7 wherein said plant is a monocot plant.
[0131] 9. The transgenic plant of embodiment 7 wherein the plant is selected from the group consisting of maize, rice, sorghum, sunflower, millet, soybean, canola, wheat, barley, oat, beans, and nuts.
[0132] 10. A transgenic seed obtained from the plant of Embodiment 7.
[0133] 11. Progeny plants obtained from the seeds of Embodiment 10.
[0134] 12. Transformed plant tissue or a plant cell comprising in its genome the recombinant DNA construct of Embodiment 3.
[0135] 13. The transformed plant tissue or plant cell of Embodiment 12 wherein the plant is selected from the group consisting of corn, rice, sorghum, millet, soybean, canola, wheat, barley, oat, beans, and nuts.
[0136] 14. A method of expressing a lincRNA in a plant comprising:
   [0137] a) introducing the recombinant DNA construct of embodiment 3 into the plant, wherein the at least one heterologous nucleotide sequence comprises a lincRNA;
   [0138] b) growing the plant of step a); and,
   [0139] c) selecting a plant displaying expression of the lincRNA.
[0140] 15. A method of transgenically altering a marketable plant trait, comprising:
   [0141] a) introducing a recombinant DNA construct of embodiment 3 into the plant;
   [0142] b) growing a fertile, mature plant resulting from step a); and,
   [0143] c) selecting a plant expressing the at least one heterologous nucleotide sequence in at least one plant tissue based on the altered marketable trait.
[0144] 16. The method of embodiment 15 wherein the marketable trait is selected from the group consisting of: disease resistance, herbicide resistance, insect resistance carbohydrate metabolism, fatty acid metabolism, amino acid metabolism, plant development, plant growth regulation, yield improvement, drought resistance, cold resistance, heat resistance, and salt resistance.
[0145] 17. A method for altering expression of a gene of interest in a plant comprising:
   [0146] (a) transforming a plant cell with the recombinant DNA construct of Embodiment 3;
   [0147] (b) growing fertile mature plants from transformed plant cell of step (a); and
   [0148] (c) selecting plants containing the transformed plant cell wherein the expression of the gene of interest is increased or decreased.

### EXAMPLES

[0149] The following are non-limiting examples intended to illustrate the invention. Although the present invention has been described in some detail by way of illustration and example for purposes of clarity of understanding, it will be obvious that certain changes and modifications may be practiced within the scope of the appended claims.

### Example 1

### Transformation of Plants

[0150] Described in this example are methods one may use for introduction of a polynucleotide or polypeptide into a plant cell.

### A. Maize Particle-Mediated DNA Delivery

[0151] A DNA construct can be introduced into maize cells capable of growth on suitable maize culture medium. Such competent cells can be from maize suspension culture, callus culture on solid medium, freshly isolated immature embryos or meristem cells. Immature embryos of the Hi-II genotype can be used as the target cells. Ears are harvested at approximately 10 days post-pollination, and 1.2-1.5mm immature embryos are isolated from the kernels, and placed scutellum-side down on maize culture medium.

[0152] The immature embryos are bombarded from 18-72 hours after being harvested from the ear. Between 6 and 18 hours prior to bombardment, the immature embryos are placed on medium with additional osmoticum (MS basal medium, Musashige and Skoog, 1962, Physiol. Plant 15:473-497, with 0.25 M sorbitol). The embryos on the high-osmotic medium are used as the bombardment target, and are left on this medium for an additional 18 hours after bombardment.

[0153] For particle bombardment, plasmid DNA (described above) is precipitated onto 1.8 mm tungsten particles using standard CaCl2-spermidine chemistry (see, for example, Klein et al., 1987, Nature 327:70-73). Each plate is bombarded once at 600 PSI, using a DuPont Helium Gun (Lowe et al., 1995, Bio/Technol 13:677-682). For typical media formulations used for maize immature embryo isolation, callus initiation, callus proliferation and regeneration of plants, see Armstrong, C., 1994, In “The Maize Handbook”, M. Freeling and V. Walbot, eds. Springer Verlag, NY, pp 663-671.

[0154] Within 1-7 days after particle bombardment, the embryos are moved onto N6-based culture medium containing 3 mg/l of the selective agent bialaphos. Embryos, and later callus, are transferred to fresh selection plates every 2 weeks. The calli developing from the immature embryos are screened for the desired phenotype. After 6-8 weeks, transformed calli are recovered.

### B. Soybean Transformation

[0155] Soybean embryogenic suspension cultures are maintained in 35 ml liquid media SB196 or SB172 in 250 ml Erlenmeyer flasks on a rotary shaker, 150 rpm, 26C with cool white fluorescent lights on 16:8 hr day/night photoperiod at light intensity of 30-35 uE/m2s. Cultures are subcultured every two weeks by inoculating approximately 35 mg of tissue into 35 ml of fresh liquid media. Alternatively, cultures are initiated and maintained in 6-well Costar plates.

[0156] SB 172 media is prepared as follows: (per liter), 1 bottle Murashige and Skoog Medium (Duchefa #M 0240), 1 ml B5 vitamins 1000× stock, 1 ml 2,4-D stock (Gibco 11215-019), 60 g sucrose, 2 g MES, 0.667 g L-Asparagine anhydrous (GibcoBRL 11013-026), pH 5.7. SB 196 media is prepared as follows: (per liter) 10 ml MS FeEDTA, 10 ml MS Sulfate, 10 FN-Lite Halides, 10 ml FN-Lite P, B, Mo, 1 ml B5 vitamins 1000× stock, 1 ml 2,4-D, (Gibco 11215-019), 2.83 g KNO3 , 0.463 g (NH4)2SO4, 2 g MES, 1 g Asparagine Anhydrous, Powder (Gibco 11013-026), 10 g Sucrose, pH 5.8. 2,4-D stock concentration 10 mg/ml is prepared as follows: 2,4-D is solubilized in 0.1 N NaOH, filter-sterilized, and stored at −20° C. B5 vitamins 1000× stock is prepared as follows: (per 100 ml)—store aliquots at −20° C., 10 g myo-inositol, 100 mg nicotinic acid, 100 mg pyridoxine HCl, 1 g thiamin.

[0157] Soybean embryogenic suspension cultures are transformed with various plasmids by the method of particle gun bombardment (Klein et al., 1987 Nature 327:70. To prepare tissue for bombardment, approximately two flasks of suspension culture tissue that has had approximately 1 to 2 weeks to recover since its most recent subculture is placed in a sterile 60×20 mm petri dish containing 1 sterile filter paper in the bottom to help absorb moisture. Tissue (i.e. suspension clusters approximately 3-5 mm in size) is spread evenly across each petri plate. Residual liquid is removed from the tissue with a pipette, or allowed to evaporate to remove excess moisture prior to bombardment. Per experiment, 4-6 plates of tissue are bombarded. Each plate is made from two flasks.

[0158] To prepare gold particles for bombardment, 30 mg gold is washed in ethanol, centrifuged and resuspended in 0.5 ml of sterile water. For each plasmid combination (treatments) to be used for bombardment, a separate micro-centrifuge tube is prepared, starting with 50 μl of the gold particles prepared above. Into each tube, the following are also added; 5 μl of plasmid DNA (at 1 μg/μl ), 50 μl CaCl2, and 20 μl 0.1 M spermidine. This mixture is agitated on a vortex shaker for 3 minutes, and then centrifuged using a microcentrifuge set at 14,000 RPM for 10 seconds. The supernatant is decanted and the gold particles with attached, precipitated DNA are washed twice with 400 μl aliquots of ethanol (with a brief centrifugation as above between each washing). The final volume of 100% ethanol per each tube is adjusted to 40 μl and this particle/DNA suspension is kept on ice until being used for bombardment.

[0159] Immediately before applying the particle/DNA suspension, the tube is briefly dipped into a sonicator bath to disperse the particles, and then 5 L of DNA prep is pipetted onto each flying disk and allowed to dry. The flying disk is then placed into the DuPont Biolistics PDS1000/HE. Using the DuPont Biolistic PDS1000/HE instrument for particle-mediated DNA delivery into soybean suspension clusters, the following settings are used. The membrane rupture pressure is 1100 psi. The chamber is evacuated to a vacuum of 27-28 inches of mercury. The tissue is placed approximately 3.5 inches from the retaining/stopping screen (3rd shelf from the bottom). Each plate is bombarded twice, and the tissue clusters are rearranged using a sterile spatula between shots.

[0160] Following bombardment, the tissue is re-suspended in liquid culture medium, each plate being divided between 2 flasks with fresh SB196 or SB172 media and cultured as described above. Four to seven days post-bombardment, the medium is replaced with fresh medium containing a selection agent. The selection media is refreshed weekly for 4 weeks and once again at 6 weeks. Weekly replacement after 4 weeks may be necessary if cell density and media turbidity is high.

[0161] Four to eight weeks post-bombardment, green, transformed tissue may be observed growing from untransformed, necrotic embryogenic clusters. Isolated, green tissue is removed and inoculated into 6-well microtiter plates with liquid medium to generate clonally-propagated, transformed embryogenic suspension cultures.

[0162] Each embryogenic cluster is placed into one well of a Costar 6-well plate with 5 mls fresh SB196 media with selection agent. Cultures are maintained for 2-6 weeks with fresh media changes every 2 weeks. When enough tissue is available, a portion of surviving transformed clones are subcultured to a second 6-well plate as a back-up to protect against contamination.

[0163] To promote in vitro maturation, transformed embryogenic clusters are removed from liquid SB196 and placed on solid agar media, SB 166, for 2 weeks. Tissue clumps of 2-4 mm size are plated at a tissue density of 10 to 15 clusters per plate. Plates are incubated in diffuse, low light (<10 μE) at 26 +/−1° C. After two weeks, clusters are subcultured to SB 103 media for 3-4 weeks.

[0164] SB 166 is prepared as follows: (per liter), 1 pkg. MS salts (Gibco/BRL-Cat# 11117-017), 1 ml B5 vitamins 1000× stock, 60 g maltose, 750 mg MgCl2 hexahydrate, 5 g activated charcoal, pH 5.7, 2 g gelrite. SB 103 media is prepared as follows: (per liter), 1 pkg. MS salts (Gibco/BRL-Cat# 11117-017), 1 ml B5 vitamins 1000× stock, 60 g maltose, 750 mg MgCl2 hexahydrate, pH 5.7, 2 g gelrite. After 5-6 week maturation, individual embryos are desiccated by placing embryos into a 100×15 petri dish with a 1 cm2 portion of the SB103 media to create a chamber with enough humidity to promote partial desiccation, but not death.

[0165] Approximately 25 embryos are desiccated per plate. Plates are sealed with several layers of parafilm and again are placed in a lower light condition. The duration of the desiccation step is best determined empirically, and depends on size and quantity of embryos placed per plate. For example, small embryos or few embryos/plate require a shorter drying period, while large embryos or many embryos/plate require a longer drying period. It is best to check on the embryos after about 3 days, but proper desiccation will most likely take 5 to 7 days. Embryos will decrease in size during this process.

[0166] Desiccated embryos are planted in SB 71-1 or MSO medium where they are left to germinate under the same culture conditions described for the suspension cultures. When the plantlets have two fully-expanded trifoliate leaves, germinated and rooted embryos are transferred to sterile soil and watered with MS fertilizer. Plants are grown to maturity for seed collection and analysis. Healthy, fertile transgenic plants are grown in the greenhouse.

[0167] SB 71-1 is prepared as follows: 1 bottle Gamborg's B5 salts w/sucrose (Gibco/BRL-Cat#21153-036), 10 g sucrose, 750 mg MgCl2 hexahydrate, pH 5.7, 2 g gelrite. MSO media is prepared as follows: 1 pkg Murashige and Skoog salts (Gibco 11117-066), 1 ml B5 vitamins 1000× stock, 30 g sucrose, pH 5.8, 2 g Gelrite.

### Example 2

### Identification Of Long Intergenic Non-Coding RNAs (LincRNAs) In Maize

[0168] Computational identification of lincRNAs was accomplished from RNA sequence analysis of 15 inbred lines of Zea mays. Assembled transcripts similar to known coding RNAs and ncRNAs were removed by identification by BLAST analyses (ref: Altschul, Stephen F., Thomas L. Madden, Alejandro A. Schaffer, Jinghui Zhang, Zheng Zhang, Webb Miller, and David J. Lipman (1997), “Gapped BLAST and PSI-BLAST: a new generation of protein database search programs”, Nucleic Acids Res. 25:3389-3402.) with an “Expectation value” cut-off of 1 e-9 and low-complexity filtering off.

[0169] Of those sequences with little-to-no similarity to known coding RNAs and ncRNAs, BLAST was used to identify candidate transcripts mapping to intergenic regions. Intergenic regions are defined as those not specified as mapped gene components in ZmB73_refgen_v2 (MaizeSequence.org). Computational methods were then used to identify those meeting size criteria (greater than, or equal to, 200 nt in length) and coding criteria (encoding a polypeptide of less than, or equal to, 100 amino acids in length).

What is claimed:

1. An isolated polynucleotide comprising:
a. a nucleotide sequence selected from the group consisting of SEQ ID NOs:1-203,370; or,
b. a full-length complement of (a); or,
c. a nucleotide sequence comprising a sequence having at least 95% sequence identity, based on the Clustal V method of alignment with pairwise alignment default parameters (KTUPLE=2, GAP PENALTY=5, WINDOW=4 and DIAGONALS SAVED=4), when compared to the nucleotide sequence of (a);
wherein said nucleotide sequence is a long intergenic non-coding RNA (lincRNA).

2. The isolated polynucleotide of claim 1, comprising a nucleotide sequence having at least 98% sequence identity, based on the Clustal V method of alignment with pairwise alignment default parameters (KTUPLE=2, GAP PENALTY=5, WINDOW=4 and DIAGONALS SAVED=4), when compared to the nucleotide sequence of (a);

3. A recombinant DNA construct comprising the isolated polynucleotide of claim 1 operably linked to at least one regulatory sequence.

4. A vector comprising the recombinant DNA construct of claim 3.

5. A cell comprising the recombinant DNA construct of claim 3.

6. The cell of claim 5 wherein the cell is a plant cell.

7. A transgenic plant comprising the recombinant DNA construct of claim 3.

8. The transgenic plant of claim 7 wherein said plant is a monocot plant.

9. The transgenic plant of claim 7 wherein the plant is selected from the group consisting of maize, rice, sorghum, sunflower, millet, soybean, canola, wheat, barley, oat, beans, and nuts.

10. A transgenic seed obtained from the plant of claim 7.

11. Progeny plants obtained from the seeds of claim 10.

12. Transformed plant tissue or a plant cell comprising in its genome the recombinant DNA construct of claim 3.

13. The transformed plant tissue or plant cell of claim 12 wherein the plant is selected from the group consisting of corn, rice, sorghum, millet, soybean, canola, wheat, barley, oat, beans, and nuts.

14. A method of expressing a lincRNA in a plant comprising:
a) introducing the recombinant DNA construct of claim 3 into the plant, wherein the at least one heterologous nucleotide sequence comprises a lincRNA;
b) growing the plant of step a); and,
c) selecting a plant displaying expression of the lincRNA.

15. A method of transgenically altering a marketable plant trait, comprising:
a) introducing a recombinant DNA construct of claim 3 into the plant;
b) growing a fertile, mature plant resulting from step a); and,
c) selecting a plant expressing the at least one heterologous nucleotide sequence in at least one plant tissue based on the altered marketable trait.

16. The method of claim 15 wherein the marketable trait is selected from the group consisting of: disease resistance, herbicide resistance, insect resistance carbohydrate metabolism, fatty acid metabolism, amino acid metabolism, plant development, plant growth regulation, yield improvement, drought resistance, cold resistance, heat resistance, and salt resistance.

17. A method for altering expression of a gene of interest in a plant comprising:
a. transforming a plant cell with the recombinant DNA construct of claim 3;
b. growing fertile mature plants from transformed plant cell of step (a); and,
c. selecting plants containing the transformed plant cell wherein the expression of the gene of interest is increased or decreased.

The application's sequence listing, which the Patent Office published only in electronic form, follows.

SEQUENCE LISTING (203370 sequences)

SEQ ID NO: 1 - DNA, 470 bp, Zea Mays
gcgtgttcgaaccgatttgggggaatttagaaattggagctcactggtgatcaaccgaggacaatacttggtggctgggtgtgtgatgatcctacggagctctgggaggcttcaatttatagagcgcaatagcggtggcgctcaatttggccgagaactgctggcggccggagagggggaggattactggtgcagtggattcgtggcaacaatcgcggcagcgctcaccagcgatgatcagatggttatagtgagtcacggcgacgcgacggatgtgtcctgatacgtggcgtaaggccgcgagacgatgatcactggcgatctcatctaattccaccgcggcgagcttggtacggcgaccgaaattgtttactggccggggcttatccatggcggcgtgctacgagcgttatccgatcaacctgagcacaaatcaagacggcgacagcacgaatcacggcagagatcat

SEQ ID NO: 2 - DNA, 380 bp, Zea Mays
gaaggcgtgcgagggagtacggccgaggccttgcggctcttataggcgtgtacgtgggtgcatggtcgagcgtggctcggcgcgggcgcgtactagcatgggcgcacagtcgagcacgtggtgttttgcttctgctcgtgttccagcgctcataggctccaaatcttcacgtatttgggcaagatcccattttaagatatgttcccccgactgagctctatcgttttcgtgtggaagccgaggggtttttgggtctgtgcagggagttgtcatgttgccaacttgggtgtgtttggctgcttcgtcccgaggcaaatccatgctaagatcatgtcaactggccagggtttgtccccaaacttcgccagggcgttcctagg

SEQ ID NO: 3 - DNA, 759 bp, Zea Mays
cagcgaagacatctctttttctttttcttcccctcagtaggagaagttggttgagtggctcggcgaggacgcttcgggcaaacactatcagacctctgagtatccaaagctttgtgagcctctgggatgggtgctacaaccagtgtttcagcaggggctgcatcagaggaatcttcagccaacatatccagcatggcaattatctctgcatcacttggattcaaaggctcctcgaaatgaacctgcctctcgtcatcagggacttcaccaagtgaggcaaccaaagcactaacctcttcgtgggagggtcgcactctaaggcccaaaccgctatcaccagcaggaggattcgacacaaaactggtaaaagccttggaaggaggcagattccaggctgagtatgcaacaggagcaccgatgttttaaacaccttgcccctgagtaccatctcgagtcggctgaccaagtccacagcaggaattcttcttttggtaacccgggtcgaatcagcgaggcctcgatacagataagtcgggtatgctctgtcctttaagggctgaatgttcttaaaaatgaaatcggcgaccacagcttctgctgtcagacccctctctttcaacaatccaacctcaacaagtagagcccctgcctcagccacctccagatctgtgggggattcggtccagcttggagtgcgaacatctggctgtctccctgaccgtggggggagggaattcccgtggttctccacgataaacc

SEQ ID NO: 4 - DNA, 860 bp, Zea Mays
gatgtgtttggaccgcagctgttatcgaccacatttggtcgataatggcagtcgatagctgagtggttgcctctggtctgagttgtttcattagttcgaatttgaaaataatccaaaaaatcataattccatcctataaatagagaggggggcttgaattcattcacacactttcacctccgattctcaaaccctctccttcattcgcatattttcatctccgtttcgattcggttgctttaacctttgtttcatatagatctgaggtggagtcacaacaataaaacattcacatactttctcaatgagcaaactccacaacgtcctaagacccctgctagtgcggggcaagttttcttcgatggtcattctctagtccaccatcagcgtcaggaaggtacttctcgtcccgatggcataactcctcaacctctctttctttacatgtatgcccctcctccatatccatactgaccatgtgtaaaagctccctcctactattaagccaccaacgaccaatgctcctcctagcactgatgaagcctcttccaccgatgctcatcctacacaacctttcacttatttgtatcctcctccatacatgtacaagtatccatacactcctcatccatatggtgctcctcttgcgttctttcccaccaatggtgttcctcccatatatggtgttcttactccatctcatgctccctcaagcacgatagtatcaccaagaaggtagtgttgatgcccatcctgtcgactggctacaacagtatagtgttgatgcccatcatgttgaaggcatggaagaatatatcatgttggcctggctgccattgtccatgagggccttgtgtatt

SEQ ID NO: 5 - DNA, 580 bp, Zea Mays
ctcggaaattaaacaacaacatccttaactcttttccctcaaatagattctgcaagtccccctccccaatacacgttccgaatgtcgaggacagtagatcgtgttgactaccccaatctagtcgaagacgggaccgctccatacccattcgacgacgtctcccacttcgtgacatcccactgatgctctgtatcgacaccactcttcacctacgtgggtcttcggctatcgccccggcagaggtggcaagcgcttcgcgcgcatcaggtttgcggcggagactccaacgtggccaaatccaacgtagcaaagtagtctaaatcctcctcaaaatactcctcaatccacgaaaaaggactcccaaaatcatccccgtccgaggaccacgacccaggttcagaaccctcagccacatttccattaaaaggtgttgcattcgcagccatcaaaatatcagtatcaacatcatcgggggttgcttgcgcaggcccggacgtcggaacctgtgcagcaaccaaccttcaatatcgcaaaaagaaaccccaaacccaacaaccctaacgtgtcccttccacctgtg

SEQ ID NO: 6 - DNA, 534 bp, Zea Mays
cccggggtggactatgatgagatcttcaaccccgtggtgaagcatggtaccatcagaactattctggctctctcacgggcctggccagtgcatcagctcgatgtcaagaatgtcttcattcatggcactctaacagagatggtgtactgctctcagtcgatcaactttgtggacccggctcacctcgacattgtttgcaagctcaatcggtcctctacggcctcaagcaagtaccccgaacttggtactgtcgttttgccaccttcttgctttcacaatgttttgtcgaggccaagcggacacctccttgttcgtcttccgacacgacctagataatgcgtacctcctctatgtcgatggcatcgtcctcacggcctcctccgggacctcctgtggcgcatcatctcctctctctagcaggagttcgcaatgaaggacctaggtgagctgaaccacttcttggggttcaccgttgagcgcaggccccacgacctattcctcaaccagcgtcggtacactgtcgacatcctcgag

SEQ ID NO: 7 - DNA, 448 bp, Zea Mays
tggcacatccaccgcatcgccgtgactcgcattaaccctccattcatcgccagggagcttgccacggtaataggacaccaatcgcgtgcgccagtaacttcttgtttctccggccgccgcgcgtcgtcgtctaattcaccggccaccgctcgtggactctataaattgagcgcaccgtcgggtctgtagggtaatcacgcaccaagccaccaagtcttgcctccaatcgttcaccagagagctccaatcccttacttcccccaaattactcaagaactccgctcggtttgacctcgtcgtggccagcgcgcctcaggtccgctcatatcctctgccctcccgttttagcgttctggtgtgccgctaatactccccgaccaactcaattgagctaggatcccttagatcaccgggaacgcagttgactgtctgcgatgcccgctgtcac

SEQ ID NO: 8 - DNA, 564 bp, Zea Mays
gttcacacccgcgccccggctcccccgcctcaccgcgcggctctgccagtgatcatcgattcgcctcgccgcgctgtctgagagaaggaaagaggagctcaggacagcggcggctggcgcgaggtgcccggaggcagacgtgacgacgacgaagcctttgtagatctcagcaggcacggcttgcctccgcgtgggcaagctctgaggcggcgtcccttcccttctcgtcggcttccattctccaccgcgctcactccatttttcgtcgtgatcccttcctctccatgggcttccatgaaccctagagctcgcccgtccatggagtacgtgctcaccatcagcggatccccaggtcgtacctactaaaccctagctcgtctggtcctgatcccccaggttctaccctaatccgcagcagccttcgccttcggctcacctcccgctccatctcctctgtttcctcctcgcgctctgcagcggcgtctcaatccccgaggccgtcgccttcttcaaccacattgccccttctgttgccaatagctccccgatttctactactcttga

SEQ ID NO: 9 - DNA, 575 bp, Zea Mays
ggccagtgtcttgaaatggtgttgattacttaatattattagtaccggtttggagacacatggtggtactaaaggcacaacccgccgcacttcaaccgccgtagttgtggcggtcaatttgaccgccgccaagttacacgcggtgtgacggtcgaggcgccacaccaaacaggccttaaatgtcttacacgagaaagcgcgaaagttaagacgctggagccggtaccggttcaaaagcaaccggtattgatgttcttggttggaagcccggttcaatacaagtggctcagttggatctgaatgttgatggactatattgattctatcacgctaggtgatggatagttggcttgatgccatgcatggaccggagtttggtgagcgacgacgcgaggtataattgccgaagcatgttcatagcaccaggtcgtgagctcgacgattgactgccctgtctgcgcatggaaacatcgttttcgtgccgtggtccagtgctctcgctccgatcccttgagacgcgccaagccatggaacaatgaacatggcatgcaatgccgttcgtctctctatctcag

SEQ ID NO: 10 - DNA, 296 bp, Zea Mays
cagacagttgtgttcttaggatcctacctgattcggttattggtgctagtgatcggtgggcctatgtcaggaatgtggacacctggagcatggaaagattgctctctcagggtcaaggagaagaacataatgcacttactttcgttgtcggtatcaacgactaccaatggagctgtgcaaacaccatcctggctaagttgtctgtggcagtggcacctccaccatttatgggggtttactggtttattttgtggctgcaactagtggattctcagacaaccaaaagcaagaaaaca

SEQ ID NO: 11 - DNA, 383 bp, Zea Mays
tcgcgatagtgagggcctgtagtgtggtcgtgcgggtgcccgcaggatatggcaacagaaagcctatagccatgacggctgggggcttgggtgtcgatcctcgtcagagtcaaaccggcctcgctgcgccggctgtaccgatggtcatcgtttggccccttccatacctccccgacactccctgggtcaggcgtgctctatgctccctcgcttattttcagttccaacggggtgggatccgctcctggcccacttcagacttgatcagttgtctcatagaggcgtcgttggttgccggcactgtcgtagcgctctagtcaaccctcggcactattgtagaggtgtcgttggtggcaatctctagcatggcgggtcaagtggag

SEQ ID NO: 12 - DNA, 694 bp, Zea Mays
tttatcccttttattcaatgattggactggggacactattctgcgaaagaccatatatttctccaagactcatactctccccgcacggatggcgggctgattgtgtaaaagtgcaggggctctttaagaaaaggggtgcggcgaaggggtatgctcataactccaccgtacgatcacacttggatggaccagatcacatcacacgcttatgaaccagtatccacccacagccatccgatgacatctcaacggcctggatctgattgagtgaaagggtaccatgcatcaaatctgagccctagattcacgaatcaacgatccacggcgttcagacctacaatagggtgacgatctaatcctggccacccatcttgagatcgacggccacagtcccgtcttccacccccgcgacccaactgcggcggcgcgcagtccgcacggtggcgccatagtcgcggtgcccagatcacgcggcccgcaacaactgacttggatctcgacggtgctacgcgtagcgggggttagggtgagtccagggagcaagatcttaccggtcatggcgggggcagtcacggttggacgaaaactcgatgaccacacaagtgatgggaaccagatggtgtccccgacgatgcccaaacacagtggtacgcgcgcccccacgatgccaatccgatcgcggcatcgaagcccg

SEQ ID NO: 13 - DNA, 577 bp, Zea Mays
ataagagtgactaataacagtaattacagaagaatgcagggcgtggcggaaattcccataccagaggagtagcgggaaggagaggaactccagtctgggcgtcacttgttgcgccgaccagtgccttgttgcgccgaccagtacccaccaacagctcgcgatccttgttgcgcttgattcactcccagaacttacaaacacgaggaggatttggcacaaggagaggaactccagttcacctcgcgtttataagcgtgtatggaggatgggtagggggtttctcgatggtaggggatcccgttcacctcgcggcgtaaggaagggagacgccgaagattgaatggcggatttggcgcggactccatcttcggcaccgtgtatggaagggaggcggcgatggatgagattgaagagcgttcccctctcggtgccgaagattctcccccacgaatttggcgcggatttggctcggatttggcggctgcgggatgcacgctcggcctcgcgaggatggaaggagcgcctgtgggatccgcgaggatggaaggagcacggcgggtgccatcgacggcaaatg

SEQ ID NO: 14 - DNA, 970 bp, Zea Mays
atccactacacgatcaacgacctggatttaacttatccacgatcggatgatgaggtatgggagcataggagcagttagattgcaaacgtgcggtccagattaggatcccatccgaaacggtacgcagcacgcaatctcggccgcccaatctagatcaacggccacggacacaacttcaatcctcccgatagccagggatggtggagcagaggtccatgacggcgctctcgtcggtgtgacgcgattgggcgacccggagcccgattgaaggcgcaactaaatgctcaatgacctagagtatgcaatgaaccgaatgaattgggttttaccctaaacagcgacgactgagatgccgcccacggcgatctgtggcccactggggaggagggagatcttgagcaatcccggcgactccgagcgcacactgaccacggtgaagcttcgaacaccttccacgccacactgcgaagctcctagtaccgcactcgagattggagctccgatgcggacccgatttccccacggcggcccatgctcaccgacctgatggtaaactcgacgacgatttggttcggggggtaggcaggtctagttgaggggatagggacgtcgtaggggcctggctttatggctgaggcatggaggtcggttggggcagctggtgcgacagggggaagatctccgctgcgcggattctgtggtcagttgcgacggtgaggatcacgcgttctattgaaggaagatctgacaagcagacccacacccacatgtaaatgatgtgcaatccggccggagatccaacggctgacaacgcgcgccaccgagtccgacgatctcggttgagcacgcgacctagagaccggggcccacaatgtcagcggaaaggagacgactccctcgcgcgtgtgtggcaggagcatgattccaacagctgggtcccacaccgtcagtgtcacacgcgcgaaatggg

SEQ ID NO: 15 - DNA, 547 bp, Zea Mays
ctcggacaggtcgatgtcagtgagctgcgtgagattggcgagctcggcggggatgccgccctccagctcgttgtagtagagctccaggaaccgcaggttcgtgaggcgcgccagcgactccgggatgcggccggtgaggaagttgccgctgagctccaggtcggtgagcgacgtcatgttgccgaaccacgcggggacgccgccgcgcatggaggtggtggagaggatgagcacgcggacgcgccgcagcggcaggaacagcgactcggccggccgccacacgtcgaacccggggttctcgttgaggttcaccacctccaggctggtgacgttggcgacggacgtcgggaacgcgccggtgaagaggttgttggacaggtcgagcacccgcagcgcgcgcagcggggacaggtcgcggggcacggcgccagacacgccggagaagctgaggttgagcacctccagggaggtgcagttgagcacgcccagcgggaacccgccgcggacgtcgttgcacgccatccggagctcccggagcgcggggagc

SEQ ID NO: 16 - DNA, 580 bp, Zea Mays
ggactcaagggaggctagaacatcaagcaaagaagcttgaactacctgtagagggttgggcatgacgaggtgttcacggtggcgcggaaacccgatttaagggaagtttggaattcgcgagcttacagtggctaatcggaggcgagggctggtgcactagatgcgtaacaacctaacagagctcattgggacattgatttatagggtaattagcggtggcgcccaatttgaagaaatcgcgctggcggccgagaagaggggatgagtcaccgcgatgatctaccgtggtgttcactagacaaaggcgtacgactattactggttagcctccacggctcaaagcgacgtggtaaaacgacccaaggtgtggcgcgaccgaatgaacggcggtagtaacggtgatgaccgtgcggccacgtcgccgggcaagtgggcacgacgacagggcgaaacagtgccccaagttcatctcctgtgcgatatttcttaccctgtgtagttatctacactccaccgggcacgaatcgtagcgccagcgaggatcgtggcgtggagtcttcggcggcgagatacagcgaac

SEQ ID NO: 17 - DNA, 274 bp, Zea Mays
tgcaaccgatggttttgcaaaccctagcaaaatcttagggcgatcgcgcggtgggacaaaaattcgaaaaagcggaacccctggtgagtgcgacggagatgaggaggcaggtagaaagtaaaaatgtgatttggtgggccggttagatcggatacgattggatccatgcggtccatgcgatgagtatgtcggtcaggcgttgaatggttgtgttcgggctcgatcggtgcggatggactcgatcggtacggttcggatgaagcttcaccgatat

SEQ ID NO: 18 - DNA, 1234 bp, Zea Mays
cggccgaggtcttctctaagctgccgaccaaatcctcctcttctctgtgcggctaggcggggaatcccctccttcctcgccctcatccctatctcctctccgctttgtgcgctggtggttgaagggacggactccgcgcagaccctggccagctaacaacctcgacgcgatcgacggcggtgtgcgcggaatccgcgcggggccgttgaaccggactcggttgcgggcgccgtgcccgccgtcctataaatagttcgccgcaacctgttgacttacctcgctctcccttctttgccgattaccgccgcgcagaccatctcgccaacagccgccgccggtgatcctcctctgtgctcgcgcacgggtccgcgcgtgtgggtgggggcgttcgtcggggaccagtgaagctgtccgcaccttcaatttgaactgtgtggcctcggggcgacgggattgctcgccacagctccatggccgccgcggatccgcatgccccgtgggtagccagctctactgcgcgtcgaccggtaaggatccatccattgtgttagtcatcgcctcctcttgatattgcgctagttcaattattcggttggacaccatggcactggttcgtcttgcgccggtgaagttgccgccgcgggtggattcgcgcggcccctgtctggccagccgggggaggaagaaggctctggtaccgttggatctcttcttgatgggccggatctgttgccgcgttttgcttcggatagaactgataggaacccttagatcgtgatcggacggattcgaccgtgcgtgctcgtttaaaatcatccaccatccgatgcggatccggcgctcgggactcaatccgttcatattaaatcagatacgtccatcacggatcgggtggtcagaatttgataccggttcggttaaagagtgttgtaatctgagccgtccagatcagatcgggtggctgagacatgcccgtttccctttgtcgtttgcgttttctaaaagagaccctaggagaatagagtatcaacccgcagtccactgcgggtaggttctgagtctgtggaacctttgccttttaaccccgagctctctgcaaattatgcacgccatccaggactcgaaaaaaacaaataaatgaatatagaaaatgaattcctagtgtaaaaataatcctaaaacttgtttaattcatacaaaactcattttaactcctttttagtccattcaagtt

SEQ ID NO: 19 - DNA, 909 bp, Zea Mays
gaaggttttaggccctaacgaaactggctcgccttctccatctcattataagccacatgagggacaaagcggaccatcttgttaaagcccacttcatactctgtgacagacttcttctcctgcttgtaggactgcaaatcgatcttcattttctccaggaaggttactaggtagaatctcctttcaaactgcctgatgaagacatcccaagacaggactcctggtgaggaggagtgcgctgcctgcacgcctctccaccaaatttgagcctctcccttcagcagctgtgtgccaaagtgaacccaatctccatacacaatctcgaagacattcatcttattctccacgtaagttagccaatctaccgcctcgaccggagtaccactgccatcaaaagaatccaacttcatgcccatccactgcatcagagaaagaccactgactggaagaggcacctcggccccaccacaaggagcagcacccgcagggacagcacccccgggcattcctccaccaccagcaccctgagcagcacccgcaggggcaataggaatagcttgcctcagaatggccaactcctgctgcatggcctgcatcgcggctaacattgccgccggactcatcgagtccccactaggaacttgcggactaccccgagccctacgaggcggcatagctatagccacagggatgagaataataagtaaataagatgggcataacatctcttcagataatgtcaaactagctcagataataacataacatatcaatagtaaagcagaaaacccatcctacatgtgcagtgtgtcaatttattattactccacttgctaggacctacaacctattcctctgataccaactgtaacaccccactgatcccacacaatggatgttaccaaaaac

SEQ ID NO: 20 - DNA, 700 bp, Zea Mays
cagcttcccagtatctaattgtactatacactccttccataggtaagtttataaataaagcttcgttttccatacaatatgattatgctcctttttatgtgaactgcaatattggtcactctatatcagtaaagattgagtgttgcacatgtctaacaatgtgcagtgactgtaaatttgcatcccgcttatccagctgatcaacattgtgattggtttacattgcaggaatttctgtaaggtggactgttatccagagcacgtacttcatttgtacagccttatacaagtacagattcgaattgcatgatgaaatgtgtattttcaaattcatctttaagtgaactcagctaattatatgtgcactcatatacttatttgttttggattataccaataatttatgaggagttgcacccatttatttcctagtttttaatagtgctgcacacttcttctttaggtaagtttataaataaagcttcattttcatgcaatttatgattttatgagattttcccatacacttgcacgttcccatgaaagattcctctcacaaaaaaaacttaaatttcatttaatgtgtaactctctaactcctttcttacatccattgagttatattgcaggttgctagatctattacattttcagacgacgacgacactaggtaagtatatttccattaacattctattca

SEQ ID NO: 21 - DNA, 721 bp, Zea Mays
tctagtgagagtttggctatggctgctatagcaaggttgtagctagatcattagacaacaactttgctactggccgatccacaagttgccatgaaaaatcaggagaaaatcgatgccaaacttggtctgtcaggctaactgaagaacaatccgatggtacagtaaccggatagaatcccaagttcagccccctcgccaccgatgagccgcgcgcggattcgtgctatcgccaccgtgattcatgcacagatcagttggatagcgccgggggtcagtaaatatcacgccgtggaaacactccggccaccgtacccgagcagaccacgactgattcggatgagttcgccagagacagccacttcacggccttgtgccacgtgccttggcacattcaccgcatcgtcgtgactcgcattagccgttcattcattgccggggagcttgccacagtgaaagccactaagcttgcgcgctagtaaacttcttccccttcggccgccagcacatcttcgtgaaattggacgccaccgcccccagatcctataaattaccgctctcgtccactccactatgtagttgtgcaaccactgaagcaacccgtgcctcgaatcatccactagaactccccaatttgggatttcccccaaatcactcaagaacaccgagcagtttgacctcgccgtggccagcgcgtctcaggtccgctcataccctctgccct

SEQ ID NO: 22 - DNA, 664 bp, Zea Mays
gcactacctgccttgtcgcacaaaacttctatgggcacaattgcacctctgctgctcgcaccacctccaatggtggccctgcttgctccctcgtgctggttatgtcgcctcacaccgatcgagatggcttagtgccgtcgtcaagtgtcgtattacaactgcaacaaattgttcatgcgaggtcactagtgctagcatctattatatcttgaggccgccgactacttgctcgatgaggcacccaaggacgagggtgtcgaggtgactcttgaggattgaccctacgccctagtcatctcactcctcgccatcactgatatacacaccgaggacaccatgcacctccacacttacatccattgtcaccggcccttttccccctggacaacgactcaatccacaacttcatcaatgccagggtatgcgtcgcgtcggattggtgacggtggacaacaccaaaatgtgggttattgtggccaatggtgaccacactccttgcgacggtgtggaacacaacatggccatgcacatcgatcagagttcaccatcagctgcttcagcattgacctagtgggtttgacctaggttcgacctcgtcctgggtgtgacctatcgccggaccttggggcccatcctgtgagactttgaggccctcttcatgaca

SEQ ID NO: 23 - DNA, 454 bp, Zea Mays
tcgctccagacaggccccaaggaagcatgaaggctaacgaccctgtcccttgtaccagattcgaggtgtggcccgacccaccgtcaacgaggacttcgagggggttggagatgaagaccattaagacggaggtgcacaggacttgggccacggtgaggcggcccctgtgatggggtggccatgcggtcccacttgccagcctatagcgaggatgtgatatgcggtgtaacaaggtatagggtagcactgttctgtaattaccccgttgtacaatatattctcggggtgtagcaggtaaccaagggcatgaccgtactttaggctctagacccttggttatcctataaatacccatgtctgcccccccctcccgcctcggataggacacgcttgacaagacatcttagctatctagccactgttttgtcgcgtgttgttgcttccgcttattttc

SEQ ID NO: 24 - DNA, 499 bp, Zea Mays
gtggttgctaccagtgcctgtcggtcgttgagcttctactgccttctattctcctacgacccgtgtcctccgaagatgacgttgacctccctgtcaacacgcgatgatgcttcgcccctcccctttcctattgctgaggctgcctgggctcgccaggccctcctcgtggtgggggaggtggtagaggctggaatggtcggccattcccgacggaatgcttgaagtctctgcaattccgcagggtgtggcgcatatccttgtggtacgaacactgggcgtcgaggatgtcgtccagcgttcgctcgcctccgtggggtgcccatcgggcacgagagatgggtggtccggcggcgtggacctcttcatgtggcctcttctcccaacgcttattgggctgctggttcgtgtcgcgccgtggtgtgggtggtgcaggttttgctcccccgatgaggtcctaagcctatttgtcagcagtgatgtagaggttcgcttctcgaaa

SEQ ID NO: 25 - DNA, 791 bp, Zea Mays
caaaaagagcatgggccacaaatgaatcaactgaaattgtacctgtcaccacatctcctttctctctgccatccgcagcgggtagcacataagccccagaaatacccgcagaagaggaagctcccggagtgaaattaatagaagaaccccactgagccgggtgaggcagacgcggagctccaaactgagacggcataggagtagtcggtgcaggagtaggcgcagccagatactgaggaaaaccctgcatcggcacgaactgagaaatctcaggcacataaaactgctgcggaggaagtggaactaaaaactgctgctcaacacttgacatcatgttgatagtgccctgagaagaggaggaagtcaccggctcccatttgagcttcccattaggattcctcttacacaccacatccttgtggtcttgactgtagatagaacacctgccactccactggcactctgcacggcgatgcgcatcaccacaacggaaacacaccagccccagcccgggcttaggaatagcccgaaacctctgagtacttcctcccgatgtacccgagtcagaagatttgccacagtaaggatggtggtgctgatgctgagacttgcccctcttgtgggctagacctccagtgttgcccctcctcgcgtcctggccacgaggctgatcaacaccagaagacttctgcgactccatggtatactaatgctgcatctccacacccagtgtctgctccactgtagtacggaagtccaccaacggaaaggctcccaaggcatgcctgata

SEQ ID NO: 26 - DNA, 466 bp, Zea Mays
ttttgttctatcacgcttacccattcatcagcttctaaggttcttctgctttgatgaagagcgggggttgagtcttggagaattccaaatatgtagtatcatgcggtccttgaggaggagctcttcctccgtgatgttggaactgattgcccgccatttcacacaagaagcacgtattatcagcgatggcattgaccagggcagcgatagcctcagccaaagtcggtggtactggtggcgagttaggagtatcttccctaccgcgggaagtccccgcaccatcatgtgcgcgagtccgtgatggcatctgaggcaaagaaacatttggaaaaaaatataacatgccaacatacaccatcatattacattaccaaaatgtaataattatacagactccaatgtacaacttgacttcattacttattttacataagtataacatctaaactatactattctagtcttc

SEQ ID NO: 27 - DNA, 558 bp, Zea Mays
gcgggacttggaatttgcagtgggtgaccaagtcctcctcagggtatcacctactaaaggagttgttcggttcgtgtctccggaaaactcaacccgagatacattggaccgttcactatcttggcccgagtgggcagcctcgcttatcgcttgcaactgtcggattccatggcaggggtacacccaatatttcatgtctctatgttgaggaagttcttgtgggatccggaccatcagattgagatggaaccaattgctgtgcagcaggatctgactttggagtgtcgtccggcgcgtatcttggaatcctcggagcgtgttttgaggaagagatcaattaagtatgtcaaggtcttatggactaatcagtctgagcgtgaggctacgtgggaacttgaggagctgatgcggcagaaatatccggaacttttcattgtgggtaagtgttgttgattcattaatctttccttttgttgttccgatagaagcgtcagaattcgaggtcgaattctttttaaggggggtagagtgtgatacccggtttgcaaagaagagaag

SEQ ID NO: 28 - DNA, 867 bp, Zea Mays
aaatctcagtcgttgaataggatccaacggccatcgtgcaaccctaccccgctcgcaccacaccggccgcgaacagcggcggcaccagcttccctatggcggcgccatgccggcttaaccccaatccggattccgtgcccataattccacaccgagatgttctacacggcctacaggttcccgcgaattcatagggagaacccttactgacgaaagtggcgtaggatcggtgatttcccatgtggtgcggatgacggcgcaatataatctccggtgaagaattgagggtactccaagcatccccggccttgatgaagccacaggcagccaccacatgacctagcgcttctccagggatacacgtcaaggtcccggcgatggctcgccgcgagttagacagtggcggccacagagctcccttcgatgccgcgatggctcccttcccctgttcgggtttcgatgtagactacccgtcgtggtggttgtggccgaggagaggatctagcggctctaagctttataggcctggggttggagcccagccgggggaattcataacggatctccggtacgaccggcagtaacaacccgggcggcagcgagaaaatcgaggggttggttgagcgacgcgcagatcttgagcgacaattcagggctagatccgcaatccggtaagatctctagtaggcgcaaggcggggctggccaggcggtctcaccaaccgacgcctgaggaggaagccacacggtcgagcagagccctgatttcgttgcgcgcgcggttccgtgagggggacaaccctagcaagccggctccacgagtcagcgatacacatgcacgtagctgaggagagaccgacatgtgggc

SEQ ID NO: 29 - DNA, 1947 bp, Zea Mays
tttttccccgttggccattgacggacaaacgcgttctccctgaaaagcatgctgtgaggctcgatatcgctgcggctgtcgtgctcccgcagcgcacaggaaggtgagtgaggaggaagaaaccgcatgcaaggggacgggagtacgggaccggcgggcggaagacgaacgggattccaaaaaaacgacttgtcgtggcggagcggaatccacaatagcgacgagccgtcggggtctgccggcctggatgcaaaccagtctcgtcgtcacggactcccggaataaatactccctcctgcgtatagctcttccctgtcctctcatacactttctctgctcgcgcaaagctcttcctcgtgtaaagacgacgagaaatttatgtactctcgcaccacctcacaaacagacctgatcctctccgtttctttttgtttcccttttccctcttccgcgattccgtcgcccggttcaatttggacgcgcgcggcgtagggcgcccggcggaaaccgccgaattcccctcttcctcgcgcgtgctcagcgattcgaggtaacagccttttatcttcttccccttcatctccgcgatttcttgggggtcggggtctgaatccccgccgtgtgttgcgattgccggagtggggtttgccactttgagcggttgcacggccggttccggtgtaatctccgctcccctttgggcgttacatctggttcttgcctcgattttgcgttgggattacgggtacgggtgcctaccgaaggggttggggttggtgaggaaatgactcgttcgatcaggctaacgcgtctttatgcggtattgtataaatttccttctgtttcttgcgcactagaccgcactagtggagattgattgtgcgtgcatggggcctttgatgatcaagtaaagcagttgaaacagcgtccccttggtgttggaatcatgcgaaagatcatggttcgcccctccaactggcaccttccggcttccgggccttgtactgttcctcagcttaacaagtaggattgctcgaatcatgctgttcatgtgttgttcagcggcttggaattcggggggcgtgcttctgtactgttcttgactcttgtggtgttgattgtggaagcggcgtgcttgatgatgcagacgtcgttcccgtggtgttttcttgtgtcctgtccttgagcgagcttcagtggtccccgcacgtcaaattttacaggccagggattttgcgagctgttgtgacggtttcctgaattatgatgggaaaagttgcaacacgtgggagaccctgcggggagtgaggacaaggtcaaggttttgaagctgcgatttgtccatgtgtaatgctcacatttttcagatgcaactgttgcatttctgggtgtgttgtctggtaaactagctacttgctcatctcattggcatgccacttaatacacgacgtgggaggctcgaacccttttcagttatggttttgtagttctcttttgcactccatcctcagtttatctcacataaatggtagctgtcatgttaatctgattatcatgtcaattgtcaagtcattatctatttatctctgaataattgtctgacaacgagccagactaatatgagtgagtcctttcttttgctgtttgtttatttacttcatacttagttgatttagcataaatgtaacctgttataatctcattggcaagccacttaatatgcagcgtgggaggctcgaattcttttcagttatggttttgtagttctcttctgcactccgtcctcagtttatctcacataaatggtagctgtcatgttaatctgattatcatgtcaagtcattatctatttatctctgaataattgtctgacagcgagccggactaatatgagggagtcctgtttatttacttcatccttagttgatttagcataaatgtaacctg

SEQ ID NO: 30 - DNA, 508 bp, Zea Mays
aaattgaaaaaggacttgaaagatggcagatcccaggcagaatatgcaacaggagcaccaatatttgataccttgcccctgaaaatcacttccagtcggctcaccaaatccacagcaggaatcctcttgttggtaaaccgggttgagtcggcgacaccactgtataagtaagccgggtatgctctgtccttcagaggctgaatattcttaaaaacaaagtctgcaaccacagcttcagtggtcagacctttctccttcagcaaacaaatttcagtaagcagagccttggcctctgttacctccagggctgtaggagactcaatccaactcggagtgcacacatccggttgtctccctgaccgaggggggagggagttaccatggttttccacaatgaaccactctaagcgccatcctttaatactatccttaagtgggatatcgaggtactccgttttcctcccacgacgcatctccaagctcgcaccgcccataagctgatgctgcc

SEQ ID NO: 31 - DNA, 599 bp, Zea Mays
aagcaatgtgctcctgaaccaaatctctagtgccaatgtaggtgcacactatgttgaaagccatcaaacatgcttgtgcttcgttcccacccgcgatcgaaggtctccttatgcaaaagcatgaatgaatgggcgctggattacacccttcacatcctccctctcactcagatcatacttaacataaaaccattgtttcatccatgagcccgaccatttttttccaaaacatcggcacaggacacctcacatcagaccggtacacaaaactatagcatctgaagttgttatggtattgctctttcccaactgccatcgtctggttggacaattcatgaatattgcagaagcagttggcatctggctccaacccttggctcctcatagcccaaatgaaaactccaactttaatgaaagcttcgggagtaagtcgatgaaggtatatttcaaatgttttcagcatttcgaccaacatcttatgcaagggaaagcgaagcccagccttcataaaacttttgaatattatcacttcatctacctcaggaagaggaacaatattctctcctccaaccctcactacggatatatcacgaaaatat

SEQ ID NO: 32 - DNA, 859 bp, Zea Mays
tgtctcctataattactaacgtctcgctcaagcttcggaaatccaatagtttttgatagagtattgacaatctttgcccagcccggtcagggttacatcctaaaaattcttcgtctacaccaccaaatagtacggatctgggcttgtatccgccagcaagggcgaattcttttaactcagaaatgtcttcgttagacagttcttgaccacccaggtgtcgtaggtccaaatttgtgtcttccgaagctttattagtggatacttcatttatatctatctcaggagtcatatcagatataagcttgtcaatctctgacattgtggttccgatgttttcagctttagtagcctcagtgggcttggcttcagtaccttcggctccggcgatatcttcggcatcgataggcatagcagttttttccgccgaagccgggggcagggtcttttcgatggcctgcattacgttcatcattcaccgctttttcggacccctgacattccctccactagccgaagcagtctcctttctttcgaagcttcgttcgacacccttctccttcgactacaataggccagtcaaatccgatcctaggggacttagcattgcaaacgggaagggttcagtcattaccttcagtatctctgaaacatcgacagaggaggctggagaggggcccgcagtcttttctggtacatcttgtaccttcatctccgcagcagtcatcctaacaagtctttgttttttgggagacaaattctttggctccgctagagttttttgcttcttaacaaccatccgatcttctttgatggaccagatggcttgcctggccagaatactcacaaccctctttctttt

SEQ ID NO: 33 - DNA, 512 bp, Zea Mays
gggaggccctcacgatggagtataagaccaagctgagtgctctggacaagactctggaagcccagcgggcccaataggtaaaggccatggaaaggctgcagaaatggtagcaagagctcgagggaaaggccagcgacgtcgcccccgccgaggaaaaccttaaggagaaggagctgtccttggacaggcgggagatggatctcgccaggcgagagacagatctcaccttcagggaataaatgctcacccggcgagacgagttgctggccgggcacgagctcaaagcagaggaaaaggagaggaagctggaggagcagatccgccagttcgatgcggagcaggcggcaccgggtccccaggcaatggaggccaccagaaaggccctcgaagatctccaaacagaacactgcgccggggtccagtgcattgccgagtgggccggcgaggcaagcacgacactggtgccactagggatgagccccatcccagtgtcggagccaccagtgtcgatc

SEQ ID NO: 34 - DNA, 489 bp, Zea Mays
gaaagctccacccctccccccatcctgctgttgaggttgcctaggctcgccaggctctcctcggggcgggggaggtggtagtggttggaatggtcggccatgcccaatggagtgtttgaaatctctgcagttccacaaggtgtgccgcatgtccttgtgatacagacactgggagtcgaggatcttgtccagtgttcgcactccttcgtggggtgcgccgcgggctcgagcggcaggtggcccgacggtgcacctcctcacagggcctcttttcccagtgtttgtccggttgctggccggtgtggattttgcgcctccgatgaggtccaaggcccgctcatccgtggtgatgtagatgtctgcttccctgaacaattgttcggaggtggccggtgccttttgaagtatggcccggatgaaggccggatctttggatccccgatagaagtcttcaatcacagccgcttcggcgacttcaggaatgcagtt

SEQ ID NO: 35 - DNA, 450 bp, Zea Mays
acgcgagaaccaggagaagctccagcccattctctgtgccctgcagaagctacaagtcgaaggccttaccgccgcggggtcgtcgccgttatccaccgccggagggtgctcccattggcagagcgacggttgcggctttcggaaatgaagtcgggggttgatttggagggttcacggatgtcctcgacccccctctccaccgacgacctcctcagacggatagcgggcacggtagggaggctggacgctggcgtccttaaccagcctccgatgcgtcccgaccacggatatgtgtccctggtaagtgtccgacctttcttccgttttgtgcggtgcttcttacgtttttagcccttaccctcgggatttttgttcgtccccaggggttgagaaattttaaaacctcccggccaccggtcccggaggacgcgacgggccgaaccgtgcgta

SEQ ID NO: 36 - DNA, 334 bp, Zea Mays
attttttgcagccaaagcatacctgtaagaatcacaaaaggctgctgaccacccatgcaacttttaaaggtctcaaaaagccacctgaatgtgtcaattgtttcatcccgaagaagtgcttagccaaaggactcattcttcaaattattgctgcaacccacaaacatggccaatggcatatgcttgctgttagtcttgtgtgttgtgtcaaatgtgactacatccccaaaatccttgtattctgcacgctgacttgcatgacaccaaaaaatgctctgaagcacctttgtttttgggtcaaaatccacatcccagtaaaagtattcattgtgtt

SEQ ID NO: 37 - DNA, 941 bp, Zea Mays
ggtagaagatgattggccgcctaagtaagctgccgtcgataaccctcctcatctggggttcaggaaggccgtcggctatctgcgccaacactcctccgacttcactcgacgtgttcaatgcccgagcgaagtcagggtataggtttcgagtgagaagaggattctcccgccggagtctagcatcttattcagctagttcctcctctcgttcttgagcttgtcggcgatcacggcgacgggagttgcgtctttctcggtgtacccgttcatcaggagtttctcccacttctgaggctttgtcctgagatacaggtcgcactgggtcccgttctctggcttcatgatgtcactgcacattccgacgcctgtttctccatcgtcgggcatcacgctggggaggttcctccccctacagggtaggttcatcgtcgaagatgggaaatgactccaatctcccctgaatgaagaggacgtcggggtagaaaggagcatgtatggcggtgtgcttattcccattctcttttgagggtggaggtgctaggaggattgctcgctgtgttttccttccccggtatgggatattcgcttccttccttcgagtgatccgtgtccactccttagtgggcgagatggacaacggagttcttcgggcgggagaggcctcgaccggctggccttgcattcttcgggagcctttaagccctgacttgtgtggggccatgccctcttgggcagcgagcggaggcatggctcgcggactcgcttcagcttctcgtggaattcacgaggagggtctcttcttgggtggatctgctatgcggtgcagagttccttctatgtccgctacgcacgggatggttccgaagcagaacattgctcctgggctgagagtgatcttgctcttgaagatgatggccatggagctagcgttgatcaacgac

SEQ ID NO: 38 - DNA, 711 bp, Zea Mays
tcgagatcttcagctctcatgggttgaactgggttggatgcagcgggctcttggatccgtagggctctacgttggttgtgggttaccaagtaggcctctatcagcttctggacatgctcatccttggcttgcttccgggcttcaatagcaatgacttcacgactttccaaggcagttgcacgagcttgagctgtggttagatccatatggagcttacggttgtgcttttctgcatcttctgctcgggcaatcatctgacggtggtgccgagccaagaaatcatactgtgtatctagggtgagcaggtatggagtgaggtacacgactgtggggttgtcctcaagcagctgctgccttccagtgcacgcatccgggccatccaaacgggacagtctctcttaaagggcggaaagaatttgagcagtgtgtcggccacttgttcttcatagatctgacacagggccttcaatgccttgcgggcgacgacttggcaggtgtctttgaatctgtgcccagcagtagtgacactccattccacatggtgcagactggatccaatgtatacagtcacgacacacttctctgtgccatgctcgacgaattcacgaccatcatactctggctagctcctgattctgaggcgaactgtgcatgctctcagcaacttggggaaaccatcttcattctggcaaaagctggtttggcagcgaa

SEQ ID NO: 39 - DNA, 644 bp, Zea Mays
gtgggcagcaaatttctgttctatcgtcatctcccaatcaagatatccctcagcatcataatgacccgaaaaagatggtaattgttattaccttgctggcggtgttggtgtggcataccttctatgttttgatgaaggcggcgacgtaggcgcaaatctctggtggccgcttaatcataattaccttcttcatcaaacaccgcatcatcgggaagtcgtggacgaggaggtggtggtggtggtgcttgttgttgcgtctccaacacagcaagtctgtcgacgatctgggacaatcgtcgatccaacctctcgtaagtcttgccaaggttcatgtcaatgaaggcatcatgcactgacttgtggaccgtctcctccatttgctccttcaggagattgttttttgcctcaagatcttggcggctaacacattcatcgaagtctgtagggatccttgcttcttcttcgtcgcctaccatcaaaacacaaaaacaggaaacaaacggtgacggttatccctaataatttcactacacgctcctctcaggtataacacaggaacacactttaatgtatcttaccaagctcttacaagtgtttgacgaaatacaagcaaaggatggtacaatcggaggttggttcgtgat

SEQ ID NO: 40 - DNA, 342 bp, Zea Mays
ttgatccatcgtccatggagggaccactgccctatttataaaccaagcggagcgtccgcagtgaagctgagtcttgtattcgaaggagagatgccctggcgtctgacatgacggcgaactgtgtagtagatttgtgcctgctgacttcccgtagagagccgaggccgagaccgagggatcgtctgtacgcccgagctccagagggagaggccgcccataccgtagtggttgtaacagcgtcggggtatgggccaaaggctacttacggggtgcgtcatcgtcctggcgcgtgatgatgtcgagattccctgctacactcatcgagatcaaagcccctggttg

SEQ ID NO: 41 - DNA, 444 bp, Zea Mays
atcgtctcaccttatacaaactgttggtcacttctctgtttgtctgaatatgtttcaggttaaagagctttcggacatgatatgctaatccatcctcttgttcggattgaattgtcaacaagtaaaaaggcaagcacgatgattaatattttttacaacttttagcagtggctaaccttggattctttcaatcagatacaggcacgccgagtggggttagcatatactatacatatatttctattttgtaatgtaatatcaaaatgcattattttttacttcattctttagtatcagcggtggttctcctgtatgtaaaagccccagccataccagaagtcgttctccattattacgttgggcttatgcgattctttggcgcttgggaatatatgcagcgtgtgatttttagtattgtgagctggggagtaacaatttttatta

SEQ ID NO: 42 - DNA, 275 bp, Zea Mays
gtttggatcgggatgccggtccttcggctcctgctgctgaggaagttcccgtgcctgagcttactgacgctgaccttaatgggggtgctccacctgctgctgaccccaatgggggtgctccacctgctgttgaccccaatgggtgtgttgtctgtgttgctgatgaggacgacggggaggaagaggatgaggtccctctgactcggaagaacagtcggcagtacgtcgccagtggtgaatgtagtggagttccttctcctgctctgtctgcccac

SEQ ID NO: 43 - DNA, 551 bp, Zea Mays
cttcgatcgaggtttctaggtcggagccaccctgatcatggggtcatcctgagcagtgggctatgcgatgctttttttgtctttcaaagtgggtcttttatgctactagaatagtaggccctctctgggagccctgcagttttgtttggaagacagcactttccactaacaaaaaaatgttagtacacactttgtaatatattcttatagagctagttaacacctactgctagtatagaaccaacacaacacctaacgtttagtcatttgatgtgtactgttcttcgttgtcattctgaaccatagcagtaatggcatgcgacaaacagaaatgacagtaacataagcgtgtagtaaacaaaacaatagcaagtgagatacatgtagtgttctatttgatatgttttccagtttataagtaaataaatagacaaatatggcatatgaatctgcaaaaaacaagataacggttagagcgagtaatacttttgtacgacataggctccatttgaaaggaagtaaagaactacttatactaaatactttgatca

SEQ ID NO: 44 - DNA, 1573 bp, Zea Mays
gtccaacttagtgtagaatcgagccccatggagttcatcttgcaactcgtcaaccactgttatagtatatttatccttgatagtgtgttcattgagggctctgtaatcaatgcaaaaacgccatgtattgtcttgcttcttcactaggaggaccggggctgagaatgtggatgtactgtatcggattataccacgacgaagcatatccgcacattgagcttctaattcatccttttgcaatcgggggtaacgatatggatgaacatctacaggtgcagtgcctggtttcaggtggatcctgtggtcacaatgtctggctggcggtactgactgtggttcctcaaagacatcatcaaaggactacagcaagtgatccatcatgtgcttgggttcagtgctgatgctacatgtggttggtgtagtggtgtctgtgcggacggaccctaaacccttccacagtatgcgtagaccttcatgccagaaggtcatgcaaaggtcctagagatcccataatactggtcccaatgttctcaggaatgctgtcccaagaatgatctcaaatgtatccaagggaattgcatatgcctcaatggtgaacttctctgtgttgatgtcaatggctgcgcgacgagttactccctggcagaaaactgtgtctccatttgccaccttgacatggcgacctggtgtgggttccaaagtaaccccacactgttgtgctgccttgtagttgatgaagttatgtgttgaacccgtgtcaagtagggccagcagctcctgaccgttgaggactacctgtagctgcatggtgtcctcccttctaatcccagttattgcatgtagggaaaccactgggtcctgctcttccttgtcatcatctgtgtcacccttgatctcatcgtcagcaaagtctgtgacctccagatagaatagcctgggacagcggtggccgcgtacatagggctcgtcacaattgtaacatagcctttgtttatgttgttctgccatctcgacgggggtgaggcgcttgaacgggactggtgattgtgttggtggctgctggggtgtattcttggcggcattgtcgtcatgtgtgtgagcactggtggtcgactaaatggtttggggccctaccagtctgttgccgctgttgagcaccatcaatgacctgagagcgacgttcatatgcccttgctagtcgagaagcctgctgcagattctgtgggttcatcagctcgacatcgattttaatccgctctggcaatcccgtcgtggagagctgcacttgctggtcaggtgccaatggagaggtgtggcacaacagtgacgagaagcgctcttggtaatcatccacggttgtccggaaacaaagatgggacagtttgcctaatgggttggtgtgtagtggcggaccaaagcgctcattgcagagctctttgaattgaggccatgtcaccgttgcatagtcctattccaccatgaaataccaggtatgtgctgctcccttgaggtgataggaggcgagccacactttgtcctcctcaatcgtgcgttggcctctgaaatactgctc

SEQ ID NO: 45 - DNA, 776 bp, Zea Mays
gctgtggccacccaactgggcctccaagtcgcactaagaccgggcctctccatcaaggcagctaacagggacaacgtcgccagcagtgggatatatcccaagctccgagtcactattgccgaggagaccttcaacatcacctgctacgtcctccctctggccagcttcgacattgtcctaggagtccagtgtcttcggtcattggggcctatcctgtggaacttcaacgccttgtccatggagttctggcgtctcggacgcaaagtgcgttgggtggggctgggtgcgccgcatactcagtgtgccaacctgtcgtagccccacgagctgctacaggccctactctagtcctacgtcgacatcttcgctgcactgcgtggccttcctccacctcctcgacacgaccaccgcatcaggctgctgccagggacgccaccagtggcagtccgcccctaccgatacccctagttgttgaaagccgagattgagctctagtgcgaagacatgttgcagcaaggcatcattcgggagtgcacatctgcctactcttctccagtgctacttgtgaagaaagctgataaatcctgacatttttgcattgactatcgggcccttaataccaaaacagtgaaggacaagttccccatcccggtggtcaacgaactcttagataagttatgaggtgcctgcttcttcacaaagttggacctccgtagtggatatcaccaagtacgcatgcacccggatgatattgagaagacaacgttccgcaccca

SEQ ID NO: 46 - DNA, 408 bp, Zea Mays
ctagagttgtcctagatgttgccgctcatatggcgaaggtggtgcttgtgtaaacgggtgaggtgggatccattgagccaaagatgacatgctgaagcaactaaagttgagggttgttggttgcgaacatactctagaatgtatggagaatagtatgaggtggtgtggaggacctgcttcgactgattctgttgtgcttcgactaattctgttgtgcttcgacttgacaggttcttgttgtatgccccctgtcctctccacagaaaaggcagaatagtttccttggttgagagttgaatcttcctccaaaactcctacctcccctcccacctcttggggccagtggtttgaaggtgctttgctgggttcctgtggattggaagtgactttgttgtccctgggtgtgat

SEQ ID NO: 47 - DNA, 487 bp, Zea Mays
gttttggccactatcactctgcctgtccactttattcaactggttagatcgtgttttggtctaggcatcacattcgttggtatgctgattagtttggatagcctcaacgcttgatgtgccatgcttgtctcttttgcgtactgttagacttaaagtgcttttcagagtggtctgaatgtgcattgagattcttctcttttcttttcctccatcatgcatgttgcgttggtgagtttgtgctaaacaaccatattggtgtatttgtggatttttagcgtctatgatcggtttcgttctacgttgttcccatggattgtttcttgactacatatgtccgtgatatgccgatgttgaccagggttcctatgtgtgttgtcttgcccgttacatgctctaatgcttggccttcttttctactctttagtaatgtccgtgatgaatgaacatcattttttgcctataggattcagttattgctctacacatt

SEQ ID NO: 48 - DNA, 729 bp, Zea Mays
aacggacacaactagtagcagtgcaagacgagtggcagggcgacgatgggaacaggcactcggcacaacagtagggagtagaggccaaattgcaaatacttcatcttcctcctaacttctctgctctctggttgtgggagcaggcaccatagcgggtaaagtgggcgcgcgtcacatggcgcagagccgtagaagcagggggggtcaaaggaggagatgcaggggaagccgttgccggcggtgaggaaggctcggcggcgccgaattggctcgacagcgatggttggcaagcaacggtgcatggcttatgcgggcagtaggaatggggcatgggaagaggaatggcgagcatgcaggggctcatcacgctttatagccacgggctagcagatgagagggtgccgaaaggagaaacgacgctgcacaaatgctcggcatctattggtgatggtagctggcgagtggacaagaaactgacgtggttaatggagaggaattagtcacgagaaactgtcacgacaagtaacaggcgtgggacggctaggcaccgagtgcggtgcggcagtccactgcctgggatgcgagcaggcgggggagacaaagcaacagtggcaggcgacgagaaggtagattgcagcgacggcgctgcctagacccgttcgaatggacgaacagagaagaaggctggagcagcagtgggatccacttgccattgaaagaaaagaaaag

SEQ ID NO: 49 - DNA, 518 bp, Zea Mays
ggattttgcagtatatccagttggtggcatatctcagacacgtgtaaattaccgaggttgaccgctttaatttgtggcatgggtgagcatccggcgcgtctctagacttttgagcacgttttcttgtcccgcaaccagtcagcgcagcatgtgaatgtgatattgcattgtcgagatcggagactctgttagtgttaggtgaacgacactactgtctactagacggccattgtaccatgcatgttcttactactgtaccctgtgccgaccgaccccccatccgcgtctgtccccaggctctttctttctttcgcaaatgccggccatcggcaactcgcactcgttctccggacccgtcatcatcggcggatcatcaccgcgactcgtccacgcctttcgccgctgcagcctgcccagtggccactgtctgctggtgtcatatctatctcaaggcctcgcgggcgtcgtcgtcgtcgtcgcgcgtcctccgatcctcctcctcctttcgccagctttgc

SEQ ID NO: 50 - DNA, 973 bp, Zea Mays
gtgcaaccctctctcgaagaagttgaggttctggttgcttcacttggtgatcttcccaatgatgagaggcaagttcactttgagatgcctatgagttcgggtgatgcagagataagtgttatactggacatgttggctgaggattcttctgactcggtccctgctgaaacaatagctgttgcaactatcctagagcctgaaaaaaccgtgaatactaaaaagcctgatggtactcgcccgaaacacctccgccaggacagtcatccaactgcacctgccgaggggaaggaaaaagagacggcttcggcgagtgttgtgtttggaccaggatgctagcccttctgctcctgctgctgaagaagtatcggtggaactctttactggagctgatcccaatgggtgtggccctgctgatgctgatcccaatgggtgtgaccctgccagagttgatcccaatgggtgtggccctgctgatgctgatcccaatgggtgtgaccctaccagagttgatcccaatgggtgtgaccctgtgccatttattgtccgtattgttgacgaggacgaagaagaagaagaaggcccactaattcagaagaatagtcgacgttacagagtaagtggggggagtagcgatattccttctctagtcctgtttgctcttgttggtctgcaagaattatccatagcaaattttgatcaggctctcgaggatgttgttcctgaagatctgctgtccgagccagctgatggtgatatgatggacgtctgctctgacattccagatgtgggattagaggtatcccgggcagcgtctcgtgcctcgtcgaccttggaaggcggtcttcagagcctagaggttggtcgaagttgttcaattcccatgggggtgactgagagtccttcagccttagaggtggctattgtggagaacccagtcctcaaggatggtgctagcggttgcccagcccccgag

SEQ ID NO: 51 - DNA, 813 bp, Zea Mays
ggtttcacaattttatcatttttctactgttttctataattgttttaactctggagtaaaaagaaaaagaaaagcctatgaatagtactgggctgatttcagcccagtagcccaactcagagggagaaagcgcccgcgcgcgcccacacgatggcgggtttgcagaaaagccctcgcctttctgaacaaccagaaacagaaccgaagtgctattcacagagtcactgacgctttccagaaaacccctcggacttctaattcttcgcaggggagggtcttcgacggcgtcgcgcggaggacgaactccagtgagcacgcagaccggccgaattgctccaagaccggtgcctagactaaggccaaaccaaattcatgaccaggggagcattttccccaacataattgcgcgaatggtcaagaggtgtgctctggccacgggggtcgtgaacatggcggctagctcgtcgtgttcccgacgattgggggcatctacattcaaattgatggcttggcgagcatcactgagctatgagaagacttaaacaagggagaaaagaagatgtgctaaccgggagggggctggccgcggtgaggttgagcttcgggtggcggagaatggaattggggcgaatgagaaattccagagcttggatgaacgattacgagtgggagtgggtgcgttggcttcgcaattacctagcgcaactacctgggtgctcaatttataggaaggtaaggcggtggtcgcgaattttggggaggacgcacggcgaccggagataaggaagaaccctggcgcacgcgaattagtgt

SEQ ID NO: 52 - DNA, 459 bp, Zea Mays
tcgcacacggtggttctggtccgagaagagagctcgtggggccgatcgttgggcaagggagaatgacacgcagagatttgaacagccaaaatcgattatcatccacaagtaggattttaagcaatggatctgcacataaaagggaaccagggaggaaggtggggcatgatgcagcaatcagtaacagagatgacataaatgcagttgcagttgcttctagatcatctacaaagcccgtgaccagagcttcgttgtcgcgaagcaatctatcaaagggtggatccccaagtaggctagcacatgagacaactcgcacacgagtcccggctcctgaaaaaggatgtgtcgaagcttcaccttgtgttatgtctacttctgaggaagatgaatttagcaggctgttgaaagcaaaaatcaatgagcttggcatgtcggacaggatcgagtgtacaccaaatg

SEQ ID NO: 53 - DNA, 282 bp, Zea Mays
aacaaagaagccatcggaagagtagccaagtgggcctgtgaattgggatctcatgacatcgaatttcgacctcgcactgctatcaaaactcaagcactggttgacttcgtatcaaagtggaccgagcaacaggtaccggataacccggaaatcgcagaagtatggcaaatgcattttgacggctcgttgaagctgtagggagcaggtgtagggatcctctttattgcacctggaggcgaacaactcaagtacgctcttcaattgttattcccaacatctaac

SEQ ID NO: 54 - DNA, 727 bp, Zea Mays
tccgcccacttcgttctcggattgggtggttgacttcagtgcttcctaccacaccacccctgatgtcgttactttatccaccactcacccttggtccttcccggtccctttcgcctcagaaatgttcttgttgcccccaacaccattcagagtcttctttctgttcgtcaatttaccactgacaactcttgctctatggagtttgacccctttggcttgtctgtgaaggatcttgctaccaggacccttctcgcgcgctgtgacagctccgggctactctacacccttcgcatgcctgctgcctcatcctcgacctccaacccacatgcgctgaccgctgctacctcgtccatcacttggcatcgccgccttggccatcccgggtgtgatgtgatgttgaagttgtctagcagttctgtcatctcttgtaatcggggttcttttgatcacttgtgtcatgcctgttagttaggtagacatgtgagacttcctttttcttccttctcttctagttagtagaaggccatcccctatactcaacgtttctggaaacaaatattatctgctcattttggattactactctcattacttatcgacttttctcttgcgtttgaagtatgatatgttcccccaccctttctcacttcttcgcttgggtttccattcagtctggacgcaccgttcgggctgtccagtgtgacaacaggaaggagtttgacaactc

SEQ ID NO: 55 - DNA, 424 bp, Zea Mays
gggtgtgtgactgtggcgagggcgaagatgatgatgtagcggaagcaggtggtggagaggtaaatgcaggaaaccgcaacatgtacaagggccagagctatctcaacgggcgagaagactctaggtagcgagatccttcacgaacaagtcaaaatgatcaaagctcaatggaataggagttattagtggtaaatttatacacatattgaagattgtgaatgatatttggggcgacaaaaacattgaaagggcctagggagagctgaatcaccaacagaggtgatcgggaggatgttctctttgcccataatgatagaggaaggactagaggggagaggtggatgggaagaagagactatacgagcgttcggaatgagtaggaggcactagaatcaaccacctagtaagtgacaacaggaggttt

SEQ ID NO: 56 - DNA, 912 bp, Zea Mays
gcacagagcccgtcttcctccctgcctccgcggcgaatgacggggaaccgcgccgtggtgccaaactgtactccggcgagaacaactccgaccccggagcgcccaatcctcaatcactaccgcgtacacgcacagggggatgtattgaaccgactgggagaatactaaccggctctggtggaacggagagctctgcccgcgacagctagcggaaacagcggcggcgttgcgtcgacgttgagaaattgagggccggtccagccaccaccgcacttgattccaccggaaatctgtccgccacggtcccggggtactcccggaacaagaccgacgtttaccacggctttaacagctaggaacgacggtggcggcaccttctttctcaacgggcgcagcaatggcggcgtcggttggcgctggggaattagactcgcgcgaggaggtagccgaggagagcaacgggtcacgggcgcgctaatatacggcgcggttgaagtccgagggcggcctgcacaacagccagcaccggcgttctcgcggctgccgttgcgcgccagcgagcgaagaaagcggaagattctggttgaccgggcccgcacaacagtggcaggtggaattcgtgcacgtaatcacaaacgccgacagggatggcccacccgccagtgggacggaaaccacgcgcgctgagactggccggccagtgggtccgtcaccgcagagaaatgtccacggagcggcccgagccccgagcagcagacctgcgcggctgacaggcgggtcccacacgtcggtgccgtgctcccgagctgggccgcgcgcaggcaattgtttcatgggccggatacgtggaagggggcccaatacgccatttctctctttttattttcctttcccttttctttatttatattt

SEQ ID NO: 57 - DNA, 670 bp, Zea Mays
attggatctaacttcaacagtctggattttatttgaccgagatcggcacgaatccatccgatctcacgtcaacggctgggattcaaaacgtgaaggggtatttctatctctaatcgtggtcgttcgttgcacgatcgatggccgagggccattcttcttcctcgctccgctctcctctctccgacggcgcaccccgctgctagtgaactactccggtgatggcaaccgagctcgatactacaccataatgcaattacgcggttctacacatgcatgatgcgaaggcgattcagatggaagctcatttaccaggaattaggcgacgattgtggctgcccacgctacgcgtgacctccctgctagaagcgaacgacggtgatgaattgccgccgagctgatgatcactggaaccatcgattgctaccatggcgtgcgcaaacccgcggcgaacacctagagcgcgacaccgacgccaaagccttgcccaaacccaggatggcggaaaggccctccttcctctgacgcaagtgctggtggcgacaaaagttggtttagcggctagggttcggtcgagtgagcacttatacgcgtggacgaggccagtgcacgacgccgattccccgaaaaccccggcgagattagcacggcgcatgcgggcagcgacgactcg

SEQ ID NO: 58 - DNA, 452 bp, Zea Mays
aattgcaattttccttctcacactcatcgcgttgccacaaaatcaatggctcaataccaggtggaagaggttcctccttttctgatgaactatcagaagcaacaactggtgactgtggaagatggtgtataatattaattgcaaatgtctgtgttgaaccccacgggacaaatctcttacgagctgaaaggcgtcgagcaagctgctcattactgtcactatatccattttggcatggaggtttgaatggcttacgaactattgctgctgcatcagaaactgaaagaatacgtggaatgagtggttgcctccttacaaccaggttgcccctgacagaaaccaaaaatatatataagtgaagtcaaagacaatgatgttaatgtgaagtcagattagttgccaattgtctgtttcctgagcaaattgtgctactgacttaaaccacaaacttc

SEQ ID NO: 59 - DNA, 660 bp, Zea Mays
gccagtagggttcccctgtcaattccaccatttagtcgaagggtttgctctgggaaacgctctaacatatgccaagagtcccattttttcaagaacgtgtccgtttgcacgtgtttcattaagaggaaaaacagcgaccattacaaagtggtcaagtatattggaataacacgagtagggtatgcctaatactttgcttgcccgtggcaaggccctgtacgttcgccagactacattttgcaaactttacacgacgtcccttagaccctaggtgctcatcaatctcagaagtgttgccaagtcagtgaacccctctggtgcactacctcgtcacatatgggtgctggcaactgtctgtgaaccaaacaccttgctgttcctctctttccacatggtccaggacaccagtaggatgagtgagtcgaagtccttgcacaggtcacttggcagcagagcacaagcctgtatccaccactccgccactgatggtgcacttaattcaagcaaaccctgaaggccgataggacagcaatctaaaccagacctccgtggtgaccacacactcctgaagaagatcaagagtcccattggttgatgatgttttaaacagctctctcctagtcactatactttcctgtttgatttatgaccatatatatc

SEQ ID NO: 60 - DNA, 399 bp, Zea Mays
tcctcgtctccgcctctttcaccaagattcttccggatcgccacagaggacctaaaggacatcgagcgaaccatcctactgggcctctgacttgtgagtcgccgtcgcatcgtaggtctatttttctccacacacgtctcacctaacaactagataagcaccacgagcgcttcctcctcctccttcttgttgttgtcgtatttaatccccaactttccatctctttcctcgtctccctacctctcacccaaaatcttccatatcgagtaggccatcctggtgacctccaactcatcagacgttgcgtcgtagcatagatctatttttttatccccatagcttgccaacaactagataagataaaccctatatcccgtatgagcaaccaaccatacaacc

SEQ ID NO: 61 - DNA, 795 bp, Zea Mays
ttttaagttatggacaaaatgctactaattctgtaaagaatcttaatctaatgaacctcaaactttttagaataaactagataaaatccttgaactaacccaattggatccaccttaatcaaaggtatagaacccaagatataaaataatcattcttattgtgtcagacaattatgacaattgattaaactctaatcaaacaattaagcgagtgaaaggttaattatctaaaaattgttaattaggaaatcaaaacttgaaaaataagaaatcaacctaaaactaaaagcaaggtggtaaaacaaagagcaaagttaaggaacaagattaccaacacattgacatgagagaattgatctttattactctcatgatatattcataagatgcttcacatgggcatcctgcaataattcaccatgaattcataaaaccttagagcagttctctcttttgcctctatctaggaaaagcaacctctaactttgcctctagttctataggtcaccctttgttcttttactcttcgatgttctcgtgatgcacggaccatgagcacatggcctccttttcattacttgccaagtacaatgctcacttataagaatgttgtggttcatcttgaaaatcaaccaactacaaacaccaacttctaatacctacccatcattcgtccatggtgcccctcagcacgcatgcatgtagaaaggttctaggggaacaccacatactgttagttttaggtaacttatatatatagtccaagggtatgcgttatagatatatacaaaacta

SEQ ID NO: 62 - DNA, 422 bp, Zea Mays
aaaagagaagaactgcctcttcggccaccactgctgtgtcgaagggcaagaaaataaaggttttgacccaccggccacgatatattgaaacgaccgtagtgcctgaatttggtgaaggggcctcctccgctgccgaagcaaaacaagttgtcccactactcggagtgctgaaggatcgattgtagtgccgaaggtgcctatagtcaggccagccaaagccaaagatgatgcggccagagagccagaattggaaaaaacagtgatgatgccaaaaattctatgtcctccggtagaggcagaactgccgaaggtgacaagggctcccgccaaaactcccaagaggagaagaatggcaagcgtgctagacgctgttgtggaaacaacaagagcacttactcctgctccagtgaagaaggttgtcg

SEQ ID NO: 63 - DNA, 1044 bp, Zea Mays
ttcatacatcgtggcaacataaagtttttaccaagttacttggtctgcaatacaaagttcaataccgtcctggctctgaaaatcgggttgccgacgccctgtctcgttgtgtgcctgctgaccttcatgcgctgtccacggtggtacctcaatggttgttggatgtccaggcaagctatgctcatgacgccgaggctcagtctctcttgtcccgcctatcagttgacccggctgctgttccacacttcactctgaatgctgggttgctccggtataagaatcgcatatggcttggagcggatgaaccattgcagagcaagattgtctcagctctccactgctccgcaattggcggtcattccggcgttccagctacctacagccgtgtaaagagtctctttgcgtggacacgaatgaagcaatacgttaagacatttgtgcaacaatgtcaagtgtgcttgcaggctaagccagacagatcagcttacccaggaaagttacaaccacttgaagttccactatctgcttggcacacagtatccttggattttgtcgaaggcctccctcgttccggatccgctgattgcattttagtggtggtcgataagttcagtaagtttgctcatttcattccactgtctcacccatatactgctctgaccgtggctcaactattcctttctcaagtctatcgcctgcatggttttccagtggctgtaatttctgatcgggacccagtttttaccagccagttttggcaacatttcttcaagctagcgggtgccgagctgcgcatgagttcgtcctaccaccctcaatccgacggtcaaacggagcgagttaatcaatgcctcgagacgttcctccgctgttttgttaatgcctgcccaaagaagtggtcctcttggcttccaacagcagaattctggtataataccagtttccattcggctttggggcgttctccttttgaagtactctacggtcgcaagccccgttctctaggcatttctgttgatgacgctgcccccgcttcattgtctg

SEQ ID NO: 64 - DNA, 598 bp, Zea Mays
tcaaagatgaagtaaaccacgtgaggcaacttaatgaaaactatcgaatcctggtggcaaacttctcaccctcggcaatagatgttataatgagttggtgaagaccttgtcctctgctgggctacatcttgagagaagaatttttcggatagtgacttggaggggttaatgtggtgggtgcttagtgaaactcatgcttataaaagtgtcctctcagcacgagaggactattgcgcatggatatgcgaccaaagcaccgctttggttttgctgaaggtcgggtgtaatcatttgaagatttgcatcgaccatgatttcagagtttctgctgacagcatatgaagatcaaccattgaggcttcggagtggtctaatttttttatctgatatatggaagaaaggagacaagaagattagcattgaagaatctataaagaatagggaaaaggtttgtgctttgttaccttcgtcttacctgtgcaggcaatacacacactgtgaccttcaaattttttgcaggctcaacatgccattgagaaggctgcagatattacacggaaactgtagggcaagaaagctgaaggtactcaaccttttt

SEQ ID NO: 65 - DNA, 808 bp, Zea Mays
atctctcgatttgatagcaccaacgtccctgcacgtgccccccattcgtgcctcataggggagatgaagaatcaaatgctgcattggattgaagaagtcggggtggaaatatattctcaagcttacacagtaacacgggtgccaatctttccaagtctgcaaccatagtccgagataactcttttgcacaaagctgatggaagaaatagctcaactctgaaagcgctagccagacatgctcagggacataacctcgaaccatcacaggaagaatccgttcaatccatatgtggaagtcatgactcttcatccctaagactcgcagagtagataagttcaccccctacccaggttagctacatacccatcaaggaacatcaacatcttgatccactgaagtacttccttcctctgggccctgcttaggacaaaattggccttaggccttctccatgtctttccaccacttggcggcttcatctcttggtttggtctatcacataacgctgccagatccactcttgcctttatgttatcctttgacttatcaggaatgtccataattgttgcccaaagtgcctcggcaacattctttttagtgtgcatcgcgtcaatgttgtgtggaaggagcaggtcgtcataataggggagccgagtcaagcccgacttatgtgtccacatatgctgctcaccatatcccataaaaccaccttctgtattggccacgagcccatctatctgttgatgaattttggcaccagtgatcgttgcaggtgggcggtctgtcactacgacacctttcgtaaag

SEQ ID NO: 66 - DNA, 1426 bp, Zea Mays
aaaacatgaaatagaattaaattaaaaagagaaagaagcctatcacacattcacatgacgcatgacgcatggcccatttcactcatcgtacaacccatgcccttttgtttttttattatttatttaatgctctagccgcagcatatgccatggtgacacaagcgatgatgtcatgtagctctcccacattggagtatgacatgacgaccagggcgtcgttcaatcttggcacgtgggacccccacctgctgtatccccatgttggttacacagttacgcccgcgtaatcaccttcgttgtagcaggctagcacggagtccgcccggaattctcgccgcgacgaactcgcctgcccgctcgccaacagaatacggctagggccgggatgcctcgatccctatataaatatggatcatgccgcgaacctcctcgcatggccgcatgcagcaacaaaatagctagtaaaaaaaaatttctcctggtgccggctggccgctcggagtcaaggtctgggcggtataaatccatctccttcttctttcccccacaaccacctctctccattgtcgcgaggaagcttggtccggcctgagtctgcgccccgctcgcctgccaggaaggtgaagacgaattgctgccagtggggaggagcaccagcgcgagggcctgtgcctcattgcggaaagccggggacggagttatgcagggacggcgcacgtagacttatcagaagcagcgacggctgggcagctcttcggtaagtgactcccctccctcgcacctgctcggcgtaccatcatttgcatagcgtgcataccgttgttgaagccgattgctagctcgtcgtggcggggcgcggcgccaccattaccccggcgttgatctgagagcgatagcaaaggcggtcggtagtggggagtcgatggcgtttccgccgtcgtccgtcggtgaccgcgtatttttcctggagcgcgttggcgagtagacccgttggggaagatgatgtgctggtcgtcgatctgttaacagatgctcgtgattagacggagggtagtgcatgtggcatccgcaggatcttagatgggcggagcagatttaatcgcgcatacccttgggcgatccaatctagaccatccgactgataatgagcgtcttagattagactcaacttacctcttcgtttatttaaatctgagccatccaatctagatccaacgtccgagaaaacaggataccccttcagcgcagtcgttttgcagaggagcccttaaagaattgcagaatgaacctggcgtccaccactactgctcaccgagtattaggaacattacgtgatggcccctgtattttccagaaattaatgcccagtccagagaattagaaaatccaattagaaaatgatttttaatgtgaaaataaatgccag

SEQ ID NO: 67 - DNA, 348 bp, Zea Mays
aggaaattactctgaagccagaaaaggatgaggtggtagtctttaaaagcttctttaaagcaggattgagatttcctttgaatgagatgattgcggatgttttgtggaagtttgggatttatcttcatcagctaactcctaacaccatcgttaggcttagcgtctacatctgggctctccgaagccaaggggcaaaaccgcttgccaaaggcttctgccgggcacatgagcttcattatcaaacaaaagctagagaagatgggctgcacgagaacttcggatgctataattttgcttatcgtaaagacgcgaagactccagttatcagctatcgtaccaaatggccag

SEQ ID NO: 68 - DNA, 333 bp, Zea Mays
ctggacctccagcagcagtgccatgcaggctctgtagtccaaaaaaatgtctcgatggggaagaattccaattccagtgtgcctggcggcatgtgctcctggcaatgcgcagcactagctcctggcagcctgtgcgaactcccagagaggtggggacgtttgctcccagttctagtggtggtaccagcgcttagggataggagcccaagataaggcatcgctgtttttgtgtcagacttgagagagtggatgggccaaagctgttgggttgtagttgggctctgaaatgatgtgctattgggctaccatgtatcaggaggtcccactgtattg

SEQ ID NO: 69 - DNA, 611 bp, Zea Mays
tcaaacaaagcaagcatagaactgttcaagcaggagatgaaagggaagttcagtatgagtgacttgggattactcagttattacttgggggtacaagttaatcagcaggcaggaatgacaaagctgtgtcagagctcgtacactctgaaaattctggaacaagccggcatgaaggggtgtaatccttgtgctgtgcccatggagaatagactgaagttgagcaagaatgacaagacacctgctgttgacaaaaccaagtataggagtatcattggaagccttcggtatttggttaatacaaggccagatatagcatatgcagtgggcattgttagcaggtatatggaagagcctagagcaagtcattgggctgctgtcaaacaaatattgagatatcttgcaggcaccatacagtttgggtgtgtgtacaagagacagggctcaactgaacttgtaggttacagtgacagtgatctggccggcgatgttgacgacaggaagagcaccagtgggtgtgtgtttctgttgggatcaagcttagtgacatgggcatcacagaaacaacgggtggtggccctatcatcatgtgaggctgaatatattgcaagtgc

SEQ ID NO: 70 - DNA, 455 bp, Zea Mays
ccatcaaggaattgaagcgaatccagagaagatcgaggccatcatgagaatggaagtgccgcggtcacagaaaaaggtgcaaaggcttactggatgcatggcagctctgagcaggtccatatcaaggctaggcgagaaaggaatgccattttacaaattgctcaagcaggtggacaagttctagtggaccatagaagcacaagaggctctagaggcactgaattcttgactacaccgccagtacttaagccaccgcgccgagctacgcctggtcagccggtagaagatctgctcctatatatctcctgcacgactcatgtggtaagcaccacgttagtagtcgagtgggcggaggaaggacatgcatacccggtgcagcatctagtttacttcatcagcgaagtcctcgatccctcaaaaataaggtatcctcaagtccagaatctactgtacgc

SEQ ID NO: 71 - DNA, 618 bp, Zea Mays
gaccagttttgttacagacattagtaggcattgagttagcacaattttcatcccctgggtttcgaagagaagcgattagaagaagaatctccttcctaagaagggccccagcattgtgtagaagagtggcgaagggaaagatcgtttcatcgaacacgacatccctagaaatataaacatgaccataggatggctcaatacactcgaatcctttgtgcattgggctatagccgaggaacacacattggatggatcgaaaggcaactttgtgggtgttatagggacgtaggttgagccatatggtgcaaccgaagatacgaagggaagtgtagtcaggttgttctttaaggaggcgatagataggtgtttggtagtcaatgaacttactgggaaggcaattgataaggtatgtggctgttaggaatgctttgttccagaacttaagtgtcatagatgtgtttgctaatagggcaaggccaacttcgacgatgtgtcgatgtttttgttcagcagccttgttttatttatgtgcatgagggcaagaaactctatgggcaatcccaagttgttggaagaaagggttgagcccttgatactctccccccgagtcagttcgca

SEQ ID NO: 72 - DNA, 866 bp, Zea Mays
gagccgggggagggcggtgttttcactcactactgcaagacaagatcgagggcaccaaacatactacatcggctcaacctttgggataatgcccgcctcccgataattaaacaacatcattttcaattcctcaccctcaaaaagattccgcagatccccctcaccaatactcgtcccaaacgacgaggacagcagatcttgttggccaccctgatctacctgaaggcgggttcgctccatccccatccgacgccgcctaacacttcgcgacatctcgccaacgctatgcttcgacaccacttttcgtcgccggcgctcgatccttgcgccagccgggggatcagacgcttcgcccacctccagccgcgaccacatctaacgtagcaaaataatccaaatcttcatccgaagactcttcagtccaggaaaacaggctcccaaactcaccatcagatgaaaaagacctagattcagaaccagacaaactatcattagcaggcacggcgtttgcgaccgccacaaaattagtatcgtcggtaggggttgcttgcgtaggcccagacgtcggaacctgcgcagcaaccgattttcagtatcacacaaaacaggccctaaacacaacacccctaacacgaccccgccacctgcgaaggacagtcggcaccgcagggtcttcagtagctgtcgcagccactgatggagcgtcttcgccatgaaggacggtctccgccacaggatcctcgcgagggccggccggcggcgccggttgttccccagcctccgtcctcacatcttctgcccgggtcactgagctctccaggtctccgaagtcgtcgacttcttcatcattcgccatctacagaaac

SEQ ID NO: 73 - DNA, 364 bp, Zea Mays
gaggaatacaataaagttagtggcttggacaatacaaaagagatttgggacactatcaagattgcacacgaaggaaatgacatgacgatgatcaccatgatggagctcatcgaaggtgaacttgggatgttcgttgtgaagagaggtaaagaacccacagaaacgtacaacaggctcaagaccccggtgaaccaaataaggaactatggaagcacaagatggatggatcacaatgtctaggtgcatgtgtgatacggaagaagtggaagtggccaacagtgatcacagctacgctccctgtggaacgcgcacccatcctccgcgacggcctccagacatctcccccttacacgatgttggcgtt

SEQ ID NO: 74 - DNA, 581 bp, Zea Mays
ggcatgagtcaatctgagacaggctgaccacggtgagagaccttcacaacgggattccgactgatttgggggaaatggacaattgggcggctctggtggatgacagaaggcaagatcgggtgctttggatgcgcaatgacttagcgaagctcactggggcagcaatttataggatctatcgatggtgacgtccaatttggaagaaatgtgctggcggccggagagagggaggagtcaccggagtcacataacgtggcatttactggggtagaagcctgggacgatgactaactaactcacacgacaccttacgacgtggtaatagggtctgtagcgtggcagattccggtgaatggtggtcacgatggcgatggccgtgcggccactttactaggcaagtgggtacggtgaggccaaccacagtgcccccaaactcatccgcggggaggatcgtttcactgccgagcgcaatccacttatccaaggcacgaatcatggtagccggcgcgaatccaggcgtggggtcaccggtggcgaggggtgatgcatctgccgatctttttcagtactgtaccatggga

SEQ ID NO: 75 - DNA, 483 bp, Zea Mays
ggaagttgcagcagtgttgcttgtgtgagcttcgacttgagggcatcaaaggcttgctgttgtgatggtccccaacgaaacgacactccattctttgtcaactcgtggagaggtgctgcaatggtgctgaaatcccgcacaaatcgcctgtagaatcctgcaagaccaagaaaacttcgaacctgcttgaccgtggttggaagtggccagttcgtgatggcaacaatttttgcctcatccatctcaatgccctgcgatgtcacaacatatccaagaaaagacacacgatcggtgctgaaggtgcacttctcaaggttaccaaataaacgtgcatcacgcaaaacatcaaaaacatcacgtaaatgttcaatacgatcatcatgagacttactatagataagaatatcatcaaaatataccaccacaaatttaccgatgaaagcacgtaaaacctcgttcatcaatctcatgaaagtgctaggc

SEQ ID NO: 76 - DNA, 450 bp, Zea Mays
gaaaagcgccggtgccgtggggagaaggatagccaccactttcgatcctccccaggagtaactctctgaccggggcgtaccatatagaagcttcgagagatcaccaggaacgagtctgtggcagtcttgggctaggtaacctagccggttgcctggaattcgtcgtcggcgcagttgagtcgtcgtgaaatcgcccatcaccgggggcggcaccaccatcaaccgaatcactggtgagtcatatgccatcacgttcacctcgaccccgtagttgtgaatccatagcctgtcgggagtagggtgctccgtggtgcaggatcggatatcttcggtaaggtcgccgtcgcgggagcgttgttttgtcgtgctcaggtgttggagattgaagatggtgcgcctatcgtctgatttggattgtatggaggagattagattgtgtccatattcgat

SEQ ID NO: 77 - DNA, 1020 bp, Zea Mays
ttctcatcatcaacatcattctcgtccatgctggactccaatggatcagcatgtagctcctgaccgaaccccaaagaaccatcaactaacacaccatctatcggctgacccgcaaaggtagtgacttccccgagagcaactgatttgtgcccggtattatccccaccggccagcttgttaaggggttgatcactagcattttccttcctgttgagaccatcttcgttgttcctatcagaacctttatcctcacttttactatcagcatcatcatcaaagaaagaatcatcatcaaccgccattgggaccgctgtccctgcgccattttccacccacaggtgtacctcgtagaagaccttggctacttcgacatccaccgcaaagggaattgcctgtggatcgatcacactgacctgcatcctacatatgccatgatgtctgtaaaacgccatatcaacatcggatgcaacccccagggtcgagccaacaccccaaatgtgaggcaccgtacaaaattcaaccggcaacccattaaactgaatccaagtatcaaccaacttagctttgacacgacctccagacgagcataccttaaactcaagagtcgccttctgcgttttagccctgaccggaccccattcaaccattctattcaattccaaggaggactgaaatatggttttgaaggttccttgatcaatttgatccaccttccacggtgctaggtgcggaaggagcctcttaagttcacataccacattgtccagagttaacacgccatcagaaacaaggatcaaagcaactttcgagtcccccttctgtttgaccaatttcttgttggtaggtatgtgaaaaaacccgcccttgttgatcgcaaaaccagccaggacagcatgcacttttggcacattgaaaatagggcaccgttgcttgatgtgtgaatcgacgtcacacacttcacaatacaacttcgccacacagtcgttcatcacatggccctttgcgtaacatctatgacag

SEQ ID NO: 78 - DNA, 321 bp, Zea Mays
cttggtgaggggtcggggaggtacggggtaaactaacgatcacgtcgaggtgcttgacacatgcggaggtggccggagtagctctggccatgtgtgcaggcggagggagttcgctggagttggtcggtcgggcgtcctagcatggtactggttcaagggagtggcacgagagcttcactgggtcttggcgaagatggtggcatgcttagattgggcgaagaacggttgaattgtcctgtccacgtggaccgagcactggtgacgatagcggctcacggcgagctcatcggagggcggtagagctctagggctggagcgtgc

SEQ ID NO: 79 - DNA, 583 bp, Zea Mays
gaatgggagagtcagggcgctactgctgtggggatcgagctgggctgcatccctgtccgtgaatgggagtcccaaggcatcgcgggtgttcaccgcaaccgtgccgggtcttccctgatgcggtgggatttcatcaagggcagaattcgtcgtcggagttcaatgccctggcgcctcgtctgggttgcggcgatgctctagctcacttttgcggtggacggaggaaggaagaagacgcgactcggatcgttgatccggtgatgggcggaccagattagtggaacacaacactttggccaggggcaatggagtccgtagatcatctagcgaacggatgagatggggttctagtgtatctgttcgctcattttgatcgagccgtagattctaggctcgatggtccggatcgggtgggtgcgcaccgttggatgacgatctggcggccttagtttagtaccggttcggttagggaaagatttaatctgagccctaggtttctaatcggacggctagagtttacccgtaccccttcgccatggctagttttcaaaagagtccccgcagaattccataactaacccgc

SEQ ID NO: 80 - DNA, 373 bp, Zea Mays
gcgacgcaggctgcgtcgcgctgacgggtcgctcatttcggagccccccagaagtgccagaggactgcaggtggggccaaggaggctagctcccaggtccacggtgcgcagaggcgcgtcagtcctccagtcccgccgccacaaccaccatctgggggtgatcacccccaggagcgccagcagcaacaacagcaacagaagcagcagtgggagcggtgattgcctcgcttccaaggtcactggaaagtccagggccccaagtaagtgtagtccctttttctttgagcctaatcatcatgccgacaagtcttaacccatcatctgtttgccagggcttcttcccccgctgctcccaaggtcatgcctcctccac

SEQ ID NO: 81 - DNA, 511 bp, Zea Mays
ggactacggtgtaaatgtttctaagactcagagactcccacaacggacggcgggttggtttctataaaacacagggtctttttaacaaatgcgacacggcgaaggggtatccacggatcctagctgcccgatccacttcctacggttcagattagatttaggtttaaacgaagcggtatgcagtcctgatccttggatcagagatcgacggtctctactccatctaactgagatcatcccgcatgcatcggattctcgatctacggtcacggttggatgcagtcgaaacagtatgaggatctaatccaatccgtccaaaacgcatccaacggcctgacgtctttcttccctactcggcgtcacaccgcgcggtcacgcccacgaccgatctacggcggctactccggcgagcccccgttggccgtccgctgctccaaaccctccccgtagagtcctacgcgaagctcacggtatggtaaataaggttggatcatttttacctgcagtagaa

SEQ ID NO: 82 - DNA, 369 bp, Zea Mays
gtgagttgtaacgtgtttacaagtaaccaagctgataatagttgagtagtattaacatctgcacaccattttaattcactttaattcaccagagcacattacagtttggtagtagttgcttgctaagttttttagggaaaatagttggaattaaaaaatttatctatttttagtattcatttgaatatgaggaaggggtgagaactgagaagtgcacaattcaggggtttcctagggtgggaaaaagcccacgatccaatggctatgttccattgttcaattatccatgttaagtctatttgtcattcgatgagccttttctttttcttcatcagtccaagttgatagagtgtcatgttttgttttatg

SEQ ID NO: 83 - DNA, 571 bp, Zea Mays
ggtggtccttcggttcctgctgttgaggaagtgcctgtgcctgagtttaccgacgctgaccccaatgggtgtgatccatctgtcgctgatcccaaggggtgtgatctatctgtggctgatcccaatgggtgtgctgtctgtgttgctgatgaaaatgaggaggaggaagaagatgagatccctctgactcggaagaacagtcggcgatatgtagccagtggggaaagtagtggagttccttctcctgctctgtctgccctcattggtctacaagaattgtctctggcgaactttgatcagacacttgaagatatggttccagaggatctgttatcagagccggcagatggtgacgcgatggatgtttgtgctgatgtgttcgacgccaggttggggtcatcccgggcagcgtcctgcgcctcatcgaccttggagcgcggtcttgagggtcaggaaactgacttggactgtcctgctcccatggaagtgactgagggaccttcagccttagaggcggctgctgcagagaacttggccctcaaggatggtgttgacacttacccagcccccg

SEQ ID NO: 84 - DNA, 463 bp, Zea Mays
atgcttttgggattcttaaacttgtagttccagtaagttggctatgcataaaagctgatttgctggcaaccaatttttatcctagaggaaggctgccattgatgatgaaactttataacaactcagcatttctagtgaatcacttatgctctataacaatatagtgttacgccatatgtttccgtatgtagcttttatgcctactgaactactatgcattgcagttcatgatctaaattttctaaaacaaaacagatacaacatgagttgaaccatttggaaagttactttagggagtgttacaacggaaaccaacgcccaagtatgtgttttctgaattacaattactagggaaaggtaaattgcaagaactacttttccctacgtgttttactttaaaaaacattttttcgtgctggctacaaggtttggcatgctctgatggtgctttctactcaggtgt

SEQ ID NO: 85 - DNA, 556 bp, Zea Mays
ccctatgagggtgtagtgggccgactgtctcgcgatgcgttctgctgcagccttatcatccggttcttcttcattccttatgtacctgatgataggccctctccaaccattaaggtccgattttggttggctcagggtgttgcattcttctgcctgatctgagggaatacttgggtgtggcacttcctggacgaaacttcaggtgggacctgggtttgactggatcctagcttcgacaatgtgtctgctgcgatgttgcgatctctttccacgtgatggaattccagcccttcaaacttgtcttctaatttttggatggttgtacagtactttcccatggaatatgtcgagcaatcccagtctttatttatctggcttatgaccactagtgaatctccatataccatcaacctcttaatgcccagtgatatggcgatgttcaacccatggatcaaagcctcatattctgctgcattatttgatgctgggaataataactgaagagcgtacttgagttgttcacctccaggggcaatgaagaggatccctgcgcctg

SEQ ID NO: 86 - DNA, 1183 bp, Zea Mays
ctgtcagtgttggtttttctctacttttgggcatcatagtttttgttcaagacgtttttagccctgggttgttataccaaagtgatagagcttggtttggatagtaattttggttaagtaagtctggtctattgttaaggggaatttaaaatcaaagggcttaaacagtgaggaggggaatgggagcagcaggcctgatttggttgaattcagagtttcagttggtaaataaagaagatccttttccctgcaagtgttactttaaatatgtggatggagataagagtaaaatgcgtggccaagggagatgcctctccccactgaaatatctaagttttggactgtctgggaacagtgggtccttatctgctctcctctatgtctgaatttctgggcagagtggatatttgtggtgtgcctgtgaaccagcccaagttcgatgctttggtgctgcttgcatgttggcgtggggcttggaagcttagccacgtgtttgagccatgttgtgctggcgccatcaaagtcttctctactgtgaaccggccgagctcaatcactttgcactacccttttatctagtcgctgcagggccagggcagtgaagtctcttctcgttcttgagttctagcgagagtgcatcgtgtgagtgttgtggttcatgttcacgtcggtgtttactctccccggccatcaggttcgatctgctcttgttcatcgcatgtcaatctccttttttggtgactgagctcatcagtttctcatctcactgtggtcgggtcgtctcgaggagttgctcacctgtgtcacttgtgttcggtaatctccttaagccagtgaagctcatgacgctgcccttttcatctctactgcagtgtctcattgggaacgccgcggtgccgccggtgaacgccgctgggaatgatctcgacatggcagaccttgtttggggccggttgcgtgcgtgatctagggttggtctgctctatggtgagtcgctagtgcctgctccaccgtggttgggaactctactgcgtcgtcgttccggcttaacaccgtcagagttgggcgccgccggcacgcgcagaggaagcgcgggcgcgcgtggtgctggagcctagggctgtaagcgctatctgagtgggccagttttgcctggagttgggctggctgggtcagttctggc

SEQ ID NO: 87 - DNA, 468 bp, Zea Mays
atttcggcgtcggttcgtctgtcggcgagactcccgatgaagaggttcctctcctggcgcagttggttcatcgtcggacataggattcgattccactcttcccccgatgaagaggacgtcggggtagaatggagcagctgtcgcgacggtcttctttctgtcctcctttgaggatggaggcacagaaagagcagcttgacgacccttggcttcattcgcttctttcctccttgtgatccgtgtccatttttctgtcggagaagtggacagcggggttctctgggtagacggaccctcggctcctagcttgctgaaagtgatcttttctcggagtgctggaggttgcgcttttccctgctttgctccaattttcttggagatctttgaggacgactttctctctggtggatccgcgatgcgatgcagagttccctcctcatccgctatagatgagatagttccaaagca

SEQ ID NO: 88 - DNA, 410 bp, Zea Mays
cgcggctcttcatgccaagattcagtgctatgcgcgctcagctaagaaggcacagaagctgttcaagaaggtcaacaagaagactgcctccgacatcaaaggatgcagggtgatcagcctggtcgctgaagcgagggaagttgccctatcgatcctcgagtcgacactgcatctcctggcgaagcagattgcggtcccaagtcccagcaagtggtcacttgtatccaaatcgttccagaagaagagaatcatgtgtgaggcggagcagttgcaagggttggagccggagattgctggtcttgagagcggagttgggactttgttcaggacgttgatccagagcagagtttctcttctcaatgctcttagtttgtaggcagatcatatagcactctgaccccccctgtgat

SEQ ID NO: 89 - DNA, 599 bp, Zea Mays
ggtcgccgggatcgatttatcctgttatcaaccgggagcgtagtgaagggggagttagatggccatggtgccaccgtggggctgagtcgcgtcggggttgggcactttgggttgctcacgaactgcatatgcatggttagggtattcgggaagggttggtctctgtcttgaacaaattaggtcagagtttgggaatcgtgggctctagatcaggattccccagtggagctcggccgcattcgttgacggcaccgccgcctgctcgactgggaggtaaggggatacgcttcagacgttggatgagatgtgtacgcttgagattagaactaggtggtgttttgctcagggaagaatcatgttcgttggatggtcaatcgatggatcagattagtgaccagcgtcgatggtttctggtcatgggatccagatccaagggctcatgtttagtaccggtttgttaagtgatttgatctaattgtgaccgttggattgtgatcctgcggccagaatccacccataccccttcgcctgggatcatttgctatagagcccctaggatctttattattcaacccgcagtgcacagcagaggaattctg

SEQ ID NO: 90 - DNA, 1263 bp, Zea Mays
caacctcctccgcttctccctgcgcatcactcaccgttccagctctaggattataaatgccaccgcgtcgcgttgtcgccctgggcgcgcatcacctcgccaacctcctccttcggggcctttcccagcctctgcggtcatggagcgtctcgtcggggtgcctgggttcacgcccgtcgtaccctatcgtctatccagtaaccggcatcgcacccggaggaaaacaaaattagtggcgggctcgccgtgcgcagtacctgcaacgcacgagcaccgcgtcttcggcaccgacgtgtgatcaccgtctactcgctcgttgcagggcagacattccacgatctcgtctacggctgcgccggtgtcgtctccatccctctggtccgtgccccgccatggcccaacccaagctacagcgacctccggcaattgctcaccgtcagcacagttccgctccacccgtgactggccctgtgatcgcccaaatcagcggtaagtagccatcggtcttactcaccccagccttctgtacgaaaatcatttgctaatttgacgcttgaagaccggggttgtcggattgcgggtccccggcgtgggctccgccgcgggtgggcgcgccgccggcatgcgcgggggtgtgaagaaagcctagcagccgtaggattgggcgttgacggctgagatttaatctggggatgtttccattagcacctttaatccgaaccgcacgatcagaatggatggacgagaatagaagtagcattcggattcgggccagtgaatctgggccattgagatccaattgggtggatctgatgcgtccggggtattttaaatcaccactgtagatctcggatctaactaccgtagtcgcataccggttcattcgttggggatctaatctgggtcgtctgttttgatctgacgactcagatcaagtgtttcccctcgaccgcagatctcagatcgtgagcaccagaacagatcgcggcattttaaaatcggggccatcggatcatgatcgagcggcccataattcaccgtaccccttcggcctcgccattttacaaaagaatccccgaggaaatcactaaacaacccccagtccagttctgagttgtctgagtcttaggaaaatttatgtagaggcccctgtattttctgtaaatggtgcgctcggtccagagaacagaaaatcaaaggaattcagttagaaaatacagttttggtgtgaaaataattataggaacttaaattaattcatag

SEQ ID NO: 91 - DNA, 507 bp, Zea Mays
ctgcccgagcccgtggcctggctctgttctttctcccctgcccgcgtctgctctcggtctcaggtccttccctccctttgtcggcgatcttcctccccggtggcgatcctctggcgccctgtgcctgcgaccctcgctcggtgagcagcactccgctctcctctccctctatccctttctctcttgttctctgtctgagaggcagtgaagcacttctgtttccacccctttttgcccaattccaaatcctgtgaaatcttgtgaatccatgttgtggtatgtgtgtctctgtgtgtattgagcattcctgcaggttcttagctccttcgagagggttttcccacctcaaatagccatttcaccgaaaccctagaactctgcacgtcacgtgctcggtgaaatgcccaaaccagccaaaaatgctccaattgaacccaaatttttctggcaccttcacaacatccccagtaacacatttgccaaatttcacgcctatctgagattcca

SEQ ID NO: 92 - DNA, 284 bp, Zea Mays
ggacatgctgaccctggcttcatgttgcacaagggtctggtcatcccgaagcttaaagccagtgggctcatcaccaccgtcatcagtttccctcttttcttctcatcggccttaatataaaaccactcactcttccagccagttggccacttggtgcgatagctgaggaccagagccttcgtatccttgtgatacacgaagttataacaaccaaaattttcatgtagcccgtcttctctggccttcgtttggtaatgcaactcatgcactcggcagaaagcttc

SEQ ID NO: 93 - DNA, 930 bp, Zea Mays
attaaacttgaccaattttgagtcaataattttgaatctatagggcctctgaaatgatattattttagcaagttacatatgttgtaaagaaggcaagcgtggcaaatactacttctctagacattttatcgagcatttggtgagcacaatagtactcaatctattttggcacatgaaacaactgaatatctgatggacaaattagcgagcaagaaatagcaagcaaggagaagcacacggaatcgttgtgccaacaggtgcgggtagtggtggagatgggagggtggcctgacctgatcttgatgaggaactcgtggcttcttgcacgacccacgcaaggccatccactgctgacactgggatggtggcctcgagaagcaccgttgtgaggagtgtcagggcgacaccatgggttcccatggtcataatctacagcaaccgaaggcagagccaatgacaggcatgatgaatagatggggcttccgtggaaggagaaagggagaaagaggcgaggccgtgggaggccggcatgggcgacgacggccatgggcggagcgaagttaggtggtcggaggggagggcggcatgggcgtgacgaattgtcggaggaagaaactgtggccgcccattgggagaggtggtggcagagcctggaaatgtcgcgatgctgggagacagtgaaaagttgatccgactgtgttcgttggatgacgatctaacgactattaagaatagggacgacgtggatggcctgtgagacgagctttgcgtcggcgtttgtatataggaaatatccatgaggattagaataatagtaagggcatgtttgttttctaggattacatgtcaatcatcttatataaaattagacggctagttcattttaatgccatggaaatgaactagtttctaattttttaaagaaaattt

SEQ ID NO: 94 - DNA, 694 bp, Zea Mays
ctcgagctccggcggcgcgtagacggcgccgggcgggctggtgtacacggctatcgccggcacggacatggtcggcggaagccgagcagcctctcaaccaccacaaaagaagcgtactccaatcagcggcaccaagcaggaaaccaaaacccgctgctccaattctgatcttgggggggctcaattcaatcccacgagctcggagcttcggaatcaagcaacccactaaactctctcgagctagaaacgaagcagcagcgggcggtggtggggtcaattgaacctacagagcacgaattcggcgtcaaagcacggccgtggcgagattaccccggcgaatccgtgggattgagaggatgaggggggcgcgcacaaggggatgcttcctcgccttcctcctgccgcgcgtgttttttgtgggtcgcctccgctgcgtggtttgtgaggtgtggatttcgggtgcgtggccagaagaatctggggttgggggcatccacgccaacaatagccgcgcgcggctggtatggcgaaactgccccaccgccagacagccaggatgtacagccggaattcagcttttacctcatccgcttgaccgcttctggctactttcgggataagatttgctccttcacgtacgtggtcatccaaatccgcagcttctttgtatcgcacgtgtcgggttcaggtcgtg

SEQ ID NO: 95 - DNA, 781 bp, Zea Mays
cggaattatcccagtcagtgtggagaaacacgatggtcgggttgctcatcactgattatcctccgtcgtgggtgaaccacgggccgacgggcgcgttcgcgaaggaaatcgtgggacgatgcatcggactgggggggggggcaaatttcacatcgacaggcatcaccgtcgccgtgccgccattgctcgtcggtggagctcggctcttcaccatctaaggcattatggcggggaatgagttctatgtgttcaccgcatcgtgtagtaggttttggattgggttatgatgcacctgggcgcgtgatgtggtagctccaccgggcagtccgccctgaggcttgcgcgccgccgtctaacggtgacagaattagggagagtcacgtgtgccgtcagaaccttgatggacggtgtggattagaagtagtgtatcggttcggcttgggcttgtcccggtcgttggattgtcaatgtggggacgagatcggatcgcgtgcataacagaccgtagcccttgatcattgatctaaccgcccagatcgcgtaccggttcattttatgttaagtctaatctgtgtcgttcgcgttggatcagacggcccacagttgtcgataccccttcggccagcgagttattcaaaagagccctcggattttaatggattcaacccgcagtcctggcagtgaagtctgagtcttgaaatacttgcgcgattgaccctaggttcctgtttatttgacgcgcagtccaaaaatagtaaaaacagaaaagtaatattagaaa

SEQ ID NO: 96 - DNA, 592 bp, Zea Mays
gtgtctagcttggatcgggatgctggtccttcggctcctgctgctgaggaagtgcccgtgcctgaatttaccgacgctgaccccaatgggtgcgacccatctgatgctgaccccaatgggtgtgttgtccgtgttgctgatgaaaatgaggaggaagaagaagatgaaatccctctgattcggaagaacaatcggcgctacgtagccagtggggaaagtagtggagttccttctcctgctttgtttgccctcattggtctacaagaattgtctctggcgaactttgatcaaactcttgaagatatggttccagaggatctattatcagaaccggcggatggtgacgcgatggatgtttgtgctgatgtgttcgacgtcgggttggggtcatcccgggcagcgtcctgctcctcatcgaccttggagcacggtcttgagggtcaggaaggtgacttggattgtcctgctcccatggaagtgactgagggaccttcagccttagaggtggctgctgcaaagaactcggccctcaaggatggtgttggcgctcacccagcccccgagggtgttgtcgagggtgactcggctcgga

SEQ ID NO: 97 - DNA, 635 bp, Zea Mays
agaaaccatcaaatgcataaaattctttcagctgattagcggtttggtttaccaacacatgattactggtcttcctgtaactggtaggtaggtatgcagctcctgtgctgtgaagttgttgagaagactgacgcagtggtctatcgtggaaaggtaaacagcagcgcaccttcctgtaactggtaagtaggtattcaggtgtggtcatttttctcaggtaagcaattttataagttattactatctggcctttcttttgtcaagttacagtgtatttgtgattaattcttatctatagaaggaatcattaactttcctgaatcactgtaagatttgccttttcgtgtatggcatgtattgcgcctccttcacatgataatctgatcccggatgaacatgttcacacaattgtaatcaaacttgactttttatttgaatgtttattaggtaacttagttcactcaatgtatcactatcactatcacaccactggatgtctggtcttcatgctgaatctttttccaggattacttcaggtggggtagtggtagttcattaaaacgccttcagcaaggaacctaagttttggaattcattcaaaagttaactttcagtaacttataagggtcatttct

SEQ ID NO: 98 - DNA, 443 bp, Zea Mays
aagctttcaatgttcgtcttcttctgcctctagccgacatctccgacgaggttgagacttcctaatctagtgcttgttcttgtgatctgtgcttgtgatctgtgctcgaaccccaaaccctaatctactctactgccttcttgctctgtgattgtacccgtgagggaccgatctggtgctccggctttggtaagtgcttaatctggtgttagttcttgtgatctgttcttgtgatctatgtttgtgatctgtgttcgaaccctaaaccctaatctactctactaccttgtgttctgtgattttagccgcccgtgagggaccgatctggtgctccggctctggtatgttcttaatccggtgcttgttcttgtgatctgtgtatcgtaaccggtgcttgttcttgtgatctgtgtaccaaccctaaaccctaatctactataata

SEQ ID NO: 99 - DNA, 574 bp, Zea Mays
cttcaacactcctcttatattagtaaaggcatctagcaggttatttgctaagttttgcaggtatattattcgttgaacttcaagttcggtttctctagtgcgtgggtcaagcgattggatgctactagcactctattctatttctcgacattctttattattaaggtactatcctccccctaatgccgggaaatactcttcatcgaagatgctatcagcgtaccgagccatgaacagatccccagttctaggctctaaatatttgattatggacagagattcataaccaacatagatccccaacttccggtgaggtcccatagatgtacgctggggtggtgatatcggcacgtatacaacacaaccgatttttcgcagatgggaaaccactggttgttgaccacgcgttaactggtggggagaagtagagtggtaagcagatggtctatattggattaaggccgcaacgtgcaaaattgtgtgtccccaacaactggtcgggagtttgctatcgtgtagaagtggcctggctatgaattttattcttttaattaaggacttagcaagtccattc

SEQ ID NO: 100 - DNA, 743 bp, Zea Mays
acctatggtgaccaggagcggcgacgatgacaatagatctactaacgaggcataggcgagctgctccctacccgtggcgatcagctcggcaatgtccttgccctcaaggagcatgaaaagctggtcgaggcggtagcgtcgtccacgacagcagtgcctactgatggggtgtatgcaagctgctccctgcccttggcaagctcggcgatgtccttgctctgcaggagcatgaagagcaggtcgaggcgatcctcctccacattggcgctgaaggagcctagcatggagggtagatgtacatacctcaagggtgttgggggataagagatggcaaaggaggggcgctcctcttatcatcgagtggcgggggcggctgttgctgtgactccggaggaggcgggctggactagatagggcatagatgggcgcatcgtcggcgagaggcatccgcgagggcggttgctgctgtgactctggaggagatggaggaagttgtgcgctagcagagggttattgtttcgactctggaggaggcgatgtcggcatgaggcatccgcgagggcggttgttgctgcgaccccggaggaggcggaggcacgcaacttcgttgggcgctgggtgatccggtggaggtggagccgtggaggaagtcgtgcgctggcgggcgacgtctatgaactccagaggaggtgggcgagcggttgcccaaaggaggcggaggcgggcgcgtgactgcgtcggac

SEQ ID NO: 101 - DNA, 1224 bp, Zea Mays
cccggtactagagatctttttgaatctgaattgtctctgcctcgatgtggttctctggtacttgcaagcatttacggagctgggacacatgaaacacattgtgaatatctgacatggattctggtagttcaaggcggtatgctgcgggtcccactctgccaatgacgggatagggacagatgaatcgcggtgctaactttcctttcatttggaaccttttgacaccacgcatcggggagaccttgaggtatacgaaatctccttcctcaaatccgagttctctccgtttgttgtctgcataacttttctgtcgactctgagcttcaagtaacctcttgcggatcagggcaactttctcttcggcttctttaacaaagtcgggtccttctagtatcctttcccctacattggaccacattaggggggtttggcactttcgtccatacaatgcttcgaacggtgacattttgatactggtctgatggctgttgttatatgagaattcggcatacggcaaactggactcccaattcctgtcgaacgtcaacacacaggctcttagtaaatattcgaggaccttgttgactctctccgtttgaccatctaactgagggtgataggtggtgctgaaatctaacttggtgcccatagcttgctaaaggctcttccaaaattttgaggtgaactgcgtccctctatctgacactatcttctgaggaataccatggagcctaactatctctttaagatatatacgggcaagggtggctcctccaaaagtggtttttactggaatgaagtgggccaccttggtgagacggtctattattacccagatagagtcattccctttttgcgtcaggggcagtccggttacaaaatccatgcctatttcctcccacttccattcaggcactgggaggggttgcagtaggcctgcaggtttctggtgttcggccttcgttcgctggcaggtgtcacactaggccacatactgtgctatctcctttttcatccctctccaccagtatctggctttgaggtctaggtacatcttggtggttcctgggtggatggagtaggctgagttatgggcttcattgagcaggacttcccgtgcctctccttttggtacacacagacggttcttgaaccaaagaactccttgttcatctgccctaaggtccggaagttgctccttgcgagctctttccataagtcttg

SEQ ID NO: 102 - DNA, 309 bp, Zea Mays
cttcaccatcttaggaaaatcagctttggagatggtcgactttccgaagtccaggtggctaggcttgctcagcactgcgatgttgtaatcatcttcagaatcggtctcttcaatatctgcttgctctgcttcagcagcagggacgtcttctggtgccaccaacccagatcgcttcattgcttcaaaaataggaacagtttccacagcttcggtctcgtctccctcgcgatcaactcttgcagtagagcgaactctagccatttgattataatttacttgaaattttttgaattggcttttctgtctttt

SEQ ID NO: 103 - DNA, 1150 bp, Zea Mays
cgcccgcacgccagtagactttgcgaatagccccctggtgttttgaataacccgaactaggttccctgcactatttctgtgagtcggtgacgctttcagaagagcccctttacttctaattctttacactccgaagccctcaatggtggacggcgtcgcgcagagctccgacgagctcgtgtaccggccaatacactcaaagaccggcgccctatcttagccgagaccgaattcaagatctaatgtgtgtttcccctcactcaatttcacgaacggctacccaataggttctagccacggtgacagcgcggataatcaaaggaacaacgtgttcccggtgatccatggcggtctagttcaatcagaggggtcgaggagcttgaggagaacttaaggacgctagaacaaacgaccagagagcttgaactaacctggagtaagctggccgcggcgagggtgtctctgcggtggcggaaacaggattgggggaagtaagaaatccgcggtctctggtgaacgatttgaggcaatagctggtgcgttgacttcgtgataacatggcgcaacagacccgaccataaaattataggatcgctaagcggtgaccggggatttggatgaagacgcgtggcggtcggaggaagaggaggtcactggcgcacgggattagtggatgtgatcgtggcaatctcaccggcaaccgctggataggccagcacgagtcacggcggcgtggttaaagtgctaaggacaccgctggatcagacagtgagatgtctaacatcggcgaggggtgattcaaggtgatcgagattgagcggacacggtggttggaccaacagtgcccaagactcatccgggggaaagaagatctttttacccaggagcgttatccgagcgccggtgagcacgaatctcccaggagaaacccggatcccggcgcaagctcaccggcgacgggtgcactacacctacgatcttctttagaccaatgttcattctgaatctcccttcgaagttgcctgacaacccatgtttgagccacaattactccctgctctaggcagtaacacacctacctttctttgacaaagttgtactccaatatatggtctccaaccttgtcacagtgacccaagtcttaactcca

SEQ ID NO: 104 - DNA, 526 bp, Zea Mays
agtccagatcgaataaccgaacaatcttctcatctggaccgtccgataagaaatcaacggcccaaaccaaaactcccacatctgacgaccccaggaggtggcgctccatggtccgcggtgattcttcaccaacgataggtgaagatgagcccgcaaacgttattctttaatacgggacatgctacgggaagcggggatgagttacaacctaggtgtagaaggccctcaccttgattggtgcacgccagagcaccaaccacgtcaagaggaggcttcgcggcagtgtcctgcctccgggaaggaattcccgagcacccgatggttttccgtgccactaaccaccatccctaactttgtgacggttcacgatgctccctagccacctcgcagacctcgaacaacgctttaggcacaaggcacaaggcaacagcggtggccctgctctccctctcctagcggcgatggcggcgcggttgtgaggctaccaagaagccaaccccgagattgactgctcgagggcaccgtg

SEQ ID NO: 105 - DNA, 331 bp, Zea Mays
ggggaagagaagggcgtggccgtttgatccataatcaacgaccacgattggttaggatgggaaacgtaggcagggccataggatgcgatccgaacggccacgatcaaatcgcagatcccctttgggcgatggaagctagaccgtagatccgggatccaaggcccctaatggcgtaccggttcggtaaagtgaggatttcatctgggcccttggtttctaatccaacagctcacaatagatcttacctcttcgaccgtgatattatgctaaagagtccccgcagaacataggaaacaacctgccgtccagtatacagaaacctgagtctcgg

SEQ ID NO: 106 - DNA, 643 bp, Zea Mays
gagccatctcgccttctcatgccgcggctacaccccgtgctcccatcgctggcatagggaggaaatcggaccaccactcccacatctcacgctcgtcgtgatttggagtcgcggggaactaccagacaacgtggatctcgggcgcgtgaatccttggtcggggaaacctcgcgagcttaggcaatcgctcgttggagttcgaccttcaccctgatccaccccacgtcgcggtcagacctcaccgttgttcaatcaccgggaaaaacccctctgttgaatttgctacaatctcctccgcgcgtagcaccttacggttgggagaatagtacaccagcgggagaatccccacaactccggcgtgctccggtgttgcctcagccatgggatcctggcggtgcggccgtaatcgtccgtcgggggtagaagaagctacatggaccgttgatcttttaatggatggctacgattagaatgcgaaaaccccttcgatggattgatctgggccgctggatcggaccgaacggtaccgattggattgcaccccattaaatctgagccgttgtgcggatcagacggttcatatagtgtaccggttcgtttaaaaaaatattaagtgatcctcgacgttgatttctaatcggac

SEQ ID NO: 107 - DNA, 538 bp, Zea Mays
tcgtgatccattattattaccctagccagagtgccagacatatcacatatgcatgaaagacggaattaaaatgggtgtgtgaattatttcaattttaaatcctgcacatccaaccattcttttacaattcatggacagccatgcatgtcgtagatagacccctacctgatgccttgatgagtttccatctaggtcgtttgaactgtttcaatttcacttgcacttgagttttatacggatgtgtaaagacctctatttcaatttaacttggtgattccgtgcatgcgagaagaaattatctagaacatgcagcacacctggtggatcctagtgcataggaatctcattgctagttttgctttaatcctctctcatctttatttgcacaaagatatgtgctttcctaaagtttatacctttgagcaacctcctctctagctagctatgcctgggataaccctatagctttcaagaatgtgaaagccatgcatgcttttgccccaatagcaaatgcactcttctttattttcagcctacc

SEQ ID NO: 108 - DNA, 569 bp, Zea Mays
gacgtcgggtccatggtggggatccgtggggattctctcgggcgtgtggtacgcgcgcgtgtggcctgcggtctcggggacggaccagaacgatggtgatttctcgctggatttatgggccaccagggagccgcggcctcgtcgtggattgggtgctatacaacgcaatcgccgataagcaaccatctacctatttctcctagtcatgcgcatcgcgtagcacgagtcggcgtggatgggggctcgccgtggggccaaatcgtcggactccgacatgagcccgccatgagcagcacggcgccacggtcgtagtccgatcgggacatgggagagaggtggggtcgttggatccctgatcgagggtgtgggctatagcacatgtaccagttcgactgggatcgcgtcagttgtagatctcccatcgtgtggttgcgattagattggggatagtgtttcaaaggatgtgatcgagacagttgggtggcaatcggagggttcgggttggatcacaacgtggatgtattgtgggtcgtgtgatttagatccaagggctaaggatgtgtaccggt

SEQ ID NO: 109 - DNA, 491 bp, Zea Mays
gcgtctctctgcgccattgcgggcaccggacgagcgtctcactgcgcctttccatctgattattgccgtcgtcggcgtagacaacaacttcgtcgatttctggcaaccgcttgctgtatgcgctatggcctttccacgctcggtggagagcacgtgctgataacgtgttataattcagtggctaaccccgtggagagagacagagagaaacgacaaaatgacaggactgttgtattcatctcatgaagtgtacatatatatacatagtgaagggacaccacaacgggtcgcaccccttggaattagatcacataaaatattttctaacacctggaacggcagaaatccggagtccccccgtatccagggggtgagggacgggtgggcatggtcccacgcgtcggcgtctcggcctactagtataggggtagcgggcaggcggacggggagggcgactggaccgcgggccaggaagtagcagtgctatgttc

SEQ ID NO: 110 - DNA, 472 bp, Zea Mays
ggtcggttggccttgcatcctccaggagcctttgagctctgagttgcgcggggtgatgccctcccgagcagtgagcggaggcatggcttgtggactcgcttcagcttctcacggaattcctgaggagggtttcttctcgggtggatctgctatgcggtgcagagttccctctatgtccgctatgcatgaaatggttctaaagcagaacatagctcctggctgaaggtgatcttgctcttgaagatgatggccatggagttagcgttgatcgacgacacacccctaacctggtgcgccagctgtcggcgtttggtatccgaccacacacccggggtaccctcatggtgcttttgggtaggacgatgtcatagattataactcgatggttcatgctgggggcacgagaagagaaaaagtcgagagagtttcagcaggtttgggccacttgaggagcgtaataccctacttcttg

SEQ ID NO: 111 - DNA, 316 bp, Zea Mays
gaagattctgaagaccggccctggcgaccaagccataccatcttcagaaagtcgaccattaaacaaagttagattgacgccatgaagggaaggtactttcgtgacatgtctattgtgagggttggaggggacagcaccgcccctgctcctgaagaaaatgaggttgttgtgtacagaagctttatgaaggcgggtcttcggttcccattgagcaaatttttggttgaagtgttgaagatatttcagatctttcttcatcaaattactctcgaagctataattagaatggggatgtttatttgggctgtgagaagcc

SEQ ID NO: 112 - DNA, 551 bp, Zea Mays
cgagctgccacacccgtcggacccggatcctctgcacccgcaccacctcgcgcctccccttgctctgctctgctctgccaactaatggctgctaactaatggctagtgtaatataatcatgtgagctattagtgagtgagatagagaggatcctagctaatggccagtacgtgtgtcgcccagtgtggacgttcgtgggtctgccctggacggtgtgcttccaacttcaacttgccaaggaaccaaccatgccagtggaagctagccacaatgcattaatgcaagcaaggaaggaaagccttttcgtggtgctacagcaacgaccgaaccaaaccaaacccaagccacccaaaaaagaagaagaagagagattagatgttgattacgacacagagaggaagaggagtgagtgagcagcgttgatgagagagaagcaacaggccgccccggacacagcagcacacacgcaaacacctagacggcgagggagatcagatcactccctttacgtgagcacaatgcccagctactaccaacctttttccagctct

SEQ ID NO: 113 - DNA, 648 bp, Zea Mays
atgatgactccactgaactttgcacatgttaataactttactccgtgtaattctgcgagatgtttccagaattctggtaggatactctgaataagtcaaatcctcattgacattcagttcttccatgggtaactgttcttctggtactcttaagcacttcttgagttgtgatacgtgaaatacgtcatgcacatccgataaactatcgggtagctctaactggtaggctacttcaccttttctttccaaaatcttgaatgggccaatatagcgaggagataattttcctttaactttaaaccttttcattcctctcatcggtgaaactttaaggtttacaaagtctcctacttcgaacatcaactctcttcttctattatcagcatagcttttctgtcttgactgtgttgtcttcaagttttctctaataatctgcacttgcttttctgctccttggagaatttctggaccaaatacttgactttctccggtctgattccaataaagcggtgttctaaactttcgtccataaagtgcttcaaatggtgccatttttagacttgcctgataactgttgttatatgaaaattctgcaaaaggcaaacttttatcccagcttctaccatgctttagagcgcaagctcttag

SEQ ID NO: 114 - DNA, 465 bp, Zea Mays
gcgctctctcagccaacttcgaaatgaagcagctaagggcggctagtgaccctgtgagtttctggacgtccttgactcgggtgggggcctcatcgcttcgatcgccctgatcttctctcggtttgcttcaatgcctcagtatgaaaccaggaatccaagcagcttcccggcggaaatgccaaaaacacatttgtccgggttcagcttcgtgcgggttgctcgcagcttgtcgaagaccagggttaagtcttcctctagggtcgacctcctcttggtcttgactatgatgtcgtcgacgtagacctctactttgtccctgatcaggtccccgaaggtcttactcatcgcccgcacaaatgtcggcagggcgtttttcagaccatacgacattacaacatagcagtacaatccatccactgttacaaaagtcgtatgctttctatcttccctggacatctgtatttg

SEQ ID NO: 115 - DNA, 1482 bp, Zea Mays
tggatacggaccaccgacgtgacccggagcggcgccatcggccggtgcttggcgtacagggtctccttcgcggtgcagttctggccgacgatgagggtcgcgctggagtgcatgcagaggcagggggtccccgtccacgtacgcgacagacggtgccagggtttcaccgtgctcgaggaggcaggcttggtgcagccgatgcgggacgcgttcttctccccgcggcacgacgacgacgcaggggcagggctacggttcccggagctgtacttggtcaacgtgctgatgcacaacggggtagtcaatccgcaccagatgacaccggagttcttcggtttgctgatgaggacacgcgaagatgtgaacgttgctgcgctgacggaactgttcggtgcaaagcttggagtctgtgataatccatgctggaggttgaagaacgcgcaggacaaggctgccaagaatctcgatcttgtctgtcgcagcagcagcagcagaagaaaggctagtgattgcgatgctgaggtgcgaaggctgatcgtcactccaaccagggaatactgtatgccgcctcaagtggagcgctccaaccgcgtcatccggcattaccacgagctgtcagatcgcttcttgagggttacttttacggacgagggtatgctgccgctgaaccctaacgcgctgaccctccgtgcggtgccctcgacgtcgacgcccagcacgtcccggcagatgacaagcgtctacaggcgtgtccagacggccctgacggaggggctcatcatgtgtggcaggaggtactcgttcctcgcgttctcagccagccagctgaagcagaagtcggcctggttcttcgcggaggacggagcgacaacggtggcaggcataaaggagtggatggggcagttcccgatcaggaaccccgcgaagcacgccgctcggatggggctgtgcttcacgtcttcgtatgcgacggtgacgatgcagcccggcgaggtggacgaggacctcgaggacgttacgcgcaacgggtacaacttctccgacgggatcggggtgatcacggaggacctcgcgctggaggtcgccgagatgctgccgctggcggacaggttcgccccgtccgcgtaccagatcaggtacgcggggttcaagggcgtcgtggctgtctcgccgccggggccgggacaagaagaccgtgggacgcggaggatgtcgcttcggcccagcatgaggaagttcgagtccacgcacaacgtgctggaagtggtgtcctggaccaagttccagccagcgttcttgaaccgccagatcataacgctgctcaccaccctgggcgttcccgacgactccttctggcagctgcaggaagcgatgctaggcaagctcaggcgggttttgtcggacagcgatgtggcgtacgaggtcgtgaccaactcttgccctgagcaaggaagcaccgcagggctgatgctgggcgctggc

SEQ ID NO: 116 - DNA, 669 bp, Zea Mays
aaaaagataaagaaacccggagccgtgggcctaatccccacctgtgtggcccatcaagccggcccagctgctgatcccttgcgcgcgtgcatcgcactaacgtgtggggtcctcgcatcatccggattccctttcgttcatggatgctcagtcaccggtgcgcgggcccaggatgccaggggggaatctcctcttcctcgtgcggcaccaattctgctgggcgccgttcttccgccgcgattctcgcagtttgcctcaacaacccccaccatgatcgggatcgatagcaactgcgcctgcccttgcgcagctcgttctcccacctcggcatcagaatcggatcgtaagcgcaactgaatcccgagatcaaccaatggtcgccaccatagattcctgtggccgagtctccttcttccccaacgacttttccgccatccgcgctccatgggctgaacggacctccggtggccacggagccgaacccgtagaccctgggaagcggatgcccttgcaccccaattgctgcatcaacctcgcgtgcatttaagtcaggcgcccctcttttctcctcggcactcgacgccgtgtctccctgtcccatggcaaacctctccggcggccgagctcctccatcgcgctgggcaccgacgctagggcgcatgccttctc

SEQ ID NO: 117 - DNA, 607 bp, Zea Mays
actaggcccctcctttgctcaacacctaattccactctcggcgacactaatctctcatttaattgcactaaaccggcccggagttcgtctgtccacggtggcaacgactaccggagataattcgcgatgttctaggtgattcaagacggtctagttcaatcgaatgggtctatgagcaatagaagccatgaaggaggctagaacatcacacataagggtatgaactaacgcgtagacgtctggccacggcgagctctctcacggcggcgttctgaccgatttggggggaatgagaaattgagaggctctggtggatgatctgaggcaagggttggtgcgttggatgcgtaaatacctagcggaactccctggggcattgatttatattgttcatcagtggtggcgcccaatttgaagaaatcgcgctggcggccgagagaggggtgagtcatcgcggcgatctaccgtggcggtcactgggtgatgagctacggcggtcactgggcagtcactacgactcgcgacgacgtggtaagatgtcctaaggcatggcgcaaccgcggtgaagggtgtacatcccggtgacggccgctcggccacgtcgccg

SEQ ID NO: 118 - DNA, 378 bp, Zea Mays
actttcgatcaattgttgtccaaatatatgaaaaagaaggtcggccccagtgaccggccagcaaagcgaccccgctcacccattcatgagcaacgtcaggtaaggccgattggaccaccccaccaatcagaagaaatgaaagctcatattgtacaattgagacctaacataactacatgaacacctccaccctcatatccacctatgccatatccatacacatacatacctccaccatatgttccaaatcaaatgtggggcatgccaccatattcatttgggatgccacagtaccccgcttgggggcaccccaaacgtctgtattcaataggttggcatcatcagtacaagaccgattgagcgtcgctcaatccggtc

SEQ ID NO: 119 - DNA, 1225 bp, Zea Mays
ccggcacagggatggtgtagggtcaatgcggcttccatccagcgctgagccactgatgcaacttggcattggtgctggcgtgctgtagatcagttttccgtatattttgtacactgccccctttgttgttcttaaacgtctcctatagcaaagtttgatggctttagtctttgtttagatggctaatttttctttatgttggaaagctaaaattcgaccagtacatacattcgagtggcatcgacccaaacaccttattagctgtgcctgcttattagtaccactgtatcagctagtagcccgtgcgttgacattagtcggatcaaacttgttagcaaagtaggaaacaactagcagcaatactagtagataaatggctactttggttgttgatgtccttgatgactttagaggattaatcagttgtccatggtagtttctttgtgattttattgacatgataagcattaagcaatctataaaaatgtttattgtaattgttgaacctatcagaagatctctacagaggacgcctttacaaaacctcaaccatggtcagcactcagcaactgaagtcttacctaaattatctttgatcctagctaattttctgttatgttgccatgcctgaatttcacaaatgaaagacttctcgtggcaaagtcaaggattgcaaaaccaaggcccagatttgtctagagaagacacaaccaattagaatgtgctgaagggtctcatcggcttggtcacacaagggacaggaatctgggtgaggaatgcctcgtttggcaagcttatctgcagtctaatcagcctactctgctttctttgagcggtctctcaagtccagaccttggagattaatttggaagagttgggctcctctccactgcaagttctttctttggcttgccaagaacactggggaattagaggacggctgctccagcagttcccctatttctttatcatctttcccccattttttcttccttctgtatacacattacccgttcaaactctatttcaacatcataatgattcaaactcatgccatacacaatcaataatattttaaattcgtggtttattattagtgaagcatacttgtgtgatatagaatataaagaaagcagaatttaggaacaagccaggttcaaaacagttgtaagataatccagaactgaagtaaacatattgcactatatgggaagaacttactgct

SEQ ID NO: 120 - DNA, 906 bp, Zea Mays
cctccctacaaccgctggtccgtgggaccaactggcagcctctccaccgcgtggacctgttactgtgcttcttcccctcccgcacgacgcgcgcgcgttcaaccgaacgtctctctcccctctgcaaactccgagtacgtaacaatccagctccaaagcttcatgtctcccacgcgggggtatatagggacccttcctatcgcctgctccactgcttgactcgaatttcgccgaagggaactaggaattcggtgagctgaaagatctggcggacctgccgccgtgagcccttagactcgacgccgttgtcggcaaatttgggggtgggtcgtgatctgctggtgcacctcggcgtagccagggaaaatttcggtactgcggtgacttggacctgtggtaattcactgccggacttcgaccaagcttcgaatccgccatacgccgaggacagggctgcccgctaccttcgtgctggtacgaacctcacccgatcacttgaaattacttccttgtcgtgtagatcccacccgattggagtttggacgcgtagtatcgaggttaggttgtgcacggcgatggcgccgctgtgggttcttgggtcatcttcaccgtcggtgttaggaggtgaggaagaaagactcagactgttagatccgtagcgggcggtcagatttgactccggtcccgatagcacctcgaccatggattcggagttcagcggccaggattaaaatgtgtcataccccttcgttcaaatgaaccataaccgttaatctggcatcctgtgtctgcgggtgagtgtgggggagagtgatggaccaatctaatccaggtcggtcattgatgatctaacggcagagaatcatcgatacccttttgctgtgcaaaacttgcataagggcccct

SEQ ID NO: 121 - DNA, 650 bp, Zea Mays
cacggagtcgcattggacaatggggtgtgtgcttgctgtctcggtgagggcgtctgtgcactgggtgcgggtgaattgctcgtcgtgtccacatcgccgccgcggatccgcctcgcaccgtgtccagcctcgtcgggtctccaattctaggtacggaaacctcagccatgtccgtctcgtttagcgcgatgtgtaggactagttaatcggcgtatggtgcgctggggcctgtgaatggcatcgccggcggtggttctcatcgccgccgtgcggtggggtattttggccggagggaagacgatgtttggtggtcggtcaatcaatggatcaacggtccagatcatgtcgcattgtaggaggtgtctaggccactggatcgatcatgggcggttcagattagagtggcatactgtttcaatacattaaaccctagccgtagatctctgatcgatcggatccgagcgaaacttgttgcattaaattctgggtcgacgatcctcgatcggacggtacctgttcctttccagttcacaccgctgcggatctaatcaggcgcgtagaattctgatctagcggtcagcatttcccgatacccgttcgcgggttagttttacacatgtgcccctatgtttttcctatatagaacccgc

SEQ ID NO: 122 - DNA, 493 bp, Zea Mays
cgcaaaggtgggaaaaggcttcatgcgggtgaggatgggcgtcacacgatcgaagcgagggctcaagccgcggaggaggttgagcacgaggcactcgttggtgatgggggccccgagggtgcgaagagtgtctgccatcgtcttcatctgacggcagtactcgtccacagagagatcgccctgagcaagctgacgaaaggcggtctcgaggtacagaatccgagtctggcggtggccgaggaactgagcctcaagggcaccctagatccggtgagcagtgtcgttcggtacgcgaacgatgtcctgaagttcggccgtgagggtgccatgaatctaggagagcaccacctcgtccatcagaagccaatcctctgacgggtcagagaccgctgagaggacgtggtcggcgagggcgtaccggcggagggtctgcaagacctgatcgcgccaccggggtactgagtggagtctggcgcaaggacgtcggtgacgg

SEQ ID NO: 123 - DNA, 516 bp, Zea Mays
actaaaaatcatcctctataatttattatctgatttctctgccctctggactatgcgcagaaatacagagaagaacagggaccactacgtaaaaacacagagactcagaactctatgctatggactgggggtttattttcaaataagctgagggctcatatgtaaacggtttcgggtgaaggggtatgaatggatcccagccgttggattagagactggcggtacagagtacaccgaccccatcccgaatcggtacgcaatcaagtccgttggatcgcgatccgatggatccagattcctctgcctcgtattaaatcctacgcgccagccatgcatcggacggtccagaataaccaatccaagcggtactctaaaaactgatccgaaccgttcatcatagatcgacggttaccgagacatccatgcactaccatgatccagtacgcacatcactggatggacgacgctcaatctacaactaacccgcgatggcacctaaacggacaggacggcgat

SEQ ID NO: 124 - DNA, 517 bp, Zea Mays
gtttttaaggtaggccgaatcaaagaactccttctttgtttcctgcaaacaaacaacctcacaaccagcatctcgaatagaacaacgaatagcattccacttggcggtagagttaatccctctaacgttgtgactcagcacagaccactccatgaagttaacagaaatgggattactcattgagtacaccagatgtttttgatgcatacccacaccagtgagtaaagcccgagtcagtccacaggccacaaaataacagaacattaaaacaggcacgcccaggtgccagcccagagtccaaaatacctgcaataaccaaaagaaaaaccgagtacacccaaaagataatggggcccacaccgaagcccagatcccccaccatccgcctaatggttgtcttgtttatcctcatcagatgaatcatcagttttttcatcggccaggttcttcctgtcaaccctccgcggcctaacaggtcccacagacgatttcttttgcttcagcctctgctcagaaa

SEQ ID NO: 125 - DNA, 1085 bp, Zea Mays
ggcattatagagtggagacctgattcaatagtaaggtggagcaccctctgaaggtagttgacacattaaagcaacagggcctcactagcgcacgactagtgtgcacttttatgcaccaccgggttcatccattgatggccagtcagaggccaatgtacaagcagtactccggtttcatgaccctgaccgccattcccctcaagccactcgcgctgacagagattgaagctcgagtcaaggccatcacgacgttgtcgtcgagattcttcatggtcgaggattctccctccctctttctaaagatatttcaagcagtttggtgagttctttttcccttgccttcttctgccccttctgccttttctgttggtaacggtcgagtagggttctgcaggggattaggcccatggttccttgtattccacccctttctatggatgctagcatcaaggtgaagcggaagcaggagagggaggcagaggtgcaggctacgatggggaaggaagagaagaaggttgcatgccttgctcatgtggagccgggaggagtttcactccctccactgacatggaggacatgacctccacaacttccagagggatggaagcccttgtgtcgatgggtggcctatcccattacaggatgctgaggctagctataacatcccgacctagaggagtgagcctacgttgggacctgttgtgcttgcggcatccacagtgcatcgcatagagggcactgagtccggtcatggagacgggggagtggctctagtggcatcacaccctcttgtgcccttggtgccatcgaggcactgctcggggaaggagctgatggctactctcccccacaccgcaggcggcgactacaccccatgcagtgcctttggcgacgtcgcaaaccccagttcccttcgtgtcgttgaggcgccctgacgggaaaaacccgaggtagttccccccttcgtgtcttctatggccgcgtagaaaaaggcaacctcttggaagtgctcctctcggtatatcaatctttcttgccttttattttatgtttccatctttgttccatgtctttcttctgacttc

SEQ ID NO: 126 - DNA, 637 bp, Zea Mays
agccaacaagtattcctagcgtccaagggtgctgaaacgagggtgaggagggcgagagcggacctggaggtggctgaccacgacggggtgactcatggcggcgtagacgaccaatttggaggaaaacccaaattctccagctatggtggctaatcggatatgagagttggtgtcctgggttcataacaacttggtgaagcagactggggcatcaatttatagaagctttgagtggcagctccgaatttggcagggaaacgctggcggccagagagagggggtaagttactagcgcgagctaccatggcggtcactagttaacgagctacaacggttactgttgagtccttgtggcttgcaacaatgtggtcaatcgactacggcatgacgcaatcgtggtgaacggcgatttccacggcgatgaccgtccggccacgtcgcagcgcaagtgggtacggtgactaggcagtaacagtgcctcgatctcatccccgggcaagatcttttcaccctgagtcattatccgcgcgccattgggcacaaatcacaccgccagcgaggatcacgatgcgggatcactggcggcggtgcactgaacttggcgatctgattcagttactgcaccatcgctcttttc

SEQ ID NO: 127 - DNA, 1029 bp, Zea Mays
aggatgggagaatttctgagactcaagcctcccacgttcgctggatctagcaatcccctcgatgcagacgactggctgcgcacgatcaagaggaaactggaagccatcggatgccccgaaaatcagcgggttcaattggctgctcatcaactttctgggatggccctagcatggtgggataccttcagcgaggccgtcagggacgctacctgggcagaatttgaaactgctttccgcgagcaccatgtaccctaggggatcattcaactcaaggaagaggaattccggaaactaactcaaggtggaagatctgtcagtgagtacgtgcacaagttcacagagttggctcgttacgcgcctgacgatgtcagcatcgaggccaggaagatggcccattttctaaaagggctaagaccagaactcaagaccatcctcgccagccaagatttcctcagcttctcgcacctctccaacaaagccatccaagtggaaagggcaaaagaggaagaaaaagggcacctcaagaggaaattctaggttctccgagctcaacagcaagaccgtcaccagagagctcgatccttcggacatccacccgagggaccaaacttcaatagaccagttggaccgactccgtcacgttacagccagcagagtcagagttcctttcaggccccctcggttgcaagcaaccaaccgccagcaaatgcctgttggcactgctgagaccctagtcacttcaagaataactgcccccagttgaaggcacccggacctacctactccaactctgtgaatggccccaagattccctcgggacctgcctccaaggcacccccctccaacagtcagcagagaaggacccagtaccagggcagagcacgagttaatcacgtcgactgttaggaggcccagcaagctccgggagtagtgctcggtgagttccttgttgaatttactcccgctactgtgctttttgattcaggagcatcccattcatttatagccactagttttgtggaaaaggat

SEQ ID NO: 128 - DNA, 439 bp, Zea Mays
taatgtaatgcaatgtaggatcaaggggtgggaggccgacttataatgagtcgatctcaattttgtaatgattcccccactgataaatgaaacctattctcgtgccaacctgttgttgcatattccgctcttgtgtctgacagttcgttagcatttagaggtaatgttcgagtgatgttattttgctacgaccaaaactctctcgagctatcggcctgtccttttgcgcccgacttagtgtgccaacccatacttttgttggcgtcctcttgacctctgaaccctagttcctatttttcctccgctgctccccaactttctaagttctcgagtccattcgcgttttgtcccagaaccgcgccgtttggaaaatcgtgatggcgcccaagaaaataaaacagagtgttgccaccctagacatccctccgatcgatcccaa

SEQ ID NO: 129 - DNA, 499 bp, Zea Mays
cgactcaatcacaacaaaaaacactaggaagaagcggaggaagtaaggagttgtgtcaccgatatttccctagaacacgattgtcgtccttcatctgagtagatattcatttcggaggcctgctcagtgctgtaatggagtactcatctgacagttgagttgtgacacagaagtattcgagagcaaatgataggatggtgtttatattggcgagtcaggagacctaaatagtcagggtgagtctagagaacgagagagctaaaagggcatgtgagatcaatggtcaggtaactctgtgtcatcaagatataacttcttaattaagttaaattgtgaaaattcttgtgttgcattcaaaaactcatgcactctaactacaacaaaagtttatctatctatccacaacagtgctacactgtgccacgaccatgtatacgatcgtgctgcaccatgccatgcctcaccttgcaacgccatgcctcatctcggtagaggcggc

SEQ ID NO: 130 - DNA, 521 bp, Zea Mays
tgaggcttatattactcgcaccgtggtgcctgttgtaggagtttacaagcacaacaggagaggggaagtccccaagtccctagagatgattgaggcaagtgccaatatctaagacagagtgagaaagcaagaactcgtctacatgtgtctccttttgtcaatggagggaccactccctatttatacaccaaggggggcgtccacagtgaagctgagtcttgtattcgaaggacagatgccctggcatctgacgtgatggcgaaccgtgtagtagatttgggcctgctcacttctcgtagagagccgaggctgagaccgaggggttgttcgtacgcttgagcccctgagggagaggccacctatgtcgtagtggttgtaaacaacaccggggtatgggccaaagactgcttacggggcacgtcatcgtccaggcgcgtgatgacatcgagattctctgtagcactcatcgagatcagagccctcgcttggttggtgcagaagtcttcccgcggtgctagccg

SEQ ID NO: 131 - DNA, 511 bp, Zea Mays
cgaggcacgctgtagagtgtcatggcgggagcggaggtcgtagtggcggagaggcgaagctcctcgagaagtagatcgttcttcaccttcgcaaaagtggcaaacggcttcatgcgggtgaggatgggcgtcatgcgatcgaaacgagggctcaaaccgtgtaggaggttgaacacgaggctctcatcggtgatgggggccccgagggtgcggagagtgtccgccatcgtcttcatctggtggcagtactcgtccacagagagatcgccttgagcaagctggcggaaaggtgtctcgagatatagaatccgagtctggcggttgccgagaaactgagcctcaagggcaccccagatccggtgagccgtatcgttgacacacgaacgatgccatgaagttcgaccgtgagggtgccatggatccaagaaagcaccacttcatccatcaggagccaatcctccgtcgggtaagggaccggggagaggacgtgctcggcgagggcgtagcggcg

SEQ ID NO: 132 - DNA, 609 bp, Zea Mays
gtaatagtacataccattatctccctgtgttgcacatgttccgccacgaaaccttgcgggaggaatggcgtaggatcaacatgatggtacgccattgctgagttctgcgttgcttctttagctggggtttggagaggatgagttggggatgctggttgcttcgatggtttcttcaatgaaccaggagaggagttaatcgtcgaatggggtttggtgaagagtgagagggtagtcaaaggtgaagagtcaccccttaatttcatttcctggaaaaactctgcgaaacatgtgtaaattgggggagatgatgggccacacggcagaaagcttgctggtaacttgaaccaggaggaaggtgacgattgccatttagcatttacaaatttgttatggaaggatgctgaaaatctgtgactagtaaggaagctggatcctagcccacgatggctacaggaaactttgtagtgacccgatttgttacatatatggcaagtgactagattgcggcaagaaaaggcggaatgtctttttcctaaacaacgggtgcacatacctgacaactgtcgccctctgatgtcgttggaccgaaccgagggaccattaacattc

SEQ ID NO: 133 - DNA, 641 bp, Zea Mays
ctccgcgccacgtttcacgccggctgctacgattcatgcacagcacaagtggataacaaaggagagtaaagatcttggcgcctggattgactcgggctcgatcacggctaagttcaccgtacccgcttgctcgtcgatcagtcgggatagacctcgccgtcgttggccgcttaccgctatgcgccacgtgctaaagcgttgtaccacatcgctgtaaatcgcgtcatgcatgcccggtgatcgccggagagccgccacggtgaaagccactaatctcgtgcgccagtgactcctttcttctccgaccgccaccgcgcccaacccaaattcacgcgccaccgctcaagcactctataaattgagcacaccgacgggtccgtagggtaggcacgcaccaagccaccaagccgtgcctccaattgttcaccagagctcgccaattccaaatttcccccaaatctgctttgcgccaccatgaaagagacctcgccgtggctagctcgtctcaggtccgctcataccctctgccctttcgtttcagtgttctggtgtatccctgatgctccccgaccccgccaattggacttggaccccttagatcgccgggaacgcgttcgattgtccgttgtgcccgctgccac

SEQ ID NO: 134 - DNA, 424 bp, Zea Mays
agaaagcgcgggggtctctgcgcaagagatactaggcacagtgaatagtaataggtggacggcgggttctaaatcctaaaaacgtaaggtttctttcataaagtgtacccgcgaaggggtatcagttgatctgcatcgttggacacgagatcgacggtgcaggatagatccatccatgcccgaaccggtatgcaataactgcccttggatccgagatccacggcgtagatttaaaataaccgaattattttctatgcgcccgatctagatcgaacggcgcggatgaatcctatgaataggtatgcaaccatctaatcccagccgacccccggccatccaacggcacacgtctgttttccctgagatctaatcgtagccgttgacaacgaatccgacggcgcgcatcacctttccccaatccccg

SEQ ID NO: 135 - DNA, 386 bp, Zea Mays
tacccttgcgtgcgccggaaaaccctagctttttcaaaccgctcgcccgctcgcctgcccacctttgttcttctgcttcgaagatctcgcccgcgtcaagcagaccgcgtgccgccgtcgatggtacgtagcaatgttttcctcctcatctgttgtgagtgcgtcgtccgccggtccgtcgaccgaggataccctgagcgatttggcggcgatggagttagagctgggccacacggtggagttcggcacctcgagaatttcctcggttcgcgtgcaggagatgcagcagctcgggtactttggtgatggtgttgggcgcgtccccggtgctgaggagatcccggagcctgattgcgaattagttgtgttcgaggcgttcttcatcg

SEQ ID NO: 136 - DNA, 713 bp, Zea Mays
ggtaaaaaatgatgtacattatgatctgaagcttcgaaagcatgttaataggctgttaaatttgcttatagtgtcaatgattatgtggggctaagttaaacgataatggcctagcatgtacccaccttatagtatcaatattgagttgacgaagcgatagatggcgttgacattgttgtagtacacaagcatacttcgggcgagggagttatgaagattttagaggagctgacgaactagcttgcatcagctaccccattagcaacaacacagtactcaacctcagcaatgaagcgggagacaatgggctaacgcttgaaggaccaaaccgtgtaggcagagatagaccgccaagtgtccaggcacccgacctatttagcatcggtatagacaaccaactcatgcatggaggagtgccaaagagctcgtagtcaacattaccttaaagatagtaaaggatctgcttgaccagacttatgccagtgcccctaggtacgggtacttgaggcgttacaacgaaactaggcatgtgcggagagggtaggctacggggcccaccttcaaggtaggctaggtcaacaagaccccctgaagggatggagtacatgatcgggaccctggctacgcatcaacctagggggtccctcaccacatatacctttgccatgcttccttcaataatagccctcactatcctgtaagcagggtccgat

SEQ ID NO: 137 - DNA, 637 bp, Zea Mays
ggcatgtagatgtgttcgagcgggtattctccttcagtcggcacaatgtcgaagaaaagcctaggagtgtccgagggaaggtgacgttgatgctgcttcccccgtccactaatactttctttaccctgctctcttggatcaccagattgacgaggagcgggtacttgctcggatgatcgaagttgagccattgatccgcccgggtaaaggtgatcgggtattctgaccatcgatagggggcgagggcactagtggttgccaccagtatctaccggtcgttgagcttctgttgtcttttgttctcctgcgacccgtgtccttcgaagatgacgttgacctccccatcgacgcgctggaatgctccacctcctcccccttcctgttgctgaggtcgccgaggctcgccgggcccccctcgcggtgggggaggtggtagaggttggaacggtcggccattcccgatggaatgtttgaagtctccatagttccgtaaggtgtggcgcatatccttgtgatattggcactgggcatcgaggatgtcgtccagtgtccgctcgcctccgcggggtgcacctcgggcatgagagacgggtgctccagcagcgtgaacctcttcacaaggcctcttctcccaacg

SEQ ID NO: 138 - DNA, 275 bp, Zea Mays
agagggagagggcaccacggcgaactcaatggcggggaagaggccatgaatccatgggcagagaagggagaacggcggtgagaaggtctcgggcgtgccggagtaactccgttgagccattccggccacggggaggggtcctaaggcgcgctaaggccttggctaacttcagcagaggcaggggcgacacagggacctactccggtgaactagaccgggctaaatcggccggccaccgcgcgagcacggtggaccgccgcgtccgagcactagcg

SEQ ID NO: 139 - DNA, 506 bp, Zea Mays
actccctagacccagcacttagctccggcaagctctgcgccgcccgccgagcagcccgagcactcgaccaccatggccagaccacccccggccatctccactcaatcccgtccctcgactagcttccctagagccccgtagagctccccgaagcaagaaaccggacgctacttcacagtagaagccgttccaccctcgtcagagttgttttccccgccggcacacgtggccacgactaaccggtaagccgtagttcaattactcgcgcccacaccttccctagcacctagtgaagctcactgactagtttaattgaactctaccgccctggataggccggagccctcgccgccgacgagctccccccgcctgcgcacgtggaccagcctactccgaccatcctcggcgacgatccgcacctcggcgtgactgtcacgacctcccctacaccgtcggccacctcactagagcaatctcgccatcggtaagcccctccgccctttcct

SEQ ID NO: 140 - DNA, 329 bp, Zea Mays
agagggtagagtggaccggagctatcacatcggacgatctctctccgagagtgaaggtccttcacaaagcaaccaagaggatcaaattccacagaacaattattgtcagaggtaaactgtcgaacagaaatgaggttcttaataagacttggggaaacaagaacattattaagacgaagagaatctgtaagaacagcagagccagtggatgtaactggaatagaattcccattaccgacaataatagaggagggaaaagggtgttgtaaaggagtggaatgggagagagtaccggcatcagaggacatgtgggtggttgccccggagtt

SEQ ID NO: 141 - DNA, 389 bp, Zea Mays
ctctgaggagtagccgaggaagacgcatagagatgaacgaggagcgagtttatgggatgtagtggagaacatgtttgggtaacaagcacaaccaaaaactttgaggtgttcataggaaggtgtagtggtgtgaaggaggaagaaaggggtggaggaggcgagggttttggtggggagccggttgacaaggtatgtggcagtgtggagtgcctcaacccagtagaccggaggaagactcgcctgaaataagagtgagcgcaagatgttattaatggtacgaagagagcgctcagctttgccattttgctgggatgtataagggcacgacaagggaagggcaacaccgttggaaagaaagaacgtgcgggccgaggaattatcaaattcac

SEQ ID NO: 142 - DNA, 532 bp, Zea Mays
gcaggctgttggagtctcctgatcgtggaggagtttggtcactagggcatgctcttcccggtatgctgtcattcacttatttccttcttcctctcccctattcgatgcttgtaattgtgttgattttgttagcgtgtccgtttcgggaaagacggtgaagatcgtggccctcgcggcgaagggggcgcatcggcctctcaagtcctcatccatgtggcatctgctagggtgattcctccagtcgtcccagtcggctcacccacggttgcggcgtccgctactcttgacacaggcacatcattgacgcccgccacccaggaggcgccaagggcgcttgttgctgatgtccttgtcctagaggtgcacgcgtccttgctcgacctcgaggtggtccctgtggccatagtttccgctaccggtgcccctcccatggtggatacggcggttgcctccatgctgcccccactgccactgccattgctgccggccttgctgcctccgggtgctgcagtggcggccgatgcagctgggg

SEQ ID NO: 143 - DNA, 480 bp, Zea Mays
ccttatccacctcaaactcacccctctctcagataggtggttgtggtggcggtgaagtagtcctctattgtgcctaaggctaaccctctaaatagtaaacagggacacaaggatgtgtcgattgttaaactagtatagcatcttctggtggtgactaggcggaggtgcatctaaacctatccgaatggaactacctctcccaaccctcttacttcacgctatggtggttgctacaacaatcatctcctactaattgcgatcaagcctattgtgcttctcgtgcatcaactcgataattatgctcttgcccttattgttcctagaagtatgtaatgactcttgctatttgtccccacctaatggaggtggtccaagtctcttggtctagccatagtagttatctaattgactaaccgccgaagcactaaccaactataatgactaaactaacagaaaattcatcactaaaactcacttctc

SEQ ID NO: 144 - DNA, 667 bp, Zea Mays
taccaaggtcctcaacaataggttggctcagtgcatcaccaaagtgattagctcatgtcaattcggttttatcaaaggcagatacatcatggattgtgttgtagccctaaatgaagttattcatgaggttaaaagaaataagcagagtggtcttattttcaaagtggacattgaaaagccatacgataaggtaaattagcacttcttgcacaacatgcttgagaaaaaggttttggagaaatatggtgtgattgggtcatgagaacagtgagagggggtaaagtagctatcaaaactaataacacaattgggccctatttcacaatgcacataggtgtcagacaggggccctttcccccttgctcttcaacattgtagcggacaggttagcttgcttgattataaaagcttaggatgaaggtctcattaaaggtttgattccccatgtcattagggatggttgtgcctccttgcaatatgaagacaataccatttttcttctacaaggcagtctggaaggagctcacaatttgaaattcatcttgtgcctttttgaacacttgtccgggctgaaaatcaatttttacaagagtgaagtttactgtttcggtaatgctagggagcctaaagatttgtatgcacaaatatttacttgccctaatatgga

SEQ ID NO: 145 - DNA, 605 bp, Zea Mays
acttggtcagatcagattacggcgagcagtatgacaccaccggtgccggcgatgcaaggaataacagtcgtgccccaccagtagcagcatccctcgacagacaaggcaacaacgcacccggggtccagacccaggggcacccaccttttgcttaacaagggagctcttgttgtcgaggcgcttgaggacgaagtcggcgacctccttgacgatgctggcgtcggaggcacgcaggagctcgcagatctcctcgagcttgtagacgggcgcgaccttgtcgtcgtccgccgtgacgccgtccaccatccgcgagcgccagtacgactccaccgcccgccggctctgatccatggctgctgccccgatcggagggggaccgaacccaccacggtcgcggccgaatcggagggctggccgggatctgggattgggatgggaagggggtgggggcgtggaccgggtccgctcgtcgacgaggagaggcgtggagggagggttgcgggtgagccgagcggcacgggcacgtgccgccggaggaacgagggaggtggaccgtggaaggttctagagaatggcgcgcgggtctgcctgccttttgcccttct

SEQ ID NO: 146 - DNA, 342 bp, Zea Mays
ccgcacccttcctccgctccggtgagtcccgccctcccctatctgttgagttctagtccaattgttgtagctcttgagcttcaccgtgccctcgcgagcacaacacacccatcctctttccctattacgcccgatagcctcaccggcgatcccaccgtcgtgggcgcccaccacctcgccgtggaccggccgtcccaagcgccctccggccaaattggccccaccatcgtaatcccctaccccgccatgccttgccaccactccgtcatcacagaaccgggaccccggcggagaaccgccgtggacctcaccggcggtcgggcttcgaccggttcgcccccc

SEQ ID NO: 147 - DNA, 474 bp, Zea Mays
tgacggtgtcctgtgtgcatgagtttgtgtactgatgaactttatcaaccaggccctcgtctaaaaacttaattccgaatccatcccagcacacgcacgtttctcttctgcccggcgcgtgacgcgtctccaaaaaaaaaattccccagctccttcgccaccggcgaaccctggcttcccgtcctcccacggttcctccgcatcgtggtaagatttgccccgccttccttttcttcctctccaccagcgcgaactccccacctaaccctttttcttccttggtcttcacctagctacatggcggattcgcgaggaatagcttccaagagcgctgacaaggatagcacctccactcgcccggcgcgcctccgcgtcatgcgccaggaagtcaaggattttttgacgagtcctcgccgtagccgccccaagaagcagccgcctccgcctcatcccccgccgccactggaggagaag

SEQ ID NO: 148 - DNA, 476 bp, Zea Mays
ggctgctgctgcacctgctgcattgctgctagggtctgaccagttgcttggactgcctgagtttgcatcatgaacatctgctcaactgtcatcgggcgtggcagtggcaactgctgctgctgagctacctcttcctggggtgcctgctgttccggctgagcatgccttgcacctctgtgcctattctcagacatctgtagaaagcacacacacatcagatctgactctgtagtctttcagcataagaaaagatatacgaaaatcttcataacactgaacaattgatcatcttcactgacatcctcccagataaagaggaaagtggaaataaagggattacccaactaaatacatgacttttttgataactacaccaagttgcaggggatacccacaccttgatgacaatcattacaaagatccaatttcattacatgttcatcatgacaagcattccaacatatgataagaaaact

SEQ ID NO: 149 - DNA, 407 bp, Zea Mays
aagaatttgcgcaggttatctatcttccacgaatgctctaggtcttcgccggatggtgaggtgagcctataagcattcggcgatgtcttggttttgatgatgtagggcccctcccacttgggttcaagcttgccccgagactctgttctgatggttcttgtgagtactaagtctccttctttgaactctatttggatgtctgtgttgtcgcgccatgccttagtatgtgcttgatatttgttcagtgtttccagagcgaggagacgatctccgtcgataaggtctttggaggttagctcatcgacgtcaggggtggctgttgggcttgttcgtggggatccttgctttagctcttgtggtgtcattgcttcggatccgtacatcaagcggaatggtgtgaatcccgt

SEQ ID NO: 150 - DNA, 438 bp, Zea Mays
ctgagtgcgacgggcttggtggggggagcccgtgtgtgtctggactggacgcgagctattgcccaagtattaggtctcggtcagtcgggtgtcgagttggtccggtccgttgccccggaccttacaggcttacacacgcaaccactgggagattgcagatgctgcaagtatgtcactagaaatggcacgaaatgacgagtccacttcgttacgttagcactcacgactccctctcagctgtggcctctagctctagggcatcaagcaagtacacatcaaccgtccagaaactgcgcgcttgttttgctttggttgcaatttctgcccgactctgataaccggccgattggagtaaacagggggaaaaaatggagaatcaagtactcgactcaagtatcgcgaggtcaagttgcccccatataattctgcaccagcagg

SEQ ID NO: 151 - DNA, 384 bp, Zea Mays
gggggttcaggcagtttcagtaaaggaaaactcacctctcaagggacaccaagaagaaagggcaggtgtcaaaactgtggcatatatggacactgggctcaggactgtaaacgtccaaaaagggataagaaggagcagaagcaactcgaggcaaatgttgctgttgggactgaaaatgcagcactcctgctagctgaagttgaacagataagaaatgtgtcaccacagtttgttcatctgacagagaacaaggtggtgcctgtgatttgtgctgatgatgagtgggtactggatactggagctagtaaccacatgacaggtacttgatctgctctatcatatcttgatgatactgtcagagggactgtgagatttgaagatggc

SEQ ID NO: 152 - DNA, 517 bp, Zea Mays
gcggtagctttctgaagctaggggtgccgacgtccttatagagatcctggacagcgcgccctctgctagttttctggctaggcgacaaataaccccaccagtttgccatacatctccagcccccaagggtgctccggttcatgaggatgctccagccctcgagggtgcagctgaagatgatctagcccaagagggtcctaggactggttctcccttagctgtctccatggacgttcatgttgggtcgccgctggttctatcttaggaagctgtggtgatgggttctagttttcccattagcccaactggcccgatcaccttagaggtcggtggtcctggcaccgaggattcgatgggtactcctggagctaagatcccattgggcgtcgcactgagcatggactacactcttcctttggtgtctaaccctacccctaatgttgcttctgtcattgcttttccgtctgatagtatctcgatgcctccagccctgggatttcccttgttcctttccaac

SEQ ID NO: 153 - DNA, 683 bp, Zea Mays
ctggagtctcccaaagggtgagagacagactcatttcgagatgtcagctagcatggacggcgaggagatggatgttgtgctcaacttgttggctggggagtcatctgagtcgacacatgccgagccaatggctatcatggatgggcaagaacttgttggaatggagacgacccagaaacccgaagaggtccgtccaaagcgtccacgccgagtgagtcggcctaccgcacccgttgaagagaaaagtaagaagaggcggcttcggcgactgtcgagcttggatcatggcgcgggtccttcggtgccggtttgcgatgaagtgccggcagaggtccttcctgaggttgatcccaatggttgcgcccatgctgaagttgatcccaatgggtgtggccgccttgaagttgatcccaatgggtgtgactgtgcaccggctgttgtccgtatatatgatgaagatgaagaagagaaagaagaagaagtcccgctgattcgtaagaacagacggcattacagaggtagtaagggggatagtgacattccttctctagctctgtcagcccttgtcacccttcaggaactgtcaataacggattttgatcaggcccttgaggaggtcgtccctgaggatatgctatcggagccgactgctgatgacatgatggctatttgttcggaaattc

SEQ ID NO: 154 - DNA, 310 bp, Zea Mays
ggggctggcatttaggtttgtgtggcccaccacattgcagggaccgcctcacctcgacccatgttgtgcgcacttttgtctcgatggtctttgtcttgtggtcttcgtctctgatccccccaatgtccttactgacaattcggccactccttgactccagcataaggggagtgttgtcagtcttcgtgcttccttgggaccatctagagtgaatgtgtcttcacttggtggttaggcctttgcaacaaactagtccaaatttgcctctggtaattgcatcttcttaggccaagggagccctcgattcttg

SEQ ID NO: 155 - DNA, 508 bp, Zea Mays
agggctggaatccaaccaatatgcacggtctaacccacaccgtccaatggctatccgacggtagaccagtcatcatcttcatccggcaccaggccacgcacgagcaagaacagccgcgacggccccacgccgacgaccggttgcaacagcaacccggccacccccgacccgccagacaattctataacgtagaaggaagggtcgcgaatccgaggggaaagttcttaccagtgctggcggcgcaccgagctccgcccacgacgcccaacgattccgcggcggcccgaggtcgacggtgagcaattcaaagctgccccggtggttgaatccgctcggcgctctcacgtgtgaaccccaagtactatggcggagctccccgccacgacttctaggctccaacggcgatgagattgaggatgggctgtagcggcgctctacccagatttgcgttcactggtggcgaggaaagagtatgtggtgacaggggcacacgagcacttcggcggcc

SEQ ID NO: 156 - DNA, 531 bp, Zea Mays
gctgctagtggaagttgtctctgactcggttctagtcacacagctacacgccggtgcgccatggtcccaatcatactcctctcgtcgccttatctcatcctcgtgcaagcgatcgcgcgaagcattgatgttgcttcgcgtgtctcaccggctgttgatggcatggcgcaggtcgttcagcgggtgagcgagggacagaaggtgatttgccacctaggtgagcgtttgcctatagccctccgtgtatggggtgcgcggtagaccattagcgatctgtgccaggacccctccgacctcgctcgttgtattcagtgcccgagcgaagtcatggaataggttctgggtgagaagcgggttttcgtgagccgggcgtcttgctcggctggttcccgctcgcgttcctgagcatggtggcgatcatggcagtgagaattgtgacgctctcggtgtgttctttcgtcggggttctcccctgcctcagaagcttcatcccgagagacaggttgggctagatcacgctctccagcttca

SEQ ID NO: 157 - DNA, 569 bp, Zea Mays
caaataaggtaaatatgataaataagtttggttgaatcgattgtgaaaggttcaattggccataacccttcatctatataaaaggcaagatctgaactcattacaagtcggtttaccgagttaagtccaaaaattttgctaacaaatcccataagaaacgaataatcctaactgattttattcgaaccgtccgcgcggtcaattttgatgatcaacaccacctgagcacccctcgccatgcccgtgtacttccagaaaagatgaaacttgcaaattgttttcggtagcagttaagtttcattgattaaaaaaatccgcgtgtgacgcagtgtatctgcaggtttcaatgcaacaaggggcgaaagacgtgcacgaatgctattattgcatttcggcagttcctactccggctagcctgtagtgggagcaagcggcatggcgagatctagaaaggaccggaaggaagacaagtgaacgcgcggcagtgtggttgtgaggatggaatgatgggtggttaccaaacctactccttgactaggagcaacatcggcgacacatgctatcattcg

SEQ ID NO: 158 - DNA, 432 bp, Zea Mays
atagttgaatactttaatcaaatagagctaagatcaagttaaatacacatgttcctagtggtatgtgcatcctttagcaccacaactttattctccaaatctctcgtccttgattcttcttctcgatgtcttggactttatcgaaagttgtaatgccaattggatttttctccgaaagtgcatggacactgataaagcctttcaccaggagtgttctagatattgtattttccacagggaagcggtaggctagtgttaaactaaccaactcaaactagaaattaatttataacttggtaaatgtacacactagtaattagacggggataaatgcaatccaaagacaagaaagtaggtgtacgaggaagaaacaaattgggaccctatggttggtagctaggtaatttgcctagtgtcacacccggttttaag

SEQ ID NO: 159 - DNA, 534 bp, Zea Mays
ccatgtgaaccgttatccacgacttcgggccatcagatcaagaccgggcggttcggattcgacacgaggggtttagtctcctctagttagctaggggtggcgctgtccgtggacacagcggcgcagtcaccggaggcgaggcagaccggggcttctatggcgctaggggttggtctgggtagccggagaggttggggaggactcggcaagcactatggcgaggtctgggtgccgagaataggactaagacgggcagacgacggagggggaccctcgggcgaacccaaggttactctagcaagcaatacccatcgcggtgagggttaatccggcgctctgtggtcggcataggctccggggagggggtgggagtgctctaggcctatgttcgggctcagggaggggttgtagtggtcggacgccgtgaagatgctacggcccggcgaggggcactttcgacgagctgaaatcccccacgtatagcagaattggcgcaaaagagggacatggaaatgtcacttacccagatacgat

SEQ ID NO: 160 - DNA, 771 bp, Zea Mays
atcaatatcacgcacgtacgtgagcaaagtcgtcaaatcatcataacgacatgttgctgttcttgcctatcactacgacgtatagtaaagggcttgttattcacatttgtgacctggtccaagttagagcaagacccaactatatatacaaagaacaccaaacacctcaaggatgctctctctcttggccacccctttcatatgtgtaattgttagtttgtttgacttgtgttttatcttgttattgtttgtgttctttgattcacaaatagggattagctttatactcaatcggattacgcacggttgataaccatggtaacaagcagggtaaggtagtagcagtcagcagcccgcgaggaggacagtttttatttggtgtcaggcattttaatgaatccctgacccaacgtcgtacactcgccggaagttaatcaccactaactacactcccgggccggggggcccagctagcagacctgacctggatgtcgatctcatcctcatctctccccggcccggctgcatgctacacaggaggccggccacacgcaaaaccactgtatggctgcactgcagcaggccgccaagagcttgtagcagcagatgcatgcatgatgcatcgatcaatcaacagcttggactattatatataacccggcctatcacgtacagtaccactaccacacttgacactgcagctaccttcgctcgtcttgcattgtgtgtacgccaccccagaccagcagccatcttctctctctctctctg

SEQ ID NO: 161 - DNA, 514 bp, Zea Mays
gttatttattaacatcgttaggggctcttttgtaaagttgtcggccgaaagggtacaggccaaccggggccgctcgatgaaggatcaagggcccagattagacagtgaactggtattctatcctggccatcagatccaggatctatggttctgaatccattcctgcgtgattggatcgtctccatccgatccgattacaacggctcagatctacctactgaaacgctgcccattattctaatcctagccgcccaaagccaatcggacgaccagggggtttccttcaccatccgacggccaagcacggtggcgcgttcagcccacggcggatccccatctgctcacggccacccaccggaccacccgagctccaaaaccaaattgaaccggtgcaacgcggacctaggcgcatggcgaaacagaaaactgagcattaccgagggttgggtggcggagcaaagctgtcctcgacatcaggcgggttcgcggcgacgcttaagctacggcgagcgat

SEQ ID NO: 162 - DNA, 617 bp, Zea Mays
cgttggatgtggccgtggcggagacttcgccgcgtgtggagggtgctgaggatcttcctggtacgagtactgggtgtaggcagcgaagggtggtgggaaaacagtgtgttggtgaatttttgcggagcggcaggcgccgtcgcatggggatggagcgtggccgacttcgagtagacggggctggtaaacgataattgttgtcttcgccgaacggggccggcataggcgaaggggatcttcgggagctttttgagggtgaggaattgaggataatgctgtttaattacagggagatgggtatcattccgaaggtttagccgatgtgataggcgatgcccttgtcgtgtgtatgttattgtaatggtgatgtggcctgttggccgtattcgtacacttgtattgttccggtgcgtacgtgggcggctttgtgcggagtgtctttgaaatgatagacttcgattaacgttattccggctgcgcccttaagtaattgttgcgatgtcttttgaataaaagacttcgattaacgctcctgttgtgctgttccagctgcacccttaggcgacatttgcttggaatgtcttataaagaaaagacttcgaataacgctcttgttg

SEQ ID NO: 163 - DNA, 434 bp, Zea Mays
cgaagggttacgcttaaatttgggccgtgagatctgaggtggagggttcggattaatccacgcacgtgccgaaccggtacgcgatatgggccgcaggatcagagagcaatggcttggattcaattattctatatccattcgtgttcgcgggatcagaatccgacggccagggcacacacagggattggtactgttttgatctaatctgcgccgtgcacgaggaaatcgacgatcggaaaacctttcccctccgcggacagaggaacgtggcggcgcgcgtcgcccgcggcggaggacatcgccggaatccggttcatgtcgatacggcgatccaaactcgatggggcttctgctacacaatgctatacgctagaagaacaggacgattggaaacttaccccgcaatccctcgtcaacagtcacgacgacggcaa

SEQ ID NO: 164 - DNA, 712 bp, Zea Mays
gcaagcaagtaggcaagtaggtggtaccttctgttgacgtttcagaggaaaggcagtagctttaaccatggatgggccgggcactgatagcagcaccctgggacataacctgaaaccacaaacgtaccctagatttgattcccctctattatcgctgtttcactatatatttaatactgccacttgaatgtgacgaaggaaatgtttccccatggcatcaaggaggggcgcgcggcactctcttgcttgtacaaggattcatctgcaatggtgtaaaaggtgactttttacaactactatcatggacgcggaagtttacctgcaggtagcaagaaagaaagacgagcagcctgcagccaatccctactgaaaagctatcgagttatggtgtgctggagcaaagtacaggcgttgcgatttacactttttggtgaatgcaacgggggacaagcggatgaacagttgaagctgcaaacagtggcagggaccagggagtgtctagggactactaactcaaggaatgatacctatctaccagggagggtacatgcacgcaaatgcattcacccatggcagcatcagcttgggcaggtcagcttttcccctctctctctttctctccgggccgccgtgccgtgaccgtgattattccattccattccatgtccatccgggtcgtcctcttcctctccagccttttgctcctgggccg

SEQ ID NO: 165 - DNA, 361 bp, Zea Mays
tgtacaaataagccgggtatgccctgtctttcaaaggctaaatattcttgaagacaaagtcagtgaccacggcttcagcagtcaaacctttgtctttcaatgagcagatatcagcaagcaacaccttcgcctctgttacctctgaaggggttggagattctacctagctcggagtacggacatctagctgcctccccgaccgagggcgaagggacttgcagtgattctccatgatgaaccactcgaggagccaccccttgatgctatccttcagtgggatgtcgaggtactctgatttcctcccgcgacgcagctccagactggcgccaccaaaaagttggtgctgtcccccagccatccc

SEQ ID NO: 166 - DNA, 306 bp, Zea Mays
tgacaatcctacgccaccttccgttcatattgaggatccagcatctatacatgatcgaggaatccgtgaaacagatgacatgacaaaaaatgacaaacaatacaatcctgacaagatggtgcacgcatccgatggtgaagcatggaaacactttgatgccattcactgtgagaaagccgaagagactcataatgtacgtgttgcgctggccatagatgggttcaatccctatggaatgagcgctgccccatacacatgttggcccatgtttgttatcccaatcaatctccccccggtgtatgcttt

SEQ ID NO: 167 - DNA, 519 bp, Zea Mays
ctttcgtatggtcgtgcgtagccgtactcctggtatggtgtcgtcctttcccgctgctcaggctcttgtagcgagtccatcgttgatatcttcgtaatgggttccacagatcagtctcaaagtgtggtcatgcggggcatggcttctcctgtcgtatgggcccttcgtcacatgtcagcgtgcacaggcacacgctcggtatggggtgttgtttcgtccttctgatgtacaggtcattgtagagaccctagtgcccattcaatgtgttgtgcgcatatccagatgtggcttgatggtgacgcgtcccatcgtagctaacatggattagtagtgcttgacttagatctcttcctcgcctagttgctcgatagagaatcggtccgccaaagttgattggtggatagttggtcgtcagagttggtcatgagagggttggtcatcatcgaagagttgctcatcactggagagttggtcatcatcgaagatttggtcatcatcgaagatttggtcatcaccgaa

SEQ ID NO: 168 - DNA, 627 bp, Zea Mays
gttgaaacgagagcaaggaagacaggaacgaacctgtagagagctagccacggtgagctcactcacggcggagttttgactgatttgggggaacttcaaaattggagcgctctggtggacgatctgaggcacgggctggtgcgttgggtgcgtgactacctagcggagctcacgacatgctcaatttatagggcccgagggcggtggctcttgaatttggaatggcgcgttggcggctggagagaggggagagcactggcgcaagagatgcgtggctttcaccggggcaaggtcaccggcgatgaacggacacgccaagatgagttactgcgacgtggtagagcacctaggcacgtggcaaccgatcgacaggcagccaactccggtgagcttatctggaccgatcgtaaggcaagggggtacggcggccagccccaggtctcattcgtggcgaagatcttttaccctgaagcgttatctgaccactaacggcatgaatcgcgtcaccagcgtgaatccaggcgtaggggtcaccggtggcaaggtgcactgcacctgtgatctcattcagtttactgtaccatggtgatcactatcagagcgtctgacagagccatttgcagggca

SEQ ID NO: 169 - DNA, 363 bp, Zea Mays
gtggatttttagcatgtatgatcggtttggttctacgttgttctcatggattgtttctggactacatatgtttgtgatatgccgatgttgaccagagttcatatgtctgttgtcttgcccgttacatgctctaatgcttggccttccccttcataggtgagtgttggtggggtctacgagaacacgctcatcgctttttcttctcagcaattcggttagttggcgcgtttcctcacacgtgcctcatgaattttaagggtgtttcattggttcagttctagttacgctcctatactaagtgtgaactgtgtagatctgtgaggtggtgttgtgcggagtctatatatgcttctagcaccttct

SEQ ID NO: 170 - DNA, 552 bp, Zea Mays
agaggatagcctaggcacaggtagggctttatatacacgcggcgcaacaggtgttccagggaatcgatgtcggagtccgcggatctcgtcggccagctcggccatgctgtttccaaacaggaaaagaagatctacagtggccgaggaggttcgggtgacgatctaggcccacgggacagcggcagtggtgctagagtgcacacgtgagcggctgtcggtggggcaacacgtaagcgatagcacagaactgcctgcgcgcgagtttgtttgaaacgcgggtccaccctggcagatgtcgtgcgcgcgcgtgatagggagaaatgggttgcggtggctgcagagaaatgaagtttgggccgagggcgaggtggtgggttgggccagtcatccgcttgtagtgggtcaaaggagttagagaatataggtggtttgtgactcataaactcccggtgcttatccctgggcggaggtggtggaggtggaggtggaggtggtagttgctgtcgttcctgccattcttggcgcatctcttggcgttcttgcctcatttcc

SEQ ID NO: 171 - DNA, 578 bp, Zea Mays
cttcgactgcgcctcccgccacatagaaccagtaatcatgccagttgccccacttgttgcgggcacagggaactagctccacaacttccgccaaagtcttcccagtcctcggcgtaaaggtgcatgacccaaactgtgcaatcttgttccgaactttcctcttctgccagtgtaaacaataattcttggcgaagacctccacggagggctgaccgccatacaaagtcactgcccacacatacttcgccaaagccacaacggcgttaggtgtcaactgatgaatctgcacttcatacctctgcaacacctccgccacaaaacgatgcgcaggtaaccggaggccagcagtaaaacatgcctcgaacaccaccaactcaccctccggctccggaatctcttccgcccccggaactcgtccaactccactcccaaagtaccccaactcctgcatgtcttgcacgcgggccgaggagatcctcgaaacaccaaattccaccatgtggcccgggtgcaactccaccgccaccaaatcactgaaagtatcttcggacgacggttcgaccaatggcgtactcgca

SEQ ID NO: 172 - DNA, 630 bp, Zea Mays
ctggactcccattgattctaacccgctatctttcttccccttggaacagtggtcggcggcgagattagggctgtgtggcttactggcagaggtaaggttcctagagagtggcttgcgaggtcggggatgtcacgagggtcatgttaatggtcgggtcacggtcggaggtggtcggagtcactcagaccatgcaggcgacggagctcaacgacgacgtgtgctccggttgaacgtcagtggaagaactcgattcaactggtaggggatattcattggatggtgggctggtgacagtgcgattttttagaggaatcaaacggaggtgggatgtggaggtcggcgcacgttcatcggcggagcgaccaactccggtgagcggtggcaatggctctggcgtggtagcaagctaggaagattgctaaggcgttcactagagcttagggaacatgactgtatgaggctgtggtagtgtggtttccttgggccatggtggccgtgtgtcggggagagttgtgggcggtggcgtgaccaattctggtgagaatcccagcgagggtgacgatggtcaagtgtgggcgcttgggtaacgtttagtcgaggccgtggcttggcttttataggcgcaacatg

SEQ ID NO: 173 - DNA, 521 bp, Zea Mays
cgcttctacgtcaaccaagactctgatgcggcgacaagtgtcggctcttatggttcatcagctccctctgctgctgctgctgctgctggtccgaagccgcttccggagatcaagggtgaactgagaaggctcatgttctactgctagtccttgaccacgggaaaccctttcctgaacaaggctttgctcttctgaagactgaacaaggctgctgcattatttattatgaacaagcctgaacaaggctgcattatactagcttaacgtttgtagtttgcattttatttcatataaacgatccaagtctttgccgaacttgattattatattcagttattcagcattcacgggacgctagagggaaaaatcgaaattttgaaacgctttggtgaaccattttatattcagttaagcattccaattaaggcattgttcggttattttaatttcatgcgtattggtgtatatttggatggaatttgacttattatggatttaaactgattcaataccacccaatc

SEQ ID NO: 174 - DNA, 380 bp, Zea Mays
caggggctcaagcgcaaatatttctaagacacagtcgataagggttcatggactgcgtgttaaaatccagagaacctagggtctttttaataatttactcggccgaaggggtatggatgggtctcagccgttggattagaaaccaagggcccagatgaaatcttcactttactgaaccggtatctgatgagattgatgatcaagggttgcgatctattatgtgcacgatttgatcttgcccatacatcgacaatccaacagccgggacaagtcctccccagtcggtacacagcctctaatctcagtcgttggccgccagatcaatagtccccatgattaccccctctttcctgctctccgaccaacccgagacgacggca

SEQ ID NO: 175 - DNA, 564 bp, Zea Mays
caacatgtaacaaactcaggagatccataacaaacaacatagggatcttgccaggcgtgcgacagctggcctcgtcctcccaggtgtataaatctgaggggcctgtatcgccctcgcgttcatccatcgaaaccatcgagagagaacatcgtcggtgtcatgcagcgggagaggaagaggagaaagagagccaccgcggacaaactacctacatgtcgttgctagagccttgacatgtggccctgggaattctcttcggtgcactaatcatctacggggcgaatccagagttctgtctgttaagggggtcacgaattcttcgccggagttcatcgtgaccgtggtaccaccattcgtcgtcgcgaagcacctgcatcatccgaccgccgatgagtagcccttgattgagttcgttggttacttctcttcatatagcacctatcgaacttcgcaatggggcattaggacttgaaagcactgggctctagcgatgatccgttgcggcctatgggccacgccaccgccaccgccgatgcgtgagggagatgggttcctggtcgtaga

SEQ ID NO: 176 - DNA, 717 bp, Zea Mays
tttttggtggaaaaaggtgccttacaaccttaacctatgtttggaaagttctctcgtgcaatttggctaaatttcccatggtctttattttattttgagaaatgatgtggcataatgatgtgtgatgttttacttgagtggacataaacaccatctcggtataccttgaataaagggattataggaaacctggtatcacaaaaggtcattagctagcccaataacgtcttcatcaactagttgtactcgaataccctctcgtgtgattacaatgccctcaatatcatagaaacgtcatttgaggtttaaaaggcaatctattgttttgaattctttatattccaactttttagcaaatgtatggtggaaaaaaattgccttacaaccttaacctatgtatggacagttcactcacgcaatttggctaaattttccatggtctttattttattttattttgagaaatgatgtggcataatgatgtgcggtgttttacttgagtggacataaacaccatctaggtatgccttgaatagagaggattataggaaacctggtatcacaaaaggtcattatctagcccaacaatgtcttcatccactagttgtactctaataccctctcgtccgaatacaatgcccttgatatcagggaaacatcatttgtggtttaaaagttgatctattgtattgaattatttatattccaactttttat

SEQ ID NO: 177 - DNA, 1035 bp, Zea Mays
gtcgggggatggggtccactcgtcatcctcttcgccgcactatacgccatctgacaccaccgggtggggtcactttgtcagctccaacctcttaccaaaatcaccgtgaagctgcgacgggttgttgcgacaaaccgggatcaccagctagccatggccgtctctgatgcgttcgggggctcggggtatatagaccaccctgggtataagaatctagggcgccgccttgcagtttcgatgccctggtccgcgtcgatggcctcgccatggccatgagttagtaggagagagagtacatgagtgttgccgccgggagagtgctcaacggagtcgcgtactggacgttcagggacttccctgtgcgtgaggtgtggagcggaccgagaccctcgccgggcattgaaggctgcgcgggcgccgtcgtccggccgtgttgtggaccagagcaagctcggagagcttccctactgctttaatctccagtaataatgccactctcgagttatgcattgcctgcgcctactttttcgcccagctgtgaccgttggggagctcggcctcgatgggtgcttctcgtcgatgccgccgtcgtggtctgcatggccaccagtcccacgccaccgtctgttggggttgtgaggtagaagagggctgctagccatcggatctgtgatctgcgatggagatgagtgggtgtcgttcatcgattaatgtacggtggagatttgatcacatggcgatagaacacgagccttcggattgaaatcgtgcggttcgacgcggataatagcgttggcgtcgcgtgggccgttgatcgttcgatgtgtggtcgagaccaaaccgcgcgcctgttctcatcgcaacgccctcacgtgtaatcttagccctccatccgtgatcgcacgaccagtacttcacaatacccctttggttgtggtcagttttgtaaagagcccctagaatatctgttaataaacccgcggtccagggtaggtagtctgagtcttgagattattgcaccgagatccctgaact

SEQ ID NO: 178 - DNA, 739 bp, Zea Mays
cagacaggggaacccagttcacctccaaattttggatgagccttcagcaagctatgggcaccaagctagacttcagcaccgcctatcacccccagacagatggtcaaacagaaagggtcaacaaggtcctcgaagatttattaagagcctatgtgttaacgttctatagaaactgggagtccagtttgccttatgcagagttctcgtataacaacaaccatcaggccagtatcaagatgtcaccatttgaagcattgtatggacgaaaatgccagacccctctcatgtggtccaacgtaggggaaaagacactggaagggcctacctttgttaaagaggctgaagagaaagttgccctgatccgcaaaagattacttgaagctcagagtcagcagaaaagttatgtggacaacaggcggagggaactcagatttgaggaaggagacttcgtctacctcaaggtctccccgatgcatggtgtcagaaggttccaagtgaaaggaaagctagcaccacgattcgtcggcccctatcccatcattggcagagtgggacccgcagcataccatcttgaattaccagaatccatgtctgatatccacaatgtgtttcatgtgtcccagctccgcaaatgcctgcaagtaccagaaagtcacatcgaagaagaggcaatccagattcagaaagatcttcagtaccgagaaaagctaataaagattcttgactcagcagtccgaaa

SEQ ID NO: 179 - DNA, 797 bp, Zea Mays
attattacaaaattataggaactgaaatggatcaatttagagttcatataatttttctatgaattatacaagttttacaattatttttatacacaaaatcaatttctaaatctatttttcctgttttatttaatacctggacggcgcctcaaatactgggaagcacaggggctaatctactaaagttcccgagactcagtgaacaacccgagtggacggcgggttctaatctccaaaaccgtaagggtccctttgcaaaacccgcaccgcgaaggggtatcatcgcggcagagccgttggatcctttctggacgacctagatcagatcaaacatttgtatccaaccggtatactaccagagtcgttgatcgtgagatcgacggccgtgatttaatgaagccgtgcgcgatcggcaccgacggatctaagatgtacggcacggatcgaaccttgtgcaaacgatgggtgtgcccgatcacaaccgttgattccccaatctacggccgacgtacagtcttcctattctctcaataccgagcgacggccgacggccagggcggcggcgccatcaccggcgaactcccgggcacgccaggaaggctctatgtctaacgcgattcgatgcgaaacgaagaggggaaggtggcgagcacagaggtgggaactttaccggggattaggtcaccaggaggcttgcccacggcgcacgacggaagtctgcgggtcaacgacgacggtgagcaattcgggccgcttccccgaccgactccacttggctcacccgcggaaagttccac

SEQ ID NO: 180 - DNA, 348 bp, Zea Mays
acttgtttcaaactgtgcgagaacggcgggtttattttaagggaaggaggggtctctttagcaaaattgacacatcgaaggggtatccttacctctgggccgatggatttcgcttagacggtccagattacatcctcgcctgcttataaggcctgccgtggacaccgcatgatctaggatccatggtcccaaggatggccacaccagcactagtatcctgcccttgaatcggatcttgacggcgcaaaactacttgcgcaaagagtcatagagattctaatccacactattgatttcaatccaacagaccatagtgttcttctccccatcgaccaacagagcggtggt

SEQ ID NO: 181 - DNA, 574 bp, Zea Mays
gaagtcaacgagctctcaaccatcgtgtcggggcgaaagctcgtcccggacgggatcttcgcctccgagctttacgaaccctccgtcaagattaagcaaacagaagaagagttggacaagatagctgatgaccaacttacccctgtgacccaggctcggcggttggtcgcgacaaccgattagcaggactggtaccaaccttttatcgatcgattatcagacgatgccctacctgaggatgcaattgaagccagacgacactctcgaaaagcaaagtccttagcagtcatcgaggagacacttcacaaaaagcgcctccgaaatcaagcagaagtgtatcacgctcgaggaaggacgactgctgctcgttgaagtgcacggaggaacatgcgggccccacgcggccccacgatccctcatcgacaaagcgttcaagcaaggcttctattggcccacagccatgactgacactgagcaggtcgtctggacttgtgaaggctgccagtactacgtgtagcgaacacatatgtcggcttaagccctccaagccatactcatcacctggccatttgcg

SEQ ID NO: 182 - DNA, 287 bp, Zea Mays
ctcaattattgcttttgccactgcctcctcactccactccatcctagaacccgtggccccaggggtgggaccaacattcgttgctagctccttcagcatgatgaccttccctcccattgtcatcgattggttgttgattccagtgcctcctaccacaacactccgaatgatgatatactctcttcttgccacccacccctcctgtcactccttcatctatcattgtgggtgacgtgaatcttctcccaatcacctttgtaggtgattctgttctttttgggcccttt

SEQ ID NO: 183 - DNA, 451 bp, Zea Mays
ttcaaaacaacacccgagagggactgagcaataacaccatgcctcacaagctcggagaaagatatgggccggtactgcataaataaattcctggagctctcctggaacgtgctggccttcctccggccaagctcctccccatcacccaacaagccaaaggccctgtcctttgcactcctcgacatcccggaagtggccgagcaacaactctgattgtggagcgcggccttggccatggcattggccttgatgatgttggtccggccgtctacacatgtgtgtcgtagtttgctgccaaacgtcaccacgcttccgctgcgcaccacgacacctggatcccacaagaatcgttgtagaacattcacagttgctctgtaggatatagcagtaacacgctccgtgtagtaacccttgccaatgatgcgatcgaagagcttcccttgtgcgcagg

SEQ ID NO: 184 - DNA, 438 bp, Zea Mays
ttatcggttcatgcattgcggtgatgtcctcatcaccattaatgcagtcgcagtcgggagggggggctcgtaggtcatgagtgctatgtggcctgaggggttcatagatcatgagtgggaggcggaccggcaccacgttgtggctcggtgacaggcatagttaaatgtagtcaaatatttatggtaggtcagtctgggccaagcgcatgatccagtcgagtggtttgcttccgacacgctcggcctaccttgtcaggttccaccactcccgaccccgtgttcggtggcgcggggttcgatcgggggcgagtccttttagggttgacatatctgcctctcctaactgaataacgggccccagcgatcagggctccttagcgcactttatgactagcggttcctagggaccgagggtcattttcccgacaccatgccaac

SEQ ID NO: 185 - DNA, 605 bp, Zea Mays
ctggactgggcctcaaattcagagaaacccagggggctcggagtaagaatccccagacaccgagcacagtaaaaatggacggcgggttattttttggtaactgcagggtctcttacgcaaagttacaaggccgaaggggtacatgcagacactggccgtccgattggaattctacgtcctcgattagatctacaatacatcgaatcggtacgcgctaagcaccatccgatccgaatcctacggtgtcgatctcgtccgtgcaccgatccagttcgatcggaatcgaacgctccacaatactctgacctaacccagtacacaccctctaatctacaccgtagatcgcgccatcaacggctcaggacgagccggtctcccccgaccgccactggcggcgccacccatcgaatcgcggcgcgacattgccggagcagtgccccataggcattccagcgcccctgacccaatctaaagtgtgctacacgaagcgcatgctagtatgaacaacaggggagggtctttactgtcactggctgagagttgaagccggtccacgacgataggcggttttcgtggcagttccctacgacggcgagcaattgccg

SEQ ID NO: 186 - DNA, 656 bp, Zea Mays
ctggactgggcctcaattcctggataggtcaggggctagtgcagaagattccctagactcaataaatagtgagtgaggacggcgggttggttttatgattctgcgggggctcttatgcgaattagcctggccgaaggggtatcgggggagatgggccacccgatcacgattgaacggcccggattagattgtcattaaaacgaagcggtatgcgatcactgcctttggattcgaaatcgacgctctggattcaaaagacctgaaaggattcctatgcctcggatctaaatcggacggcgcatttcctgcacccgaagggatacgttggcttctaatcacgaccgcccattgttagatcgacggacgatgcgtatcccccatcaggacacccgcacacggcggcgccaccatggttccgcggcggcgcacacgccggagtcacccaatcgccgcacaccggagcccaaacctcaatccacatgtcccacgtcgagtatgcgcaaccaggaatcgattgagggggttctcaccgtggttttcgaagccgcaggaccccggcgacgacgcagggggaatccgccaggcacaccaaattccagtgaggaattactcgccgacggagactctggatcgcccaaggacgccgcgacaacaac

SEQ ID NO: 187 - DNA, 912 bp, Zea Mays
cgaaggatcgtgatgtcatggcgcgacaaattgatgaaacagggaagagggtggcggccttgactttggaacggatggctgagcagatggaacagtttggggaaccttctcctaaaccatattcaaggcctggaggggtaccttctctacaccagtggatgagtatgtagagtttgttgagttacgctattccactgctatgcacaatcctaagttggatgagattttctttgtgcaacagtttgtgaagggtctcaaatctgagattcggggttcggtgttgtgtcaagtgccaactacggtgaatcgtgttgtgctattggcaaagttgcactctgaagttttggatcaaggtagaggttgacctcaacgaggtgggtctgttatcagacaaggggggcagcatagacctgaccataagcagactaatgggggtgttgatctctccaaataaaggcaactcagggattatcgaaggattcatggtctatgttttgtttatggggagaagtatgatgcaggtcatgctgctaagtgtaaacgaaaaggtcctatgcagttgaatacacttcctattgaggatttgtccttggagcttagtgaggaagttttacagcaattggatcaggaggatcaactgggggatgagtcttgtaaactgtcgctgcaggctatttctggtactgaaagtatgcagagtattcgtttgcaagcattggtgaaggatcaagcatttttgttgttggtggacacagacagttctgctactttcattaattctgtttttgtgcagcaagtgggttaccatctatcaactgtcccgctgtcaaggtaaaggtggctaatggttaggagttggtgagtgattctatgatacctacagtagaatggtgttgtaatggtcattctttt

SEQ ID NO: 188 - DNA, 586 bp, Zea Mays
gagacttgggtaagttgccaagtgaaatttggagaaaatcgaccctcaactctggctgtcaggtgctctgaatggtgttcaccatggtacagtgtacaactgaaacagataagatcgccagcaaacccaccgccgacgaccaattccaccgtgattcgtgtcgttgccggcccgacttgtgctcgggatgggcagataaggacacacggtaaaagatcctcgccgacggtgagctggagatcactctggtgcctccccgtggctctctcttcctctttgcggctgagccgataaactcgccggtgaacgccgcctcccggctgtgcgccgcatggcttagcctttctaccgcgctgtcgtgactcccttgggccatcccatcgtcgccggggaggttgccacgccgttagccacgaattcacgtgcaccagtgctttcttccacctccggccgccgcgcgtccatcgtaaaattcccggccaccgcttgcgacgcctataaattgagccccccaccagttccgcaaagtcatcagctagccagcccccgctaatcgttagcaatcatccaccagtgagctcgaatt

SEQ ID NO: 189 - DNA, 471 bp, Zea Mays
tttaccaggaggaacgacagaacgaaagagctaagttacctgaagattagagaagaatgagggcaatcccaagtcatgagaagcttctttctagctcgatgaaggaagatcaactggaacaatttgaagagcatcatcgggagttgattcagccccactagcagatatcagaattcttgcatctagctcaccgacctccaaggagactcgctcgctcgaagtaaagaagcatgcatcgctatcactccatcagatcgtggtggagatgacccgacatggacgtccatggaggtgtgggaaggatagctcacttggacaccctcgggggctgggttgtagctcgtgccacccaccaaagccggatcactaccggcaacaccctcgggggctaggatgcagctcacgctacccaccagagttggatcactaccagcgacaccctcgggggctaggtaaccgccagcaccaccc

SEQ ID NO: 190 - DNA, 598 bp, Zea Mays
gtgaaagccactaagcgcttgcgccagtgcccctcttcctctccggccgccgcgcgtcttcgtccaattcaccggccaccgctcgcggacgctataaattgagcacatcgtcgagtccgtagggtaatcacgcaccaagccaccaagtcgtgcctccaattgttcaccacagctcgctaatttctcatttccccaaatctattctccaccaccgtaaaagagccctcaccgcgatcagcgtattccaggtctgttcgtactccctgctcttttgttctagcatccttaagtcctcctcaagctcctcgaccaattcaattgaactagaccgccctggatcaccaataacgcccatgttcatccattgtccgcgctgtctccgtggataggatgatttagagtctcattagtgaaattgagtgaggggaaacgatcggtgggtcttgaattcggtcttggccaagtgaatcggccggtgtaagctcgtcggagctcggccatgcgctgtccaccgttgtggacctcaacctgcgaagaaataaaacatggcggaggtttttgtaaagtgtcagtgactctagaaatagtattgcgaacc

SEQ ID NO: 191 - DNA, 287 bp, Zea Mays
ccgaaggcagccccacaccagcggtggcggagcaccactatctccttcggggcatccgactgccccgagaacatggcagggtccggcatactgccgctcatcaccgcccctatcattgctaacatcaagctgcatcatgttctgatcgacgatggggctgggctcaacgtcatcagccacgcttagttcaagctgctacaggtcccagggtcccgactaggaccctctcgtccattctccagagtgggcgctcaaccggtgtatccccttggcagcatcacgctctc

SEQ ID NO: 192 - DNA, 763 bp, Zea Mays
ccggactatagatccctccgcatgtttggctgcctatgctacccaaaccttacaaccactacatctcataagctggcaccccgtttcatgccttgtgtttttatcgtctaccctacctcccataaggcatgttatcatctccttacatgttttgatgagtccttcccctacggaaacacaatcacatcctaccgctttgtcttttgacttccacttacaggatgattatcctttggtcgctttgcctttgggtgtagagcaatcgtaggtcccccctatatttgatgactcggccatcctgctgcttggccttattgtgcaccacactgtagtatgactgcctaccaccaccgctagggcagcccttattgcttcgtctaggcctactggacatcctgcagctggtggacttcctatggctacacaactaggtgctcgttgatttggctggtgtaccagcattggcctcctacacccccaatcactccatctccatctccatgttgcttcggcatcatctattgtcgtcgtcaagaccactatggaccatatctccaacccttgtcaagactccaggcttagacaactccacgccctatgcaggtcccagtcgactgcggttttgtgtctccaagcattcctatctccctttgtcgcctccttcaaatcccttggtgactcatggccaagctgctgccatgggaaccggacccaagctccacctcgcctcctcgactaccttgacgatcgcttcgcccatcca

SEQ ID NO: 193 - DNA, 981 bp, Zea Mays
ccccgcggaccccgcgtttcagctggttgaggcctggccgaggctccctctccggctataaatggaagccgcggcccccccttcttcatcctctcggaacatcgcgtcgtgtgccactttgtcgccgtgagccacaacaaactcaactcgaaacaaactccgaaccccaccccatgatcccctctggccgaattccgccgcgacgctataaagcacgaggattatgaccccccaaccagccgaagccgtgtatagcttggtgtcgtaggcgcatggatggggggtgcagggagatgtgattgccgctgccgccatcgatcctgcccatgggcgatccttcggcctcgacgggtggtactggggcatcgaaggatcccgccgcgcacatatgtggccttgtcgtgcgtgaaccccgggcgggagaccaacaatttcacgccgatgctcaccctgtccaccaatccacaacatgtcgtgggcgggcatactcactggtgtactctcggtaatatgctattgatcgcatttgttaccttccggtcttcgcttggcagcttttgggggatcgattaggccactgtttcgtcgttgtttggtgcaccggcgaggtgccgccgtggagattcctgttcaccgcgatggttgatcggtgagcaaggggatgggtctggtgccattggattgttggcgtgcggctgcgattggatggaggataaggcttcggccgggaatatctgtaccgtctgatctaatcgagcggttggtgtgaaatgtggcgtcatgaaaatcctaactgtgggtctcgggatcgacggtctataacgcatgccattttgatgaagctctaatctaattcgaaccgcatatatcatatcctacggctgatactgggtgataccccttcggtccaccccttttgctaataagcccctgcgcttaccagaaactaacccgccatccacgtgcggggtgggtatgagt

SEQ ID NO: 194 - DNA, 324 bp, Zea Mays
cgcataccaaccatacatctccttctcgcctcgctgtgccgctgacaatgtggggcccagtcgtcatgttcatcttccacccagtaaatagactccgccgaacgacacgcgtggaatccggacaagattgcccaccgccccagctccagcctccctcccttcctgttccgcgcaatcacctgggcgtgtcgtccgctgcctttggtgcatgggccccgcgccatagaatcgtctcctaccctagaaacagaacacgcatagctccgtatgtgccgccgcgcgaattccgcgctcagctgtaaccaccgcggatcctctcctccc

SEQ ID NO: 195 - DNA, 696 bp, Zea Mays
ctcgcgaccatgccaaaccctcgccaccgcgtatagagcttagggagagaaaagcaaggggtggcggaagtggggagacacgggatttccgttcccgtagccgtccagtgccggagatcgagtcaggaaccttcgtcgggttgctgcgagggagtctgaagcacttgctggccgaatcgacgggcagagcaacctcaattgctcatcgaagtttcgcttgggtgccgcgccgccttgtgccgtgaacagagaccttgtcgctgttgaactgaggtaaattcacccccagttcatttgccatgttctcgtagggtgtatgcgttagttaatttaggctccggggcgttggtgcgtctgtgggtgctcgccggagaaatctccgtcatgggggatttgccgccgtcgcggtattacgacttagaggtagacgactgcgtgtgaaccattagatgctaaatggacaacttagattaggcgtcgtgtatcccttcgactggacagatctgcgccgctgaatcccactcgaacgtctcggtgacgtcgtggggtgttttgaatctgtgtcgtcgatcggcgatctaatggctgccatagcgtatcgtttcgcgctcgggtagattaaatctggagcgtctgaaattgatcggacggctgagatcacatagtaccccttcgcgtggccgacttgcataagag

SEQ ID NO: 196 - DNA, 602 bp, Zea Mays
agacatggcaagaacatgtcacttttgaaccaggtgttttagtttagcttcatctaaggaaagatcagttccttgatttaagaacgtctaacttattgcctaggtctaatggacctttcaaagtcttagaaatgattaacgataatgcttataaacttgagttgcctatacatttagggttagtcccacatttaacattttagatttttggtcatttattaggaacaaggatgagcttaagtcgaggatgactcaaatgaaagcagggaggatgacgaggacacccctctcaatgagacaacccctagggccccttcaaaccctagggcatctcttgccctagtcctttgagcacctcacaaatccacccttagggtacctccagccattacccctagggcacctcgtgcatcgacccccatggaacctcacatgttagcccacgtggcacatccgacattatccctcaagacacctcttgcccctgctactagtgcacttcatgcatcgacccctgaggcacctcttgccctgatccttagagaacctcatgtatcagcctctaaggcacctcttgtccccacccccaacacacctcttgt

SEQ ID NO: 197 - DNA, 839 bp, Zea Mays
caagagccgccgactctagtggataggatagaaactagataagtttgtttgcatgcctagaattagggagcagttagctccatgcagttagtcctagggcctatatattcctgtaactagacctgagttggaattaagaaatatcattatcctaatctctctcaactaagccggtggtagaggggcataaccttgccggagaagacgacggaccgcggctatgatctctgtagccgagggccacctaccctagacactaaggcccttgacaacctggtatcacggtcacgccgatcctactcatccacctacgccaacgctgaatccaccaccgtcgctccgctcaacccaaccgcgccaccacaaagcccaccaccctcccgaccctcagccacatcctccagttcacccatggccgaaccatccaatgccaacctcgccaagatgattgagcaactcaccgatttcgtcgccatgctgcagtccgaggtcaccgcgctgaaatgcgataaggagaagtcgtcgttggcggtcaagggtggcgttcctgacggccagcaccactacgattggccacccaaatttcaaaagatcgactttccccgcttcgacgacaagaccgatcccttgatcttcgtcaatcgctgcgaatcctacttccatcagcagcgtgtcatggaggaggagaaggtctggatggcttcataccatcttgaagacggggcacagctctcgtatatccagctgcaggaggacgagggcactcctcgatggagcagattcaaagatctcctccacctgcgtttgggctgcctatccgctctatgccactcttcgag

SEQ ID NO: 198 - DNA, 659 bp, Zea Mays
gagagtgtctatggccaggatttgggcacggggtgaggctgtagtggccaggtgatgtggaggcacggcggtccggcgtgtaatggctccggcgagcccaaattcactacagtgagacgaagtgcggggtggggttccttacctaggggcggtgctcggggagtcttggcacagcgtcggtgggctccggtcggctggatgacgaggaaacatagcggcggtggtcactggtctacactaggagggggtcaaacatggacgggacagaggggccaagaaaaggggaaactgaggtaggttcccgatgcattgtacttagacggagctaaccgtggcaatggcgacggcagtggctcagcaacgacggcggaaaggccatgagacggtggcggcgttattgcgtgctaggtgggaaaatgggtagggagagtgtgaatgaggggcggggtgcgctggtgggtctggggtcttcactttgaagctagggcgatgtgcgtgggactgggatcatggggtgtgggtggcgattatccgcgcggagcgtgcggtgtgggcgcgagcacgacggagcgggcagatgtggggagggggacgagactgatgagtgggaccagggcgttagtggactagcgcgagcgagcaggcagggagtgctgaca

SEQ ID NO: 199 - DNA, 367 bp, Zea Mays
ccctcgccgtggccagccacttccaggtctgatcatgctctctggggttctgtttcagtacctgtgtgcattcgtgatgctcatcaacccacccgatcaaactagaccatccccaatccgcgggaacgtgttctcccatgatcggtgtccgccgtgatcgtggacaagggactcccagtagggttcatgttagtttagtggttgttcctaggtcgccttaggtcaatgaagcctccccgttagttattccaagcagtcatcgccggccatggccgatacggaccacgtcagggatgatctgcgtgcgcgccgtggtcaggggcattcgctgggaagagatagaagatggagggcatttctgcaattt

SEQ ID NO: 200 - DNA, 515 bp, Zea Mays
agactttgcaatgaacaaagacttgaattgctagtcttgtgtaagttggtttcacctataggcatcactgatactaggtcgcctaaagccacgcctctggttggagcgttacggtcatgctcccgtgtcttttagtgaatttatttgagattacccacatctcaaaagtttctagcatcatcataggatgagggttggccgagatgatagaacatagctcatttctatcgaaacacctttagtatagtcatatgcatcagtgctgaagttttacgtaggccaatgtcgggttccttgggagcacctagatacttagatgagggatgtgttccatgttttacccaaaggcttctttcatcggtcaggatatcttagggctatatgggcctttctcaatatctagcgagggcgcatgagcatacccactgggtgtaacccctaaccaattaggataatcatcaaggtgttaatcaaacctttatatatggtgataacatgatatttttgtaacccac

SEQ ID NO: 201 - DNA, 573 bp, Zea Mays
gcagccctgaattcatatctctaagcgaggcaaattcagaactatctaagaagaacaagtaccaccaccacttaggcacaggtggttacaagagtcaagtttctaaatggagacaagaagacaccgagaagaaggccgcagggttgccgacgcttttcgagcaacttggtgaaaggacggaaaattggatccgtgctagaaaacccagggaaactgaggctggtgtatcttttgatgatccaaatatcgaagaagttgcgaaaaacatatatgcaatggcagctaagcagagccaaggatcatttaagccacaaagggagagagacatcctaacggctggtctcagtaaccctgagcatccaggccgtgtacgaggaatctcgtctaaggaaggatggaaggaaggattcggaccacagtgggaaggtttgtataagaaacgtgatcgatacaaagaagagttgtcggattattttaagcaagaggcaaagaaaaagttcaaagacctgatgtctcaaatgctatcaaaacctccaccagaattgatgcagcaattggcaagtgcgatgtctg

SEQ ID NO: 202 - DNA, 951 bp, Zea Mays
atttagttcaagaacatgtggcctataggatatggccactgatagacagctgggaaatgccaaaggagaccatcactaaccctagcgaaggtggtttagttcgattgaaatataccttcaggtttggagaccaatttatcgaaccagacgatgactgattgaagtgtgttgaaaatactagtgatgaactacttggagcttactccaagtctgaagataatgcactatctgtggccttcaggagccaaaaaaagaaaaggctaaatagagtttttgatgctattgggtttgtgtaccctgactatcggtaaccgcaatgggggcagaaaagaaagggtgaaacttctgagaaggctgttgcttcagctgctccaagcgagcccgcgctgaagaggaaaaaggtgaaggttcttactcaccgaccgcgctacattgaaccagccatagtgcctaaatttggcggtgagacctcttcggctattgaagccaaaggacttgttcctacgcagaggattgaagagccagctgcaatgccgaaggctgacaaaattgaagaaccgagaaccgaagggacgaaaacatcagaagttctaagcccttcggcaggagtggaggtgccgaagaaacaaaaagatctagcagcaacccccaagagaaaaaggatggctagtgtattagatgtgctggagacgataaaaacttcaagctctactccaggaaaaattgccaaggcttcgaaaacacagattgaaaccgagacaaagctgaccgaagccgaagctatactgagccaggctgacgccgaagctgggccttcagtgcccgccaaggagaaatcctcagaaactggagaaaaggcagcggaagaagagggtatagaacaaattttgcctgaaaaagctgctgctcttgctctcgaagcgtcttccgaagtccttgattatattattc

SEQ ID NO: 203 - DNA, 605 bp, Zea Mays
ggtagtcctcaatcgtggagcggaacgacaggcgtgccacctcgcccaacgtgttcgtgcgcagaggaggcccaaaacactgctggcacaacgtcttgaagcgtggccagtgtagtgtgggctcgtcgcgccgtagcatgacggaccacagctgtgcagcgcccgtgagatagtatgtggccatccagactttatccacctccggcgtcccttgattgtagaagaagctctcaccacgggataaccaaccaacatgaccctctttgccgtcgaatgtgcgaaagggagggttgtggtggtgctggttgggatggttttgttgtggtgggtaagcggtatggtggggttcggaaaagcctgagattggtgatggggagtgtgggaaggctatctgatggatgggtatgggcatggtagatgtgggcagcaacaaggctgaggttggcggtggaagattggttgaggtggatgggagtggagcgggtgtggtggtgatcggcggtgatggtatgggtggcgcgacagggtttgacaagggaggtatcccgccataacctggcatgccatatgggatggaagtagggctggtggatgctgggggcggc

SEQ ID NO: 204 - DNA, 520 bp, Zea Mays
gcagtagcgggcgagcgatggagcatgtcacggtggtaggggcgggcacagtgcaacgcgcggcggtgatcagctcgacgagtgtgcaccgtgtggtagctgggaaccaaatgataatgagcgggcacatgggatggccatctagagggggaggagttgcggcgtgacgtcacgattccatggcatggaggcagggcaacacaacaagggctagagatgggatggcacgaccggggtgagggaggaggcgaggttgcagcattggtgactgggtggcaaggtggcagcgttagcaacatggggagtgaggctgggattggaggaagcgctagcagcattggaaagatgcgagtagtcacgaacaaaaaatgttatatatgctttattttggttacgggttgctactctatgtacgctgaaagtaagtgtattattgtttggcttccatgcacaactgtcaataataaagtgtattattttctaacaatagactaacaggaaagcacgttgtcatttcagc

SEQ ID NO: 205 - DNA, 837 bp, Zea Mays
catgcctccccttttatagctaaagggggcacgtacaagggtactgagccccgacatgtgggcccaggaatataacagatgtaatacttggagcagctaatgttcgttgctggagaaatcttcttgcgccctgacatccgtgatctgcgtagtattggcatgcaggggaagcttccctggcaacgtataagtgatgatggacacagtgcaccccgcagcacgggcgcactgtttgacaatggactggacaggcacgccgcctgcaggatggcctggatgccgcctgccaagggagtggacatgacacattaaatgctgagagggcacatcgcctgttagtgggatagacaggcggcacgtcgtctccgcaataaatgcagaggcagcagggcccagaggccttacgtcagactttgcccgctggcttacgtcacgggctacagtccacatggcagtgtcgggtctccgcctgagcagggagcggaagcgcatgggtcatagcttggacacgtgtcagtatcggacccttgcctgtccttcacataggccagggtatcctctgtcccgggaccttgctgtaggtggtccggacctcactcagaggggttcggaccccacccaagaggtccggcttgcttacttgggagtcctggaccgtactcggaggtccgggttgagtgtacaggggtccagtgccctctcgtggaggttcggacccactgatggcatcctagagtatatcacctcttctggtcacgtggcatccttggggccgcccacatggtggagtcgggcgttgttcaccacgtcgctcgagatagctgcacaggcaccgtg

SEQ ID NO: 206 - DNA, 490 bp, Zea Mays
attggaggcactcaggaaaaaagtcttcgataaaaatgaaaagttcgcaggaaaatggataagggagttgccctacattgtttggagcctaagaactcaacctagttgagctctgcatggaaatactcctttcttcatggtctacggttcagaggcagtactacctgctgatctcaagtttggggcgccaaggttgatctttgaaaacatagcagaagccgaggctactaggctggaggatgtcgatgtactcgaagaagaacagctgaacacggtaattcaatcaacacggtaccaacaaactctgaggcgctatcacgataagaccatgcgacatcgatccttcgcagtaggagatctcgtcctccgccgaattctaacgggggaaggacggcacaagttgtcacctctatggaaggaccattcatagtagtagaagtcactcggtcgggatcatatcgcctcactcagatggacgacacagaaattg

SEQ ID NO: 207 - DNA, 340 bp, Zea Mays
ttcggaataccatgtttttcacaaaaggataacacatcctctaatagagaatcccaaccatcatccctaatttgctgaaatctctgctttgttaacttcacctctaccatggcctctaaaatgtctttatctttcctttgtaatgacaatgacaaagcatttgcatggcccaaaataagcaacattaactgcaagtgaaacacaaagtcaaaatccatcaaatagtccatgagaccacgtgcttggcgtctcttggcatcatttggaccttctttttcaacgtattggagaacttcaattacatcagggaacaaactgcttaacctctgaagggttttaa

SEQ ID NO: 208 - DNA, 408 bp, Zea Mays
gttttaaatagaccaaatcaccgacctcaaatgttcttggagttctatggcgatcagcttgttttttctggcattgttgagctcgtgtcaattgctgttgtatcaactgaatcatcaacttgcgttcggtcagccacgtttgcaaggacggaatggtaccctaatcactgaaatgcagacctagatgattgggaggatatccgtataatacttcaaacggtgtccgtttcagtgaggtatgataactagtgttataccaatactctgctagtgaaagccaatgtttccatttggaaggacaagcctgggtgaaacaacgaagatatgtctctaaacattggttgactctttcggtctgcccgtccgattgagggtgataagctgttgtgaacctgagatccacacctg

SEQ ID NO: 209 - DNA, 281 bp, Zea Mays
acaaaatttactggtcacggtggccgccggtgaagactccggctgggcttgggagatggcgccacgtacgggttatccctccccgacgttatccactccataccgcacacgaatcaggacagcggcggcacgaattttggcgcagagaggttgccggtggtgagggtctgtcgcgctggcgatctgatccagttctggtactgtaccatggcgagctcgtttcagttaccctgacagagcaacttcagggcaatttctttctatatttctcttgacaactt

SEQ ID NO: 210 - DNA, 558 bp, Zea Mays
cctattagtgagaagctttcgataggagacctcaatgggcatgtaggtacaaaaagtgcaagtttcaagacggttcatggaggttttgggtatggtagtagaaatcaggggggagaaaaagtgttggacttcatagtagcttatgacctattgatatccaacaccttctttaggaagagagacttatttagtgacctatagtaatggatagcgtcagattgactttgtccttacaagaagagaggataaacgaacatgcttggattgtaaggtgatacctagagagtatattgtctcttaacataagtttgtggtgacggtcttatgttttcaggtgcatgcccatatggataaacaagccaggattgtgagaacaaagtcttcaaggaaagaaccatcaaagagggcacttggaagtaagaagatgacacacacaacaagtggaagaagatggagtaactaaagggagtggaggtgaagctaaagacacttggtggtggaatgagaaagtctaaaaagctattgaggagaagaaagaatgctacagatgtttgtaca

SEQ ID NO: 211 - DNA, 370 bp, Zea Mays
gcatcgcacagtttgcttgtttattcttctctaaaaattggtcgtcatgggcctggtcaactcgtcctgcagactctgctctagcactctgcaggctctgaaactctgcgtctcatggccaagattagttcaccgtatcgatcactgctgacctttcgaccttgaatgcagacgctagctgtcgtgcaagtaagtaggttgacttgccagaggttcaggttctggctctccagtcgagcctaacctttctgtttacttgattctgtagtgtgtgcgtgtatctccaataaatcctaaacttcgcgtgaacttcgactccgccctgatggaatattaggtactcagcagctatcgcgttctctatctcatt

SEQ ID NO: 212 - DNA, 722 bp, Zea Mays
tacttctctcagtttaggtggcttctatataagaaggcctcacaagtgctatatctacattttgcattgaagagacgtgcatttcttgaagaattccatgagaaacaagaacaggttggttacataatctatgattattttgagccatgcttgaatatacctattctttctggttaaccactaaacacactggttacatcacaatgcaaatatatgtcgttgtggaagaacttttgcgcctttttttttcttgacaaaatcacaaaactatttagtttataaccatcatctgcatctaggaggtgcttctcattacattttgcatttcactgtattttctgtcattttcacttgcttgggccaacacatgcatattactttgagatctgtttgggggttctataccctaatgtagctgcacaatgcaagtatgccttctaagtgagtgattttgctgatcaacctgattctatccctttatttgactgtcaactcttcttgacacagtatatttgttttgtgcggaagcttcatttccagtcatgtagaactgaactaatctcctttgtttaattaaaggtcaaagaatggcttcaaaatttggggataggggagcatgtgccagttgtacatgatgatgatgaagccgatgatgtgcatgttccttcacagcatgacgaaaactctgtcaaaaacaggtaaagtggtggtttattaacaat

SEQ ID NO: 213 - DNA, 699 bp, Zea Mays
gtttgcttgtttttgtcagtgtctcatcggtctcccattcagtgactcactagagcttgggtcttgcgtgatgctcatgcagtgaaactgcatgtccacactgttgtagctgtcgacacctcggtgtccttctcgccgtgatccaattaaaccaggcagtgtctacctcgctgctccgtggacttagttcagtaaagccctacctctctccccgaatttagtagacctcgccgtgtgttactgcgttccatattccgggtgctagccaggtctgtcgcgcgctgtccttgcccttaccggtgaccacgctaccgacatcccacctccaccatggtcagcctagcacgatttatttatatgctttaagcttagtgttctagtacttgcatagggcagtgaagcttatggacatgtctgtttttttgtcccgtagcgagtcgattggaacgccgccacgacgccgttgatctttgccgtgagccactccatcatcgaccgttctgtttgcgctctccccggtcatgtttgcgtgagcaccgttggtggggtgacttgctagtccttcccgtgccctccccttgaactctactgtgccggcctcacctggatacctctcaacggacccaatttttactggaaccgtggtcagggcatggtgatcttgttatcgcttgttccttgggtccaaatgggccgccg

SEQ ID NO: 214 - DNA, 706 bp, Zea Mays
ttcatgggaataaagtgcgcagacttagttaggagatccacaacaacccatataacatccttgcctcgaggggaacggggtaagccaaccaaaaaatccatggtgatatgctccgacttccattctggaattcccaacggcttcaataaacctacatgcctcttatgttcagccttcacacgctgacactccccataggctgccacatacttagaaacatcaaccttcatcctcttccaccagaagttttgcttcaaatctctatacatcttggtttcgccggggtgaacggtgtaaggcgttttatgagcttctcccaatatatccatcttcacatctgatttctgtggcacacaaaggcggcctctgaaacgaaccaaatcattctcatcaatggtgaactctcgaggtttaccatccccgtccctctttcaagcctcctgcaacaaacgatcctgctgctgtgccacacgcactctatccagaagggaggattgaatgtgcatctgagtctcctttctagcggtgccaacatagcacaaagtaatacccatacggtccagatctacaatcaaaggcatgaccactttcgagacaccagtcctgctaagtgcatcagccaccacatttgcctttcctggatgatattgaattgtcagatcataatcctttatcaactcaagccaccgacgctgcctcaaattca

SEQ ID NO: 215 - DNA, 476 bp, Zea Mays
ccgaggtcactcaccggcggtgaaggcgttgaaggagctcggccatggtagggagcggtccacggtggaggaggaggtccggtgagcgattccaggggcccggctaaccaatcgcgcccggtgaggccttgaacgtcttccggggaaccgagtgaagctccacgagtacttttcgaggcccggacggtggtgttcaagtgggaccacaatggcggcgacactccctcccttccttgccaacagtggactatggcgcttgggcaacagatgtgggcgtaggcggatgagaagaggggtcacgatggtcgagcttttatggcccgaggaggagaggtcccgaccgacatattcccccgcgattcccgacggcgggtttagcggcgtttgttaggtccatgcggccgttgatgcgaggaagacggacctgacacccttgtcccatcaaccagtgatggagtaaggcgggtgcggcgtgg

SEQ ID NO: 216 - DNA, 533 bp, Zea Mays
agaagcgtgccctcacaacttgcacatgtattcgcgtgcgtgcagcacatcgtcgggtttccgacgatgtccgtctacccccctccccatagacgacccccgtctacccccctagaccacccccgtttaccccctagacgacccccatctacccccacgtgtgcatagccctgccatcacatccatcgcttgttcgcacgtcgttcgcgtgcgttgagcatgctatcggtccatgtcgtcgagcacgctatctctcgcacatcgtcctcacgcgtaacgcgtttggtcgcgtgtcagtaatccacttcacttagaatcgctcacgttaataatttatgtagttaaacgacgactaaccgagtagtgagccaatcaaaaccaagtgtgattctattggtgcatgtgataaataccagttactatggctaggtcgaataatatgttataatgattaattgcatagcatacatgtaatacctctctaccatagctttagccgttgcgattccttttctctctcgcgtaatcgtaaa

SEQ ID NO: 217 - DNA, 633 bp, Zea Mays
ttattggctggaggttaatttgttggcttgaatggtttgtacgatttgcaatgttagagtatgtggcgcaatcggcggcgacggggccgcgcgtggcacggtcggaggcgacgcggctgcgtgtggcatggtcggaggcgacgcggccgcgtgtggcacgggcgccgggatcgggggtagggaaagaggaggaatgtcgacgggattgacatcaaggagggaattgaggtcgggcggtggagagggtcagcaagggggaaaacatcctcattgaaaacaacatgatgagagataatgatgcggtgggtgagaagatcgaggcactggtacttgttgtgatcagaggaggtactcgaggaaaaggttgtgactggatcagggcgcaagtttgtggggagtggtgatggaggtggttaggatagcaggccttcgacatttgggtcggcgagtagtgatacattctgtagagcaccagtgggaagcgggggcctcgacctgccactgcgcgtgtcggtagtggcaaccgccggtgggaataaaaactggttcggaggccatgaagggcaaaagctcacgagcttgggtccaacaggcggcgcggccagggcctgggcaagtgccgacgagcgggag

SEQ ID NO: 218 - DNA, 329 bp, Zea Mays
ttaaactaattttaacaactagtaactaacagtacctataccgaattgggccaataacagactgcgttgaccaatccggcggcaaaagttgactccaaattcccctctccgcttccgtctcactcgtaatcgtcctcctcttcccatttctgcttcctcctcacgggcgtgcgacgacgtcagcaaccccgccgagtacccctccttcccctcgcagtcgccgagggagcaattccgcccccaatcggccgcctgaacccttcttccttcccttcccgcggcatccgatgtgcgttgccgccgccgccgcgctcagatagcccagccta

SEQ ID NO: 219 - DNA, 429 bp, Zea Mays
gaagaccttcccaaccagagtcctggatgctgcgtgtatcccacactgtccgacatggatctcatctaacagttgcttcccagtagccgaaagaatgcacctcatgaggactcctgttgcgccccttctgtacagtgtatccccaatgagggtgtagtgggctgactgtcttgcgatgcgttctgctgcagctttatcatccggctcctcttcgttttttatatacttaataataggctccctccagtcattagagtctgactctggctggctcaaaacattgcactcttctgcccgatctaaggaaatactcgggcgtggtacttcttggacaaaaactccaggtgggacctaggtccaactggatcctagttttgacaacgcgtctgctgccgcattgcgatctctttccacatgatgaaattccag

SEQ ID NO: 220 - DNA, 1081 bp, Zea Mays
tccaaggcctttactcattttgtgtcaaatcctcctactagtgatggtggtttgggccttagagtgcgaccctctgccgaagaagttagtgctttggttgcttcgcttgaagaaattcctgatgatgaacggcaggttcactttgaggtgcctttggatcccagtgatgcagaaataagtgccatgcttgatatgttagccgaggattcttctgatgccgctcctgccggaacattggtggtgacgcctctcccagaagctagtaaaaccttggatattcagaggtctgacagtgttcgcccgaagcgcccttgccgagccaatcagcctgctcctcctgctgatgggcagaaaaagaagaagagacgtcttcgccgagtgtctagcttggatcgggatgctggtccttctgctcctgctgctgaggaagtgcccgtgcctgaatttactgaagctaatcccaatgggtgtgacccgtcttacgctgaccccaatgggtgtgactcatctgacgctgatgccaatgggtgtgctgtccgttttgttgatgaggatgatgaagaagaggatgaaatctctctgattcagaagaacagccggcgttacgtagctagtggggaaagtagtggtgttccttctcctgccttgtctgccctcattggtctgcaagaattatctctggcgaactttgatcaaactcttgaagacatggttccagaggatctgttatcagaaccgacagatggtggcgcgatggatgtttgtgttgatgtactcgacgccgggttggggtcatctcgggcagcatcccgtgcctcatcgaccttggagcacggtcttgagggtcaggaagctgatttggattgccctgctcccatggaagtgactgagggaccttcagccttagaggtggctactgcagagaactcggccctcgaggatgatgttggcgctcacccagcccccgagggtgttgccggggatggtttggctcggatgggtagcgcaagctgtgacccagcccccgagggtgttgccggagacgatccggctcggatgggtagcgcaaactatgacccag

SEQ ID NO: 221 - DNA, 764 bp, Zea Mays
gacctggatggtcttcgcgggcccaccgtctgccctggtcggctgtactttcggcgccttggagggcgccttggcacttgggcctcttcccccgtcgtccggtcgagcgatctcggccgccagagtgtgtagctctcgacggctgctagagaggcggtgcggtcaccttgcacggtgaggattccagcgggggacggcatattgaggaccaagtacccataatgggcaatggccatgaaccggtacagggctggcctcccgatgatggcgttaaaagggaggttgacctccgcgacgtcgaactggatgttttctgtacggaagttctcttccgtctcaaatgtaaccgggagtgttatgctcccgagggggtatacgggttgtggacccaccccgaaaaatgggcgagaaggccccagccgcgaccccggaacctgcagctgtctgaatgctgcgtggctgataacattaaggctggcccctccgtcgatcagcacgtgatgtagccgcatgttggcgacaacaggggcggtgatgagcggcagcacggcggctcccgccatgttgttggggcagtcggatgccccgaaggagatggtagtgctcctccaccgttggtgcggagcggttttggggacccctgggactgccgaaagtacttcctggcgtagggacttgacactcctgcgggaggtgagctcccagcttccgccgtacattacgtacagcttcttgcgacggtcgccaccgtcgctggagtcgga

SEQ ID NO: 222 - DNA, 539 bp, Zea Mays
gtggcggagtgcaggtttgtcgcaaagcgatggcagcttgggactatggagtggcatgtggatgggactagggttagtgctgatgtcgtgatggtcctttatatgagcgtacttctggtgctagttttttagactgaaaactaaattcggatattcgccggatacctgcggggagtcggtggagacttaggggctagggtagacctgctcggagaagagttgcctactcccctagctccttcgaagtggacgtactcgatggtgaagtcgtcgtacgtaagagtcatatgtcgtcgtccaccgccttgtcccatgcccaccctcgcccttcgtcgaacactacgtcacgcatcgtgcgtatacgctgtgttcctgggtcaaggatgcagtaggccttcgagccctctgcatagccaacgaacacccccggggtagctccctcgaagtggacatactcgatgatgaagtcgtcgtacgtaggagtcatgccgtcgtccaccgccttgtcccatgcccatctgtcggcgtttcgagacagg

SEQ ID NO: 223 - DNA, 532 bp, Zea Mays
aaaaaatattgtatgatatatacagttatgtatactaaaagttggtcggggagggccggatcataacggcactcccgcgatccccgccaacgctggtcgagggcaacgcggtagggtcgacggttgaggtgttcgtgcgtatattcgtgtacttgcataggtgattcgcgtagagctagagtggatgcacgccgcggaggtgcgactcgacagaggtcgttggatcccagcaagcaaatggcacacgtcagtgccatgtgcgccgcgagggtgtggacgcgaggttgctctgatcactatcaacgaggcaaggccgcaaggagcgaacagggagcataggggccgctactagggctattgtgtgacctacatggacagcgacattgtctcgctcgtggaagcgctagagcacaagacaacgacaccgttaagtacccaacatctggggcatgcgatgacattggtcacgtactaaactttagtccttggaaccaaacacccataaggccatgttcgattcagcactcaaaat

SEQ ID NO: 224 - DNA, 826 bp, Zea Mays
ctttcagcatgtgtttcaacatcaaacccgacaccaatgatggactcccaagtccagcaatttgatgatgttttctcatccccaacaggcctccctccagcacgaccatgtgatcatcgcatccaccttatgccgagcacaacactagtggtggtacgtccttatagataccctcaactgcagaaagatgaactggaggcgcaacgtccagcaatgttgaagcagggaacaatctgacatagtacatcagcattctccgctccagtcctattggttaagaaggcagataactcttggcacatctgcatttactacagagcccttaatgagcgcacagtgaaagacaagtaccccataccagtagttgatgagctcctggacaaactcaacggggccaagttcttcaccaaactagatctacgctcaggataccatcaggtacgggttcattcggaggatattcataagttagcctttcgaacacaccacgaccattttgaattcctggtcatgccatttggactttcaaatgcgccagcaaccttccaagcccttatgaatgaagtactgtggtcgtacctccgtcgttgtgtattcatattttttgatgatatcctcatctacagtgcatcctagtctgaacacctttgacatatcaaggcagtactcgaaacatcacgcagtaaccagctttttgtcaaacagtccaagtgttcctttggagccacctcagttgcttacttgggtcatgtgatttcagcagacagggtagccatggacaatagcaaagtggaagcggtctcctcatggccggttccccaatcaa

SEQ ID NO: 225 - DNA, 329 bp, Zea Mays
attttattttgtcctgtggctgtagctatgccgcctagaagaggtcgtggcagttcgcaagatcataatggggattctatgagtccagcggcaatgttagccgcgatgcaggacatgcagcaggagttggccattctgaggcaagccattccaattgctcctattggtcctgctccgactactggtgctcaaggtgctggtattggaggtgttccaggggcaatgtccctgtgggtgctgctccaggtggtggggctaagatgccttttctagttagtggtctttctctggtgcagtggatgggcatgaagttggatacttttgacggc

SEQ ID NO: 226 - DNA, 742 bp, Zea Mays
ttgtcgacttaacagagcacttagcagcagatgggacaagataagggctgatgtcagtaaattctctggatactacgccagagtcctacgagagaaacaaagtggtctaagtgacgacgataaggtacgacttttgaaacgatgattttatgtactacatgtgtctctgctgcaactaattatataatcaattccaaatttgcagacatcgaaggcagccactttgttcgctcatgaggagggcaaaccatttcattttatgcactgctggcatcaattgaagggggaaccgaaatgggagagcatatgtcaaggacactcgtttagaggattacatgcaagatcaataccttcttcggggtgtccatcagtggaaacaccggagactgacagtggatccgctgggctctcaggaaaaaggccccgtggccgtgattacagtaaagctgagagaaagaaagatggttcttcttcgtccccggagtacttaagccgattacaagaaattactgagaaacaaatacagaggtccatagaaaaggggaaaaaagaaaagaccactgaagaagacagggagatacagaagaagagattggaattggaagcccaaaagttaagcattagacaaagggaactcaaacttgaagaactgaaatcggcagaacaacgtttgcagatgctgttgtcgacaaacgaagaagatgtagatcctgaagtttgggttgtgatgaaggaacagaaa

SEQ ID NO: 227 - DNA, 422 bp, Zea Mays
gagaaataaacatgcgaggcgatatgagtttaatcacctgatctgatctattcgcagatcgttcggtccttagggccggaccgtccgaccgtgcccagtgtcacaaatggtgctcaatacccctcatcaaccaaatgaggtactgtccctatgaattgtacttgttctttcactctagatataaggattgctagcatatcggcaatgatattaaacaatattggtgataaaggatcaccttggcataagcctttatgcgtgtaaaagaaatgtcctatgtcatcattaactttaactcccacgtcccactagacactatattccttatccattcagaccactttggtcagaaacctttgatacatagttcttgttggagaaaattccatttaaccttgtcgtaggctttctcaaaatctaat

SEQ ID NO: 228 - DNA, 383 bp, Zea Mays
gaatcctcagccaacatgtctagcatggcacttatttctgcgtcactcagattcaaaggcatctcgaaatgaacctgcctctcgtcatcggggatttcaccaagtgaaacaaccaaagcctcaacctcttcgggagaaggtcgcactctaaggcccaaaccactgtcaccaataggaggatttgacacaaaattgatgaaagccttggaaggaggcagattccaggctgaatatgcaacaggagcaccgatattcgacaccttgcctctaagaatcatttcaagctggcttaccagatccacaacaggaatccttctgttggtaacccgggtcgaatcagtgaggccacgataaaaataagctgggtacgctctgtctttcag

SEQ ID NO: 229 - DNA, 515 bp, Zea Mays
aggaaattgaaaaaaaaattgtcgttcgttccagccaatcgagcgcttcttcctcttctctatggcgagtggggcccttgtttcacttatttcacttggcttcctgcacgcagccgctggggcctgctcgcgttgccaggtgatggacggaccactgccgcgctggacggacggtttcccttcctgtatcgcaccactgtcacacgcccgtccatctcccttccccactctcgcgctttcaatgcgcactgagccacgccgatagtgcgccattgatgctgtcgtaaagcttttctcctcactccggcaccctcttctcctctccaccactgtcgtgaccactcctcttctccgcgacgacagtttctccttgccattaatggcatttcgttgggacgtttctctgtggcaatcaaattcgaggccatgatttccttctaccagcctataaatggtgccgaccttcatcccttttctccctgctcgacccttgctcagctgctaccgcactcgtc

SEQ ID NO: 230 - DNA, 476 bp, Zea Mays
tgaatttacaagccaaaccctaagttttggactcatttgcaaaaaggaccctaattgagatttcatgttaagtctgaatttcagagttttggctcaactttggagccttgcaactttcaaattctagggtttttgccctaggtcaccacatcaaaattgtagaccaaactaaggggaacaactttgcttaagaatgtgagcatagttgttatgaagaattctaagataaatgagcctgaagttggactgtcagactgcttgaaatctgaaattcagattaacagtgggataacatgaacttagggcttaattttaagcaagatccagtgactttttgtgggagcacattgtagcaaagttatagctggattgtagctctacaactttgctgtaggtaactggatgagttgccatttgaaattaagagaaaacttggcttcaaattggactgtcaggtccatttgactgaactttgc

SEQ ID NO: 231 - DNA, 423 bp, Zea Mays
cccagccattgttcaaagctcttaaagatcagtagaagccgagcaccgaccaatgctaataaatgctctctcccttgactgctgctgctggcagggatgcagatgtgcttgctggtgtatgcgtacgctcaccgtacgtaaactccattcacggaagaggagatatcctcgcctggcctggcactcttgactacccccagagtactgtgcactgcgtgcgtaacaggccatgctgagcaagtgctctgtccctaatcaactctcctccatgcctgcagtagtacgctgtactgtagtacagtgcaataccacaggttcctaaatacgtgcttcgcacctgtccttttcttattcttcttctcctctaaaacacggaaataataataaaaaagagggtttgtgagaatccagacacgatctttc

SEQ ID NO: 232 - DNA, 421 bp, Zea Mays
tattagagtataactagtggatgaagacgttattgggctagctaatgaccttttgtgatacgaggtttccaataatcccctctattcaaggcatacctaaatggtgtttatgtccactcaagtaaaacatcgcaaatttagccaaattgcacgagagaactgtccaaacataggttaaggttgtaagacatctttttccaccatacagttgctaaaaagttgtaatataaagaattcaaaacaatagatcaccttttaaacctcaaatgatgtttctatgatattgtgggcattgtattcacactagagggtattagagtacaactagtggatgaagacgttatttggctagctaatgaccttttgtgatacctggtttccaataatcccgtctattcatggcatccttagatggtgttta

SEQ ID NO: 233 - DNA, 409 bp, Zea Mays
tcagccagatctcaacctccgacaacgaagatggttggaactgatcaaggattatgaccttgagattcattatcaccccggaaaggccaacgtggtagcagacgccctcagccgaaaaccttttagaataaaaggaaccaactttttagaagattggaagaaggaatcagctcaactgaatgcatgtttggcaaacaacggcagtctcgaagtcaaaccaatgctagaagacctcatacgcaaagctcaatgcctagactcagagacaacaagactggtggaaaaagctcgcaaggaacaacttccggacctcaggacagatgaacaaggagccctttggttcaagaatcgtctgtgtgtactaaaaagggaggcacgagaagtcctactcgaggaagctcacaactca

SEQ ID NO: 234 - DNA, 502 bp, Zea Mays
atggtaaggctcccaactaccatagtaaatgtgacggatgaccttatttatggtcacgccttcaccctgacatgctctctggggggcaggtgtactcgctgccactgggcaggagtgccattgcatttaaggcaaaaccaggtcagccaatcatgcccgtgaccagggaatggaaaaatcactatagccatgattagtttcacatattaaatgtacgaggaggcgtactatactcctattatggcttgccagtgccattaaggcactcatgctctgagcagggctcggaaggtcaactcaacaggaataattaacattggcgcatgtccgacgtgcattacatggctgaggtatagggtctgcagttgtacaaatacgagattgcgatatgacaaggacaataggcccgatgataggtagggacaggtagaacgtacatgtaagatctaccactaccttgagctataaaagggagcccggacttgagtttggggggtgggtg

SEQ ID NO: 235 - DNA, 401 bp, Zea Mays
ctcttgcttacccatagcctgaggggagactggcattccttccaagactatggctccttccggtagttcccaagccttcttctctcctctagtagagaccgagtgaccttcaagaatctggggatcttcagctctcatgggttgaactgggttggatgaagtgggctcttggacccgcagggctctatgttggttgtgggtgaccaagtaggcatgcatcagcttctggacatgctcatccttggcttgcttcagggcttcaacagcaatgacttcatgactttctagggcagttgcacgggcttgagctgtggtgagatccacatggagcttacggttgcgcttctctgcaccttctactcgggcaatcatctgactgtggtgccgagctaagaaatcat

SEQ ID NO: 236 - DNA, 358 bp, Zea Mays
actatggggtcgtcctcaagcagctgctgcccttccaatgcacgcatcctggccatccaaacgggacggtttctctgaaagggcagaaagaatcttagcggggtgtcggccacttcttcttcataaatttgatacagggccctcaatgccttgcgagcgacgacttagcaagtgtctttgaatctgtgtcccgcagcagtgacactccattccacatggtgcggactggatccaatgtatacagtcacgacacactttctgtgccatgctcgacgaattcacgaccatcatactctagttggctcctgattccgaggtggactgtgcatgctctcagtagcttggggaaaccatcttc

SEQ ID NO: 237 - DNA, 426 bp, Zea Mays
acaggaaatgcctcagggacttcgatctccctccggaggagatcagcgacgctccggtggagtcgcggctcccaactggagtgctagccgtcgaaggccgacgtaagggagaaggcctccgggtccgcttcgacctccctccgcaggagatcagcaccgcgccggtggagccgtggttcccatctggagtgctgggcgagccgccggaaagctttgcgcactcggatgcggagatgaccgccgcgttcctgatgtccgtcatcgccgagaagagcggggggatgggcagcgccacgcaagtcgaccgggaccttgtatgctggacggagaggaaggaggcctgctcgcgccgcctgcgctacctcagggactactgtccctttcaaagggaggacgaggagagcgagccggggacgacgacacgac

SEQ ID NO: 238 - DNA, 401 bp, Zea Mays
gaatttgtgcacgtattcactgaccgatcttccatcttgagttagttcccggaattcatcttccttgagctgaacgatcccttggggcacatggtgctctcggaaagcagtttcaaactctgtccaggtagcatctctgatggcagcgttgaaggtatcccaccaagctaaggccattccggaaagttgatgagcagccaattgaacacgctgattcttcgggcatccgatggcttctaacttccttttaatcgtgcgcagccaatcatcagcatcgaggggactgctagatccagcgaatgtgggaggcttgagcctcagaaaatctcccatcttgtcttgtggtcttccaccattcgggcgttgattctccagacttctagtgaggacctcaatgagtc

SEQ ID NO: 239 - DNA, 542 bp, Zea Mays
ggagagtggatttggggaaattccaacttagggtgctacggtggacaatcgggcgcgaggagtggttcactaggttcataacaagtagatggaacaagccgatgcatcaatttatagaggacggccgtgaggagggcgaatttggacggggaagcgcgcgcagtgagaaggggaagagtcactggaggttgctaacttggcgctcactggctaattgtctacgacggtcactgtcgagtccttacagcttgcgacaacatggtgaatcaactatggcgtggcacaatcgcggtgaacggagatctccatgttgatgaccgttcggccacgttgctgcgcaagtgggtacgatgacttggcagtaacagtgccccgacttcatcccctgcgcaagatctttcaccctacatagttatccgcacgccaccgggcacgaatcacaatgacgatgaggatcacgacacgggatcactggcggcggtgcactgaacctggcaatcatcgtcaggttactgtactatgcgaattcccttcagtgcgcc

SEQ ID NO: 240 - DNA, 714 bp, Zea Mays
tgcgctcgagatctgcccacgcaccacatcgcgttagaaccgatggatcgaatcccaacggtccacaaccgattgcgtaaacacacgcctaactaccctcggatcagcatccaatggtccaggtccaacacataccagatctaatcctaggcatccttttcccatccaacgatccacgatcttcgcccccaacgggccacgcatgaatggtggcgctgcccaccgcctacggcggagcatcaccggtgacccaagcgccccatgaactagcgctcggttcctcaagcttttgggtgctaaacaatgtgcgaggtaaagccaatcgacaagacagggtccgactgggggtggtggcgccgagaacccccaacgcgaccgactacggatccgcggcggcgctaaggttcccgcgagcgatttacgtagcccgggcgagcatctacctatgattctcggttttgtgcaacaaggggtaacaagcgggaggtaggacaacttcttaccggcaatggcacagcacagagctccaattgcggaacaatggcgacagtggcggaatcgtactgcggcgggtgagattcacgcggaattccgcccagtgcgcactgcacgagcgttcccgcacctcgcacgacctctgcccacgcaaattgatccgcgtccgagagttccgtggcccgatttgaagtcttcacgccggtccacggcggcggc

SEQ ID NO: 241 - DNA, 847 bp, Zea Mays
cactataccctactaacggagcaatcggcttaagtcgacaatgacttaagacggtgcaacatgctcgcgcttactcgacttagggtgaccactataccctactaacggagcaatcgacttaagtcggcaatgacttaagacggtgcaacatgctcgcacttactctacttagggtgaccactataccctactaacggagcaatcagcttaagtcggcaatgacttaagacggtgcaacatgttcgcgcttactcgacttagggtgaccactataacctactaacggagcaatcggcttaagtcggcaacgacttaagacggtgcaacatgctcgtgcttactcgacttagggtgaccactataccctactaacgaagcaatcggcttaagtcggcaatgacttaagatggtgcaacatgctcgcgcttactcgacttagggtgaccactataccctactaacagagcaatcgacttaagtctgcaaaggcttaagacggtgtaacatgctaacgcttacttgtcatagggcgatctctatgccttaccagctgatcaattggcataaattaggaaaagattccaaaaaccagcatgccacgctcacttctgcaaatagcaactgttgaattctaatgtcatagctttcaacgccaaggacacattctaatatcctaccgagtatttgagcgcactgatcacacacacatatagttcacaaatgcattcagtatcttctaaacacaacaaaacttctctactcggcaatgtctttcgcaggagaaatcgaggaggaagggcgactcgaagcatcaggcgtagccttaacatccgcgacaatgtcatca

SEQ ID NO: 242 - DNA, 519 bp, Zea Mays
gttgattgccgctcgccgtgattcatgcgccgtggccatcggataaacatagctcggtaaaaatccccgccgccggtgagctggacgccatcccggccagccgcggtacccctccccttgctcaccgccgtggataaagctgctcaccgccatcatgccatctccgtgtctgccgcatgtccaagtctttccaccgcgtcgccgtgactccctatagcagtcccatcgtcgccggtgagctcgccacgactgtggacacgcactcacgcggccagtgccttcttcatctccggccgccagcgcaatctgctcaaattacccgtcaccgctcgctcctcctataaattgagcccgtggctagcttcgcaacattctcacgcaccaagccacccagtattgcccccagccgatcaccagtgagctctaattccggattttcccccaattcgagtttccgccacccgaaaccgacctcaacgcgaccagctcccttcccggtcagtccaaccctccctctcc

SEQ ID NO: 243 - DNA, 426 bp, Zea Mays
cgcgggcgccgaaggcagttgttatagcttcgtcttctgccttcgagtacgccccaagcatctcatcgcttgttacttttgtggcatccaaccagtcatcatttggcttgtcaaactgacttctaaaccgaaatatgtatttcagataaaccaagccaccctggcttgaaccagcggcggtctctttcagcatttcccaatcactcgcaagaggccatattttgtacgcaatatgctcttgaaccaagtctcttcagctaatgtaggtgcacactgtgttgaaagctgcctggcatgcttgcacatcattcccaagtgcagtggctggcctcctaatgccgaagcgagaccaaatatggcgttgaataattcctctcacatcctccctctgacttaggtcattctttacgtaaaaccattcctgca

SEQ ID NO: 244 - DNA, 496 bp, Zea Mays
tgccttatttggtaattgacgttgcgttgttatttttacacatgtagtctgggaatggtttcgttagaggtacaggttgtattcattcattcctcccctttgttgcggtgccggccgtatggctcgtttatatatgctgtcttctattccatcaaacgaaataaggtctatattcaatcaagcatgctagttccttattcctgtgtgcgttctctatcagcgtactagctatctctttctgcagtctcgacgaaacaagatgagtcatgtaatgcttgctgtttttttttcaggtctgttcaaggtgtgtttggttcggttccaagatcactagactgaagtgacaaagttgtgttgcacgctgtgcttctaacaaatggaagcagctgctcttgctcgtagaactagagcagtggaagaactacggcgtttatctacagttgctgaatctgatgacacaccagaacagcgcctatctacagttgctaaatctgat

SEQ ID NO: 245 - DNA, 417 bp, Zea Mays
ctagggctgaaggcccttcagccacgtccataggagctggatgactcggatcaacgcttttgcatggaagactgccttctaaggtcgacgatgcacgagataccactcgggttacctcttgcccagcagaatcatgtagcgaaagaccaccatccgggacctctaaacagatggtcggaatgtcagcctcaggagactctgataaaatatcctcaggaacgacctcttccagtgcttgatcaatgtctgatactgaaagcccttgaaggctgacaagtgccgacaaggcttgggagggaatatcgctgccctcgtcactgcctctgtagtgacggatgttcttgcggatcagcggaatttcttcttcttcctcctcttcatcctcgtcaaacacaccgccagcagcctgagcatcat

SEQ ID NO: 246 - DNA, 368 bp, Zea Mays
aactagtataaattttacgtccactgagcataccattcgaacccaaaacacgtatacacaaatttatacgttggtgctagctcgaaacaccgacagttggcatgtcaggtaggggcctttgtgtgtttttgacgttcttccctctaggctccggatggccagcctcgatgctgcatggattctcagagtaatcactcgcttcaagagcctcaacttcatcatcaacagtaagggataaacggttagggccctggctgtccaaccccactcgatggaagaacttgctgacatcgtcgagacccttagcggtctccgactcagcctccctcaaaaggcacgacccgggatgggcctcaccaggattcgtt

SEQ ID NO: 247 - DNA, 1321 bp, Zea Mays
tttaagatgaactttgagctcgattttgaaggggatccagtgactttttgtgagtacacattatagcaaagatatagatggattatagctctacacctttgctgcagaaagttgacatagattccacataaaaactggagaaaatgaggctccaaaatgcgctgtcaggttcatctgactgaaactcgtgatggtacagtagcctggattggatcagactgccagcgcggaactctctccgccgacgatacctccgccgtgattcgtgccgttgccggcccgacttgtgcacgggatgggcagataagggcacacggtaaaagatcttcgccgacggtgagctggcgatcactccggtgacctccgtggccctctctccctctttgcggctgaacagattaactcgccggtgaccgtcgcttcccagctgtgtgccgcgtgtccaagcctttccaccacgtcgccatgactccttatacccgtcccatcgtcgacggggaggttgccacgacggtggacacgaattcaccgcgcaagcttcttcctcacctccggccgccgcgcgtcctcctcaaaattcacggccaccgtcttactctccctataaattgagcccatgactagctctgtgaggtcgtcagctaactagccaccgctaatcagccacaatcatctaccagcgagcttgaatttccaatttcccccaacctcgttctccgccgccgtgaaacccaccctcaccgcggccagccgtccccaggtctgctcattcctttttcatccctgttctagcatgcttacgtattggtgatgctctccgacccttccaatcgaaccaaaccgcccctaatcgccaggaacacggctgtctggccgtagggttcacggttgtcgtggccagtgctccttgggtggtcttagatgaaattgggttggggaaaaggcttagggtcgatccaattcggtgtctgttgctcggagaactcagtcgttgccccgttcggccggtgtaagtgctcgccggagcgcggtcgtgcgtgaacggcgtcgaggatgtgtcaggtgaagaaatagaacatcaggggcatttctgcaaatcgtcagtgactctgttaaacagtgagagaacctgtttgcgattagtaaaaaccccgagtccctttctgcaaaggtgccagggcgcgggcgcgcgcgggcacctttctgccctagctgggccgcctgggctggattcggcccagtgctgttcaattgtttttctttttcttttatctccagagccaaaacaattatagaaaaatgtagaaaaatgctaaaattg

SEQ ID NO: 248 - DNA, 316 bp, Zea Mays
ttctctgcatgtcgatggccatgtaaatggtagagcattggaagttttggatgtgaagtgaactgttgttaaagtccactggagtgaagctgacttttgcttttatatagtagccaaaataagttaggccatacaaacaaaaaatttccaatcatgatatcctttgtgctatttgttggacattgttggatgacaaatgcaaaggattgtaaacttctatatggatgttttatgatgcaccccacagaggggtgtaatatgagtctttgccacagctacagaaatctcacctattcgctctgtgacagtgaattgt

SEQ ID NO: 249 - DNA, 652 bp, Zea Mays
ctcgggggctgggtcacggtttgcgctacccacttgagccggatcatctccggcagtaccctcgggggctgggcagtggcttgcgcttaccacccgagccgagtcatccccggcaacatcctcgggggctgggcgagtgtcaacgccgtccttgtggaccaagttctctgcagtagccgcctctaaggctgaaggcccctcagttacttccatgggaccaagatgatccaagtcagtctcctgaccctcaagaccgcgttctaaggtcgatgaggcacgggatgacctcaacccagcatcgagcacatcagcacaaacctccatcacaccatcatctgctggctctgataacagatcctctggaaccatatcctcaagagtctgatcaaaattcaccaaggacaattcttgcagaccaatgagagcagacaaagcaggagaaggaactccactactttcaccactggcgacgtactgccgactgttctttcgagtcaaagggacctcatccttttcttccccgtcatcttcatcagcaacacagataacacccccattggggtcagcagcgggtggagcacccccattggggtcagtagcaagtggagcacccccattaagatcagcgtctgtaagctcaggcacgggaact

SEQ ID NO: 250 - DNA, 599 bp, Zea Mays
taaactttgactctcaggtgcactgaatgggattcgccatggtacagtgctctgaaatggatcaggccgccagctcggtttttctcgccgccgacgatccctccgccgcgattcgtgccatcatcgtctcgattcgtgctctgggtaagtggataacgctcggagtacgtcgccgtggataagctacggccagtaaaatattccggccaccgtacagagctcgccgcggtggattctgatatgcacgccggtgaccgccgccttccggccttgtgccacgtgccctggcacctccatcgcgttgtcgtgacccgctgtaaccttctatccatcgccggggagatggccacggtaaccggacactaatcgcgcgctagtaactcctggtccctccggtcgccgcgcgtcatcgctcgaattcccggccaccgctctcacttagtataaattgaccccgccgtaagctccgttgtatcatcacgaatccagccaccaagaatcatcctcagttgatcgccagcgagctcgaatttcacacttcccccaaatcggttcgaatacatcgcgaagaacacctcgccgcggtcagccactcccag

SEQ ID NO: 251 - DNA, 617 bp, Zea Mays
actgaagaagttcagagcagtccaaaatatctgaaaatatctcagtccactagtttatctagggagttctagggtgtggcatacaaaaaggagtttgtgtgaagagggaagtagcatggcaccagtcgataatacccacgatgagattgaggtggtgtaaagcttatctactagccgactcagctactagcttatctactagcatgactcagctgctgtcacacatgcagtgaaggtgtgcttaactcttctcctgtgctttcaccttgcaaggtgaccatgttggaaatctggccactggacgaaagcaatacagacgtatgcgtttggacacgagaaaggaacttggtgctggaaagacacagcttttctggtacatacagtagtataaggtaacaaatgattgagctaatcacggcattatcgtgagcaattgttgccatcccaacaacctgggccatgccgtaatttctaccttacttattcaaacaatctcctcctaaagactacgctaactttacaatgccgatctcatgacggagctcctggaagcgaatgcgcccgagcgcctttctaagcagctgttgttcagtcccgacgaactcaacgtcgattag

SEQ ID NO: 252 - DNA, 777 bp, Zea Mays
ccgacgagtatcacacgcacatgagagtgccgaaacacaaactaggagggcgagagcggacctggaggtggctgaccacgacgagatgctaacggcggtggttttggccaatttgggcggaagaacagaattagggtgctacggtggctaatcggaggcgagggctggtgctctggcttcataacaacctagcagagctaatggtgtactcaatttatagcctaccagagcagtggctccgaatattggacaagagggaggttaggtggcgtcgtggtgagtcactggagttcgccagacgtggcgctcaatgagggtaaagccggggagggtaagcgactatctcacacgaccaacggcgaggtgacacgcgactcatggcatggcacaaccaaagtgagcggcggcaaccacggtgatggttgcatggccacgtcgccgggcaagtgggtacggtgaggccggcccgatcctttccccctccaatctttttacgtcccacggtaatatcctccctgggccgagcacgaaccacaacggccggtgcggattgtggcgtggaggtcaccggcggcgaggtgcactgcatcactgatattttcagacactgtaccatgaagatcttctttaaagcgcctgacagggcacattgaagggcgtttttcttgaatttttatgtggcaaactgctaatgcaactacatcaaagttgttgtgcaatgtaccagctttaattttgttataaagaccttgatcaaacattcactggatccccgca

SEQ ID NO: 253 - DNA, 502 bp, Zea Mays
gacatcatgtacatctgacaggtgatcgggtagttctagttgatatgcaacttctcccactcgctttaagatcaagaaaggtccaatgaagcgaggggacaactttcctttaactttgaatctcctcataccctggattggtgacaccttcagatacacgtgatcaccctccttgaactccagtagtcttctccgggtatcagcatagctcttctgccttgattgtgcaattctcaaattctcccttatcattcgcacttgttcttctacctcttgaataagttcaggcccaaagaactgtctttctccagtctgatcccaacatagaggagtcctgcattttctgccatatagagcctcaaacggtgacatcttcaaactggcctggtagctattattgtacgagaactccgcatacggtagactctatcccaacttccaccatgtttaagagcacaagctcttaacatatcctccagtacttggttagtcctctttgttt

SEQ ID NO: 254 - DNA, 577 bp, Zea Mays
cagattttaaagatactcattgtagaatacagttctttttagatatttctcgtgcatagaaaaccggctctacttccttaacaactcagctgctagcttttactaacaggatctttttttgtttcttgcgcacattgagcccacgggcccaaccaacagagagggagagagaggagttgtgaaagcccagcaggcaaagaacggaatgacgaaatccacagcccagttattagcatagcaagaagttgtgtggtgggcatcagcgtgtcgtcacccggtcgtcctcgctcactctccaacgacaattccattccatggcatgtcgaagttgaaatcccaccactgcacgcacgcctgtctcctccctccgcttgtctgtacgtacattcgtgagcaacgctgttctttcagttcagcagcgacaaagttcctgctgtgtttgcctagctgtgtgtctgtctgtctgtgcagctgatataccaatactgacaggggtggcaagtctttgtttttgtccacgaaagaaaaaagagatatatatacttggtgaagcagtagtgaaaatggatgatgcatc

SEQ ID NO: 255 - DNA, 473 bp, Zea Mays
aggagttcagaagtaccttagaaagcgctcacatgtagtgcgacatgtggtagttgtatgcttgtaatgaactgatgtaatgaataaaataacttggttgaaaaaattagcatatgcataatagtaactctctccccctggcatatggcttcggataaaaccacgcctaccgcctccgagattagagcagggtttcccctaagagctgaaggagaagctggcggagaagggagtgagacccacctccccgcacctccggagctgccattagatttagcccaagttctagccaaccaaacccgaggtcctcactagaagtctagagaatcaactcccgaatggtggaagaccacaggacaggatgggagattttctgaggctcaagcctcccacattcgctggatccagcaatcccctcgatgctgatgactggctgcgcacgattaaaaggaagttagaaaccatcggatgcc

SEQ ID NO: 256 - DNA, 428 bp, Zea Mays
caaagcggtggagactcggaagcctgaaggtgctcgcccaaagcgtccacgccgagttagccgcgccgactgcacctgttgaggaaaagaagaagaagaggcggcttcggcgattgtcatgctttgaccagggtgcaggtccttctgctctggttcatgatgaagtgctagtataggtccttcctgaggttggtgccaagggttgtgaccatgcacaagctgttgtgtgtatatttgatgaagaagaagaagaagtctcgttgatccataagaacagccggcattacagagttagtgagggggcgagtgatattccttgtccatctctgtcggctcttgtcagtcttcagggactgtcaatatcagattttgatcaggcccttgaggaagtcatccctgaggatatgctgtcagcgccaactaccgat

SEQ ID NO: 257 - DNA, 958 bp, Zea Mays
atgacacctaaagtaatgtcaatcctaaagaaatatgagaatagttggaaggcgatgaaagttgccaatccaattagctctggagaaggatgccaaaccatgaacataaagaggaagaaactgaaagaagccatacttctacgcaacagatgccaggcaagaagcatcatatggtgtaaattattatcatggctgcctctacaatcctctgtctgacagtagtcattgcaggaactggatgatatatgccgtgagagcaactggattcttccaagatacagagtacttccttcagttaccggtggtatgtggatgataatcaccgatttttcaagttcctgcatgtcgcagcatggagtccttggaccatacatagcaggcgacagttatcatatggtgttcgatcttttacagtttgtactcctatattggcagatatgtaccaggccagtgtccaccttatgggcccagacttcaacttgagtgtagatggtgatgtgagggttacccctcacgaggcacgagactcagcagcgtccaacatgctgtctcagcttcagcagaaggcaagggaaggctaggagagcggcatgtctccacagaacccttaatgctgcatccttgtgggtatcgacttgcatgcgacaggaaagaacagccatcacagctcagaaatgaacatgctggttgtcaaaacaaaattctatctatctatttgaacttaagaattctgcaggtgtggttctgcgttttcttgttgggcaatctggattttcacttgctatcttgacttgaccatgttctttttgtttggctacattctttttcgttcgcgcatggtagcctgctgtgctaagaaccgcggcccggagaggttcattggtctttaagctgttggctgcaggctatatacttgtcacccacccaccctgccgttgctgggagtccaaactcatag

SEQ ID NO: 258 - DNA, 480 bp, Zea Mays
gaacggcatggaggtatagcagaaagctccgaacggggtgatgaatgctgttttttcctcgtcttcttttgccaagctaatctgatgatacccagagtagcaatccaagaaagacaacacagaacatccagcggttgagtccactacctggtctattctaggaagtccgaagggatccttcggacagtgtttgttgagatccgtatagtcgacgcacatgcgccaatccactttattctttttgagtacaagaacgggattagctaaccacttaggttgtaacacctctctaatgaatccggccgtgaccaagcaagccagctcagcacggatggcttctctcttgtcgggcgtgaagcgacgtaatttttgttagatcggccttgcctgggggtagaccttcaatttgtgctcggccagttctctcgggactctcgtcatatccacaggttgccatgcgaatacgtctcggttatcttg

SEQ ID NO: 259 - DNA, 359 bp, Zea Mays
tgatcttgtgtgatatctagcaacagccaaagatagtgtttaagtggcacagactgcatcagcacactgttagaaacaagttcctcatatgcatacaattacatcacggagggacctcatagtatattactgtttgtggtccatatggcaaaatgagatgaacataaaggaaaaagaatcatcagacaacaagcttacatagctaggattgtagcagggaagcaataccaagcaaaacacaagcccaaaagagaagatacaattagaaacagtattatttcacttagtatccaccaaaatagacccacgagcaagggcacttgaaatagcaatcaaaaagttgctattaaggtcatatt

SEQ ID NO: 260 - DNA, 275 bp, Zea Mays
ggaaagtgtcatggttttagaaaccattaggcagtaacatttgtgttcggcggggatgctagcgcggacacactctgaatggtgagtcactaggactcgagcgattgatttgagacggtgggttatactggttcagccttgtgtcctagtccagtgtagtgttgatcgtagtattgttgagggcgtgttacaactggtgtgcttgtgtctctcttgaagggcggtcttttcccttttatatcttatgtgagaagccttataatgggggccctccc

SEQ ID NO: 261 - DNA, 728 bp, Zea Mays
tgacgattggctgcgcacgattaaaagaaagctggaagccatcggatgcccagaaaatcagcgtgttcaactggctactcatcaactctccgggatggccttagcctggtgggataccttcaatgtcaccatcagagatgctacctgggcgaagtttgaaacagctttccgggagcaccatgtgccccaagggctcgttcagctcaaggaagacgaattccgggaactgactcaagacggaagatctgtcagcaaatatgtgcacaagttcacggaattagcccggtacgcaccagatgacgtcagtaccgaagtcaagaagatggcccgcttcctgaagggactcaggccagaactcaagaccatcctagccagccaagacttcctcagtttctctcacctctccaacaaagccatgcaagtggaaagggcaaaagaggaagaaaaaggccatctcaagaggaaattccaagtcctccaggctcagcagcaagatcggcaccagaaaactcgatcctttggatttccacccaagggaccaagcttcagtagaccagctggacccaccacgtcacgtttcagtcagcagagtcagagctcctttcatgccccctcagttgcaagcaaccaacccccggcgaatgagttttggcactgcggagatcctagtcactacaagaacaactgtccccagctgaagccatcaggacctgcttactccaactcgg

SEQ ID NO: 262 - DNA, 310 bp, Zea Mays
tgcgtaagtaacttctacatttgcatccaagaagtgttgatgcagccctgacactacagttgcaaatggtttgaagttgcttgcgacactagagcaattatgacacgacaatcctggcgatggcgcagttgcatcgttgaactcgattaaaccattgttaagctctgcagaagtcttagtgtcactggaagccggtctgttgagcaaggacagatcaccctgggcggtaaaccatgattggtcaatggtgactggtctagccaatctaccaagaaatgggtccattctttcatccaacacctgcaacatc

SEQ ID NO: 263 - DNA, 439 bp, Zea Mays
cgatagtacgggtgcggttgccagatgctgcctcaaggtgtgaaaggcatcttcacatttctgaccctaatcaaacttcactcccttcttcaacaactcggccattggcttagcaattttggagaagtctggaatgaattgtcgatagtaccctgccagtcccagaaaactccgaatctgtcgaatggtggtaggaggcttccaatccatcacctcttgcactttctcaggatcaactgctattccttcctgagaaattgtatgacccaagaacttgatctcccttagccagaaataacatttggagaatttggcatacactgatcatgcctgatatagaaggagcccatcaccatatgtctgtagatggtaaagaggccaacctgcttgaggccattagagttgtgtcggagttccctgacgtgtttcttgaggagtt

SEQ ID NO: 264 - DNA, 346 bp, Zea Mays
agccacaattcctactcccgcttcgagttttacagagccaagaacctaacgaacccgccaatgacattttcctggtggaccggccgcacatagagcgcgtccacgccactacacggccccgcggcgattattgcactacggcgagcaattgccgccccactaccctactacttcatacaattctaggtgtttcgtcaatggtagagacaacataaaatccgactgtgagtctcacctcagtgtggtacccgccggtgagatgtccacggcggcggcgaagcgatggcggagttgtgtgcccggcgacgaattctgaccgcccaagtggtcgatccttccctcctcg

SEQ ID NO: 265 - DNA, 824 bp, Zea Mays
gatggtacagtaactgaaccagatcgctgattcagtgaacctgtcgctgccggtgggcgtgctccgcgatcctcgccggcgttgtgattcgtgcgctctggtgtgcggataatggccgacggtgaaaagatcttgaccgcggatgaggctgtgagctggccgctgtacccacttgccctgcggccggtcgagatgacccatgccggagtttgccgcttgccgcctggacaccacgtattcataagtgttaccacatcgcaatagaccgccgtaggtagcctgtccatcgcctgagacattgccccggtgaacgccacagtagttcacgcccgtgactcaccacctctccggccacgagcttcccttttccaaattcaaatccaccactggcgggtgctataaattgagtgcacaaccagctccattagcttattacgaacccagagcacccactcttgcctctgattaaccgccatagaccgtgaattttggttttgccccaaatcagccaaactcgccgccgagaagagctcttctgtggccagcgtcgcccaaggtagttctagcccaattgcgatatgttctagcttcctttcagtgtgacgatgctccccatacttagaattcgaacgctactgcacctcatcgccgggaacggctcggcctgccctcagttttcgccatcgtcgtaggtaagagaatctagggtcgggttagctcgattagagcatggtctaggctcgcctgggtttggggatttcgatcgagtgctcggtttcatcaggcatcgccatttggagcgagttcccgcgagagatggccga

SEQ ID NO: 266 - DNA, 414 bp, Zea Mays
ggataaaaccacgcctaccgcctcagggattggagcaggttttccccgaagagctgaaggggaagtcgttagagaagaaagtgaaacccaccttcccgcacctccacccctacccttagacctagcccaagttctagccaatcagacccgactcatcgaggtcctcactcgaaatctagaaaatcaacggccgaatggtggaagaccgcaagacagaatgggggacttcctgagactcaaacctcccacgttcgccggatcaagcaaccccctcgatgcagacggttggatgcgcacgatcaaaaggaaactggaagccattggttgcccagaaaatcagcgtgttcaactggctgcccaccaactttatgggatggctttagcctggtgggacaccttcaacgtcaccatcag

SEQ ID NO: 267 - DNA, 505 bp, Zea Mays
gtggtacagtcatcttctctggttgttgtacaaaaattaaagaaacaacagcccgaagttgctttgtcagaaccctgtcgagctattgaagggttactgaaaacagaattcaagaacaggaatggtcaccgtggaatagggccgaattggaagcaacgtacctcttgttccattcagtttaggtccagggatcctatattaaatactattgtttagtgaacaacctttattaatggagatcaccttgttcttaacacaaatcaagagaaaaggagggtgaaagggggtcggttcaggaaagcgctgaagatcagaatgctgaaatatttgaaaagcgaagacaaagatcagaggcactgtagaatcggatgtgttcgagtgatttggggtaaggatcgaccgtggggaggtagcttcggacgtgtcgcggttccgcggacctaccagagactagccggagataattcaccagcggtcaccgtggctcgatcatttccaccgccgt

SEQ ID NO: 268 - DNA, 532 bp, Zea Mays
ggaagacgggctgaccagtcaggcccagtgccaggggcgcaagcaactgatgggtggggccagggcaaagcgtgcttacgtgaagcggtatccgtagatccggaccactggatacgaggtggatggttaggatctagcgagcaggggtttatggctcagtggccggcgctgttccatccgcggaggcgaagtcaccggagacggggcaaacggctttcgagggggtctggggtcaccggtgttggctgcaaatggtgaagaaggtccggtgaactcgctggtaggacttcggtcgcgagaacgggactggaggcgagagaatggtggaggaagtgctccagacgggtcgggtaactctggcgaggaatcccggccgcggggagggggaatcgggcgtgcaaaagctcggactagctccgacgaggtaaagggaacgctatggaccaaagcaagagctcaaaacagggttgaatcgaccggtcatcgcacgggctcgatgcaccagtgcggccaaacttcagcgaggacgaat

SEQ ID NO: 269 - DNA, 527 bp, Zea Mays
gcaacaccctcctcctacggtagaaggcaacgacgaccccaactgctgtaagccctcggtctcagagcctccatagagcatccagcaatggctgcaactgggcctggtgctctcgcggcgcgccccatctccaatgttcccccgtcgcgaagacgactcactgggtatacgtcgtagccgctcgtcgtcgttgtagaggtataaccagtggctctaccaccccttattcgatgaggtcagggtagcagggatgtagagctgcactcgatccaagcgcagctggagcgtacaaccaccggccctcaccacgtggtgcaacttcttcacgtctgtggggagggagaacggctccgcacataagaggtggagccacaggtcctagtgaggctcaatccccagatacccctcacagattgcgacgaagatggccacttcggtgatggagttagggttgaagttgtggagctccaccctgtagtgatgtaggagcgcttgcatgaagcggctcgcgggcaccccgaacccct

SEQ ID NO: 270 - DNA, 434 bp, Zea Mays
cggctatacggtcgcaaagaactaccgattcaccgtgcacaactaatttggggagaggaggagaggatcccacgaattttagcatcaaccgagctcactggtgaatttgtgagtacctcgcagtggttcatggcgctatttataggcacggcggtccggctaacgatcagcggccacgaaacacatcgttaacacatggcgaccacgtaacaaaggaacacagtgaggtacaatggtggagtaagtgacacggtgacaaaagaaccgagccacgatggccaccgatgaaatatctccagtcaggctccggtcaagttcgcggaaccgtgacatggctcatagttatctcactgtggtcgatccttcctccaattcactcgagcacatccaaatccacagtgcctcagatcttttattcgttcttcagatatttc

SEQ ID NO: 271 - DNA, 630 bp, Zea Mays
tgagaatatctgattggccgccatcaccagaagaagaagtcatgatgtcttccttgttctcgggttttccagtggccggtttcaatctccagctgagatttctatttttcccccacgactgagagccctgggggcatccttttgcccccaacactcccagctaggggtcctgcccttcggatccatccgtagcacagcagaagcgcgacccgggaggggccactcctcttcaaccatgggaggacgaaacggggaagaaaaccaacctccactgaagctggaacgcgacgagcatggaagagactagagacgagagaggaacgacgcgaaatgtgggaaagaatgagcaccaatgaaatctgaaggaaaccctaatctcgtaccttttatctcccccgatccacacgacgacgcatccagacagccgctatgggccgagcgagacgcagaaacccctgaggaccagccgatccagctcgcgcgagaaggagaggcgacgctagcctcgtggcaagcgagaggatgcggcccatggagagcggacgcggcaacgctggccgacggggaacatgaggaagacgacaaaggtatacctggacgccttaccttttttttcgcctacgagccatc

SEQ ID NO: 272 - DNA, 736 bp, Zea Mays
aattgatcgggttgacaagcatgccaagcgtgcctgggtgctaaaacaagggtgatgagggcgagaacggacctggagatggtggtccacggcgcggtggctcacggcggtgcggagaaccgatttgggggagaaaggaattggggcgctacggtggctaatcggaggcgagggctggcgctctagcttcgtaacaacctagcggagctcactggggcatcaatttatagagtgcgatcgcgaatatgatgaattttggcgggaagggcgggcagtgagaaaggggaggagtcaccagagttatctctcgtggcattcattggggcactgtcacaggcgattgatagactacctatggcggtctactgcgatgtggtaacaccactgactatgtgacacacgggcggtaagcggccaacaccggcggggatcatctcggccagccgcagaataagtgggtacggtgaaccatccaatgaccgggtccgagattatcctagcgccaagatcttttactccccgcgattatccactttgcgccgagcacgaatcgtggcggccggcgtgaatacaagtgcggggatcaccggcggcaaggttaagtgaacacaagatcttcttcagactattgtaccattgaaaccttccttcagggcgcctgacagagcgaattagagggcttagttcttcaatttttatgtgacaacttgaccagccctctgtagcaaagttgtta

SEQ ID NO: 273 - DNA, 514 bp, Zea Mays
gtgaattggttagtcatcgtctcaggtctctaccccagtaaatgccacgttatgcgactccggtgactcacccctctctccggccgccagccttctccttcaaaatttggagccaccgccctcgaacactataaattgagtgtgccgctagctccgttaggttgtcacgaagccagagcacttgcccttgcctccgattagcctccatagcgccataattcctttcttcccccaattcggttcttcgcgccgtcgtgagccaccgcaccgtggaccgtcatctccaggtccgttctcgccctcctcaccctagttttagcacttaggcatgcttggcatgcttgtcgacccgatcaattgagctagaccgcatccaatcaccgggaacacctcggtttgtccttagcgttcgtcgtcgtcgtgggcagacaagctccagcctggatttgtgcaattaacggagggctttgggtcgccgggggtaggaactggtgtcaaccaaattagggcgtca

SEQ ID NO: 274 - DNA, 414 bp, Zea Mays
gttctgccaaagagcatgtacgaggcacgtaaactccttcacgcactcaagatgacgtatgagtagatatatgcctgtctgaagggttacgtcctatttaggaaagaatacacggaggcaaagtattgtccgaagtgtaaatcgtctacgttcatggaggtagactttggtgatggatagaagaggcagcttgacgtccctgtgataagcatatgccaccttccgttcataccgaggatccagcgtctatacatgactaaggaatctgtgaaatagatgacatgacacaaaaatggcaaacgatacaatcctgacaagatggtgcacatatctgatggtgaagtatggacccactttgatgtcattcactgtgagaaagccaaagcggctcataatgtacatgttgcactggcc

SEQ ID NO: 275 - DNA, 607 bp, Zea Mays
ctgtacagtgtgttccctatgagggtgtagtgagctgattgccttgcaatgcgttctgctgtcgccttgtcatccggttcctcttcattttttatgtacctgatgataggctctctccagtcattggggtccaactctggttggctcaaggtgttgcactcttccgtccgatctaagggaatactcaggtgtgatacttcttggacgaagatcccgggcgggacttcggcccgactggatcccagcttcgacaacgcgtctgctgtcgcattgcgatccctttccacgtgatggaattccaacccttcaaatttgtcttctaattttcggacggctgcacagtaacaggagtgcatacttgatagaatcagtcgagcaatcctagtctttatttatctagcttatgaccactagtgaatctccatataccatcaaattcttaatgctcagtgacagggcgatgttcaacccgtggatcagtgcttcatattctgctgcattatttgatgctgggaataataactggagtgcatacttgagttattcacctcaaggagcaatgaagagaattcctgcacctgctccctgcagcttcagtgagccgtca

SEQ ID NO: 276 - DNA, 574 bp, Zea Mays
gagatatgcctcttgcgacaatgatggattacatggctagtactaccatatttccgcgaagaatggattagttgattcgtagttcatgaaaaactgctttgggtcaaactgcccatcataagaaggaagtcgggggtggcttgtatgcaacatgttaggggactacttgtagatcccttgaaagtggagatgcgctatcataattgtagatccttggacgaaggtgcttgtgttgagacatccactttgctcttgtctttgttatagatcttcttcccttctcgtatgataaagcactttagagtattcatctgcctgtctccgaagctgagcagccaaaaacagcttctgcttttgtatctccatctgcctttgtatcgcttctagtccctcaatctttgcatcaacatcatcctactgaaccaagagcctcatatcttttctcttctcctgtcttaagttgctagatttgatctggttgatgtcatcattgtaatcttgttcttcaaggatgttcgcaatattggttgtgccaacaacatgtcaacactcctgttgcggaggcatgatcatg

SEQ ID NO: 277 - DNA, 516 bp, Zea Mays
tgtgatccgcctgagctcgcgcttgcggtggataccctctttggcaagaccaagggcggaacagcgtctaatctctcgccggagaccaaaagttgtggcggtgttacccgcttccgtgggcgcgcaactccgggtggctaatcatcagtgagttcctctcatgtgttcagcttgtaccccacgttgggattctgggttagcattgcagtttggggtgtcgggggcctcggcgggctgcgagcatccatggcgccaccgttgtgcctgctcaccgccgttgggcgctggtgcgcgtaggtagaagaaaaccaattagccgtcggatgctctagcagcggatggatttggatcctgctgtttggatccggctaattagactagtacccttgatctcggatcgtgcggccgagagtgggctttgtgaccgtgtgttgtgggccgtagatcctgcatcctgtggttctcgaagcataccggttcggtataagttaaatctaatatgggccctcggttggg

SEQ ID NO: 278 - DNA, 623 bp, Zea Mays
cacaaagtctggccaccactctttcttgagttctggatagtcctcaaatggagttttgtccttcttgacataatttatatttagtttccacttgaaatccttccatgcatggcctgtacgaataaaaggaaaataaatcataaatcccaagaaatgatgcaaataggatcaaacaatctcaagaagtcaatccttactcatagatttcaaagcgaccttcttcacactgagggtatgggtttcatcccttggcatgacaaatttctttgacacatcctcccataggtttgattttaccactgtagacacttttcgccaatcctttatcctaatatcaacacgcatgcgtgctatataaccacaatagcttgagaattcattgacatgttttaccggtgactgggcaatcccatttttatcaaacgtaagacgacgaggacctcctttttctagcttcttgcatttggcgtgacctcgtttcgttctatgcctggcagaagtacaagaacctttttcgacaatgtcctctgaatgcaagctagtggaagatgagctacttgtggacccagaggtttttgaagttgatgacccagatgtatcagaagatgactcagagctcattt

SEQ ID NO: 279 - DNA, 758 bp, Zea Mays
tccagatctggacgtgccctcgggtccccagggtaagccatgggcggcgaccaccccgtgagcgcacgaaggtaggtggggttgagcttgcttgacgatcgtgggtggggaggtactggccttggctgaaaggagcatgaagaattgagaggagaggatgtccttttaagcttggggcagagatgagctctatgcccatctccaaagcagcgccagcaatttgttcggtttgtgcacaccgccactctatggtcttgggcaaaacaattaagacacctcccatctacatgcctgatgaatttccttcttctctcctctctatcggccgattggagctggcttgaatactgatttgatgtcctttgcctacgccaccagtagggaggcggactacctcccagccatgagttaaatcctccccagcctgggtagtagtagcaaaacgcgcatcagagagatctggttgcttctggttttgattcgccggagaagatctcgctgacagcatggttggtgtgcttgaatgcccttcacttgcctttcctttcctttccccttctcatgcttgctgaatctcgatgtgcgggcttccaccgtggcattgaaaacaggctccgaaaatgctggtacgtcgtggtggccatctttaggttgggaaccttgaaggctgaggtctactggggatagacgcaccaccgccgaagacggcgcttgcaaggacgaaaactgtacccctgccgctgacgctggcgagccgc

SEQ ID NO: 280 - DNA, 335 bp, Zea Mays
gtagagttaattcctctaacgttgtggctcagcacagaccactccatgaagttaacagaattgggattactcattgagaacagcagaagtttttgggacatacccacaccagtggataaagtccaagtcagtccacaagccacatattaacagaatattaaaacaggcacgctcaggtgccagcccagtgtccaaaagacctgcaagaaccaaaagtaaaaccgagtacatccaaaagttaatggggcccacacacaagcccagatcccccaccatccgcctaatggttgtcttgttgatcctcatcagatgaatcgtcagttttctcatctgcc

SEQ ID NO: 281 - DNA, 677 bp, Zea Mays
cgagggatcagccattctgtgacgacttgaacttttgttgtatccatggtgacgcctgcagcggagatgacatgcccgaggtagtagatggaggtggctccgaactcgcacttggagcacttgacgaagaggtggtggaggaggaggacgtggcgtgcacgtgtcgcagttgatcgttccatgtcttatttatcctctaatacttatctccctaacaaacttctgctgcttatcctcttatctaagcaaatctcctactttctagtcacacctaactgcctgctactcctgcgccgacgtgatctgttgctagccgcgtggcctacgctgatagtggtggccccacatgacacaatccgttgacagtattttacccacctgcgtacgttgtgcaaatgtacagcattgaagctaacagctactgcccttctaaaaaaaataaaagtagctagttactgaaccttggtctctctcttatctctttcaccggatgaaagaatatcagaaacaaacacatcttctccttccttatttttcctcctcaacttttgtagaagatggtccttgctgccatggcccatgcagtgaagctgctcaaggtaagaagtcgaagtagacccatcagagctcctcctccactaggaagcagaagctcatctctacacgcagcaactttt

SEQ ID NO: 282 - DNA, 811 bp, Zea Mays
tttccacaaacttggtggctataaaagaatgggacgcccctgaatcaaaaagcacagtagctggagtaaattcaacaaggaactcaccgagcactactcctggggcttgctgggcttcttgagcgtcgatgtggttgactcgggctctaccctggtactgagtcctgctcagctggctgttggaaggaggtgccttggaggtaggtgccgatggaatcttggggccattcaccgagttggagtaggtcggcccaggagccttcaactgagggcagttattcttgaagtgactggggtctccgcagtgccaacaggcattagctggcggttgattgcttgcaacggagggtgcctgaagggagctctgactctgctgactgtagcgtgatggagtgggtccagatgatttattgaagcttggtcccctgggtggaagcccaaagggtcgagctctctggtgacgttcttgttgttgagctcggagaacttggaattttctcttgagatgccctttttcttcctctttcgccctttccacttggatagccttgttggagaggtgagagaagctaaggaagtcttggctggcgaggatggtcttaagttcgggtcttagtcctttcagaaaacgtgccatcttcctagactcggtgctgacatcttcaggcgcgtaacgggccagctctgtgaacttgtgcacatactcactgactgtcctcccgccttgagttagctcccggaattcatcctccttgagttgaactatcccctagggtacatggtgctcacataaagctgtttcgaattctgc

SEQ ID NO: 283 - DNA, 391 bp, Zea Mays
ttgaacgggacgccctgatgtgatctctacgccctgttgtgtagatgcaagggatgaggtagatcctgctgtcgtgcatgtggtttggttgcaagatctccagatcttgcgagcatgtattgcgggcccatgtatttcttgggatactcgatatgtgatattgtgaggagtactttagcagtagaatttgtgtgagtccctcatcatggggttttattatggtctggtaggtgtactggagtggagtttgaaaccacagtaacttccattgttatgttggtctacatatgtgtttggtgatggaactatttgttggagtctgatgttgtagtgttgtacgttctggtgttttcccatggttggagttccaaggtgcgaaaggtgttctggt

SEQ ID NO: 284 - DNA, 1553 bp, Zea Mays
cttttcctgggagacccatctgcttgtggcccagagaagcccacagtgctcagcgcgacaacggcctccccacccccgcgcgtagtgtccacaggcccaccccgcgcgcccctcgcgtgcgctgtgtgcccgattcctggcccgctgcggacgtcttcccccctcgcggcgaaccgatgcaacacaatctcgatcgcagcctcctctaccaaaccctagctgtctacgcccgtgctgccaccatggagtcgatccacacggatctagcgcgcacgcaggaggaggcgctggtgaccgacctcgcgctgccccaaccggccagaggaaatggcgacaagtgagggcgaccaccgcatcgcctcacccaccatcctccgtcccacttcccccatcgcctctcccgacctcacgccgaccccaaccaactagaggaaatggcggcgagcgaggccaaacttgagcaggtgtcccgggcgcgatgacaatcagacgacctgggttattgctcttgtagcgagcgagtggatcaatgggtaactggaggaggtccttgatagcgagtgggttattgctcttgtagcgagcgagtggaacctgaaaaccccgcttgtccaccaccattgtgcgacgcctccaactgcgcccgagccatcagcgcggccacctccaacagcgcccgagccatcaacgcagctgtcgcgcctcccatcaacaccgcacctccactagagccatcttcgccccaaatcctagcacccttccccaggctgccttccacgccgatggagccatcctcgccgcagtcgacgccgcgtctcccatctacgcctgcctccgatggagccatcctcgccccaaattgacgcaacgcgtgggttacttaaagaccatgccacccggcatcacaatccccccaagacagatttagtgtacatatatatctccccattctcaggccggcgctctccaatctccatccgggtacatctctgcaacttcgcaatcatcaatttggtactgctgtttttgaaaccatgcatttgtactgctgtttttttgttagggtgttagggtttcatcactaacagtttgtgtaatgctttatcagtgtacactaaatctgctactatttcgagaataattgtaaaagttgaagcaagttctctgttccttcctatttgactaaaaccctaacacccttggcctttttatcagtgcctttagaaccttcaagtggtatttgtttgaggggatttcttcttgtttattcaataaatggtttagggtctcatacattataaaaccctttatatggtgaaatgtgatttcctatttcgtgaaacgagcagtgcatttttgtagtaagcgaatacgtaatgtagttctgctcatgggagacgaccaagtagacatagctgcattggcaacctgcaggctgtagatgaaatgccatagcagtagcccattgatggcctgactgtgaacaataatccaaagtaagtcgaaagccttgaggtgactggccaatgtcaagtatgaagactcaatttggt

SEQ ID NO: 285 - DNA, 1168 bp, Zea Mays
aagtttttcaatttttcgactgtttgtattttcaaataaaatggtttttatgtcagcgttcttactagaggaagaacactgaacggaaattataggcaagaagagacgaagaaggaggattgagcgtgagctttggtattctgttatttccaaaactgaatgtcttttcctcccactctcctatttattctattacaaccactattcaatatgggccttaacgaatccattcagcaccagaaattctggagttgggcttcctagtgcgtcgacccatcatcctgtcttgtggcccttccatcgttctcccctgctccatcttcagaatgcccttcagccattaaaggagagctgacattccctcctcctcgaaagaacgcttgtccccaagcgttggctttaggaaattttgcacggagagcttcttcatcttcccatgaatccaatgcggcatccgactgtgaccacctgacaagcatctgctgcactgggctgcctcctcgtgatatcacctgtcggtccatgacttgaagaggaacttggagagaactgtcagtaccaggcaaggtagcactgacctgattgtcacctttggaaagcttgagttgcgatacgtggaagatgggatggacagtggcacctagcggcaactgaagcttgtaagcagctttaccaattctctgtagcaccacatatggcccaaaatatttgaaactaagcttgtgatttgcacgagccgctacagatgtctgaacataaggttgcaatttgaggtaaactgaatcccccacgttgaactctctgtcagttctgttcttgtcggcttgtgccttgatgcgttgctgagcccggagaagatgttggcgaacaacacggaccatcaattctctatcattcagccagtcctgaagatctccagagacaggcgtgtcattcagagtaattccaaaatgcctaggaagatggccataaaggacttcaaagggcgttcgtcccaacgaagaatgataactggaattgtaccaatattcggctatagataaccatgacaaccatttggatggacaggcgtgtacgaagctgcgaagaaaggtctcaagacattgatttacgcgctctgtctgaccatcggtttgtggatggtatgatgaactcatcttcaatgtgg

SEQ ID NO: 286 - DNA, 615 bp, Zea Mays
cccctacattggaccacattaggggggtctggcactttcgtccatacaatgcttcgaacggtgacatcttgatactggcctgatgactgttgttatatgagaattcagcatacggcaaactggactcccagtttctgtcaaacgtcaacacacaggctcttaataaatcctcgaggaccttgttgaccctttccgtttgaccatctgactaggggtgataggcggtgctgaaatctaacttggtgcccatagcttgctgaaggctcttccaaaattttgaagtgaactgcgttcctctatctgatactatcttccgaggaataccatggagcctgactatctctttaagatatatccgggcaagggtggctcctccaaaagtggttttcactggaatgaagtgggccaccttggtgagacggtctattattacccagatagagtcattccctttttgtgtccggggcagtccgcttacaaaatccatgcctatttcctcccacttccattcgagcgctgggaggggttgcagtaggcctgcaggtttctggtgttcggcttttgttcgttggtaggtgtcacaccgggccacatactgttctatctctttcttca

SEQ ID NO: 287 - DNA, 869 bp, Zea Mays
ggtcagcggggtgcttagagcgcggggcgcgatggccgctacatcgtcgatcaatagttctggctccacggtctacgcgaaacattatccgcacatccgagccatccgatgaagactggacgattaggatcgggcgctagggactttgtcctctccggtcggccatgggcggtgccttacgcacccgcaacggcgcagccgctggcggcgaagtggactggggctcctaggggcgctaggggtggtctgagtaaccagggaggttagggaggacccgacgaacaccatggcgagattggggtaccaggaacaggggtgaggcaattggacaatggaggggaggtcctcggtggaccgggggcactccggcgagcaatcgcgggcgagaaagtgcaaggcaggggaaaataagggtagggttaggacggttacctcaagtggagactcaggggctcacgaacggcgtctagggcgcaacgaggatgtaggtcgacagcgacggctctccgactgcgcaagaaccactccggtgagcgcggaccaggcgaatcagagggggagaggatgaaccgaggggcgtttcaggtggctggtgataatgcggagcttaccggggcaacggacacggtgggggactcgacggcgaccgtagaatggtggcagaaccacggcgagcggcgaaacttcctgggcgcacgcgtagggtgagagagagcgagagtgctcggctgagggcgcaaatgagcagggggagtgggcgagcggggtgcaggctctaaagaggtcgagggcatgcgaaggtggccaggaaatgcgcggatgtgggcgcgtccatggcgagagtgcatgggcgggaggttagggacaag

SEQ ID NO: 288 - DNA, 512 bp, Zea Mays
tttggagcagcagagggttccactgcatcatagacgaagcttgatcggggacaggagcaccgcaggatctcagctgggcagatacaccgccaagaaaatcctatgatcatgaaaagataagcaaaaaagctagtttgccaataagaacaataaaaaagaaaaagttgactcacctgaagattggagaggaacaggggaagacccaaagcaggaagagttggtgaattgctcgatgatgggagatcagcaggaataatatcaaaggcatgactcggaggaatttctaccccattagcaggcggcaggctcctggcgtctggttcactggcttctaaagtgaccagaccagttagagccgtagatagatgtgtcaccgtagcctcctcggaccgaactagtggcgatccaatgtggatgtccatagaagcaacagtaggggagcctgccccagcaccctcgggggctaggtcgctaccagcacaaccctcggggattgggccctccacaccagc

SEQ ID NO: 289 - DNA, 641 bp, Zea Mays
tcctctagttctctatcgtactctcttgcgcgagcgtctctgtcatagtggcacgcccacctctgtgccatgtcaccccacactactcacatggcgacctccctaccatgggtgttgtccgcctccacactggttgactcccctcccacctagcctcctccacgtcaattgtcacctccttgctaaagtggtctccctctccaatgtggctagctacctccatcgtcggttgccgagggaatgacccccggtcactgggacccgccagccagagagtgcgttggtgaaagagcccctgatcgttaaaatccattagtcagttaggagaggcggatgtgtcaaccccgaaacgacacgcccctggtcgaaccccatggcactagggaccagacgtggcaaaacctaacaagggagatcgagcgtatcggaagggaaccacttgagtggatccccgcgtccgactctagactaactcgccataaataaccggccgcatttattcatttaaccacgcctcacaccgagccacggtgcggcatcgtttcgcttcccactcatgacctatgagcaccccgggtcgcatagcactcatgacctatgagcctccccccgattgcggcacattaatgtcctgcgcgccc

SEQ ID NO: 290 - DNA, 874 bp, Zea Mays
gataaattccaagtcatcgcttccctctgctccattcagttcgaacttagccgggagaagttggatgcgctaggtcactgttaagacatagcctcgtgccgctgcccaagcttcgcgtcggccgccacccttgccctgttccgcgtctggtgggactcgcggggtcatgcataactaatcccccgactggtttgggctcgacgtcgattccgggcactctgattgctcaccgaaattgaagcttcacctcggatccgctcgacatcgacgaccgtccacgtcacagcctcaactcttggtaagaagcattcgattgaattcgttgtgttctgttctacgtatttccctagccgcgttaggatagaagcatcggggcgccatggcacggtgcacggcaatggtcgccgtcgtcttgggcgttctagcgccacccaacccttagcaaggttgaagatgacctcggtaccgttgatcgtgtggtgaacggctgcgattagaccacgcctactgattcgtttgagattaaccagggccattgatcgggcgatggtcggatctggatacattcgggtatggacgatctcctaccgtagatatcagatctagcagtcaggatcgcaccttggttcataatgtgtgagtctaatctgggcggatgaagcaagatccaacggccagattgcatgataccctttcggcctaggcattttgcataagcgaccccctgcttttagtgaataagaacgttgtccgttacaatgttaataacattactgttaggtcctgacatttttagattagaccctggaattcgaagaaatagtatccgcgatccacagtcattagaattaaccaaaattaaaacagaaattga

SEQ ID NO: 291 - DNA, 374 bp, Zea Mays
gcattatgggtcagctgatgaaggtaaatctcaaaattttccaggacatctgcaatcatcccgtgcacaggaaatctcaaccctgctttgaagaagctcttaaaaaccaccacttcatcattttctggtttcgggatagtctcttccccaccacaacgaatcaaccccttatcggcttctctgaagtagcctaacttcgtcatcataaccatatcagcttcagacacagttgacttccaaaaatccaaatggctgggcttcgacggcatagcggtgttataatcaatttcttcttcaccaatatcgccctcttcaacatcttcagtaataggggcgccttcgtcagaagcgccctccgtcgcaactagtcccga

SEQ ID NO: 292 - DNA, 615 bp, Zea Mays
ggcagatgccttaagcaggaaagcccagtgcaactgtatgaatatggatgcaaaaatcaccaccctatgtgatgagttgtgcaagctgaacatagaagtcgtttcttccggtgctttaagttatatttcagtggagcccaccttacatgagcaaatagttatggcacagattggagacaagggtgttcaagttattaaggaaatgatcaaacagaaggtggaaaaatacaaatgtttccgtcaggacagcaaagggattctatggtttggagaccgattggttgttcccaagaaccccgagctcagaaagaagatattgaatgaagctcacctttccaaattttccatgcatcccggcagtaacaagatgtatcatgatctcagatctttgtactggtggaccagaatgaagagggaaattgctaagtatatatctgaatgcgacccttgccagagagtcaaggccagtcatttgaaggtagcaggcaccttacagccccttcccataccatcttggaaatgggaggatatttgcatggatttcattgtgggattgcccaatacctcccgacaccatgattctatttgggtcattgtggataggttgaccaagac

SEQ ID NO: 293 - DNA, 364 bp, Zea Mays
ttttcgggcaacattttggcaagtatctgggaagcggtgtctggtgaaagtgacttggaaagaaggatggttcgggtagtttcggctttctcccaggtagactgccatagagcacttctccattccattctcgagatactccttccagacatattctggcttcttgcggatccccatgcgaagcgcacaacttcgcaacaggtgtgggaatccctccacctctgagcagtaggatgtcctaatgaccagagagtcttccatctggaataggaaaagaagggtctgttaatatcggaggaaaggagagaagaatcttttcttggggtaagaggtattttcttttaaggcaacttttaaggtcagg

SEQ ID NO: 294 - DNA, 455 bp, Zea Mays
tctacggctgaaggatcctcagtcacctccatgggagtcgggcaatctggaccaacctcttgacaccgaagaccgccttccaaggtcgacgatgcgcgagatgctgcccgggatacctctaaacccacatctggaatgtcagagcaaacatccatcatatcaccaccagtcggctctgacagcatatcctcaggaatgacatcctcaagggcctgatcaaaatctattatggataattcttgcaggctaacaagtgcagacagagctggagaaggaatatcactatcccctctgctactctgtaacatcggctattcttgcgaattagtggaacttcttcttcttcttcttcgtcctcatcaaaaatgcggacaaaggatgatgcaggatcacacccattgggctcatctgcaacaggatcacacccattgggctcagctggtgcaggattacac

SEQ ID NO: 295 - DNA, 413 bp, Zea Mays
ctcgttcttgagcctgacggcgatcacaattcacaatggtgggaattgcgtcgttctcgatgtgttctttcgtcagggtttcccccatctctgaggcttcgtcccgagagacaggttgtgctgggtcccgttctccggcttcgtgatgtcatcgcatgtttcggcgcctgtttctccatcgccgagcatcgcgcggtggaggttcctcccccagcacggtgggttcatcatcagagatgggtgatgactccatgactccagtctcccctaaatgaagaggacgtcagagtagaaaggagcatgtatggtggtgtgcttcttctcaccctcctttgagggcggaggtgttgggaggattgctcgttgtgttctccttcctcggtatggaacattcacttcccttcttcgagtga

SEQ ID NO: 296 - DNA, 873 bp, Zea Mays
attgttaggtgagacgaaccagccaccaccgtatcagagcgagtatgcttttcaaaccagtttgggatgggtaactgaaacttcccagctagctagattaatggattttcacctttacacacgttgatggataactgaaacttcccaactagattaatggattttcatctttacacccctaggatagataagggtgtccccaacgggttcaccaaatcgccagtgaagttgaaagctgaaaataataataaaaagaagtgaagagcgtaggtatgcagactgcagagcaacggagctgagagagggagcttactgtggcagcagcagcactagctcattgctctatctcctattcgcccaatagaatttcacaagagctggcaatttaagcactgttggttacgcccttataatcttggggctagattggacgtttggtttggactttggagaatgctagggtgtttcgtctggtggcagttggcacccagttgtatttggcaaataaacgaatggcacaaccttgtcctccccaaatctggtgagatctctattgagattatactattagagtttggtgtttggtctttggggttgggttttggggatggacaatgggagtttcttgcctgacggcttttgctgggctggcagcgaggcaaagcagcaatgacaccactagcccagcaggaggatttctgtctagtggagttgaggcttggggaacaccggcggtggagtgagggataaggaggtggttgccgcatgcgggttaatttcttgctggagttccatgctggcttcagcaaaaccctagcctgctgcggcagggtgaaggcgcatgggatggcagtggcattggggcagtaccgc

SEQ ID NO: 297 - DNA, 732 bp, Zea Mays
ttactatgcactaagtgggtgtttcgtcccaacagtattatacgatgtatcctatgttgcagtctacacacttccaacaatacatagaatagtcaaatattattattgtagtcagaatcataataattaaattatgatagaaaataagctggacatagctcatctcgattaggtagccacagaagtaaaatccctttcctaaagccatccaaaattaagggtatccggtattactgatgctcaaaactacggtgcaattcatactgacaataaacctttagaatccatctataactaatgtcaagcaaaaaagtgcttcattaaggtaatggaacacaacctttataaaaataaggaatagcattttttttgtcccctaagatcatgtagcactgagcagctttgacataccaactacccatttctttgtgatcaaagcataaaccaccctggaacaagtaggagtatatcagaataatcagcagagaagaattaagaaaatgaagaacacaagcaactgaaccaaacaaaattcaagaatttgaagcagatgtatcgaatgtctaaataaattgttccagaaatcttttaaactcttcaggagttaatgaacctgaacacgtgttacatggccaaagtccattaaaaggtgatctaaagacttcaatatatgtatcaatatgcacaaagaaatagcttgtttgacaatctggatatgttccaaccgatatg

SEQ ID NO: 298 - DNA, 342 bp, Zea Mays
cgcgcgtgcacgcgtgggcagttgcccagcatcgccgccgcacgtggggcctgcccgtcagccccgcgcccaccacgtcttcaacccacgtcctgcccagtttccctctcgctcgacaccgcacaagtaggagcagtcgaacacgcccgctcgtgccgaatcgtctggctcggagcttgtcgtggagcccatctgcgccccgtccgagctgagctcgccctcttccaccctccacattcctctcctcttcgcttcttgtagcgtcccgatgcgacacccacccgccatggacggagctcggccgagcatcctggccaacacccccctcatgtttaattgatc

SEQ ID NO: 299 - DNA, 514 bp, Zea Mays
ctgggatatctgaatcaaaatagaaaatgacttaacaaacgcgcagactatggagtcgacccatgcacacgaagggagccgcgcgcggagaatgagctgacacgtggcacgaggaagccgtgcggaagaacgagtcgtgtgggggatgcgcgtagctcatggagctgcacgtgcggggggaggttggtccagataatgaaccgtcgttgtgtccatcactctaggtgataaatagagtatatctatcactttagatgataaatctaaaggaccataacccacgcctaatgtggtgcggacatatgtggctaatttgatcgtatgggttagatcatgtacacgtggtaaactatcagtgattgtgacaaataaatacgtgacctagccaggcgtagctttgcagtggcgtaccgccgtccgccggtctatacagaggaagtatttaattttaacctcgagctcgtgcagccacggtgacagcattctgagcagcttctcagtaattggattccgt

SEQ ID NO: 300 - DNA, 761 bp, Zea Mays
gattggagtatattctattcattggagaaaggatacctagctcagatggaagtgaatcactggtgttcaccatgagggactgggcgacaactataggtggacctccgccgtgggcgcatgtggtgtgccggtgaatcggcggtggtcctccgacgcggcagatcggtggctacgcgagggcgaccaccatatgacggcttggcggtagatcgactatgctcctccatcttggccatgggcactgggcagtgagcctctatcgtgggtgcctgtgcggtggctcgttgtcgtgtatccatggtcgtcaccgtggatggtggttcctacgacgctaggattggggaatggatactggggaagcaggaggctcagggctggcggctgcgagtctacgaggggaacaggagtaggtgattcaggttaggtcaccgctacagtcagggaggaagatcgagcctgtgttctaagattataaatgttactgtactagcaacacatattgttgtcgagtcctaattaatcaatacattcccatagcaacacatattaagtgttgtcgcatcctatttaaacaatggatggtgcttgcaacatatattaaatgttgccaccaccctaataacttaacagatgatgcttgcaacgcatatgaagcgttgcccgctaatttcttacaacacataaaaccatgtgttgttgtggatgcgttgctataggggagtttgtgttgtagtggtcgagcatctcgcgtgagcacttcc

SEQ ID NO: 301 - DNA, 670 bp, Zea Mays
gtcggcgttgattggggccgtttgcgagcgaggagagtggatctggggaggtcggcttggattgtggcatcgagcatagtggatccgccttccatggagagccgcgtggtggccgggtcggcatcgagcagagtggaccgcacccttccatggaatgtcgaggtcgtggtcggtgtggaccgtgcccttccatggatagtcgaggttggggtcggcgtggatgggcgcccttccatggagagtcgaggttggggtgggcgtggtggtcagcgttgattggggccatttgcgggcgaggagagtggatctggggagaggatagccgtggcgggggcatgcttcaccatggccgatgtggacgcccacactatatagacatatagagtagtagagatatataatatgtcctcttaatcaatatacatacgttggctatgaaatttggagcaggaggcgtgaaaatccaatttcgttcacctcagctctggttcattaatgtaccagtacatactctacgtgcatatgatataactatacgttgtatacgcgttacagtagctgcgcaaataaaatgtacgtaacagtactgtcggccgtttttcttggtactagttaattagtacgtacgtgtactgtcaaatacataaaatgttgctaatgataactaatt

SEQ ID NO: 302 - DNA, 432 bp, Zea Mays
gtcttatatgagcgttatcgcagcccaataattattggaggcgagtagcgttcatgagtcagtccttgctaaaattgaagaacaatccgataacatatgcacatgagtgctttaggtccttcagtagcaaatgtaagtcttatggagttttacgccatgtgttaatacctctatgttagacccccaaaaatgtgccattttaagtgacctgtgtattaacaactttaagttgagcaatgattaggaaaaactgtttaatctgctctaacccatgtttcgagttacaatgtctaaaatggtttgctaattctgatactgcgttagccaactcatgttaagtaggagtcgattgcgtaagtgattgtgatatataggttgtgtctcagattgcgataataataggcaaaccaacgtgtatgttatttagcggga

SEQ ID NO: 303 - DNA, 816 bp, Zea Mays
ggtgtctgttgaaagtgctttagtagatccgaattggagagtagctatgaactcagaattacaagcaatagaagctaacaatacatggagttggtcaaaactgccaaatggacagaaagtcataggactgaagtgggtttttaagctcaagaataatgcagcaggagaagttgtaaaacataaggctagacttgttgcaaagggatattcctagatagaagggatagactttgatgaagtgtttgctctagttgccagattggaaacagtaagagtcctacttgctctggcagcacatggtaactggcagattcatcacatggatgtaaaaacagctttcttgaatggtgatttgagagaggaagtatatgtgtcctagccaccaggcttccaagatccagggaaggttaagaaggtcctgaaattacacaaggccctatatggtttgaaacaggcacccagggcttggaatataaaattggacagtgaactgatctctttgggttttgaaaaatgcagtgtggaacatgttgtttacagaaagggagctggtgactcctttttggtggtgggagtatatgttgaggatctcataatctgtggaccgtcagtagtaaaaatagaagaattcaagaggcagatgatgcacactttcaacatgagtgaccttggtttgctgagttactacttgggcatggaagttacacagaaggagggtgagatattaatctgtcaaagttcatatgcagcaaagattcttgagctgtgtcacatgactggttgcaaccccactgatactcctatggaacaaagaat

SEQ ID NO: 304 - DNA, 550 bp, Zea Mays
ccaacgaaacctgcatcttgatgctagcagagatgacctgacaaacaaggaagcaggcttgacccaccaacatgccaggcctcgggctatgccaccaccctcgggcgggacacgagtaaatcattccctcgtgtgtaataagtgggggaacacaaaggttaatgccattaaggcgggtttcccccagattacatcgtcctttacataaagggatctagagtctcccgctgccacgattctaggctcgggggttgggcgtggatccaaaacatacaaaaagagaggaaaaccacaactacgatagggcgaagagcttatcgctccacctccagttctaacacatgatgcaaccacgaagatagaagcccatgctaggaaaccaaaaggtggatgccaaaggaggctctaagacacccatctaatcatatccttcgaggacacaacaccgacgatcccactcgtagcctcgttgtaaccttaaatcaggatcttgaaggctgcggatggggcgctctagggaaggatcatcagagcacgaaggtcaaactca

SEQ ID NO: 305 - DNA, 444 bp, Zea Mays
aaagatcttgccgcggataggctggaatgtactatgtgcttgatggttcatcagtacacacaggcgacgtggtcgtgcggcaatcaccggcgtgttcgccgttcaccgtgaggacgccacaccttaggaagtttatcgcatcggtatgagccatagtgaccacccaatgaccgccgtagttcagtcgctctgcgattgccacggtagatcgccgccgtgactcattcccctctcgcccgctagtgcaattcgtccaaattaagcaccaccgctcaagcaaactataaattgagcacacagacgggttcgtagggtagtcaagcaccaagccaccaagtcgtgcctccaattgttcaccagagctcaccaattccatatttcccccaaatctgctttccgccatcgtgaaagaggtctcgccgtggctagctcatctcaggtccg

SEQ ID NO: 306 - DNA, 364 bp, Zea Mays
caggttatcaatgttccaggaatgctctaagtcttcgccgtttggcgttgcaagcctgtaagcgctgggggaggccttcgacttaacaatgtaagggccctcccacgtgggttccagcttgcctctggactccgttcgagctgttcggatgaggacgaggtccccttcgttgaattcccttgggatgactgcctggtcgcgccatgcttttgtctgggcttggtatttgtccagagcctgcagggcgaagacgcggtctccatcgatgagatccttcgaagttggctcatctacgtctgggacggccgacgcgactgtccgaggcgacccgtgctttatttcttgcggagtcatggcctccgat

SEQ ID NO: 307 - DNA, 655 bp, Zea Mays
aggcaatgatgcccatccgatccgtccaaccacaggatccatgccagggtcacatgatctccatcgtactctccgctctccggcgcgcggtcgagatggcgaagcgtatcggggtggcgcgataaaggatcacgggttgctttgggttttgggaagacctttttgttccgagtccacgacacggcggcagggtacagcagacgaccttaccttaccggctctctgatgatcgcccttttatgccccaggcccagccgagaaatcggcgcctgtttactaccacgtccattgattctccgtcctgcttacggttggtgttggcgtgcgtacctgctgtagccacgcaatctctgttgattgccatggatttagcatgagctagcactactcttcttgcgaaaacaacgcggcacagccttgagatgcactggtcgcatcctccggccgtccacaacaaaaaaaatgagcacagatgaactgcacaatggagtagcattttatctctcgaggggtctataaggaatcgtgcgtcggggctcgggggcatttgtgaacaaattaaaagggtccatcgaccatcatggcctataatttctcttgttttatctgggaaggacagagacttgcccggctttcccgccacataggtttcttc

SEQ ID NO: 308 - DNA, 363 bp, Zea Mays
caaaagaggaagaccatcaacctagaaatacaagatgaggagcttgatctagagaacaataacctcgaagcaatccaacagcagatggagaagcgcagggagaaggtgcttcgtctttctaagcttcagaaaagattgacgaagcagctgaagagatgcgcaacattgaagtgcaagatcagtacaactacaaggactagaactatgagggtcgtaatcatgacaatcttcgtcgtgaggcattcaatttccaagattttctctatgacgaagcctccccactgacactagagctgcaggcgacgccttggccaccattgtacaagccttctgtactaccaatgtatgatggtctaaccggtc

SEQ ID NO: 309 - DNA, 528 bp, Zea Mays
cgctgcgcttgcggctgtggaaaagctgctagcccggacgacggagggaggaacccctcgatctccggtaccaaggcgcctaccaaggtgccgaaggtgcggccatccagagccgacgacatccctgtcaaggccatccggctccgcgcggatttgccccagaccactcgcattgcgggtgatcttgaggagaaataggaactcgcgctcgtcgccttcctccaggcaaatgccgacatgtttgcatgggagccgtcgcaattgcctgggatccccagggaggtgatcgagcaccacctgaagatcaaccctgacgccaggccggtgagtcagaagcctcgcagacagtccgtcgagcggcaggacttcattcgagaggaggtccagaagttgctagacgcctgcttcatcgaagaggttcatcacccggtatggctggccaacccagtcatcgtccccaaggcgaacgggaagcttcggatgtgcatcgactacaccagccttaacaaggcttgccccaaggacccg

SEQ ID NO: 310 - DNA, 400 bp, Zea Mays
gtcgtgtaataccctacttcctgtggtgattctggtattgatgtgaggaatacaagctgagagttgtgggtgttgtaggctaagatgagatgaaatggtaggggtccctcccagccttatatacacgaccatggagagttatcccgttacaagcgatgatttctatctacttgcttatctccttctttgtcgcgggttgtatccctacatatacggtgtcatattcatccattcgtctgagttaccgttgagggtttagcctgtcgggtgatcacaattgcatcgcccgatacatccatgctcctatagcacttaactcgggcgttggtttttgtcgacttagatcgtgcctgcccagcctggttatgtctatatgggccatctcataggatgacccaag

SEQ ID NO: 311 - DNA, 319 bp, Zea Mays
aggtgatagtaattttcaccggcatgagaatgcagaggaagacactgaagaggtgtacacgagaagaagtgaagacgcgcgggagcaaggttttgaggtgaaagcgttgaagaggtctgggcttgcgtttgtccaatctagttgggcttgggcagaattaggcctgcgcgcctgcgactacgagtctccctatttggcttcttctacctctgatacatccttttccaaattgattgagcatagtgtacaatcaagcaaggaactgtgacatccgggcggtcgtcgccgtcgatcgagcagggacgctccggcgttttct

SEQ ID NO: 312 - DNA, 663 bp, Zea Mays
aagtgttactactggctattacaataaggtcatcatatcacatcattaaaagtttgtggctttaggccatcaccacatgcatcacaatagtcagacaaataattattacagaccaggtgttcattacataaattaaaagtgctgccaagatgagaatccttctccccctttttggcaactagcaccaaaaaggagagaaccaccagacacacatcaccactgaggaggaggaggatcaaagaactgatgcgccaggtgagttgcaaagtgttcttccccagactgagctgggggaggatagcttcctgaaggatcctggggcggaggataagaagaggattgacccggatccccctggtgggggaggcgaggcaaactgctcacgatcatcaaagtattcttcatcttcttcttcatcttctggagacatgaaaggcaccccatatgcctgctggtgccactcattgatttctggtggaggaggatgcagaggcatatcaggccaacggggagcaaaaggcatacccatagaggaagcttaacgacgaagattgtcattagtctcccgctgccaccgagccagctcatgcacatctgaagatatatttctgcacatggaaaagaatgctgcaataccatgggccagacgagcgcccatcctgc

SEQ ID NO: 313 - DNA, 1291 bp, Zea Mays
acttatttcaacattaacttaagcaaccattgcaatttctaaaatctgttcagaaattcgacagattcaggtgctgggcttgtgaaaagcacaactcctaaacgatctggtttatggctgtcaaattttagtacaagcaagataatcatgttatctacaactcttctatatgacttttctacagaaaacatgatttggtttatcaaacaaacagagcttctatataattcaagaattgccgcattctagagacttgaatcattctagcactttaccatttcttagagttaaattaattaaatgaggactaacaagtagacttacaaattttatccaaatcatttagtgcactaaaattactacaaccaattaacaacgcattcttcacgataatcacccaacaatttgcgttttaaattagacatcacatgagcactactactttttacccgcgatcataaccatacgcatttagactataacaagtaatccatcataactacgagcttaaccaaagccatctaacaagttaattaaccaaaggaatggcatagcccgccatacgacatacacatcggcttgcctattattaacgcagtccgagacaccacatgtatatatatcacaatcacttacgccatcgactcttacttaacatcagttggctaacgccgtataagacttagcaaaccattttagacattgtaactcgaaacatgggttgaagcaggttaattagtttttcttaaccatttctccacttgaattagttaacacacaagtcacttaaaataccatattttaggaggtctaacatggaggcatttacacatggcgtaaaactccataagactacatttgctactgacaccaatagtacctactaacctattattcaccatacgaacacaattactcgccgcctactagtttctaacataatccttacataactcgtaatcccactactaactaacaataaatcacgcacgacaactaccacatcaaccggttaatttatttggacaccgtctgcctagcttgccactagtaccccacattttgactaatgctcaaaaatacatcctttattcgattatacaacagcgacctaagcgtcatgttacccagtgcatacatctttcttcgtcgcgagtataaccatattacggcatacacccgcacacctcaatcaaatatcttacgccaccaccactataatacaccacggcacacacacgcatacgtgtccccactgcattctcatgaccaattttagcacaattaatta

SEQ ID NO: 314 - DNA, 656 bp, Zea Mays
cggaatctgtctgtaaaaaagtgcacccccactgtgcaggttttggtgtaaagcaatccccgtgcatcgccgtcatcaacacactcgggaaaactatatatagaatccataaatgagaggggaaagaacccgtgcagaaatctttttaatttactaaatctttctgggaaactttttctttactaaatcgttttgggggaacattttcctttactaaactactaggaggctaacatgaagggcccttcttccctgatccattcttcttgccccgcgctggcccctggggtggtcgatctcgtcgtgggcatatggctggctcgatcgggcggggtagggcgggcctatatatatgggatgctaccgcttttggctagcgaagacacgcacaaaggtaagtgtgtaaggttaggagccagtgtaccatcacatcagatcagatcgatcgctcgccagagcttataggggatggtaggcgacgtgaggaggtgcggcctaggcctggccatggctgtggctctgatgctcgctgcgctggttctcgttgcaagcggcggcgcggagacgaggcagaagctgcctgctggcagtggcaacgactacgaccactcagccattcttagccacctgtccaacatcattgatccgtcggggag

SEQ ID NO: 315 - DNA, 475 bp, Zea Mays
gaaagcggcgtcaaggtggaggatccatacctgatggttggtgaggaattgagcctcgatagcaacacaggcttagcgagcggtggcccctactcacagacgacatcatggaactcaaccatgagggtaacaaggatccaagagaggaccacactatccatctgacattaggaatgcgtcgacacgatagcgtcggtgaggatgtgtttgtcgacggcgtagtggaggagagtcaacaggacctggtcacaccagcggatgtacttagttgattctagggcaaggactacggagacaagggcctgtattctagggagccccatcgcctaatcatgaagattgatgatgaccgatgcgttggtgtgggaagggcatagtcatcaacggggtgagggtcgtcgcccgggacacccacaaactagcgagtggtttcgatgagctagcgctcgagggtgacgaaggtcgcacactccag

SEQ ID NO: 316 - DNA, 429 bp, Zea Mays
ttgcagtccacgcttgagtcctacagactcgagaagactaggatagaggtggaaaacgtataccttcgatcagtcttgagatgggtgtctagaagtgagccccagttggacatgatggttagtcaattcaagaaggtaactggcggactggattaggctttgctgctaagactgggagtggagcttgctttggtaacgttggtgagtgcagtggcttgactccatcagagaaacatccagcctccccaaagcttgtcaaaatcactccatataatttttccacctttgttgtgagagatggagtgcttgtggagcttgtgagagccccaccacaaaactagtgtgatgtcccaaacgaaaccatctcaggaacatacttgataccttgcctaacatctctagtgatcccctttctagagcaccttaggc

SEQ ID NO: 317 - DNA, 570 bp, Zea Mays
cgccaacacacgacactctagcggggtcatctagagtagggggcggcgccgccgtctcgacatgggctgtggtgggcgatcgggcgttggccgtccgatttgagtggacactcacgattagaacctcgatacccttcggatggatttaatcatcgtcgtcgaagtttgatcgggtcgctggttcacctagtgcatcatggtcgttagatcgggcggtagcagctctgggttgaagtagaatgccctcttcgatgcctatgatccgtgccattgatctagcgatgggcggtgtcagttagatcgcgggtcaataatgctcataccgttagatttggatccgatggttctcgttgcataccggtttgggtcccgagcagatgtaatctgggccctccatctcagatcgcacggatgggatcgtccaataccccctgggcgtgcagaatttgataaagagaacctctagttgtaagtaataaacctgcagtcctctgtcctttttaaagtatttacatcggggtccctgggtttcgcagtttagcccctagaaactattttaggtataaaaat

SEQ ID NO: 318 - DNA, 580 bp, Zea Mays
caaagttgtagttggtttatagcactacaatattgctgcagagatctggatgtgttgccacagaaatttggaagaaatccggccataaactatggctgtcaggcttactaatgaagcagtgccatggtacagtgtccaaaatagaccaggccgccagcgcggcaacctcaccgccggcgacctccctatgcaaagattcgtgccatcaccggcgtgactcgtggccaaatcaactggatagcacttggagatcatcgccgtggataactccggccagtaaagtattccggccaccgtacaagcgttcaccgcggcggaattggataagtacaccgatgaccgccgcttctcggccttgcaccgcgtgtccatgcacttccaccgcatcgccgtgacctcctctcgctccccgttgatcgccggagtaattgccatggcatcagacacgaattcactgcgccagtgaacttcccctttctctgaccgccgcgcgtctcgcccaaattcatggccaccgctcactaagggtataaattgaccccgccgcgagcttcgtaaggcagtgaagtatccagccacc

SEQ ID NO: 319 - DNA, 469 bp, Zea Mays
tatagagcctcaaatggtgacatctttagactggcctgatagctattattatatgaaaactcagcatagggtaagctcttatcccaactgccaccatgcttaagagcacaagctcttaacatatcctccagcacttggttagtcctctctgtctgcccatcggtctggggatggtaggccgaactgaaattcaactttgtatccaagctctcatgcaacttcttccaaaaccgagaagtaaactgtgatcgtcgatcagacacgatcttcttaggcactccatgtaggcaaactatccgggtcatatacaattctgctagcttggctcccgtgtaattagtcctcactggtatgaaatgagccacttttgtcaatctgtccacaatcacccaaatagagtcatacccagcaggggtgcgggtagtccaacaatgaaatccataccaatttcttcccatttccactcagg

SEQ ID NO: 320 - DNA, 439 bp, Zea Mays
gcatttacacatggcgtaaaactccataagactacatttgctactgacaccaacaatacctaccgacctattattcaccatacgaacgcagttacacaccgcctactagtttttaacataatcctcatatagctcgtaattcaaactactcactaacaataaatcacgcacgacaactaccacatcgaccggttaatttatttggacaccactcgtctagcgtaccactagtatcccgcattttgacttgacttataaacatagaggaagtgatacaacgaccaaacatttatgtcgagcacaattatttatgaccacatttatcgactagacaagtggaacattaaccgattattcgcacacctcgtctttaaacacaaatcacatgtctcataatttatatcttcgacccactctatcctacaccacaatgaataca

SEQ ID NO: 321 - DNA, 895 bp, Zea Mays
ctaccatgaaaggtccttcccataagggtgataacttgtgtcgttcctcccccgttagaattcggcggaggacgagatctcctattgagaaggatcgttgtcgcacagccttgtcgtgatagcgccttagagtctgctgataccgtgctgattggattaccgtgtttaggcgttcttcttcaagtacatcaatgtcctccagcctggtggcttcagcttctgctatgttttcgaagatcaaccttggcgccccgaacttgagatcggcgggtagcactgcctctgacccatagaccatgaagaaaggagtgtttccatgcaaagctcggctgggttgggttcttaggctccaaacgacatagggcaattcccttatccactttcctgcgaacttttcattcttgtcaaagacctttttcctgagtgcctccagtatcatcccgttggctcgctcaacctgcccgttggcccttggatgtgctacagacgcatacttgatctgaatgctcttttgctcgcagaagtcgaagaactctgaactcgtgaagttggatcctaagtcggttatgatgctgtttggtatcccgaatctgaatattatgtcttgtatgaattccacggccttagcagaggttaaagaagcaatgggcttgaattctatccatttagtgaatttgtcgattactaccaatacatgagtgtatcccccttgagctttcttgaaaggtccaatcatatccagtccccagcatgcgaaaggccatgttactggtatggtctgcagttgctgtgctggcagatgttgttgttttgacaagtattggcaagcttcgcacctctgaactaactcgactgcgtcattctttgctgttggccaatagaatcctgatctgaa

SEQ ID NO: 322 - DNA, 294 bp, Zea Mays
ttttttcaacgcctatttattattgcggctttaaatatctgctacttattaattcccatctttttcttgtttagtcagcaaatagatattatatgcttcacaatatagcataggctaggtgtgtgggcttccaaaatctaggattatgttgcctcatcatgtgtttcatttttaaaaaatttatattgactaaatgcaagtataaagggttgtatgttcggtgctcacaacttaagtaacatcatgaaacaggtcatataaacatgtcactaagtcatgtcgcgtcaagttgtg

SEQ ID NO: 323 - DNA, 607 bp, Zea Mays
gcttgagatgtagaacaccagaacgtggggtgcctgcttcaccgacgaagctccgccatggttctgggcggcgccgccgcgcgtcgttgtgcaaggaagggagaaaacaccctggtcgttcgatcccatttgaacagatgagattagaaataaggtatcgcgtcggcctgattcgttctggaccgtcgatggcatgatatgcgatcgcagattagatcaaggcgtggggcgctcctaaccgtttgatctgatcggacgattgttatcgcgtacccgttcggagtcatggcgatttgatcttggccgttggttctgatctggcggtcgatatcccttaatacccttttggcctcgtcaactttgctaaagagcccttcgacttcctatgaatcagctcgccatccccgggtataggaagattagagcggatcagcccctggtcttttgtagaatagtgtccccagtccaatcagagaataaaggcaataaaacaattcagaaaatgattttttgtttggccattccggagacattaattttgttttaatattgtttaccacttagtaaatttgtttggccatgaaacatgaactaaaattattcacat

SEQ ID NO: 324 - DNA, 483 bp, Zea Mays
cgcgtatggtggtcggagtgcataattgaagaacgctggagcatgtggtgctctcgacgggcgcgattggtgggctcggggtgatcaatttctcaccggagccacgaagaccgcggcggaccacgcattgtcgtgggcagcgtccctggcgccattaacccaggtatgaaggacctcctccgcctcactttggtctctgatgtgctccgcgacaaactaatttcgggattggggcgtgtgggcggcaatcgcatgggcgccggtgagcctccactgtgggcgcaccatctccgccgctctggtggtcgtgaggtggaaggcctcccatggtcgttagatttagatagacggtggagattagacatgggaatacctattgggaggataaaccagagccgtagatctagatccaacggttgtgggcctatatcggttccaagtcgtcccgatgtgatctgagccctccatctctaatcgggcagt

SEQ ID NO: 325 - DNA, 586 bp, Zea Mays
gtcgtaagaggctgtgctttcaccgtgcgcaattgatttgggagaagggtggagatggcagtgcgaattcgacttcgaattagtcactgtgttcgcgatgatcacacctcgtcgtggctccatgtcctatatataggcacggcggcccagcgatcggtccgtggccacgaggtgggctgttagcgcatgtctaccacgtaagaacgaagcacagtaagagagatcgaagtatggcgacagcgcggcgaaccgcgctgagtcacagcgaccgccggtgagaaaactccggctgagctcgggagatggcgccacgtatgagtcaccctttccctggcgttatccatcctataccatgcacgaatccgaacggcgatcaacgatggcgagttgagctggcgttctgatccatccgaacattgtaccatggcacatcttcatcagtcgcctgaaccagccaccatcctccccaattatctctggattcttgttaagaacatagctatctctcttaatagaatttgttcactatacctcaatcttcaaccttgctataggattctgggatcgacaccgaacggattcaaag

SEQ ID NO: 326 - DNA, 746 bp, Zea Mays
gtcaacaccatccttgagggccaagttctctgtagcagccacctctaaggctgaaggtccctcagtcacttccatgggaggaggataatccaagtcagtttcctaaccctcaaggccgcgctccaaggtcgatgaggcacgggacgctgcaagggatgaccccaacccggcgtcgaacacatcagcacaaacatccatcgcgtcaccatccgccggctctgataacagatcctctggaaccatatcttcaagagtttgatcaaagttcgccagagacaattcttatagaccaatgagggcagacagagcaggagaaggaactccactactttccccactggctatgtagcgccgactgttcttccgagtcagagggatctcatcttcttcctcctcctcattttcatcagcaacacagacagcacacccattggggtcagcgtcagatggatcacacccattggggtcagcatcggtaaattcacgcacgggcacttcctcaacagcaggagccgaaggaccagcatcccgatccaagctagatactcgccgaagacgtctctttttctttttctgctcatcggcaggagaatcaagttgattggctcggcaagggcgcttcgagcgaacactgacaggcctctgaatatccaaggctttaccagcttccgggagaggcgcgaccaccaatgttccagcaggagcggcatcagaagaatcctcggctaacatatcaagcatggcac

SEQ ID NO: 327 - DNA, 496 bp, Zea Mays
cgcagatcaaggattccgttgccaccatctatgaccgactcgctagggtccataaaaccgaaagtcgagttttcccctcctccatttgttcgctgtgtgcaagtttccctcaacaacgagaaagagaggttccgctgccgggcagtgacggtgagggagcttgtccgtgtcgcgtcaccaaacctcggcgcgcccttagcactgctggtgttctgtgttggcgggcagtgggttacagcaggtgtcgacgacgtgagtgttgtcgccgggagagtgttcaacacagccgtgctttggacatcctagtacttgcctgtgcacgtggcgtgaaacggaccaagccacctcgccgatcgtcgaagaccgtgcgaaggttcgccatggagggagaagctggtaagggcgtccgattggagaagggtcgtctcgggctccggctactgctgcgatgcgtgtgcgccgccgctggtatgcctcatgctgtgggcgggtctcg

SEQ ID NO: 328 - DNA, 1345 bp, Zea Mays
aggaaaccaatacccgtgaggcctaccgcactctgaagatggactatgacaagaaactgaagaagctcgcccctgcaagaaaaattcgcaaaagaccaaaagccaaggatgtcagactgagtagaaggaagaagcccttccagccctaccccctgtcgggttaaggaactcgtccgacaccaaggagatgtccctagctagccttgatgacattctcaaggaatttggggacactttagagaaggagttcgggagtaccctagatagcactcgcgtgtaatgagcttatggtagttgtatgttgtattatgtaatgacctgatgtaatgaataaagtaactagttaaaaaaatggcatgtgcatgatagtgactctcttcccatggcagatggcttcggataaaaccacgcctaccgcctccgagattggagcaggttttcctctgagagccgaaggagaggctggcggggaagggagtgagacccacctccccgcacctccggaactaccactagacctagcccaagttctagccaatcaaacccgactcattgaagtcctcactagaagtctggaaaaccagcgcccaggtggtggaaggccacaagacaggatgggagaatttttgagactcaagcctcccacgttcgcggggtccagcaatcccctcaatgcagatgattggcttcgcacgatcaagaggaaactggaagccatcggatgccccgaaaatcagcgtgttcaactagctgctcatcagctttcgggaatggctttagcgtggtgggacaccttcagtgaggccgtcagagatgctacctgggcagaattcgaaacagccttccgtgagcaccatgtaccccaggggatagttcaactcaaggaggatgagtttcaggagctaactcaaggtgggagaactgtcagtgagtatgtgcacaagttcacagagttggcccgttacgcgcctgacgatgtcagcaccgagtccaggaagatggcccgttttctgaaaggactaagacccgagcttaagaccatcctcgccagccaagacttcctcaacttttctcacctctccaacaaagccatccaagtggaaagggcaaaagaggaagaaaaagggcacctcaagaggaaattccaagttctccgagctcagcagcaagaacgtcaccagagagctcgaccctttgggctccaccccaggggaccaagcttcaataaaacatctggacccactccatcgcgctacagtcagcagagtcagagctcccttcaggcaccctccgttgcaagcaaccaaccgccagcaaatgcttgttggcactgcggagaccccag

SEQ ID NO: 329 - DNA, 570 bp, Zea Mays
tcctggttttctagaggtaatgggtgcgtcctggagcttgccagttgggggctcctgcccgttggagcaggtgtcattgaagcttaaaaggttagctcgcgcattgcagtcctgggggcataaagaagtgggtaatgtaaggttgcagctggggtttgtcagagaagtgttgcataggctggaaatggcgtaggatattagaattttgtctagtggggaagtttggttgctgaacttgttgaagcagcggtgtcttagcctcgcgtctcttgaaaggactgttgctcggttgagatcacggatccactatctaaaggagggtgatgccaacactaagttctttcattcgcatgcatgttatcgaaagaaaaagaatttcatctccaaacttgaggaagatggaagattggctaccaatcatgatgacatgcaacaaattcttgaggagtattttcgtaacctgctgggggctgatttgcagaggccatttactattgatctgagtaattgtcacagggctgcgatggatctaactgttttggagcagcctttttcagagaaggaggttag

SEQ ID NO: 330 - DNA, 813 bp, Zea Mays
gtgagcaggaaactgaattctctgaaacttctcaggctgttggggcctcttgctctcaaatcgacatttgcgctcattgaactccgcctttttgtttctttcggtggtgattgctctgttaaccatggcattaaagtcattatgaacagtgacttccacaagggtcctgatctcagagttaaggccactaagaaaggcttcctgcttcttttcatcatcattgacatcttcaggagcataacgagacaattctgtaaacttgtgaagatattctgacacggacatggcgccttgacgaagctttctgaactcatctttcttaagcttcatcatactgctgggaatatgctgctctcgaaagatcttgacaaaatcagcccaccccatcacaactgcatcttcatttacctctcgataactttgccaccaagcaagagcctgaccccttaattgctgcactgcaagtaagaccttgtccctatcatcagcatggacgacctcaagcttcatctcaatctcacgcaaccaatcatctgcctcgatcgggttgtcagatcccccaaactttggtggttgtaagcggtggaaatctgcaatgatgctgccattgccattatgatgagctacaggtctgggattgccttgatttccttgagcttgagcagtgatagtggtcactagagcctctagaagtctattctgctgatacatcatggttgctaggtcgacaggagcaggaggggcttggggtagagggtggctctctgctgagtcagcgaggttttcaggcagtctaaggagagcgtgactaga

SEQ ID NO: 331 - DNA, 1288 bp, Zea Mays
gataaagtccaaggatcccttcaatctgctgaaaataaggggatggcaataatttcagagctcactgctaagcatcagaaggtaagagaaaaatccaggaatgaaatttggggagcatgccttcaccaaaagcattaaggtgatctaactttacttctttttgtcctcagcaaatagaaagcttgcaggcgcagctagctgaagtttctgcagaaaggacgaaggcatctgaaaccatacaatctctacaggtaactccagcatttagcatcatagtattatcataaaactataatttccaggtggtatttagctgtgttagtctattaggtgaatgcttttaaacattatgccattttctgttgtgctttactgaggaaagtagtgactcatgagtagctgaacaagactgatctcagtatgctggcgaaaaaatggtgaattagagtaagcaatcatattatcttcaacatttgcatataattatgcttttgcaggtggtattaacggagaaagactcagaaatagctgaaattgaagcagcatcaacaggtgaagctgcccggcttagagctgctctggaggagatgaaaggggagcttgttcatctaaaggatgaacatgtatgtttctctattctgtactgaaacatgccattgctgtacaaagttgagcatcatagatgtcaaattcgaactggcggatatatgagcagctgtagttctagacttgtaatgatgattagttttatataaactacaaactatggtaatctaaaattgatgagattagtgtgttctgaggatggcgtaattgcacaaaaatcgctgaataaagtgatcttgcgtgacttagaaaccctgcccattattcagagcggacaaaacgtatgtaaacttttagtacatgatggtagccattgtttaaaaagatcgaaacagcttgtagacgtagacctgacttgaatttaatttagtcttgcttctgtttggccagaagatcagttatgatgtgtgtgggaactaagtagactttgtctgacttctgcaattactcaggaaaaagaaaggcaaagctgggagtctacttgtgaatctcttaggtcaaagctggaagcatcagaaaatgcatgccttagatctgaaaaagaatccgccgaagttaaaagtaagtctttcaatacttactattttgactttggtgcgaaatggttaaatctattaagctgtttggatattctgcaggtcaactggaattagagttgtcaacacgaagtcaattgttacaa

SEQ ID NO: 332 - DNA, 518 bp, Zea Mays
ggcgtgcccaacctcgccatcctgccatgcaatgtggctgtggtggcaagcaggaagtcacgctcctcccaatgccacactcccggcctaggtcctcaaggctgatgctgaggagtaggaactcgtcactctagcacttcggttttctgaaatctgaagcagaaacgagatctcatctagagcttcagtgttctagcgaccagggaggggaggcccgcgcggcactatggcgaaccgacggtggaagctggaggtggagccgttgttgaccgtcttggattggagccgagccgccgatgaggggagggcagcatgggcctgcgacgaacctatggagtgtggtagggcacaagcagggggtgaagaggttgccagatcctggatctgtgttggacgcacgtcgcgaagggtgctagcagtccggttgttgagctcatcgccacgggcaccggtgaccagccttcgagctcaaccaccaccaggcagcagcataagacaggacagagcatcatccgccg

SEQ ID NO: 333 - DNA, 342 bp, Zea Mays
taaggaaaaagcgcgcggcgaaggggtatggttatatatgggccgtgcgatcacagatggagagctaagattaaatcgttctcatccccaaccggtatggcaccaggaccgtaggatcagagatctgtggcctagatttcaaatatgctcgatcagatcaccaccattggacttctagatggacgaccaagatcacgagcctggagtggctacgggagatctgatcgtatccgcttaacctcgatcggacggtcccggatgcataagtcctcacaactccaggacccaatcccgatcgctgaacgagcatcccacggtcacgcccacttcatccctcccgac

SEQ ID NO: 334 - DNA, 578 bp, Zea Mays
gacggaggggtcttcggaagaggacttggattatttttgcagctttggatgtggctgcggcggagactcctccgcgtgtgatgggtgctgaggatcatccgggtgcgagtgctgggcgtaggcggcgaagagcggtggcgaaatggagaatgggtgagttgtcacgaggtgaaaggcgtcatcgtggtgagatggagggtggtcgtcttcgtgtggatgggactagcaaacgggaattgttgtcctcgccggctggggcgagtgtgggtgaaggggagctgcaaaacctgtttgcgggtgaggaattaaggataatgttgttcaactatagggagatgggtatcatctcgaaggttgagccgatgtaatgtgtgatgccatcgctgtatgtgtgtaaccataattatgtgtgatgaagctacgcgctttcgtggatcaggttgttctcgtagggttctgcgcgaagttctttagaaaaagacttcgatttttcgtactagtatttcggctgcacccgtaggcgacttttgcgcggagtcttttggaagagacttcgatttttcgtgcttagtattccg

SEQ ID NO: 335 - DNA, 1578 bp, Zea Mays
tcaaagctttgcaacttgcttcaaaccaactaattagcaaagatttctctagatgatatccatacttgtgaatcagaaaacaaacagaaccactcctgtgggagaaaagaagtgtaaagagaagctaatagcgtgtgcataaaatggaaaagttgtgaactctcactacttctgcaccaaaaatgttattgatagtaagttctactagataaaaatcaatgtaacagtaaggttatcaattgtggggtcatcaaatcaaaataatagaacaaatggagcaagagacagcagtttgatgcaagggtgtttatgggatgatgaaagatgccccaaatactgaatatcaggctcccaacatgtattaaagtataatagcgcccaagatttaactcaggggggtttgggcagcaacacatggaaatagtaagactttacagaagacaggagatttttttcagggaagagactggaatgagctttctgagggaataatatcacatttggcttatacagatacatgtaaggaaactgcatactcttgtcagaagaagctatagtcaccagtcaccacacaaactaggaagcatcatttaaaggcatggagaagtacaggaaaaagggcacagattaataacaggtgactctgggggcaatgtacttatcagtcatacctcggaagaggatttcaaacctgggacaagtgtagagttgtcataaatgaccagataattaacttaccaagagcattatgtataattaacttaccaaaacaaagatcctctaaaaaggccatcaacgataaggttcataatgtgttctttcttcatccttttctccctgtttgctgtctttgttgtgcatttgcaggcctaaatgtttgtaaagttatttgtaacggagcaaggatatattgcattgagtaaaagatcggcaaatctaattagtgagtgcttgcatggctatgcatgcaatgggggaggagggggtatgttgtgtaataggcaggtgagtaggatccaaataccagataaaaaacagtagcagagagatccatccattcctcttggaaacaccttaaggacacagctttctcatctcttggtgcctcacacctgcaataattgaattcatcagttaagaactaaaaacataaaatactttaaataacaacagttgcattaccatagaagtccaggtccagtgttaacatttttgtctagttccttaatgatgacatcaataagtttttccaaaatctctggaatattcctggcaatcttcagctgaactttcacgtaggttatgaacaaactctggaagcaaaaacgtatttcaaatatgtaccgaaaaatgcaattgagtttttgtaatcaaaacaaagatataaagttacaaaactgcaagtcagatcaccagaaccttcaaggcctgatcatgagttgtcatccaacaacggaatataaactcttgaactgcattatggatcttcacagatttgtatcccagatttggcccatccttcagtaaaaaggtgttaatgcattccataagtttgcgagtcagctttccctcctccct

SEQ ID NO: 336 - DNA, 429 bp, Zea Mays
gagcactgaagcaccaaaggtcgatggtctcagaggggggagcagagcaccggaggccggagcagccgcacatggaggtcggcgacgagtcggccgaaggccgtagcagccacacatggagatcgactacgcttcgacatcactccattgcgggatttttggtctttacaacgatgtcgtccacgtagacctccaagttacgtccgacttggtcggtgaagcagtggcacatgcgcctctggtacgtagctccaacgctcttcaagccgaacgacatggagacgtagcggaacatggcgaagagggtaatgaaggtggtggcatgttggtcggtctcatcatggcgatttggtggtagctcgagtatgcgtccaggaaggaaaggaactcacacccgatggtcgagtctatggcctgattgacacatgg

SEQ ID NO: 337 - DNA, 376 bp, Zea Mays
tgcaaatttgtagaggggatgcacgacatcacgacgtacatcaaggacgtgctcaggacgctgagggagctgaagaaatcgtccggcctcgcgttcgagatgctcaagctgctatcagacggccaggaatccagcgtcgtaatggctctcagatacctgcaaattccaggctctgtatatacatacaatgcagccgtcagatgatccctctggatttttcccattgcaggacatgtggagccacaaggagatcaatcaggtagactgcagcgcgaacggcgaggtcacgtcggtcgtttacctcaacaactacatcttctccggccactccgacggcacccttaaggttgctgcattcatgcatgcatgctcttcc

SEQ ID NO: 338 - DNA, 736 bp, Zea Mays
tcgagaattcgaccagggaaggacaatgccggattaaatcaaccaatcgattaggccatacctccgttagaagttcttcttgcgtctggcggccctgggaagagaggtgaatctctctttctctccagacggaggggagaatggcggcttgttaggcggacgtgggagcccaagggagaacgcagagagaaggaccggctatacgagtccgagcgttttgtggagacaactgatttttctattgtggtgtttcttcttactcagagatcttcctctcctctaaccttcaccaacacatgatgcgccaacgtctcaggacattcctcatctgatctcacaatcaacaaaggtggcgtttgggaacccggagattttcaaaatttgtaccgtgtacagtatccaacaaaattcaacgtaaggttaatactccatggagattctttgttgcagcacactattcaagacaaagaatccaaactgtttggatcaatagcagataaactttatcagattacgataatcctgcgtaaccaaacacggctacagtatagataaaaatagaaggacgcaagtagacatataacatattcacggggtgtttggtttgggaattcaaaccctccaagataaggtgagatcatttctcaaatttggtgggatgaccacatttcttcgtgagaaacgaggtggtgatagatcaacttattttatcctgcaaatcaaacaaaaaagtgag

SEQ ID NO: 339 - DNA, 652 bp, Zea Mays
gagatgatttatgtttgccaagacaactgcatgcttttttggaaggaacatagcagagagcagaaatgcttaaaatgtgggaagtcgaggtacatggagcttgtaaatgaagatggggagaaggtggtgacaaaggttgcacataaacagcttcggtacatgcctctcactcctagagtgaaacgtttgtttctctcgaggaagaccgctatgcacatgagatggcataaagattgtacagacagacaagatgggttaatggtgcacccgtcagatggtgatgcatggaaggctcttgacaattttgatccagagtttgcgagcgatgcaagaaacgtttgtatcggcttggcaactgatggtttcacgcctttcaatatgaccgctgcgtcgtattcatgttggcttgccattgtcataccgtacaaccttccacctgctctttgcatgaaatatgagtttatgttcctatgtcttgttatacctgggcctgagcatcctggcgtacgcctcaatgtgatgcttcaaccactgattgaagagttaaagaagctatggcaaggagtggaagcctatgactgcttcaagaagcagaaattcaatcttcgtgttgcgtatctattctcggttcatgattttatggcgtatggta

SEQ ID NO: 340 - DNA, 405 bp, Zea Mays
tgggaagaaataggcatggattttgtaaccggactgtcccgaacgcaaaaagggaatgattctatctgggtaataatcgaccgtctcaccaaggtggcccacttcgttccagtaaaaaccacttttggaggagccgcccttgcccgaatataccttaaggagatagtcagactccatggcattccgcggaagatagtgtcagacagaggaacacagttcacctcaaaattttggaaaggccttcagcaagcaatgggcaccaagttagatttcagcaccgcttatcacccccagtcagatggccaaacggaaagagtcaacaagatcctcgaagatttactaagagcctgtgtgttaacgttcgacagggattgggagtccagtttgctgtacaccgaattctca

SEQ ID NO: 341 - DNA, 797 bp, Zea Mays
gctctccccacgcgcgcgctccccctctgtccggtgggtctgccctaacggcgccaactccctgagccatgcgcgctccctcgctctctgcgccacggacccggtatgtcagtgtcgttgcacgttcccgctcgcctgccccctcccactgacccatggaccccgcctatcagtcccgtcatccccaactacccgcatgcacatcgtggacttcgcgcccacgacgcacgccgaggccgcgaccgccccacccccgggcatttctagtggcccaaacccccactcactctcctcctccctcattcgcgcacccgcaatgctcccaccctcgcctcgcaccgtgagcatgccagagaagcactatcgccgtctaccatggttgcgtgcccgtttcgccatcgccgttgaacccttatcgtgtctgttgcttcggtgagcttcgcctcgacgtccgtgaccctggacaccccttggttcgtgccctcccctctgtttctctctgcacgcgctcaccgaacttccctccgcttagcctcagcgctgccgccgtcgactcgagccctcgtcatgcctctgccaccattcaagggacccggagtgttccctcaaggtaaccaaccttccccgcccctctatttctgcttccctgccctctgctgtgcgcgattgctcaccatagtgagaagggctgctgccgagccttttcgtcatggaccgccacccgccagtgcctttgcatcggtgtcgtgcccacctccgtgttcgccacacctcatccgacctctctgagcctttcc

SEQ ID NO: 342 - DNA, 537 bp, Zea Mays
gccgagcaaatctgtgaggcgaatcgactgagcaggtcctaccgctgggcaggaccggctgaccaggtcctaccgagcagcccaacgaggtagaccggccgacaaggttctatcgagcaactctgcgagacggactaaccgaccaagtcctgccgagcaactctgcaaggtggaccggtcgagcaactctataaggcgggacgaccgaccaggtcctaccgaacaacccagcgaggcgaagaggcacatgcctacaacggtggccagtacacctgtggcccatgacatgccctcctgtcacgcgcacgataggagcacacatgtaccccctgacgtagaggtagggcaggcacgattaccccacgtcagccacagttagacacgtcaccaccacacattgtctcggatgacgccacgacacgccggagggggggtgatagagtgtctggcaatgagtgtctcgcaatgggatgagacatcgccacatacggtctcagtatcacttggctctgtccaatgggtcttgtcaggcatcgc

SEQ ID NO: 343 - DNA, 283 bp, Zea Mays
tttggacactacactagcgagcacgtgatggagagagatagttggcggtgcatagagtgggatggcagcagcgtcgaacatgaacttatggtaaggactttacttccagcaggtgagatgtgagctgatttgatggtggactatcatgaagttgggccttacaaccaagttgggctgaaatatgaagataggtcggcaagaatgatgggctgatattagaagaagggtattatggaattgatgttagtacctcccaaaggcttgtgtctcatccacaggtgcc

SEQ ID NO: 344 - DNA, 379 bp, Zea Mays
gtttggattcgtccaccgtctatggtgggcatgctttgatttgtgcaaggggaatcgccaattgtttttgttgttctgatcgatgggacagttaaacgatttagaactattagttttggccgtcagaatcgtgttaaaccgactgtatgtagtcacagggccaaacaagttggaacatcatagtgactgacgtaagacagtagcggatctcgtaggttgtagtatggggggtcatgtgctataggcttgtagtactgcatcttgcacaatttgcttgctgtttttgatagtggcgtgacttggagctttcccagttcgtggattaacgctgtgggtaccttgcattgcagaaaaagaggcaactctgggggaataacgg

SEQ ID NO: 345 - DNA, 432 bp, Zea Mays
aaagaattcgtcatcgaattcaaccactccaacaaaacatccaaggtagccaatatagcaacaccattcaaaacatgggtccattattggtcttaattaacacaagaacttctacctcgactaattgtctaaggaaactacaccatctgacatcaagcatgaaccaacatgtaatgaagctcaaaccaagtcatagacgcaatcaacactacgatttcacaacatcgaatttggatgcagccatacatcagcatcaatgtctcaaaacgacactcttttatgaaggggtaatatgcactaagcacaacctttaccaacttcaacaattcattttaattcaatggtgaaacatccacaccagatgaatgtataagaagatcaaacacctcacctcacagcaccacgaaacaagtagttctattgaaacaaaac

SEQ ID NO: 346 - DNA, 474 bp, Zea Mays
cggtaggatcctggccaggtagcctctgcaacgatgaatggcccttcccatggtggtgacaatttgtgtcgtctttctcccgtcagcactcggcggaggaccaaatctcccactgcgaaggatcgatgccgcactactttgtcgtgatagcatatcagggtttgctagtatctggctgactgtatgaccacatgcagccgttcttcctctagtatgtcaatatcctccatcctggttgcttttgctttggctatgctttcgaatgttaatctgggtgctccaaagatcagatctgctggtaacactgcctccgacccatataccatgaagaatggggtgtttccgtgtaaagctcggcttggctgggttcgtaggctgcagactacatatggtagttccctgatccattttcctgcgagcttctcgctcttgtcaaacacctttttcctgagtgcatcgagtatcatcccgttg

SEQ ID NO: 347 - DNA, 1039 bp, Zea Mays
aagtctataacttgcataaattatattctcacattatctaaaagcgttaaaaaccggtatcatcccgaatcaaaaaaaggaaaatatgaaaatgatcgtaaaactagccaaatcgttttcgtccttttcctaatcggttcttgaataatttgaaaaacgaacgagaaaaacggtattcggaatgtgacggtacatgattttcccgtcccattttcgcccctgcatgacactgattttttttggtcctgtgaattgagaagtggcaggcaggacattacgaccaatttttggtcttcactccaaatttcagtcttagacaggccaatattcagtctgtctgcaggagggggttgtggcctcacaggaaatttaacaagcggtgtggccagtgattttggatgcagaggcggggaagaggaaagcatgaatccaggcgggaaagtgttttgcatggcattagcgcctagttagcatccaattagttttcaaactgaatggacggcggtgtattatggggcccatggtgaataaatgaaaactgtgatacttgagccttccttggtcacagtgccatgggcttatgacttgactttcggacggagtactatggaaaaatttctaatcatttatcttacagtgaattcgatatatgtttctgaatcttacttcgcaatctcaccatttgccacttaaacctacaaactggaagtggaaaggaggtagaagcgctgacattgatggataggaaatattgaggaactctgtaggtctgtagctaacggcataactgaataatccgaccctttcctgacaattgaataattgataaatattactgtaaatagtgatgccagaataccaccataacgattgttctccacaatccctctccaaaagcaattaactgcacaaaataccattttgagtttttaccttttcaaggtatctccttagtactcctgtctagtataagaactgcaatatactgaagacaatatttttaagtctgtggatataacagttagatattcttgattat

SEQ ID NO: 348 - DNA, 437 bp, Zea Mays
agggaggaattgtcgatgtttattgaacgacaaatattttttgcccttcttcaagaaaatgaacctaagaacttccttacaaagtgggcatggaacttatcatgaacacaccaggcagagaatagcccatacgtagggaagtcatgtagagagtagtggtaccaaacatgcattttgaagtttttctttgtatgtctataccccttcctcccaagcacggacaattcaacaatcatagtcttcattacacacccattttattctctgggtgtccaggaattatcaatgacaagaatatgtaatgtcattgaaagcatatgccggaggggaggttgagggggataacaaacacggaccaacatgtgtatgggggtagccatactcatatgaagtcttgttcaagaaagctcgaagaaagatgtggtttgacacatggc

SEQ ID NO: 349 - DNA, 611 bp, Zea Mays
tgtagatgtactcgtgttggtgttgatgtcctcatcacgaagcatgccaaaagttttcccctcgctcaagcaacccttcgtaattcaccaagctaatcgcccatacctggccacttcaacactaggggcttgatattgtcagacctctgcctacggctcaagggaaccttaagttcacctttgttgccgttgaatacttcaccaagtggatcgaggccggagcagtatccacaataacgtcgaagagcgcccaaaagttcttctggcaaaatattgtgtgccgcttcggagtcccgtccaaactcacagtcgacaacggcaaacagtttaatagccaagacttcagggatttcggtttctccatcagcaccaagcctatcttcgcctcggtatatcacccgcaatccaacggcgtcattgagtgcgccaacggcaagattttcactgccatcaagaaaagactcctcgacgacaaaaagggcaaatgggccgaccaactacctgaagtggtatgggccctaaacacgacagaatgccgggcaaccggattcacaccatttcgcctattgtatggatccgaggccatgacgccgcaagagataaagcatggg

SEQ ID NO: 350 - DNA, 569 bp, Zea Mays
cccgcacattttttctctcccacggcattgtcttacgcatgtcgtgcccctaaacttctcagcaaaatgggaaagcagaacgttctcttcgcaccataaatgacattctgcgttctcttttgtttcaggccagtatacctccggcttattgggttgaagcccttcacactgcgacatatcttgtgaatcggctccccactaaaacccttgctttctccacaccatatagtgccctcttttcctcccaaccctcctatgatcatcttaaagtttttgggagtgcctgttatcctaacatgtcctccacagcacctcacaaacttgccccccgctcctccttatgcgtttttctcggctattcctcggaacacaaaggctattggtgtctccagcttgagtcgaaccgcattcttatttctagacatgtcgtttttgacgagtccttcttccctttcgcagccatgtctaccactcccatggcatcctccgccttggattttcttcttgatgaacatgatctaaccgctcctattcctggagcaagacttgtgcatgcaggtacacctcac

SEQ ID NO: 351 - DNA, 464 bp, Zea Mays
ttggagataaatgttggggaagtaacccttggtaaggatcatgcccttgaatatgcttagaacagggagaaaatggcgttccaaaacatgctgtcagattttaatttcagacttgattcagttatctaaaactgaatttcagtgagttttgctcaacttcggagctttcttgtggctaatctatggggttatggactatggtttctatagtaaaatggaagaccatacaatagtgaacaagttttcttaaataaggttgactttgtactgcatgaaaagtggagtaatagttgcttaaaactgggactgtcagttacagaaactgaatttcaatcagtgcctgaaaactgaagttgcacagtttggtgtcagtttgggaacactttcgtgaccattccaccaggtgttaggctaagaactatgtaacaaggatggagaccaagtaaagaagtacaagttttgtt

SEQ ID NO: 352 - DNA, 411 bp, Zea Mays
caaccttcttgagagcagcaaagactgggaaagaggaggaggatgtggagctcaccatgaggaggaggaagcacagggtcgaggacacctgccatggacgtcggcggcgagcaaggtagatggcaaaggaaagctctagcggtgacggtgcagagaagagggaggaacgtgcgggatgaactggggaagaagagagcacaacaggtggctccaattgaaaggatatgagcaacagacgtgagggtccgggcgagagaaagctttgaaagcaatggtaatgggtacaccggacagtgaacaacacactatctggtgcacaccgaacaatctgcaaagaggaagagcaagccaagaccaagccggagcaccgaaaagtgcacaatgcagtgtctggtgcacaccggactttcc

SEQ ID NO: 353 - DNA, 424 bp, Zea Mays
cgcaggggagggggcttcgacgcaggctcggtgaggggaatcaacatgggagtgctggaaggcgacgagcggtagcgcagaggggcgccgatggtggaagacggcggcatgagcatgacaacaggcatggactctccagtgaggcaatgatgtcgcgacgaatgttacgtccactactcctgagccggcgtgccgctcttccgagaatgaagcccaagtcgcataagcaggcccaagaaggggaagccatgtccgcaggcccaattctcgtttacagggttttgtgtagcctagaggatagctgtaagggagagagttaaaaggcgcttgccattgtttggatgcagacttgaacagtacgaacacaaaaatcctgcagattctgtcgtcctcccttcttcttcttccttgagacttcttcttc

SEQ ID NO: 354 - DNA, 369 bp, Zea Mays
tagttccgccgtgtgcttgcgatctctggtccctactgcaatggcgtatcggtgggtggatccggagcctttcttgccgccgggtttcagcgccatggtggtgcaacaccgtgagattatgtctaggtcagtctctaggaggcttccatcgatgcatgaagactgggcaataataaatattcaccctttgccagatcatgagggtctttttcctacggttcgggacgtgattagagaatacttagttgagcatcagaggcttggggtgagagacatccaacgctctcatttgggtcaagttttggtgcaatttcaaagggtccttgaaagagataaccttgttcttcttggtccgcagcagtatcttga

SEQ ID NO: 355 - DNA, 545 bp, Zea Mays
gtgggaggaagtctgattatcttgaaatccctctcaaggacagtattaagggatggcgcttggagtggtttatcgttgagaaccatggaaattctctccccccacggtcggggagacagccggacgttcgtaccccgagttggaccgagtcccccacagatcaggaggtggctgaggctggggctttgctagctgaagttggactgttgaaggagaggggtctgactgcagaggctgtggttgctgattttgttttcaagaacattcaaccgttgaaggacagggcttacccggcttatctgtacagaggcctagctgactcgactcaggttaccaacagaaggattccctctgtagacttggtgaaccgacttgagatgattcttagaggcaaggtatcaaatgttggtgccccagtggcatactcagcctggaacctacctcctcccaaggccttcactctttttgtgtcgaatccacctgtcgctgatggcagtttgggccttagagtgtgaccctctgctgaagaagttagcgccttagtt

SEQ ID NO: 356 - DNA, 680 bp, Zea Mays
tgccagggtttagggtgaagcatagtacctcggagatggtctcgctcgccatgtgcatcgccgctacaagataagatcgtcgatgaggtgggaagtggtggtagatggagcgggtcgtgccgtctccgacaccacacgcatcgccgccgccagttccaccttcctgtgccgagttgggtgactgaggagaggggagacgggcgagtggagatcatggtgggacggacgcatgaccaagaggagccagcggttctacgtcgttgacttgcgaggtgtggaggcatggaggagagatgggtctgagaaagcctagaaatagataaaagctccttcgtgtagcaggaaagaacatgagtgctattggttagaaggaacgagttgtgtttgttgaatgtgttggtcagagttcgatccctatgtggtgtcttttttggccattttattggctggatggatggtggcaaaaccaggggaatgggaaagggagggaatgggaatggcatcgagcgcgagagaggggacggggaatgggaaaggaaagtaatgggaatgtcagtcgtcgcgagagaggggaatgggaaagggagaaccccttgctgccttaataagtaatagagatattgccagaaattttgggagaaataacaacattagaccctatcattttcactgcttcatct

SEQ ID NO: 357 - DNA, 607 bp, Zea Mays
cagctcacgtcgcggctctgttccgcccgcctttcacagatgggtcgcgacgttctccagcagacttcactactgcagcgaagtacttatatgagctcgtcagacggacactcctgcctaggatgggatacagggaggctaccactcatattcagctttggctccttggtgccctggtatcccactctgagtttgatgttgtggactttctgatctgtgagattgaggacaccgttctagatgggattcgtgctcgtcggtagctaccctatgctcactacttgtgccacatctttgcgcagctgattcagccacctcgatttcagagcacccttgaggcctcacgccttgtgtttggatcttaccgtcctgctcctgagattccagtgccagcttatgctcctgtgtttgacactcaggccgaggatgcagcacttcgacagtttgacaccccagggtacagcagctgatgatgatgatgattttgggattcctcctccgcctccgcctcctatgcctccacgctcacatgatcatgaggctgggagctctagtgctgcccctgctactcctcaggctatggaccctgcccttgcttcgattctcc

SEQ ID NO: 358 - DNA, 596 bp, Zea Mays
cgacgcccacctctggccttatcttcagcatcggtgatctcaaggacctggtgcccgacgaggccgacctgcaggacgcggctcgccgggtggtggcggaggtcacgcgcctgctcgagacgcacagacctgctgcccgccaaacccaaacggtctgggtcatgggctggtccgccacctacgagacctacctcgccttcctttccaagttcccactcgtcgacaaggactgggaactccagctgctgccgatcaccgccgtgcgcgacgccggccctgcagcgggactcgtgcctcctcctccagctccagccaccacggtcgctgccttgtccatgcctgccactacaaggtagtactccttttctatccatcaccatatcacttgcttatttattctatttatcatatcattctgcataagatttgattagccgcatcgcatcgatgtggatgtgattgctgtgctcagtctatcacaagaaccaggatgaagagtgtttcttttatgtctgcttgtcaccacagtcagtatagtactacaattaatagtagataatttggccaataaaatctgcagacatgctaccaccgga

SEQ ID NO: 359 - DNA, 1665 bp, Zea Mays
gcgtttctgtctaacagcgaacgagttctttcactgtttaacagagccactgacaacttgcaaaagagacccccggtttctgtttcttcgcagtgggaggtcctcgacggcgtcgagcgcggagaggctccggcgagctcctgtactggccgaatggggctatgaccggcgctctcgagcggctaacactcagttgaactctccccgaatgattcccctaagttaatttctcatttggtaaactatcctgctctgtccacgtgaaccgcggacgatgaagaaatggtacgtgttcccggcaatccctggcggtccggttcaattaaaggggtcggggagcatcaccatcatgtagggatgctagaacaggaacaagaagggaatgagtagacctggggaaggctggccacggtagggtgtggttctcggcggcggagagggatttggggcgaattcaaaattcgcgagttctggcgaaggactgctagcgattagcggtggccgggtggaggatgaccttgcggagctagcgggggcttcaatttatagggctcttcggtggtgaccgtgaatttgggcgttgatgtgcggcggtcggaagtgaggaagaacgttggtgcagtgaacacgtgttcatcgtcgtggcagtaactccggtggtcgacggggagtttagagggagtcacggcgatgcggtggcacggttaggacacgcggtggacaacgacgatggcacgacgacggtgagcacctttacccgcgggcggtgtgccaggggaggagtaccgcggctgaccggggtggcttccggcttgacggcggcgaagatctttctacccgaagcgttatccggttaccagcgagcgtgaatcctaacggcggcagcgcgaatctttgcgcaggggggtcaccggcggcgagcaagctacgctggcattctgatccactcggtctactgtaccatggcgagacccttgcagtgcacctgacagccacggttgagggccaaattgctcctaaatttcaatggcaacacacctaagtttctgcagcaaagttgttcttgtatagtagccctacaactttgttagagcaaccttgggtaagttctcactggatcttagtggaaatagctctcaaacttggatcaaagtcactatcaacttaaagttcagactgtatcagtctgacagtccaactttggacataaatatctcagaattctttatggtaccaaggcatgagttctatagcaaagttgtgctccttccatagatctacaatattgatgtggttacctagggcaaaaaccccataatttgaaagttacaagggcttcaagttgagtcaatcacactcgaatgcagacttaaccaaaagggtcaagtatggctcttttgcacttaagtccaaatctcaagttttggattgcaaatccaccttcttgtgaaccatatgacttaggataccctattaacctggtttttgcactttagcccaaaagtggactaattttgcacataggtccctagggtttggttttagggttttctagggttcaaatggggtttttggtatcccaggggtataaaggtgattcaagtttattcttggggtcattttatgacttttcccctaaagcttttaggtttctcaacttgggtt

SEQ ID NO: 360 - DNA, 766 bp, Zea Mays
acaattgtattatctcgacctacaaatattctatagtggcatttgataatcgtgcaagccaaatgtatgttcttccaatcacaccgctgctatttccatctagaaaattatatagccgcacacaagcctcatagcaactaaactggaaaacacgaaacaacaaagcaaataatacagaacaacaggttaatggataggcaccggaacacgggcacacaagcatccaagaacagcacaagaaaagaaaagggcagggactcacctcagggaagaggacccttgctagtccgccgaaatcacgaagcatcctcgccaggatggaattctgagaccgacaatctctgggagacagaaatcaggcacaaaagcacatgtatcaggaggggcaccgacagaagaggagagatctaaagcacatcggatggccaggccgagccatcaatcccatcattccacatgggagcagggatggtagggtcctaggcacgtggaaccgcaagcggtggcggatggggcctagcatggatggtttccccgtcgtggagccgcacaagcgcaacatgaaaccacgcatgccgataatgtggagacggtcctccatatgcgattatgtgaggaggtaaagaagccggtgcagtcgccaggtgcttgcctctcttgcggggccgcaacgacgattggcgcgcacccagtcgacgcttccggactgctctatgtccactggcaccggatcaagactcctccgtgtccagcaactacttggttg

SEQ ID NO: 361 - DNA, 382 bp, Zea Mays
cgagaattgaggtgctacggtggacgattggaggcaaggagcgatgcactgggcgcataacaacctaatggagcacgctgaatgctcaatttatagtgtccttgaatggtggctccgaatttgaggagagaagctggcaggcgaggagaggggatgagtcactgtggcgatctaccgtggcattcactggacaaaggcgtacggctatcactggttaacctctatggctcacgacgacgtggtaagacagtccaaggcgtggcacgactgagtgaacggcggtagccgcggcgacgaccgcgcagccacgtcaccagcaattgggtacgacgtcagggcggccatagtgcctcagcttcatcccttgtgtaagatctttttt

SEQ ID NO: 362 - DNA, 2707 bp, Zea Mays
atgtttggatgttgtgaatgatactgagtgggtcatttctttgggtgatgcatttgcacggcagtatgatctgtattctatatctgacggacacgctgctttgctgcacaggtaaatattaataaccattaaatttgtgctgttcttgggcactttatccatactgcatgataccctgatacacctggaaggtcaatgaacctgtacctgatatggcgggatacgatgagatgtaatgacatgtccttgtttttttgtgagaaatgttgtatcctcgtatcagttacttttattgcatatcagtgaaacataggttactagatcaaagctaatgcttttggttccattgcatccaaaatattttctgaacatgtgctgcatgctattcattttgttgtgacaacagtcttcctttccttcttgtgttacctttggagtggcagctatgttattactctaaataatcctaagaagtttgtgccgttatatttttggagctcagtagcttctagcttgattgtttagaggtcttatgtattctgtcagagtttttttggacaaaggttcaacagtgcttatatcaaaagcaacaaactgttttcgagatgctggggttacttgcttacataagtgcaccaacaccgcaagaggaagctaggataccaacaccaaaaaaactaggaaaggctagccttctgtgagatatttggcagtatttctatatcagagtgagcaaggatactataagttggcatcatcatttcacattagcttctatacatttatttgttaatcattgtgctagatctgtcaaaatctgccataacaagtggatcatgcttgtttatttcaaaagcatgttcattcagtgacatgtctgatcgccggttatagattataccctttgctgtagttatttttgttaaatgttgcggccaagacaataaactattggtttatgctacccttccttggtgatattgagtgacttgttatggaagctacaagaaaatgactccatatatcggctttgttttacctttttaaatgttgtggagccaagacaataaactattggtttatggaagttacatgaaaatgactccatatactggctttgttttacctttttatttgcagatgcttgggaatgcttcttcagaaggttgatgataggatttatgtcagcgagaagattgattggatgtgtagacactcaagtatgtctattcctattaatcgccttggacttgctcaaggcatcgggctggtaaggtgccatcagtgaatccttctattttgagcttattttgaatccttttagcactaaagttcccattgcaggttgcggcttctcatttagatacagtgttggagaaactgaagaacatactagatagtgcagagcaaagtgctttccagaggtacttatataatcttttggcagaagacatctatttgtcatcttaccgccagtcctgtcttgcagcattgcagcaatataacctaaaccaaaacttggttgtgttgcttcacatgtacactcctttgaccaattttgtgccaaaatggaatcctgtacttcattcttaacttcaatgtaccaattagtttcccttcttttcagttattggtttggcatattttgtgaaacttcattccatatcccatcttgtatttggaaaaacagaaatggagactggatcattcaaaagtgaatatcaagcaaccactacttagctggcgtatttcatttatgtaggccgtctatcctgttatttcagtattaataagtttatggcatccaattctgcaggttcctctcatttttctcattcggcccaaaagtggaagatgttgatgacacatatgcagcattggcgttgatgtatggttatgccgcaagatatgctccatcaactgttattgaagccagaattaatgcacttgtggtatgatatcccatttacaaactaacttttgtttcttacatgaacaattccgatgaataataatatgtgtatgcatttgagacaaactcttgcactccatagacaaatttattttgttcagtctaatactcaagtttggtagtttacaaatattgaaaaccaatctgtcaccattatttcaattttaacccaaaattctatcccctaatctgtccttcccaactgccacatctagtacattgctggcatttatttattttacattatatttatgttgatcacattttacattgttgtattttggggcacttacattaaaacatctcagcgtctttgtacctggtcaatggaatattcacaaacggtttattacattttagcttgatgaatctcattctcttgaactcaggggagtaatatgcttggaaggttgcttcatgttcagcatcctactgcaaagcaagctgtgattactgcaatcgaccttttaggtgttttccttcataacatgctgcaaatcacatcttagtttcactatatgatttcatgaacaatcttttactatttagttattgcaatgggtttggtagtcttcattctgttttttttttctgaacatgcaggagaactgcacatcattatattaaaaagaaaaaaaactagaaatgagcccatacaacacaccattgcattttaattttgtatttattttttagtgttttagttatctactaatcttttttatgcactttgta

SEQ ID NO: 363 - DNA, 620 bp, Zea Mays
ggattcggctattagtgagccgctgtcttggattgcgctttcccggcaatggcgacgccgtgaatcggagcttcgccgtgggaaggggcctgggcgcatcgtttcatggataggggttagccatgagattcatggtggccgagcattcctgaaaacggagtcgggtgtgtgaatcggacggggttcaccgtagggcgcgttcgccggtgtgcttccgccgctctgggtgcgcgcctccgtgctctggcgaggcagggaggttggtgacgtgctcgcgaccgttggatctagctatgcggtcgagattagaatcgcgtaccccttcgatttacgaaagcgatcggcccgttgatcatgaatcgtgtgggtcagggtgaatcaggagagttttaaatccgtgccgctgatcgctgatcaaacggctatagtatcgtaccgcttcactttagataggatttaatctgggtcgttgaagtgatcgggcggcccatagttcccgataccctttggccatgcgtatttgcaagaaagccactccgtttctggcatatcaacccgccgtcctagcgctgtgcgctctgtgtcttaggaagttttgcaccagagcccctgtgttttct

SEQ ID NO: 364 - DNA, 535 bp, Zea Mays
aatcaagaaaggtgtaggctttcctcaaatcgtcattagagcctcacgcaaggtaactctgtggctattaccctggaccttttcgctgcatgcaagtggtattgtagctagggatggatgcaaaggggggctgctggcctcgcgcgttgggttaaaagtagtaggagtaggtcttgaaaccagcctaaatgtgctactccacaatctaacacgtatcagcaacgacgacatctaacaggacaatataatcttttgccatctttattgtgtggttgtcacaaaaaatgtcatggtaatgactcagctaaaagtgccatctgcaaagacagaaacaaattaaatgccccatctgacacgcgtgcgccacgacatcggtctcgtctcagtctacgtcctaaccctagtcgtccgatacatggcaactgcgctacccgtgagtcgttggctcgttgttgtatgtctggtagttaccctccatctgctccatggcacatgtctaggctctatatcgacaagtggaagtggctaattgacc

SEQ ID NO: 365 - DNA, 392 bp, Zea Mays
aggaacataatggaaagaatacattatgtgagtaactaatgctagtaacgcctgagcaatcaccgggagtcttgatgaccgcagtccatgaagcattgatagctgaaacgtacgagtaatggtgaataacagcacggcccgcgtatcatggactgtgcatgccacctgtcagtggaatggacaggcgcacgtgttatccgtaatgaatgcagaggcacgcgtagcccagaggcgtcatgctaggtcccgcccattggcttaagccgcgcgctgtatgccacatgacaacaatgggtctccgtgtgagtggggggcaggagtgtatgcggacaggtccggaacccaccagactaggtccggacacgtgtcggcactagaccctcacctggttc

SEQ ID NO: 366 - DNA, 947 bp, Zea Mays
cttaagttaacgattgcattcttaaaataaaccacaaacattgtgggaagtcaccttaaagaaaaatttcctcagtcgatctcagcttagagtgcacctaagaagtgaacttttttctctctctgtccctctcctttctcctccctccatggagcagacgactgttggttggtcacctccagaatggttgctagggccaggtgaactcgtgtacaggaagggtgcagcattagcgtcagcatgtggtccagagtggttggtgataggacctcaagctgtgtggtgtccgtctcctctagaacctgcaaatgggagagggagagtagcctcatcaaatccatctaccggcggaagtccacggatgggatgtggtcagtggtgaggacaatatagctgcaggtatccacagacaaatcatcaaattaatcactcaaccacgggaatgaggaaagagcagagacaatgaagctgttcggctgccgtttttgagaaagctgcagctgcaaatgtgcactgtgctacagcagcaagcagcaggcggctgcagcagctgctgctgcaaaggccaccagccgaacagcgtcaataattcggtgagccaatctaccatgtaacgcctgagcgttgaactgcctctgtcgcttgtccagtggcactgggacatggatcagggaggagcttgacctcgcgcagagcagctagcgtgctggatggaggccttgggtcccaaccgcaggatcgcaaggtggccagcatgcgaccctgccgtgttgctgcaggcttgcatcctgctgccctgctcgttactagtccggactggagcctgtcatgcgaggccacattccatgcatgaggggctgaaggtgtacagaattgatggatcgaatgagtgttcacagaatgggaagttggggatcgagcaagggttctgcgtggaaaggggaggt

SEQ ID NO: 367 - DNA, 829 bp, Zea Mays
agcgaggctctaaatcattcggtccacggagacagtgcagacaacggaggaacagacgtgttcccggtgatctagggcagcttaactcaattgaactggtcaagaagcatcaggagaacctaaggatgctaaacaagagagcaggaagcacgaacagacctggagcacgctgaccatggtgagatcactttgcgcgatgctcgggattgatttgggggaaatctaaaattggcgagctcgggtgagcaattggaggcacggcttggtggcttggtgcttgactaccttacagacccgaaggcatgctcaatttataggcttcgggggtggtggcgcgtgaatttggaatggcacggtggcggtcggagaaggagtgttgcactggtgcgagcgattagtggctttcaccgtggcagactcacaggcgacgagccaggactatagagcggtttacggtgactcactgtgacgtggtaaggcgtcgaggcgcgtagcctggctggataacggcgaactccggtgatgccagtgcgattaaccacggcgggacacggcgaccggtccggccagcgaccggattcaccccgcgctggatattctcaccacgctcgacgttatccacacttcccgtggcacgaatctcccaagcaagcgcgaattgcaacagcggatcaccggcagcgaagggtgatgaattttgggatctttttcagctactgtacaatggaatcctcatttagagcgcctgacaaaccaattcgctgggcctaaatctcaattttttacatgacaacttgttaatccgcctgtaacaaagttgttgcccgat

SEQ ID NO: 368 - DNA, 644 bp, Zea Mays
tggcaatatataccgactaacagttcgacgggaattctctatttatagcaacagtcgtccgacgctaatttggtgttgtggtatagtggtggtttttttgacagcccggctgcagtgtcgtcaaaccccggtgagacctcactgtccctgcatgccttgtgtttgatgtaatgtcaaacctataaatcgatgtcgtttcttgcagccctctgtcgatgacgcgtccgctccttatcctagcacctcgttgtaacatggaatacagggagatccacaccgttttggcaatgccgcgcagatcccgtcacaccaacattaaaaggatgccaacacctctcgtcctccgctcatcctgttcgcatcctctgcaacgtccacttcctgtgtgcgcgccttccatttcatctggtgagtcccgagtacatcccgatcctaattcttttttgctatgtgtctgtgtgaacatcttgtggtttcagttgcaggctggcgatgccaccgcttaattttatagataagtttaacattggattgttctgacttcttgcactgatctgccatgaatcctgaaatgtagtcccatgtgtgccatatttcctccatgcatgattattaagtctgtgttcttgaagtttccaatctca

SEQ ID NO: 369 - DNA, 440 bp, Zea Mays
cacctgccaagtcgtcgctcgcaaggcattgagggccctgtgtcaaatttatgaagaagaagtggccgacaccccgctcagattctttctgccctttcagagaaaccgtcccatttggatggccaagatgcgtgcattggaagagcagcatctgcttgaggatgaccccacagtcgtgtacctcactgcatacctgctcaccctggatgcccagtatgatttcttggctcggcaccaccgtcagatgattgcccgagcagaagatgcagagaagctcaactgtaagctccatgtggatctcaccacagctcaagcccgtgtagctgccttggaaagtcgtgaattcattgctgttgaagccctgaagcaagccaaggatgagcatgtccagaagttgatggaggcctacttggtaacccacaaccaacatagagccctgc

SEQ ID NO: 370 - DNA, 594 bp, Zea Mays
gcgtctgccacggtcgcgcctctccgtgggcagggaattccacacctccaaactcggtgagatttgcttctctggattcgccatgccctccagttcgtgtagcgctagtcgggcagtgtgggaaggtctcggggcgcgggatgactatctctggcgacaactccgtcatggggagctcctggcgccgtcgctcggctttgacaaaggtggaagaagacgcacctacgccattgatctattgtcgaatggctcgaattagataggagttacccccttcgctcagttgaatcgcggccgtcgatgttcgatcgggcggttgtggttgatttgggtttcataaaatcggtgccatcagatctcgatctaatggctcatagcgcttaccgtttcagttggcaggaaatctaatcctggcggccgatttccgatcggacgatcgtaataccccgataccccttcggttggtggttttataaaagagaccccgctcattataggaatcaacccgcagtccaccctgtgcagtccactgagtcttagaaatttttacacgccagcccctgcacttctctgtatttgaggcccgatccagag

SEQ ID NO: 371 - DNA, 777 bp, Zea Mays
cttgaaactcagttgagtacaaggtagcttttgaggaatcagtttgattccccttttcaaaaagccaaactcaacaaaagtatcacatctcaggagaatggattctcttccgctcagccatgacgatgactgccaatcagagcgagcatgatctgcagaagtcaaatgggaaaaaaaagaggaaattgtaaagcttccatttcttttggttgctaatataggcaggaaaagggtaggagatgaaagtggaagtggcgaattatgaattgttggcagttattcccttgccagagggggtccagcaaatagtgaaagctatacacagatacacactagcaacatggagagacatggctcccatgttatcccgtgcaacccctgttccccacttgtgcccctcccgttgcacatggccttgtaaccaaccattccacccttcctagagttaacattgccatgggaccccctttccatacagaacaattatcaccaccttccttcctccgttcctttgtaccctgtacttctgtattcaaacagtgctttattttaagttggtatggtgcggcaatatctctactacggtataagaaattagcggttacatggattattactggcactaactagccttgttatgaacaggatctcactacagatcatgaaagtgcaaagaaaaaccatatgtgacaaataattgcaattagggaacctttaatcagcatcctgtaccacgtgtaggacttgagttcattaagtccagggatgatgttgaag

SEQ ID NO: 372 - DNA, 605 bp, Zea Mays
gtcattctgcatagagaattaatatatctataaaacttatgcagatttgtggactcccaaaatttaccagtctcagatatatgaagatcctgggcttcatccttggtgggttgacggaagtcatgaattttgatcttgtccccagaaatgtcttcatcagagaatccaaaaatatgagcaaacctctggtagctcaccttgtaccagctgccttcgatatagaaatttagataaggaaagttatagggactttcctcatcggccagcttgatccaaagagtggaatagaactgagcaatgacctcatcattccaatcatattggaatgtcataatgttcttcattttcttcctctcacaggccctcaaagcctatgtcatctctggatctccaatagcttcacatcattcccagttgatgtacctctgatgcagaataggctgatgcttcttgggaagaatcacagagttataaaaatcaacatgctaaagggtccagaaccgattaccatcgatcctagcatcacgaatacgcaatgtagggttttggaatctgatgtcctggagaagagcgaaccctccgctggcggtaaatctgtgatagac

SEQ ID NO: 373 - DNA, 548 bp, Zea Mays
cacgggccagtcagtcgcggggacaggcgtggtagtcggcgtgaccatgggcgggccgacagtaattgcatcaacgggcgcgcaggagcagcgagccaatcgccagtcaaactttggccccacctgcaggctcgcatcctcccctgaggcggacccgggggccagtgtcggtaccctgaaacaggggtaccccttactacagtatgaagacgcggtgcccgtacgtcattcattagccacatggtgaacaacgctcgtccccaccacatgggcagatcaaggggcaccatatggcaaggaaagatgatacatccaggatgtgtcagtcgagccggacctccgcaagggagcaccggacccctgtacgcacaacccagacccccaattgtggcccgagactcccgagtaagcgtgccaggtcccttggatggggtccagatccctccaagtaaggtccaggccgcaacaaggtcctaggacaggggaaaccctggtatgagcaagggttcggtgctgacgcgtgaccgggctttactctacgcatgcgc

SEQ ID NO: 374 - DNA, 575 bp, Zea Mays
cctacaatgcttgatcaaagtctaatattgaaagaccctgaagattgacaagagccgacagagtcggagaaggaatatcactacccctcgctacctctatagtgccggttgttcttgcggatcagcgggacttcatcctcttcttcttcatcttcatcaaatatgtagacaacagcttgtgcgtgatcacaacccttagcatcaacctcgagaagaacctctgccggcacctcatcacaaaccggagcagaaggacctgcaccctggtcaagcatgacagtcgccgaagccgcctcttcttccttttttcctcaacaggcgcagtcgggcggctcactcagtgtggacgctttgggcggataccgacaggtttctgggtctccaccgcttcaccaagttcttgcacagttgtgatagctagtggctcgacatgggttgagtcagatgattctccagccagcaaacaaagcacaacatctatctctgcatcgtttgtgctagctggcatctcaaaatgagtctgcctctcatcatccggaagactctgagtgtggcaattagagcctcaatgtcct

SEQ ID NO: 375 - DNA, 373 bp, Zea Mays
cctggggtgctctatattccatgaattccctacttccgtgccatccatttgagtaagccgatatgatcctggtcgagtgacctccgacaccatgaacgacccttcccataacggcgataatttgtgccatccttctcccgttagaattcggtgaaggaccaagtctcccactatgaaggattgatgtcgtatagtcttagcatgatagcgcctcagggtctgctgatatctagctgactgaattactgtattcaaccgctcttcttccagtacgtcaatatcttctagcctggtagcttccgcttcaactatgttttcgaagaccagccttggtgccccaaacctgaggtcggcaggtagcactgcctccgaa

SEQ ID NO: 376 - DNA, 527 bp, Zea Mays
gtttggtaccttgagaatttcctcggtccacgtgctagagatgcagcggcttggttactttggtaacggtgtcgggcgggccctgggtgcagaggaggtccccgagcctgaaggcgacttgatagtttttgaggccttttttgctgccggtcttcacctcctgacacattgattcgtggtggaggtgttgcaaaggtttgaggtacaagtccaccagttgacgccgaacgcagtggtggcgcttgcgaagtatgtctgggtggttacctcctacggcaggcagcgtttgtggaggtcttcgccaaaaactattgcctgcattggcagaagaggaagataaggaataagattgcctaatttggatcgtgcaccttcacgccaaggactgggaagacttcagctgaggttgtggagatagtcccctacgctaggaacaaatggggtagctggtgggatttttggttctacgtggcttctggtgatgtcgaattcttgctgagtttgcctcaggccatcctgtgctcaca

SEQ ID NO: 377 - DNA, 346 bp, Zea Mays
cacgtcgctgtaagtcgtggcatgtagccaattaacgcattgggccattactccatcgtatgccacggtgaacacgccctagtgaaagatcccaccgccgtcgtgaacaccttcgccccaaatttgcaaagcacacgatcggtttctttaaattaagcactccactcgctccgcttctctgttacgcgcccaacccaccctcagccagcccctcttatgtaccatagctcccagtcaccggaatcccccgagcatggtcaccggcaccgccgagttgagccccaccgtggccagcccttctcaggttcgttcatatccctctggttcccgttttagtacacctctg

SEQ ID NO: 378 - DNA, 534 bp, Zea Mays
tccaaaaaaatctagaatcttagtccaaaaactctcaaaatggaatcttcacttccccttgacatcctcattaagatgtagagctaagagacaatggtcagaaagctccgaagagttgctatggagaatacaatctggatggatctcctcccagctggctgtacagaaaacatggtcgagtttaacaagtgtagggacatttctctcatttgaccaagtgaatttcctgcctaccaacgggacttcttttagctccaagtcattgataagtctcctgaatctgccgatcatggccctatttatattggcattatttttgtcttctgagctgtagatctgattgaaatctccagctattacccaagggccagcgcatgtctccctgacttccctaagctcctggagaaaggaatgcttgagaggatcttggtgtggcccataaatacccgtgaaccaccactaagcaccaccttcctcttgcaacttgactgaaactgtgaaaccatgcaccaaactctcaatagcagaatagac

SEQ ID NO: 379 - DNA, 326 bp, Zea Mays
aggccctcttattcggcttggaacttttaaattgtatgggagtaaaacatgtgaaggcattgggtgattctcagctggttgtccaacaagtgttagaagaatatcaatgctttgatggtactctgaatagttaccttgaaaaatgttggagcataatccattcttttgacgaattcagtattcggcatatttctagaggtgagaatcatagagctaacaatttggcacaagatgcatcaggttatcggataaagcgagggagatttcacaacaccgaaaatctgataaccggtgtagggccaattccccaggtcatggaccgtccg

SEQ ID NO: 380 - DNA, 645 bp, Zea Mays
aaaatgtcaaggcaacaaagataagtctcgtgtgttatttcatatgtctctttacattacatcccacttattgccgggtatgataattaggggtaccaatctacacccccaaaacacgcttaaaactctagggacaccatcaaagtacgacccccgaggacaaggaatcaagaactccacctcacccgaggtccccctcatgggtcttcccaaaacatcaccatgccctagcctgatttcggatggggcgtaagtgcgggcagatctccgtcccgaccgaggctcccccacccctcataagccatgtccgcctcgcccgagcccatctcgcgcgagagggacaagacttgtagcaaacctccaaaggtcactaggggatagtcgcattcaatgcatgcacctaccccgcatagagctataggtgtatagtggcaacaagaccgcgatcttgtcaaagattcactaacatgattacgtatgctccactgtacacgcacgtcatctgccagcccctgacgggacatgtaatatgataggggagcgaactagcccttgggcacaaactccgtcccgctcaacccagagctcagccttaggacaaactctgcctcgcccgagcccagcctcggctacctgctcccccat

SEQ ID NO: 381 - DNA, 346 bp, Zea Mays
caaacacctatcttgttctccatttatgggagcctcataccgtattcatggaagcccttttatgtcagtctgtcattctagggttgtcggtggtgtcagtactagatatcacaagcgttttctggaggatgtgcaagtttaccgaaagctagaatgtggaggggatagaagcaagctctccatgcctacacaagagacctatgaggttgaatcacacgttatcgatgaccaagagtgcacatctaccatagcatatgtagtgggtgactcaagatgtgatagtccacggtgggcattgaccatatcgccatagtgtgaagctcaggtgcaccttaaagcacacaag

SEQ ID NO: 382 - DNA, 466 bp, Zea Mays
tcacaaatgaggaagtcaacaacatcaaactctgagtgagagatcagagcactaaggagccagagctgaatatgagtagcaacctccttgtaacccatccatggcagaagcgtccgtctcatgagctgatataggtatttggctgctgtagtgaagtgtgttggagaacgtcgtgacccaactgagaagggtggtcggaataaagccgcgacctgggctgtacctagagcaactccgccgtgaggggatgaggaggatcagaggtgtcgtaacacaagctgtgaaggcgagtcgatgactagggaaatccaaatagttggcgaatctggctggcatgaatagtaaaatccttgcgctcaaagtggaaactcatccactggtgatcagggtcgatccatacataagcatagaaaactcggacccattcctcaacatatctgccgctggtagtcagaagagtcagaag

SEQ ID NO: 383 - DNA, 552 bp, Zea Mays
gaacgccgccgggccgcctaaacttggggacaacccgtctgcgtgcatgattctcggtatagatcccttaaccgaaatcgctatcgcttcaatttcgttttgcgctcatcaggacaagttgcggttcaccatggggcgtgattggtgtcccggttatggcatcttcgtcgtggccctgtacagcgccaccgtggtccggtgctggagataggagaggctacatgggctgtggatcctatatctaacggctcgcacgacgtagcggatcgatccctggtaaagctgatcgtagccatagatatagaatccgacggctattgtgccgtaccggttcggcaaggggccgatctaatcggtgtcactcgtcctcaatccaacggccagatttggccagtaccccttcgcgatggcaatttcactaaagatcccctgcatttatcttaaataggacccgccgtccagggtagagatacctgtgtctcggtttcttttacgacagaacccctgcattttccagatattgaggcccagtccagaaaactctaaaaccag

SEQ ID NO: 384 - DNA, 697 bp, Zea Mays
ctgtgacacctccctagtcccagcacgctccctcgttgaagacgacgtcgcgcgagacgtggacgcgctcggcgacggggtcgtagaaatggtaggccttggccccatcttggtaaccgatgaagaccaccttgcacccgcgatcgtcaagctttccaaggtgtgggtgtacattcttgatgtaggccacacatccgaacacgcggaggaagtgcacgaagggcttcttcccgtaccacgcctggtaaggggtcttgccgtcgagcgcgctggtgggcgcctggttgaggagaaaaacagcagtatgcactgcctccccccagaagtgcccgagcactccacatgaccgcatgatgctcctcgctgtcgctacgatcgactggtttcggcgttccaccacgccattttgctgcggcgtgtacggagccaagtggtgacgttgtatcccttctcctgcacagtattcaccaaatgtaacagaggtgaattcacctccattgtcggtccggagcaccttcagtttcttaccggattcatgttccacccgcgcctggaatgttatgatggccgccggtgcgtctgccttggagcgtagcagcgtgagccacatgtaccggctcatgtcatcaaccagcaacaggaaataagtgttcccaaccggcatgtgtggcgttatcaggccacaaatatctccatg

SEQ ID NO: 385 - DNA, 345 bp, Zea Mays
cacaaagtaacatgatttgtaaatacttgccttgtctacaattctttcttaccatatgtttctaacttagatggtcaataccaagaagggtggtggaattgatctaccccccaatcgacacagttggaggatatttaggcaaccacaacaacaacaagcagagatggaccctccaaatcctccaccagccggtactgatcccgcagttgcagcctagatgcggataatgcaacagatggctgatactatggcggatatgcacacgcagatgtgataggaacgtcaagagatgctccaagagatggaagagatgcgccaagagcgaagggtgcaacaacagcaagc

SEQ ID NO: 386 - DNA, 731 bp, Zea Mays
aaagaagtggtaaagcgggatcggaaaaaagaggcctccaatgccgtcgtcccagctcagctactacttgccttttgcaggtctcggcccgaccacccaagttgccttgcccgagcatcatctcttatccccccctggcctctcccacgccttagctagctctccaacaagcagctagcctccagcaaatgggcacagcattaccacacctcccactagctacccatctcgatctctgcccgtctaagctagagtacccttgcaagcgtttttgtcctctagaaagaaatggcctgccgagactagtaggagcatgcagccactaagtggttgatgacctgctgatgtttcttcaggccggcgcggctgttctatctatatcctctgtctgtcagtgttacattatggactttagtcatgcatgcatgcatggtctttttgttgggtcctgtacattccagcaagggctagcttactagtgatatgatgatggggaagtgtgtgatcatgttaggaaacatcctacccaggttaacacgtacttggatctcatgcatgcaatgcaatgcaacaacaactcacttttctggtcaactagctagcctgcctgcagtgcaatatgcccaactgaatcacgaatatgtggaaaggcgtccctgacttaatcatttgacgcgcatctctttcaaataatgctgcatctcagctccaccaccccaccaacaatctcc

SEQ ID NO: 387 - DNA, 689 bp, Zea Mays
caacaaatagctatagcgcccacatatatcttagctttaacattagggtgaaacccctgaagccaagaagaacacatatcttctatactagttggttctctaatgccaaatgtaaaatataccgtacgccataggaatctcgcataatggcactggaagaaaagatgttgaatggtttcatcttgtggacagaaaacacatttttttgatcctgaccaatttctcttggcaaggttatctttagttaaggttaccccttgtcttaagaaccagaagaagatcttgatctttaaggggagttttagtttccagatgaggccatcctgccgtacttgtgcgttcccaatcaatgccgcatacatagactgagtggagaacaacctgttttgatgaaggctccaacgaaaactatctcttgcctggttcaacgtcgtatccactactaggctgactaaggtatgccatctctccaaattagcaccatgtaggcctctcctgtaggagacattgagaggtacagaccctagcacattggccacagtagcattcttccgctgcactaggttatataggctcgggaatctatgctggagcgagaaatcccccagccatttgtcctcccaaaaccttgtgtcctgtccgttgttaactcggaatatcccattcgcaaagaagatatccttcacttt

SEQ ID NO: 388 - DNA, 926 bp, Zea Mays
gcactatttagcacgtcactgacaactgcagaaaggaccctaagtttctatttctttacactgcttgatccacgacggcgtcgagcgctgttgagctccggcgagcacctggaccggccggagggggccaagactggcggtctacgttggtctaaaccaaattcagggcctagtgaaggttttccccaagttaatttcataaacaactacaccaatgtctctggccacggtgagcgcgcggatgaactaacaatctacacgttcccggtgattcatgggatcttagctcaattgggcgagttggtgagcatcaccagcacacagagatgctaaaacaagaacaaggatggtatgattaaacctgtggaagactggccacggtgagctcggttctgcggtggcggaaacttgatttgggggaaaactaaaattcaagctctctgacgaacgattggtagtgcttttcggtggctgggtgtgtgatgaccttgcggggctggcgggggcttcaatttatagggatcaacggcggtggcccgggaatttcagtggggacgcgcggcggtcggaggaggaagaagagtactggcgcagtggcttggtgtctagcgccgtggcaattactccggcgagccacggagagtcgcaaaggttcacggtgacacggtggaaacactcgggtacgtggcacaaggccggaagacggcggttcaccgacgagcttatctgctcaagccgcaaagcaggggggtacgacggtgagtcaccggagtggcgtccagcgtacggggtgatgatcttttaccccgcgatgctatccagcaactccaggcacgaatccagtcgccggtgacacgaatcgcggcgaaggatcggtcgtcggcggtggtagactgtcgcgctggtgttcagatcttcatcaggca

SEQ ID NO: 389 - DNA, 552 bp, Zea Mays
cattcaccttgatccttagctctaatcctaaagctcccattaacaaaaatgtgtctaactaacccctctatcacatatctgaagatggctttgggacgcgagcactagacacgacaaaaccgaagatttgcctcaggctcgggctgggagacagaccagacttcagagccccaaatctctgaaaccagtaggccaaatcctatgacccccacacaaggtcggtagcttatatggaggagaagaggttttgtgcactgaccaaggcaagagcagactcggatgaatgaccacacgcgccagaactcgagcagaatgaacgcgcacacgtgttcgaccctggtcggcacgccggcgttcgcccaacccacgcatgcgctcgccttagcgtccagtcaagtccgtcgcacgccctcgccctcgccgtgcctataaatcagcccaaggcctcagtcgtacctccccgctcgctctcagaccttgcctaagacgaagttcattggactttgcctcgagcacgccgcgccagcacccgccaccactgcccaagccaca

SEQ ID NO: 390 - DNA, 636 bp, Zea Mays
aactttgctgctgctgccattcagtagctctggtgccatccatggaagagtgtcgcgtacaccaccagaaaccagagtgttgcgcttgaaccttgtcaacccaaagtctccaacctaagaattagcaatgaattattaatgtaacagttcaacgagagttggaaggccaaaccaaggtgaaactttgctgttcactgacaatgaatacaaactcctaacaatcgtaagttcgctactgtactgctgcgtatgatatgctaacagtactgtcccagctgcgaagctgcagttgcagccatggttattaaggtggtaaggcgatataaggcgttaggaccaccgtatggacgtctaagacgagcaagacgacaccttatcagtctcaaaaccagcaatatggaggaagaaaaagaaaaaaaagaagggaaaaggggaagggttaggaggcccagcccactagctagcccatataatcattaccctggttgcctaggttgactctctactccacagttcagccgccggttgccttctcctccatggtttagccgctaccgccccgattgagccgtcgttgcccctagttcgccaccgcctccgtcgattcgaccgctgccgccctgatttgacaccgcc

SEQ ID NO: 391 - DNA, 497 bp, Zea Mays
ggctgtttcccaagtatctctccataaggaccgattcgttgagagatcactcgagatcaggtgaggcgtaggaggagcgacgacgacgacgagatatccggtgtgacatgataggggatggctatgaagagcttggactacgactaggaggagggagccgtgagcatggacgttggggtgatgcacgaggacggtgccgttagagatgtaggatgtcatgcccgcacagaggatgggaggagctggttcgacgcactcatcgttcctccaacgagttcacgctcgcagttcgcaccgatgcacgcagcaagttgaagcccatgtgcttttcgtctctgctcctcccgggcatcctcaccaaactccatcacatcccctcgatcgaggcctccatcgacttccccgttctccacctccatcaacacatgcacgagtggtccccctgcataagcacatccccttcctaaatacatgtttgtattaacttcacatcccgc

SEQ ID NO: 392 - DNA, 765 bp, Zea Mays
cttcctcgagctatttacacttgtgcccctctcattcctcattcacttgcctgcaatctctctgctagggtttcgcttgctcggttccctatccgcactatcgccgtcggtcatggtccgacacctatttacacttgtgcctctcttgttcctcattcaatcgcctgcaatctctctgctagggtttcgcctgctcggttccctatccgcactgccgccgtcgttcatggtccggcacacgctatggcggttggtcgcggtgcactgcctgggccacgtccctgtcggtgaggctagcgtgtttgtggtcgcggcgcactgctagagggaatatggggtctaggaggttgacgttgatggacgacggcacctgggtcttctcttgctccatcatggtcgcgatccatgggattggcccagtgagggtatcatgaaatcctctatgctactcgatctcctcctgatatagtaaacaacaacctctgctatttccttctccctcgcacatcacccactatacgtagaagaacctcgattcgatcttgcctcacccatgtcaggccgaccgacgacggccgcaccctctctctccttcccagtcctcctgctcgcctctacctacacctttctcttataggaggggttggagcccttacatgaggaatttattgataaagaaagtgttatagggagtttcggtctgtttgtgggtgatgtttgtgctaatgtagctgattcaagtttcgttttttgtgcagtctctat

SEQ ID NO: 393 - DNA, 483 bp, Zea Mays
gatttaaagaagaagaactattttatgcggggactaaatgatcggctacaaaggaaaatggccacatgcatagatatcacgtatggaaaggctgtcagcacagccttatctgttgaagcaaaatacacaagttctgggaagaataagggatttggtggtgaaaggcctaatcaggaccaggcgaagaagcaacggtttgtgatccgaccttcaagccaaaatcgcactttttctcgtccaccctcattccctttcaaacaacctatcattattcgccccaacaatacccccactaccccaaatcagtcgggtgccccaggcactcgattccctgccttgcctagttcttcaactgggtgttttaattgcggcaagtcgggacatttcatcaaagactgcccatatcctaagcaaaatcaatcaaatgctccgcaaggatctgggagatcagctcagcccaaaggaaatgctgtggggaaaaat

SEQ ID NO: 394 - DNA, 1377 bp, Zea Mays
cgaccgaccaataacctaccgagcaagtctgcgaggcagggcggccaaatgagtccccgctgagcaagtcagcaaggcgaagctacaagtccccaacgagaaagtcagcgaggcgaagttcccaaccaagtccgcgcgcccatgaagcagagattcgaatctagtggtgcaaacccgcactcacgacaagacgcgtcattaccacacacgcctgaacgtgcgcacactgcacaagacgagccctggggagtcatcatcagcatgcttgtactccctgcaagatcaagtccccgtagaacaagaacacaaggcggggcgaccgaccaaggtccccactgagcaagtctatgagacggagatccaagtcctacgctacaagtccacgtcgactaagacaagatgtgtcaccccaggccacgaacaaacataagaatggcaaactgagggcacgccgaggggttgctttcgacaggactacacctcctcaggtacgaccataggtgcacacctaatgccctaaggggctggtcgaccctattcacagaggaccttagcaccagagcttctacagtgacccgaacatcggataatacgtagcaaatacaccataacgggtgtacatctacgaacaccggtgagtaacgcgggctcatgacaatgggtgagaccgcacgacacacgactgcaccgtatgactgacctgcagagccccacgcactgctgcaaggatgtcagcaggaggctcgctacagggacccatatgacgagcggatggggcagtacgactacgcatgaacctacagacaacagaccaagatccctccagtagaataccagtccccactatgaagtctggtccttaagttataaaaggggagggctccctctttcttcacacacgagcacaccaattgtaacacgcctcctagcaaaattacgatcaacactacactagattagggcgcgagcctggaccagtaaagcccactatctcaatcacatcgctcgagtcccggcgactcaccattcggagtgagcccacactagctataacacccctggtgttactgtcactaaaatttgagcataacatcatgagcattagcatatcatatgcttgttacacttagaatgcattcactaggcaaaaatttcaaacaagttgtatttgatgtgactagtcatgggtgaaactctagtttagggtacttaaccctaaaccaggcttagaagtgtcaataaagcccaagtgagagaaaacttcaaaactcatgagaaataatcataagatatccccattaatggacttgagtggcattcaaaccctagaagtgccagaaaccctaaaaagaccactgaaaaccctgagttgaaacc

SEQ ID NO: 395 - DNA, 1508 bp, Zea Mays
ttgaagatttagcacttatttttgtattaaaaatacattttctaattcatttattcattttatcctgtcactggactgggccacaatatctgtgaagcacagggggctcgaggtaataatctgcagactcagtgaacactggtgttggacggcgggttctattcactataaacagaagggctctttaacaaaagtgccagcgcgaagggtatcgagggtgctcagccgtccgatcggttgcacacggtcaggattaggtcttttataactccgaaccggtatgcaatcgcacccgttggatcttcatccaatgatttagatttttttaagtcgcgcgctctgctctacaccgcacatctaccgatctacggcccagatccgatcgggcgaaggggtatgcgatgacataatctcaaccctgcttggtcgatctaacggctcacatatcttcctcctcgcccagacacaagggacacagagccgcgccccacggcggagatcctctcccccgccgacgccccgttcgtcgctcagtgagctaacccccgattggatacacgcaaaacaatgcggaagcgaaggtaaattaatgagccaagttttaccggctgaggcgctacggtgaggtcggcccgcggcatgaagcggcgacgcggcggtgctccagcgccggtgatcaatccatggagcgacagagcgccattccatgcaggtaatccatgaacagctccctggcaacgtagagaagccccaagaaccaatagaagctcgaacgacgacgaatcagcgaagacctcccccgcggcggacctcccgaccacccatctcacccgcgcaagcacacgacgtaggcacgtattgcgggtgaaagctcgagggggaaggccggaaggcgattggcgacatgcggtaatcaaggccgggcacgacttataacacaggccgcacgaatcaatgggataggctggcggcggtggaccgagcactcacgcgacggctccaccccttccctctgttctggttacggaatgccggccggatagaaggggaaaggcggagacgggtgtccccatttatctccccaaggtcgtgcaggtaggtgggttctgcggggttcgcggtcaactgatcacgcgaagatcacggtggggcaggtacgccgtccgcgctccgcgcgatgggaggaagagcaacagtgatatatgggccccacaggtaagcgaaaacacgagggagggcgcgagctgacggtccgggccaccagccagcgggatcgcccagcgcgcgcatgtggcatcctggtttactgacgaacggccccacgttgttagcgcgttttcacattcatgcggctgtaggcatgggcaccgaccggcttggcccacgtgtcataccccccacgcgactggttcctaatctggccgcgcagaggcaaattgaagctgggccgcagcaatgaggagtcagcccattctacatttgacttctttaattcttttctatttttc

SEQ ID NO: 396 - DNA, 802 bp, Zea Mays
gacactattgtcagtgttttgaacccgagggtcctaaccaactactaaattttatgttgtgtgcccttgttccgtatggttgatgcaagaagagacacacagggtttatcctggttcaggcaagagaaggccctacatccagtgggggagggagacttgtattatcttgcacctaagttctcgtagtaggagatacaagcaagtcgctagagggagtgagtcccaagtctctaagtatgatttaggcaagtgccaatatcaggagtggggtgagtcatgaacggtgaagtgtcctccccctacaaggcctcgggctcttccttttattgttgcaaggaggatgcccaggtgtacaagtattgttatgcttttgttatagtcagaggaggtgtgtccgagccctgtagcggtatggtcggcgggatgaccctcgtcgttgttgtcgtctttggtcaggagaaggacgcccgatccttgtagtatgttccttttaccgcgtagagagccgaggctgggttcaggagcatgggcatgtgttcgatccctagcctatacaggggtgcggatgagacgtttccaagtgtgtcgagtcagagtggtggaatcagtgcttgacatggtctttagcggggttcgcgggagagcatgtaacatttaatgtgcatgcttccctattggggtagttggacgaggtcgagctcgggcgaggcaaagatttcttccaaggccgaggacaagattagacattgcatgtactcacgctttgtgtggttgaaacagtagtcagagtgggggaatagta

SEQ ID NO: 397 - DNA, 403 bp, Zea Mays
tataatttgtatgacgaggctgtgtgccttagctgatacggccgtgcccgcaggggacttgtgcactaggtctagcgcgtttattatgtcggtccagctgcaccctcaggcgactttggcatggatagtctttttctcacttgttgtgctagtctggctgcacccttaggcgacttttgcacggatagtcttttggagaagacttcgattttgcgcacttgctgtgctagtccggctgcacccttaggcgacttttgcatggatagtcttttggagaagacttcgattttgcgcacttgctgtgctagtccggctgcacccttaggcgaattttgcacggatagtcttttggagaagacttcgattttgcgcacttgctgtgctagtccggctgcacccttag

SEQ ID NO: 398 - DNA, 609 bp, Zea Mays
gatggtgattccaaacggcaggggcaagttgcgtacataacagagaaggatgaactgatctcttcggtcatatccgatgtgatctacttcaaccccttacaaccaattgatctaatcaaaatgtgcatcaagtagatccatgaacctagatcaagacaaaaactacgcaacacttgctccgataccacttatggattatggggaggctacactagcgaaaatcaaaattttcgaccccataaatcaagaacttctgctattataggtcatggaattaccactagatgtgaaggcagtggaatccgtctcgatgtagacatacgcgacgagcattgccgtgtagtcgccagcatccttcacatccccgtgtggttcatcctattgctttagatgcaccacctctgaggtatccacaagtactgggagaaagtaccacgtaccgaactgctaggttcgtgacgacggcttggcgatggcgagaggggcgtgtctgctggtttgctagtcgcgaattagggttaaccctaagcacgccccgcccatcattataaaggcgttctggtgggcttctgactccaaggtccgtcaccctaacacctagtctagttt

SEQ ID NO: 399 - DNA, 462 bp, Zea Mays
agacagtcggcccactacaccctcatagggggcgcactgtacagaaggggcgcaacaggagtcctcgtgaaatgcatttcctcggttactaggagacaactattagatgagattcacgccggacagtgtggaatacacgcaacatccagaactctggttgggaaagtctttaggtctggtttctattggccagcagcaaagagtgatgcaaccgagttagtctagagatgtgaagcttgccaattcttgttgaagcaacaacatttaccagcacagcagctgcagaccatacctgtaacatggccatttgcgtgctggggattggacatgattggacccttcaagaaagctcagggaggctatactcacgtgttggttgccatcgataaattcaccaaatggatagagtacaaacccattgcttctctaacttcagccaaggtagtggaattcatacaagat

SEQ ID NO: 400 - DNA, 802 bp, Zea Mays
atttgatgctattggctccatattccctgattaccgttatccgttgcgagggcaagagaaaaagaggaagattgccgcttcggtcaccccagatgagccgaagagcaaaaaggtgaaggtcctgacccatcggcgcgttatattgaactggtcgtagtgcctgaatttggcaaaggtactgcttcagctgccgaagcaaagcaagttgcttcgattgtgcagaatgttgaaaaaccaattgcagtgccgaaggtgcttacagtttggccagccgaagctgaggatgataataccgaagagccacaggtggaaaaaatggtgaagatgccagaaattctgagtcctccggcagagacggaactgccgaaggttacaagagctcccgccacaactcccaagaggagaagaatggcaagcgtgctagacgccgttgcggagacaacaagagcactgactcctactcctgtaaaggagattgccgaagttgctacagcacatacggaaaccgaagctgggtcctcagtgcccgttgaaacaaagctcgccgtaaccgagcagagggccgaagaagaatctccagataccggagtagctctggagaaaagtatgaccaaagaagccaaatcccctgctcccgaagcactgtctgaaagtcatgattatatcattcgacatgctttgggaaaaagattatgtgaagaaggttttgaagctaaacactatgcccgagaactgaagtacccgaagggggccttagtgtttaacggtacagacgaagatgatttcctatactgtctcccgg

SEQ ID NO: 401 - DNA, 648 bp, Zea Mays
tcggcagccagtggtcacacctcggtctcgtctcactcccggaagcgggcaggtggaatgggtggagcggaaatgggagcgggaggaggaacaatggaagagagagtggtggaggtggtaggtatggctgaagtggtggatggctcaagagcgactggagctggcgaagtgggaggtggagtggtagctgtggcgggtgtagagggagcggaggagcgaggccgagacgtgagacgacagacccggtaggcaatctgatatgatgatatctgtagttctccacccgctctctgcctgctctgttgctgctctcactgcaagagctgctcgggctgctctatccaaacgctgcttcttgcggccttcgtgctgctctaagtatacggtcttccccttgacctgcctgaaggggcgaggagggtcctcgtcatctcctcccctggcactgacacattctttgtgcgcaccatactaaactgaaggctgcctaggagagtgaaaaactaagcacgagtagatagcagctgagaggattacaaaagaatggaaaactacctggaaacctcacgtgagagagaaagaatccaggcaggacaggagacgggctcacgagcaggcgagaccactgaaatgacagaagaggtgagc

SEQ ID NO: 402 - DNA, 356 bp, Zea Mays
gcggaccgtccgcgtgatgacgccggaccgtccggggttaccaaggaagttctcctaatcgattcggctgataatgaagctgatgcaggagattggatgacacccataactaattatttacgaaatcccaacgttaggacagataagaacattcggcgtacagctttcaagtatgttttgatgagtgatgaactctaccgccgaacagtcaacgacgtcctgcttaagtgcttgggcccagatgatgctatattagctatggccgaagtacatgaaggaatttgtggtacccatcaatcggctccaaagatgaagtggctgttgcgaaggtctggtttttattggcctaatatgat

SEQ ID NO: 403 - DNA, 804 bp, Zea Mays
aggaatttactctgacatgcctatttctaaagttttggagataatgaaatccaccaacttggatgtaagtggaatatagtgattctttctgaaatgtgcgtgagataatgtcagcccaaattctgatctttttattctttgcatcatgtggaaccaattttacagaatgcccctactcagtcacttttgagttttgtgaatgccatccttgatcggatcattgaaaatgagaatggagaaattccttatgtaggctactcaaaagcaatacagttagttgtttcttttcatacatgagaactttggtacatttttgttttatacttctttcatccccttggataaaaagatagcattctttgcacagaatatcgcttgcttgttgagaaaggtaataatggagattgaacgccgcatttctactcaagcagaacacataagaaatgtaaggaatgctattttatacttatttttcaaattattcttgttgtaactcttacttgtatggcagcaaaatagccttatcagagcacgtgaagagaaatataaatcaaggataagagtactagaggcacttgcaagtgggacaggtggacaaatgcaaataaattcaagtgcggcaaatggaaaaataaatgtaagttctagttttcatttgaaacctattatgatgagttttgttagactcttttatgcataaatcttctgcactttcgagaaaaacaaaaccttctaacattaataacggatatccttttcttatattattttcagattgctgaagatcatgtgctccagatgatg

SEQ ID NO: 404 - DNA, 323 bp, Zea Mays
tgacccgcctgcgtcgtcgggtggatggcgcttcgctggggcagacaccacgcgagatgaggggaagaatgactggagcacgtgagaggtggaagatgatgcgatcaccgtccgatttaggttgagtggatgggattagatctggggaagcaatcaccgtagaccgttgatcgggtatccaacgcctggggtttgatctcacataaattgaatccgagccattggtcacaaatccatcggtggaaatcgtgtaccccttcggcttctaatctcgacccttgaaacttgatcgggcggttgtggcttggctgtacccccttcgg

SEQ ID NO: 405 - DNA, 473 bp, Zea Mays
ataagtttgtgtgtaccccaaagtgtgaggaaagtttccagatcataaaggaaaagctcacgaccgcgcccgttttgacactaccagatatacactaggacttcgtcatcttctgtgatgcttcaaggcaaggcttagggtgtcctgatgcaaaatgagaaagttattgcttatgcatcacgcttactcaagccgcatgagcagaattatcccacccacgatttggaattggcagccatagtgcatgccctaaaaatatggaggcactacctaattgggaacaaatgccacatcttcaccgatcacaagagtctgaagtatatcttcactcagccagacctcaacctccgtcaaagaagatggctagaattgatcaaagattatgaccttgagatccattaccactccagaaaggctaacgtggtagcagacgccctcagccgaaaaccttttgggataaagggaaccaactt

SEQ ID NO: 406 - DNA, 740 bp, Zea Mays
gatgcacccttgagttctaaagaaaaataaaaagggaaaaagtgttagtgagataaaggaaacaagcctaattaacaggatagatggcgaactactcgatatatgctacactggctaaacatatgcaatattatatcacctgtcgagaattagacccatgttgtgatgggctttctatatgttgcaccccttgagctgctaccatcatttgataaatttgatctattttttctttcatttgattcatatcctgtcttaaggctctaacctcttgctcagactgactgcgagcttgcaatgccatttgaagctttgttgatattttcatttgagttccaggggtgcctacatgttgtggagttggtcctaagcctaaaccacaaatacaacctcttggttctttctctccaaaaacatgtgcatataaatcaccatcttcaatacttctgtccttcaattctgggttctcagcaacaacttcttcaaatttattcttaagaggaccacacatatattatattttgttcacttatattttaattattacataaatcaaaaatatgtgtgtactcacaatgaatatttctgctctaggtagaggcacaatatccccttctttgttcttacgcgtgtgtgttctaacatatatttcatctcttctcgcagggcgtccttgttgctcggcctacaagaaaaaatgatttggtccagtaattgactagatttttcataaattaaac

SEQ ID NO: 407 - DNA, 1033 bp, Zea Mays
tagaattcagccgttggatccgtgtttgagggctcggattagaaagacacatcacccaactggtatgtaatcaccaccgttggatcaggaatctatggtccatattcatgaagcggtacgcctagggatcgatcacagccgcccgcacaaatctgacggccacggctgattgggttctagatctaatcgtgtccgcccatccttgtacggacgacgcaggggccatcttcccctcccaagctgaccggacacggcgtataggaaccccgcggtggtggacctcaccggcgtacatgcggtcggcaacacagagccataaaacctaatcggacgaagctgcgcgatgctacgcaaacggtgaaccagtggaagtagttcataccaggaaggatggcgaggaggtctcagtccagggaaccatgcgggtccgcggcgaagttcgacccccggcgagaaattccggtcgcctagaccaccgggtgagcacggagagaatatcgcgagtactggcgcggtccaacagagcatcagggctaagattctagagagcgttggtaacgcgtagagatcccaggcgcggtggctgggtctccacacggcggcaacggtggctacacgacgggggtgttcggtcctctttatactctgatgcgaggggattccggctggcggttggaacggtcagcgggatccgctcgatccaagccagcaattgatcgagttcggcggcgcggtaacagtggccttccgttttcatcgcgcgcctgttacggtgagaggggaaagagatgatgcgcgggacccaccggtaagtgagcaagcgcgcgccagtggagttgaagggagctgggctggcgcggtggtaaaatggtattgggccgaggcgcgcgagaattcggcccaaggtgagttttccccttttttcttttctttattgtttctattttcctttcttatttcaatttcaaatcaaaccaagttttaaattctaaatttcaaatttatgcacaagaaaactccacatgatgcacaa

SEQ ID NO: 408 - DNA, 388 bp, Zea Mays
gtcgatttcctatcgcagcgtctccttcaccagcagcccaggcgtctgatgctgctgggccagcagccccggtgccccctgatgctccaggagctactccaactgtccctgccggcgtagttgttgtgcccctatggtcaaccaccaccgtatgaccactcgaggcaagcgtggtcttcggttcccagctctgtttgaagcttcggcactgtctccaattccccgcagctatcgcgctgccctggcagatccccattggcgcgctgctatggaacaggagtatgcagctctagttggaaaccacacttgggatctcgttcctcggccacctcactccaatgttgtgacaggcaagtggatattcaagcataagttcaacgccgatggc

SEQ ID NO: 409 - DNA, 288 bp, Zea Mays
agttgtatcttcctccgaagcttcgtcctcctctgcctcttggggctggtggtctaaaggaattctggtgtgtccctattgattgggggttactctgctacccttgattatggttgttcttgtcttcactttagcctgggttgtggattgttctaacatgtcttggatgaaatcttcccccgaagccccttgtcttctcagagtatctataagcttcatctcttctttccgaaatcattatcggtcctgatatactcatctatcttttggagaagcttttctagagtc

SEQ ID NO: 410 - DNA, 849 bp, Zea Mays
cgcgtccaagggctggctgacgctctacgcggggcccaaggcgcagtgcgacgtgtacgctgcgtgcgggccgttcacggtctgcagctataccgcggtgcagctctgcagctgcatgaagggcttctcggtgaggtcgccgatggactgggaacagggtgaccggacaggagggtgcgttagagatgctccactggattgcagtactggtaacaacagcaatgccagcgcgccatcttcaacgtccgatggcttcttctccatgcctagcattgggttgcctgacaacgggcgtaccttgcagaacgcgaggagttcagctgaatgctcaacggcatgtctgaccaactgctcctgcactgcgtattcctatggtggcagccaggggtgcctcgtttggcagggtgggttgctcgacgcgaaacagccgcaaagcaacgacgccgactatgtttccgacgtagaaactcttcatcttcgtctcgctgcaacagagtttcagacatcaggacgcaggaaaagaggagtgaccatcggtgccgtcaccggtgcgtgcgctgctgccttggttttgctggcgctggcagtagcagtgatcatccgtaggaggaagaaaaccaagaacggtcgaggggctgctgccggtggtgggctcacggccttttcataccgagagctgcgttccgcgaccaagaatttctctgaaaagctcgggcaaggtggcttcggctccgtcttcaaggggcagctgcgtgactccacgggcgttgcggtgaagaggctcgacggcagcttccagggagagaaacagttcagagctgaagtgagctccatcggcgtcatccagca

SEQ ID NO: 411 - DNA, 662 bp, Zea Mays
gcattagcgagataacgacaaagtcagcacacatgcaatcagaaattcagcattagaggacacctcagtgactcatgcactttactggtgagcaacagactgtaaaaatcaacctgcgatcaagtgtctattagtcttgaagtcgaggctaagatcaaaatgccaggaaggtaatttcgaatttgcataagatgaactaattcaatggtgtagtagtcataaacaaaggcacgctgcaacagggcaaagaaggatctaattcatcgtcggtccatggtaattatgacaaggaattgttgaggcatgggtaaacacagggatctaaacaatctgaggctccatttcactggatctcgaagacagcgaaacatgaacagtatatcattacctattgccgatttggcaactattcgaagaattggaccgagcatgaacagttcagaaattgctaggaggacttgtctgatctggtgacttacacggtgcaacggaagcatcgctgaaatggacaggcaaaatctacgagcagagacacgcagaagcgaccgcatttgagggacgaaccccaagcgttagactaaagactaacacctcggcctagatccagcgatagacgcgcgcgcacgacatgagccgctagaaactgaatctgaagcaggcag

SEQ ID NO: 412 - DNA, 431 bp, Zea Mays
aggcgcatatccggtctcggtctagggataaatctctgtgtcgcccgagcatggcctcggccaaacaacagcgatagaaggacgcccgacgccaccgacccttccacaaagatcgtcggcaacgggatggctacaaaaactacatgactagtgtcaagtccactttatgccatacgggactgattaccatgcacttttcaccatacccatcgttgtttcaacaactatgactcagacgtctcgtccacaagatggcctcgggtacgcgtccgagccccgatcatggcctcggctctctgtttggtcaagatatgggctataggggccaaacatcctcaaagataacaagccaggatagggaccattctggtggccatactgctacaggggctcgggctcgcatcctctccacattacgacaaccctggtac

SEQ ID NO: 413 - DNA, 707 bp, Zea Mays
cgaggaatagtgataaatcagtggttgttgtcaaaataccgtgttgcatgtattgttatgattgtatccataattgtaatggagtcacatcgtatgagtgagtttaagctgggatgtggtgtatgcatgggatgttctagtagatgtataaatctagtatcagtaaattggtttgatttggataggtggatgtatatgcagggtgcttaaattagttcttcatttgtgatagcttatgtatttttaacgtctagccgataggtgttagtattgattatgatgaatatcgtttgtttgtttgtttagggctgatgccttacttaaatagttactatattctagattccttgattggtgaaatgtcttgtagagtcgagatttgcttatgattcatttgtggtttgtcactctgatttcatcatgccatgtcatgccttgtggtttaagtgttctctcttcaaatagttagtagagggtggtattgcagatttgcagatttttagactttctcctagagttgtttcgggtgtgggatgttcacgtagacgtggatcatttaactcaactaattggtagtatccctccatgattttgcttggtgattgagttaattgttcttgtgctcacaaacagaaatttcctgtgtgtacagttttgattgcgcagcaaatcaagtgaagcaaactacgttttatgtaaagattttc

SEQ ID NO: 414 - DNA, 402 bp, Zea Mays
tcatctcaagctggcttaccagatccacagcaggaacccttctgttggtaacccgggtcgaatcagtgaggccatgatacagataagctgggtacgctctgtcttttagtggctgaatgttcttaaaaacaaaatcgacgaccacagcctcggcagtcagacccttctccttcaacaatccaacctcgacaagcagagccccggcctcagctacctccaagtctgtgggggattcagtccaacttggagtgcgagcatctggctgtctccctgaccgaggggggagagaattcccgtgattctccacgataaaccattctaggcgccatcctttgatgctatccttgagtgggatgtcgaggtactcagttttcctcccacggcgcatctccaaactcgcac

SEQ ID NO: 415 - DNA, 602 bp, Zea Mays
aataatgtatcagccatcattagctcatgtttattctcccggtctcagtttccataaccgcatataccaccgcaaaaacccatccctctccgccgactccgccctccccgacgaatccacaccttccgccgctcgctgtcgatccagtcgtaatcgacagtacaacggcgtcccctagttgaccccaatccgcggtccactattgccgctgctgcaacaggcgacggggccctagaccggacaaaaacccattttccccggcgttgcgactgcttccccattcttcgtcgtcgttccacatttctgcggcagaagactggtccaacacgccgtcaacgggtgccgctcctgcaccagtccgacggtagtcgcatcatcaacctcccccaaccatcgacggtagttgcatcatcgacctccaccaaccaacctccttgaggttcttccgaaccctagcgagccgcattacccgggatcatcgtcgaccgtgaacaaagtgtaacaccccactactcccacacaatgaatgttaccaaatacccttcccacaaaacttatacaacataagaatagaaatagagaaagaaagtattgcaaaaatc

SEQ ID NO: 416 - DNA, 405 bp, Zea Mays
catgtaccagtgacagcatatagtactgcattacatattacacctcacctaaccttccacatacgcctgatgcagcagtcatgccgttgcgctctgaagaagcaccaaaagtgatggcacagcacagacaaggctagcacataaaagctaaagctctctgatgcaatgcaagaaaccaaaggggagatgagaaaagacgagcgctttggacctttggtggggctgaggtgaattaatgcctttgttctcatgggctggatgggctataggctggcacggtcctactcgaatccatcacaccgcgcaaccgattgtgcacccagtaaagtgaagatatgactgtcccaaccacacaaacaacgttaatataataatagcataattaattttccatatgaaaaaaag

SEQ ID NO: 417 - DNA, 386 bp, Zea Mays
atgttcatcatgacaagcatccaacaaaagataaccaaactaactctaactaagactggctagactaagacactgaattaagcattattacagactccgactccaccaatctatggatctaaatctatgcgggtccttcagtctggggtaccataatcgaagcgaccacggggcggtgagcggtaagggtgctgaatctagacaggggcaggagagccaccatcacgatagtggcgtgccgtgcattcagcacgcaattctgcaaccttcactcgaaccttgcccaactcgtcaagggcgtggtcgagctctatgttgagcatgatggccaggttgaccatgctgctcagcctaggattgccctcaccaactagcgagacaatcac

SEQ ID NO: 418 - DNA, 456 bp, Zea Mays
agaaaaggtcgtcatagtggttgtcaagggtatggagatatccggccatgtagactatggtagggtcatcttcattaggatctctccctaacaaggcctgaagtcttttcctccaggcaggagtatttttgttgctgggtggaaagtagcgaaggggtgtctcagagacttccctattgtagttttggcataactggcggagggctctttgggcatcattctggcaagtatctgggaagcggtgtccagtggcggtgatttggaagggagggtgatttgggtagtttcggctttctcccagttagactgtcacagagcatttcttaatcccgttctcgcggtattctttccagacgtacttcggcttcttatggatccccatgcgaagcgcacaactccacagaaggtgagggaatccttccacctccgagaagtaggacgtcctaatgacaaagg

SEQ ID NO: 419 - DNA, 565 bp, Zea Mays
gaaaaaactgggctacttcggagagtcttagagcaaagttgtttgatttgctagggaagagataattccggagccgagggatgacaaagttatcatctttaagagcttcttcagagcgggcttcggttcccgctaaatgacatgataggggaggttctaaacaactttgaaatataccttcatcagctgaccccaatgccattgttagacttagtatgtacatatgggctctccgaagccagggaatggatgcgaatgctgaagctttctgccgggtgcacgaacttcactaccagacgaaggctagagcagatggccttcacaggaactttggctgctacaattttgcgtatcggaaggatacgaaggccccggttattggctatcgtaccaagtggccgactagatggactaatgaacggttctacataaaagcggatgagaaaaagagggagaagctaatgagcatggttatgagtctgttagagttaaacttcggcatgactcgacccttatgcaatatgcaattggggttaccctgccagctggctgaagtagaatttag

SEQ ID NO: 420 - DNA, 392 bp, Zea Mays
tgcaaccccaaacctgggaatctcaagaaacatatcttttgcttcactgaacctcttcgctttacagaaaccgtcaatcatgtttgtaaagataggaaaggacaactccatggaatcctacaatcaagtatagtgaacttgtgtaagtctcaacaacatatgaagtcttacatcaagcctcaatgggacagacatgtcctatttaagctcaatataagcagccaatgaataagtagcatctatatttgtattgccataggacaacaacaatcacaaaggtataaagcatatactagcataggccattttgctctgatcccgttcgtttcatcaactcctattgtttcggtagtccagtttttggaatctgtcaacaaacaaaccaaaaacat

SEQ ID NO: 421 - DNA, 301 bp, Zea Mays
tatatacaacttgtatgcgtgattcaagctctagccataattaatctttatttttgcaccaaaaatcctcaacaaccatgccacccaccatcaatcgagattcacaagggcactagtcatgctagcttgtgactcatccaacaaacaatagttatcctctattacacctcagtgccagcactaggtgccaatccacctgtatccacgatgtcattgcttggacccatctgctcctataagaacaccaagcaaatagctaaccaccaggtgacaaagcatggatgctcacaccactcacatt

SEQ ID NO: 422 - DNA, 480 bp, Zea Mays
cttgtgttcctattctatggttgtaacttagcaatgccctcattttttttgtgcatgcagtcattgctaaagaaagatagagaagaacagagcaaaccagatatggcggagttcttcagtaatcttgtaacagcttactgtgacccagctctgaaacctttccaacgggcttctaactccgacgaacgcaccgcgccgctcttggcctctctgtctagctccagataagctgtggatggcagctgactccgctgtgtgaatttcgatttgattttggtgtttagatacggctagtagcataggtataattttatgctacattgtaagagtagaacttttgacagacatatagtttcttattgttgttgtctgttgtgcaattttttgcccttctggtgtgggggggagttcgttgtacatatgtgaatgtacatgatattttgtgcacttctcagagatgaattgctcgttttatgatgt

SEQ ID NO: 423 - DNA, 464 bp, Zea Mays
cgttggtgccatagggacgcaggagcagcaacagcagcaagggcgtaatgtgtagtggctggtggagcacgcgcagtaggaagactgatggtgtacagcggcccagagctattgcacctaatgattgtgttcctggaattaagatccttcacagaaaggccaaacgggtcaaattccatggaacaattattaccagtcgtaaattgacgaacataaagaagattcttaatgatatcaggtgtaacaagaacattgttaagataaaactggccagaaagaactgtatctcctactgaggtgaccggcagactggacccgtttccaacaacgatggatgaaggaatagcagaagttggagaacgaaaactagggagatgttaccagaatccggggtcgtatggttggaggcctcggagtcagcaatccactcggtgatggattggggctgctgaagagtcatcgtg

SEQ ID NO: 424 - DNA, 372 bp, Zea Mays
caccacgaccccgcgctgcaccgtgcccttgaagccgaccagcgccgaccgcatgcgcgccaggaaccgccgcaaactgagcagcccatacgcatccgtttcttcgttattggaaatcaatgcctccgtttcctcttctctctccctccattcaagctctatgaacgccatcaatggccatgaagcacccggccgacccttcctctccccctggtgtctcttcccctcacccttctctataaaatctgacactgtgcctacgagccccttgccttttccctgctcgcccatttcccatgcgctcgcctcggtgtcacgcacctgccgctgttcgttcttcgctctcgtccacacttgctatgttgttgtctg

SEQ ID NO: 425 - DNA, 765 bp, Zea Mays
gtgtaatttgcagacagttcagggcgaaaatggaaaggttcccaagactcagtaaacagtcaaaatggactgcgggttcattatctatttcttcaagggcttatttgtaaacttggctcaacgaagatgtacggtgtgatctgggccatcggatcatctttcaagcgcccagattagatcggattacttatgaagccgcacacatcctaagccactggatctaacatcaagggttatgatttaaagatcgcaatccaatcgaatccacacgaccaacatccaacggtcctacttaacctgagcgaagagatactcgatcgtctgattgtagccgtcaatcaagagatcaacgcacaaggttgtttcacctccgcccatgtaccccagcgcagaccgagcggcggtgcagtagcaaccgcggcggcggccatggccggtgaatagccaaatcccgctagcgcgcacgaaactcaactctgactggttccaaacctagaacacgcggtaaagaaagggtaggaagggttctcatcgtgtgacgcacaacaggatgaccgtgcgacgaagcagggcggaatcacggcatgatctcgcataggtgcgcaatcccgggtcaccaggtcgtcaatcccacaaggcaaagccgcaatccatccccggagttgcgcagtgaagcttcgacgacagagcccaagcgcagcggcacccgatccatactctctctcgcaatttcctgtgcttccgtctctggcggtgatggtggca

SEQ ID NO: 426 - DNA, 484 bp, Zea Mays
caattatacgggggtaaaagcaataaagataggtgtatgggggaatgagtagaattaaaccctatgatctgtagtaaggtaaagttgcctcaaaggataatgaggagtaaagaaccaaactaatacgtttactattctataaagaactatttgcacttaatcaattatttataaacttcctagataactactcattggtgcatcaaagctatagtgcatcaaagttgtagtgcatcaaagctctagtataccaccaccaccaccatcggtatgcaacatgcagctaggtatgaccagacagtaagaatatgatctcggatcgtccggacacattgcggaccatccgacaccttacgctagatcgtccagatatgcatacgcagaacagagtactgtgcatgaagcgcaattttcatactccaccccacatacaacacactatattcacagcatgacaccacccgcatgtgaggttgaatatttt

SEQ ID NO: 427 - DNA, 373 bp, Zea Mays
tttcgatgtgctacagtgacctttcaggtcaacaagcaagtggaaaactgttgcgccttgtgcaatagcggtttttgctgattcattacgggaatcgaatcaaaccatgtgaaagtacagttttccaaggtgaggtattttgtaaggtgtgtccacgtgagcacgcaggcataatcttgtagagtgaaactgttgatgtaaaacgagatctctttattgcttgaatatatatacacaagttgtaatcacagggaaaagtaaaggacgttgtctattcatgcgtggagtagggatgaaaacaattttggaattctggaaactgtttttgatttttttaccggaatctcggaatcggtcaccaaaattttagatc

SEQ ID NO: 428 - DNA, 516 bp, Zea Mays
cttacgtcattcatcctccattttccttctggcccagtactgagttggtcgtataccacagttggcgtagatgccgaccgcgaggaatttgtcggtcctttacctgatagggcttcacttgtgctcacggaagcatcgtaatagcccattccatgggccttggagccaggaccgaccttcaaagagtgtttggtggcttccctcgggatacccctcgtgtcagagggtcatcatgtgaaggcattattttccttgcgaatgggagggtaagcgagtgtgccctcctatttagaaaaaggggtgcatggactcgatgtgtgccacctgcttgcttggttgcctatggattggcggctctcccttcacgtcgtccgctattttgaggatcgtactcgccctcttcgcatcagggacctgctcgttgagtgtctagaactcatccatagctcttgagcgagggcgcccccctcggtcaagtcaaagtattcgatgtcacattcatacgcatgttgcgtt

SEQ ID NO: 429 - DNA, 494 bp, Zea Mays
ccgagccgctcgatcaagatcggacgggggaaatcagatcgggggaaacagacgtgcgcgaagcggcgccactcctctccgtggcggtgaagtcgctgaagttgaggcaggcgcaagctagggtggctccggggttgccggagttgggtagtggggaagagggcgccacgacgaactcaatggcggggaagaggccatgaatccatgggcagagaggggagaacggcggtgagagagtctcgggcgggccagagcaactccggcgagccattccggccacagggaggggacttaaggcgcgctaaggccttggctaacttcagcagaggcaagggcgacgcatgaacctactccggtgaactagaccgggctaaatcggtcggccaccgcgtgagcacggcggaccgccgcggccgagcaccggcgaaggcaaaattggccgaacacagggcgcaataggggaaattgggcatggggatgggtgtctcacctcg

SEQ ID NO: 430 - DNA, 397 bp, Zea Mays
cacagcaaagcgtactagatctacggcaacggcaacccagtcatcttttgtttggagtcatcatcatcagatgagatgcagatgccggagaaagaagaaaagcgagcagcagctcgtttgcttaaaggtagaccgtgcagttgagtggtagattactgacaggcccaactttgcatcagtgaaagccagacatggcaagcggagtagagaatggaagccctggtctggtcaaaagtacaggaaagacacgacgtagctttggatctacgcaaaagcgagcgtatgtactcatctgcaggttacactatgcatacatcctaccagaaaaagactgtacatggatgtgtgatgaacaagctgttcagtgctactccctccgccacccaccctcccacac

SEQ ID NO: 431 - DNA, 549 bp, Zea Mays
gcccagacaaaggcatggcgcgatcaggcagtcatcccaagggaattcagcgaaggagacctcatactcgtccatacagctcgtacagagtccagggcaagctggagcccaggtgggagggccctttcattgtcaagacgaaggcctcccccagcgcatacaggctcgcaacgccaaacggcgaagacctggagcattcctggaacatcgataatctccgcaaattttttgtttgactcatctaggccagctcgcccttgtaattcgcaaagacaatttttattctggcccacactcttttcctcccggggggtgaggtttttaacgaggcggagtcatgtaatatacaagtgcaaaatcccccgcaaaatctatgtcgaaaaaagaccgcgccgacggtcttcgacattcgaccaattcatagtcaccgcgaggcccagcgtcagccaccctcgtgtgcaacaactccgcgcagaagtcgcctaagggtgcagccggactagcacaacaagtgcgaaaaatcaaagtcttccgcgaagactatccggg

SEQ ID NO: 432 - DNA, 538 bp, Zea Mays
ggaaaatttcagtccgacaggatttgtccgaatctaaggattgaaataagggggatagatttccccgctagcctagtagtaatgggaactcaagggttagatgtcatcctagggatgaattggctatacagaactcaagccactgttagtgtgacaagaggacaaccaagttggtgtccccattcggaaaggaagtagtaaccaagctgtacttaactaaactagaggaaggatcctgtcatcatttatcagtagatgacaaggagtccaatccgattgaggcaattaggatcgtgtcagagtttcctgatgtattccttgaagagttaccaggcatgccacctgaaaggaaggttgaatttgccatagagcttatcccaggcaccgcccctatttccaagagagcttatcgagtgtccggaccagagttggtggaactcaagaagcaaattgatgagttgttagagaaaggttacatcaggccaagtacctcaccttgggcagccccggtgttatttatggataagaaggatggcac

SEQ ID NO: 433 - DNA, 656 bp, Zea Mays
ttggaccattgttttttagttggtgactggagatgtcagtcgttaattgatcctatgacgtcaatccctcatgatttagatttattagatatgctctcctgatatttgaagttgttgttatatgatataccatgatttcttttgggctacaagttgcgaacacatgccacccaatgatattcagtgtcgtaggtcatagaaataaaataaggaacagcagtaaaacattatccacacaactaatttatattgactagaaatctggagcaccaagtatgaagtaatcttatgcattatgtgtatatttggaagctattgacggcagaatagaataggtactgggtatgtcgtgtaccttgttttcaaagggatggagatacttgatgtacgacaccttttgctcctcagcaacaggagatataagctggctcgaagtaacagttgcattccacttcactggtttatgatcacctcgtgcgctggtttgcattgtatttgtagaagcattccgttagaaaaaggcaagagcaggcaacatgtgcatatatttgataacaagaggatagaattacctggacataaggggttctgccttaggaatggatggattgatgtaccacttacatggtgagcctccagtcagacaaagcccatct

SEQ ID NO: 434 - DNA, 565 bp, Zea Mays
atcgaaatgaaataaggacttgtgtcttatgtatgtgatgcatgggtgaccgatgtacgaatgctcctaccttatgtttactttgtatgaaccttatgtgcaatggttcatccttatgtgttccttctctatgagtcttatgtggaatgcttaatcgttacgttggtttcgtatgaacctttttgtccaatgcgtcatcattgtgttcctttgctatgaacctttatgtgcaatgcattacagttcatactttacagttcaagtctgttctgtgttgtccaaattaatgtattcctgtatttcattccagaatggctgacaacaactcaaacacaccttttcgacctactggtgccagccccaattcaggtaaccagtctttccccccacccatgtgggatcctcagatgtggcagggccaaggtttggacccaacccatccttctacatttactactcctacaaaccatatgagtaatcctacctggtcccagggagctaatgacccatctacatatacctttcgtagtccatggaacccattttttggtatgatcaatcctgg

SEQ ID NO: 435 - DNA, 481 bp, Zea Mays
cggcgctgtccattttcttctttttcagcagtcacacttagcactcgaagagagataaaacagttatgatctccttcttctggttggttctcattctcttcttgttgaatttcttcatcaaactttggtccgttgtcttctggatcactgtctgattcccattcacctttttcattcaagaacattgttcttctgcttggacattgagcagcaatgtgcccgcgaccatggcacttatggcatacgatttctcttgtacgggtagaagaagtagcgactgaagcttcagttgggtctgatgtactagcagcagaccgctccttatttgcagggaatgaacctatagaagccgccatctttgatgtaccattggatggagaagacctagatgaatttccttgggatcgtcctccaccaaaagaagcactggattgctgtttgcgccacagaacaacattataatgacttgcataagattttc

SEQ ID NO: 436 - DNA, 732 bp, Zea Mays
cttgaaggtgacgatctcttctgggagcaaagggcagccgaactccaagaaaaagataaaaagctgaggggcagccgaactccaagaaaaatgtttgccaggaacaggaagaagtagaggaaaacacctactacaaaggaggaaactgagggcacactgtcgcttgcaaataccgtaactgagagtctgtcatctgctgtaggaaagcaaaaaatgggggcacatgctctgctatgacagggccaaaaaattctgctagtaacagggccaaaaaattctgctagtaacgagcctgcagacacaaaggagcatggatctaggatctcgatctcagcatggatgaggcagagaactaggaatccatcctcagcaatgaagaagaagtaacctcgtccataactgcaaagaagcgtggatctggctggaaacacgtcctcagcatcgaaggagcagaaaactgggaaggggttctcagtgctgaggaagcaggaagccggaagctcgtatgcagttgcaaataaggaggctgtgacgaatagctcaagacgccggtggaggcaacagagtgaggtctgggtttggggtagaggccgtggcagacgccgccgcggaggttgaggtggtgcagtaggcaagggggtgagaggctgggagaggaattgctcgtgaggactgccacagacaggggcgacaaggaggaaaggacaagctcaccggggaaaaggtcgctgt

SEQ ID NO: 437 - DNA, 678 bp, Zea Mays
tgaccttcaagaatctgggggtcttcagctttgatgggttgaacagggttggatggagcaggctcttggatccgcagggctctacgttggttatgggtgacaaagtaggcctccatcaacttctggacgtgctcatccttggcttgcttcagggcttccacagcaatgacttcacgactttccaaggcatctacacgggcttgagttgtggtgagatccacatgcagctgacggttgcgcttctctgaatcttctgctcgggcaatcatctgacggtggtgccgagccaagaaatcatactgtgcatcaagggtgagcaggtatgcagtgaggtgcacgactgtggggtcatcctcaagcagctgctgctcttccaatgcacgcatcctggccatccaaacgggacagtttctctaaaagagcggaaagaatctgagcggggtgtcggccacttcttcttcatagatctgacacagggcctcaatgccttgcgagcgacgacttggcaggtgtctttgaatctgtgcccagcagcagtgacactccattccacatggtgcggactggatccaatgtatacagtcacgacacacttttctgtgccatgctcgatgaattcacgaccatcatactctggctggctcctaatttcgaggcggactgtgcatgctctcagca

SEQ ID NO: 438 - DNA, 725 bp, Zea Mays
cagccttacgcaattgaatgagcaacgtttgcatactccttggcagcagaaggtatacactaagctgattggtctctaatataagattgtgtatagaaagggctccgacaacgcagcagctaatgctctgtcccgtttgccccggccgtcccggccgtcagcagactgtttcgctgtttctcattgttccccggcatggttacacgatgtggttgctggttatgacaacaatcctacagccaaacagctgttaacaagtttgtcagtacagtcggatgattctggacctttctctctgcgtccgggtgtaatacgttacaaagggcgcgtgtggttggatggtaactctgaattacagcagcgggttctccaggcgatgcatgattctgctattggcggtcattcaggcatacctgtcacttacggccgattgaaacaactattttattggccaggaatgaagtctgttgttcaggcttatgtgcattcttgttcagtctgtcaacaggcgaagccggaaagggttaagtacccaggccttctccaaccattgtcagtaccgccgcaagcctggcatacgatttcactcgacttcatcgagggattaccccgttctggacatgctaattgcatcttggtggtggtggataagttctccaaatatgggcacttcttgattttatcccatccattcactgctgctcgcgttgctcgggtgtttttgg

SEQ ID NO: 439 - DNA, 309 bp, Zea Mays
ccagatctgagaatttatgcagaattgatccatgaatcctatagtaaacttgaagactgttgtttggtgaacaatttttattaatgaaggtcacccttttcttaacaagaattaagagaaaacgagggtgaaaggaggtcggttcagcaagggaatgcagataagagatcaagaaatatctgaagaacgaaaagatctgaggcactatggattcagatgtgctcgggtgaattggagattggaacaaccgcggcaagatagctatgagccgtgtcaccgttccgcgaacttggtcggagtctaaccgga

SEQ ID NO: 440 - DNA, 590 bp, Zea Mays
tggcaggcgacgaagaagaagcaaggatccctacagacttcgatgaatgtgttagccgccaagatcttgaggcaaacaacaagctcctgaaggagcaaatggaggagacggtccacaagtcagtgcatgatgccttcattgacatgaaccttgtcaagacttacgagaggctggatcgacgattgtcccagatcgtcgacagacttgctgtgttggagacgcaacaacaagcaccaccaccaccacctcctcgtccacgtcttcccgatgatgcggtgaggatgatggctacattagtgcttccgacggtgaggatgacgatgatgactccaatgatgttgctgctaatgatgatgctatgcttggtgctgatgctacggtgaaccttcgaagcatcatggtgcagcgtgttcttagtgcttagcctgaatcattagagaagcagcaacaccataatttgttccagactttcttcgccatcgagaatcggcgtgcacgtgttattattgatggtggaagctgcaataatttggtgagttcagatttggtcaagaagcttggcctgaccacacgtccacggccacatccat

SEQ ID NO: 441 - DNA, 643 bp, Zea Mays
cttttattgttttaaatttaatggactttgtttaatttatgcagtattgttttttttctgaaatagctatatattctttttaatatttttcctcattaggcttacattacttgaattaaaaatcatgtttaagtcagcaaaaggttttaggagaaaagctgatgtggcgttggtgtggtcatagactgacgatatagattgtgcacagaaaagttctaatagaaaaaggccgacgatggtagatacagtctagtcgatggtgatgtggcggtagatacaaacccaatgcattggatctagccttacacatgagctgcattggatagtgttggtcttgtgccgctgacatcgagtcttgcatctttgcccataatatacaacaggtcatcagttgttccttttctaagcctaggtgaacgacagtcggtacacaggcgagcatatccccatcgacggttgattcctctggtcgagtaaatctctagtggatccccaaatccaaaacatcatacctcaaacacctaaccccaaaacccaaaccctaaaaccccttattccaaacccaaatccctaaccccaaactttgaacccctaaccccaaccctaaaccccaaacttcaatcccaaaaccttaaaccccaaa

SEQ ID NO: 442 - DNA, 802 bp, Zea Mays
cctgattccagccaccagatcccgatcggagggttctgatcgcacgcgagagactctacgtctaggatcaaatctgcccgtccattggccgatcaatggctggacacaacgtcttcttcctacagcacactacggaagcaggttgccgtcttcttccctggcgcgacaccaggcgcacagccgatggtgtgcccgccattcctatgccagcgcgccgcaaaggttaactggaccgcagatcccgagcccgcttcgcgcctaatcccctcaccagaaactccccacgttacatatcatatcgcagaggggagaacggatcttgatttgaagaggaggaggatgaaccgtaccgtggagaagtgagtcgggagcagtcctgggttcgacgaccaccgattggagagacccaagcacatcgcaaacacgtacaggatgcccaacaaccatggcgctctccaacaatcctagcgccgaggtggctcggttcggtgactcctttctcgctctctctgcttcttcgatgttgcgcacatggcggtccttgctccacaaagcaacaaggcttgggttatatagtcacccgggtgcgcgatggtcagcttccgatcgaaatcccagcaagcggttgcagctgagcgcgggattcgcgcgggtggttgagtcatggagctcggaaatcctgggacgccgagcgggttgttgaggatgggataagcttgacgagtgggccccaccgaacagtgatggaaaggcaggcgcgacgtgaaataggagataaatgggccggccagaaggggtagtt

SEQ ID NO: 443 - DNA, 547 bp, Zea Mays
atgtgtaattcgtatgatcgtatatattactttttatcctcttgtggtgttttgttgtcttctaatcttgtttctcttgtgattaacatatatatatatatatattaaaaaaatacaatccatgggtcagcaaccaagtgaagaatcaaggaacaagcgcaaggtggggcctatgttgccacctagcaaaagaccaacaatgtgtggccgttgtcaatctacaaaggttggtaaccattgcaacagtgcgtcagaagctcctccctccatacatggttagtacttagtttttactcaacacatggtaaatcatatgcaagtgcattatagagatttacaaattaactcttatatgtggtttatgtaggccatccaggaggctgatgaggatgaagaggaaattaacaggattgacatgaatgatgatttatcagtaagcatgccttcatgtgcttcacttgaaggggcgggcaaggatggagatgaagtatcaaaaaatcagaaggatgcttcacttgagaggaaggagagcttcttgctggaagaa

SEQ ID NO: 444 - DNA, 505 bp, Zea Mays
gcggggaggtagctttggacgtgtcgcgatctcgtggacctagcccgagcctagtcggagataattcaccggcagccaccgtggctcggtcatttccgccgccgtgtcgtccatgcctcgctcctccctgactgtgtcccttctttacgtggtaaccatgcacgaacggtgtaatccgcggccgtggatcatagctggactaccgcgcctttaaatagccccgccacccacggcgaggtattcacatcttcaccagtgaactcggttgaagcgcaaattcgcggaatcctctccacctctccacatcttcaccagtgaaaccatagtcctttgtgaccgtgtagccccaacctcacctcctaattccacccgaacccgtcgcggtgccattttcccccttttctatcaccgacgagcgaaaatcctccgcgctcagtggccagctactcccaggtctgctcctgctagttttaatcgtgtttcagcacctatatacgctcgtgat

SEQ ID NO: 445 - DNA, 317 bp, Zea Mays
aaatttttatgtttaggtgtctagtacaactaaaaccgtgtgaaatgtgatagccgtatccatggcgatgaagaagctgctcggtttttcgggtaggcaactgtccacgtggttcaggttgtttatagtactagtttactagatttgttttgattgttcataccgttggcaagtcatgggatagctggccaactaagccttgtcgtttcgatggtagagggggggcccggccttggagtgcaactgtccaagtccaacaatgtgctggagcaatgatttagcaggcaaatggacaagaagccaacgtgcattgcctt

SEQ ID NO: 446 - DNA, 588 bp, Zea Mays
ttagtggatgttaatgataaaaaagtcttggtttggctgaatgtgaccaataaagacaaagtcaagggcatcatcttcgatgaccctcaggcccccgatgaaaacacaaaaaaactattgcaggaaagttgttgctgagaagaccctagacgaaaaggagaccctaaatatcaccatcaagtctaacaatgctgggggggcaaacgcagataggggaccaaggcatgatccatgttccgcgcattgcggatggtccggatcaccggcggacagtccgagaaactcctgcggtccgtccggttgtgcctagggacaacagtgactatgtacttttcaagccacgatgacccaaaataggcatgtggaagaaaaattcagcaaaggcacctggtcggttgatcaaagccgtcccaacttttgatcaattactatccaaatatgtcaacaaaagggtcggtcactatgatcggccagcaaagcaacctcacttacctacccagacaagacaggcaaaatcaattggatcatctcgccaaacaaggccgaataaatcagcccgaaacattgtccaactagcaccaaaaacac

SEQ ID NO: 447 - DNA, 310 bp, Zea Mays
gctcgtttgaaatggcacattgctctcgttgtcggattgactggctacagagggatggggtcttgttgctggaagtcgatagggtattaaggcctggaggatattttgtgtattcatcaccggaggcctatgctttggaccccttcaacaggaagatatggagacagatgagtgaccttgctcgaaggatgtgttggcgggttgcatctaagaagaaccagacagtgatatgggctaaaccattgactaatggatgctatatgaggagagagcctggaacacttccccccatgtgtgaacgtgatggtga

SEQ ID NO: 448 - DNA, 589 bp, Zea Mays
gttgagtaaatgtgttgattccaagtttaatcaaatcaaagtcaatcgacaaccaatagtttgaatgcctttgagaatgaaatcttttattgatgacggttctccgattacatagtacaacgttgatccgatagcttttgaggtcttgctaagggtaaaactttcaaagatgctctatgttccatgagttccccacttccgtccatccatttaagtaagccgatatgatcctggccgagtgacctccgacacaatgaatggcccttcccatagtggtgacaacttgtgccgtccttcccccgttagaattcggtgaaggaccaagtctcccaccacaaaggattgatgtcatatagccttatcatgatagagcctcaaggtctgctggtatctggttgactgaattactatgttcaatcgctcttcctctagcacatcaatatcctctagcctggtagcttctgcttcagctatgctttcgaataccagccttggtgccccaaacctgaggtcggcaggtagcactgcctccgaaccatataccatgaagaagggggtgtttccatgcagagctcgactgggttgagtt

SEQ ID NO: 449 - DNA, 400 bp, Zea Mays
agaaccttcaactttttgccctagcacaggctcaactggggtgaccgaagtagcagctttcctctttttcccctgtcctcacaacagatagcggtagtcggggtatatgaagccaatggcatcaaaaaccctgttcagtcttttcttccccttcttccaaaggctgcggatagagcattatcttcggccttggaataagctccaagcaattcatcacttgtagcttcgatacacttcagccagtcatcgttgggttcatcaaacttctccctgaatctgaaggtatacttcagtcgaaccagaccatctttgctagagtcggtggtggtctccttcggcatttcccagctttctacaagcggccataccctgaaggctatatgctcctgaattaaatccc

SEQ ID NO: 450 - DNA, 595 bp, Zea Mays
cgcgggtaaaagatctgcggcactgttgaatcggatgtgctcgagtaatctggtgaaggggatttgatcgcgtaaagataaattcggacgtggcaccattccgcgaacccaatcgtgtgtgcccagagaaatcccaccggcggtcaccgtggctcggtcacttccaccgcggtgtcacccatgcctcattttccccttactgtgcctcttctatacgtggtagccatgcgtgaacaaagccttccgcggtcgctgatcgttagccggaccgtcatggctataaatagcgccatggaccacggcgaggtattcgcatctccaccagtaagctcagttgaagctcaaattcacggaatcctatccacctctcccaaaattggttgtgcacggtgaaaccatagtcccttacagccgtgtagccctaatctcacctcctaattccacccagaactgtcacggcgtcgttttccccctttgctatcactggcaagcaaaaatcctccgtgccccatggccagctaccttcaggtctgctcctattcgttttaatcgtgtttcaacacctatatacactcgtgatactcatcggctccac

SEQ ID NO: 451 - DNA, 1699 bp, Zea Mays
tttagttccgctaattcggtgggagccatgcggtatggtctctttgcaatgggtgtagtgccggggattagattaatgtagaactccacttctctttctggcggcattcttggcaattcttctgggaatacagccatgaattcttctactacagatatgctttctgctgctaggttaaacaccattggatcttgggcgggtggctgagcctgacatgagactgactttccttggtggacagtgagaagaacggtcttatttgcgcaacttatgatgcccttgtgcttggttaaccaatccattcctaagatcacatcaattccttgggatggcaagatggctagatctaccaagaacaccaccccacttaaaagaatcctgacttgggagcatttgagctggcatagaaggtctgaccctaggttcgggtgactaagggaatttctaggtgggtagtggggatgccatgcttttccacaaaactagtggctatgaaagaatgagatgctcctgaatcaaaaagtacagtggcgggagtaaattcaactaggaactcaccgagcactactcccggggcttgctgagcctcttgagcgtcgacgtggtttactcgtgctctgccatggtactaggtcttgctctgctggatgttggaggagggtgccttggaggcgggtgctggggcactcttggggccattcaccgagtgagagtaagtaggcccagatgccttcaactgggggcagttattcttgtagtgactggggtctccgcagtgccaacaggcattagctggaggttggttgcttgcgacggagggggcctgaaaggatctttgaccctgctgactgaaacatgacggagtgggtccagctggcttgttgaagcttggtcccttgggtggaaacccaaaggatcgaattctctggtgcctgtcctgctgctgagctcggaggacttggaatttcctcttgaggtgacccttttattcttcccttgccctttccacttgtatggccttgtttgagaggtgcgagaagctgaggaagtcttggctggccaagatagtcttgagttctggtcttagccctttcaagaaacgggccatcttcttggcttctgtgctgacatcgtcaggcgcatagcgagccaattctgtgaatttgtgcacatactctctgacagatcttccaccttgagttagttcccgaaatttatcttccttgagctaaacgatcccttgaggcacatgatgttctcggaaagcgacttcaaattatgcccaggtagcatccctgacggcagcgctgaaggtatcccaccaggataggaccatcccggaaagttaatgagcagccagatgaatacactggttcttagggcatccgatggcttctaacttcctttttattgtgcgcatccagtcatcagcgttgagcagattgctggatccagcaaatgtgggaggcttgagtcttagaaaatctcccatcctgtcctgaggccttcgaccattcgggcgctggttttcaaggcttctagtgaggacttcaatgagtcgggtttggttggccagaacttgggctaaatctaatggcagctccggaggtgcggggaggtgggtctcactcccttctccaccggcttctccttcagctcctaggggaaaccttgctccaatcccagaggcggtaggcgt

SEQ ID NO: 452 - DNA, 437 bp, Zea Mays
attcataggaactattcatcgttcatacgaactattcaccgtacatcggatcgttcataatcactattcatcattcgtccgatcacccaattattcaactgctcattcatcatgatgatcagctcaactaagacatgtcgatcaatatcttagtcatacgaactcaggtgactgttattttccttctagtaagaacttcccggttagtcaccatcccagaattgctccaagttgagtacgcttaactttgaggctctttcgaaccagacttccataaataaaggcaaaccaagtttatatggatgcaccatcaattctataaaaactttaggctaagataccacaaccctctcgggccaggatatcacagtattccggttgtttggggtcccgccttactgttgtcccatgtgacacaataggtaggaatagttgcc

SEQ ID NO: 453 - DNA, 387 bp, Zea Mays
cacccctaacaagctagacctagatcgtagcacatcacgctcatctcgtagggtggcgtacttggtgtacaatgtggtgatgtttgatatgtgtagggcgtacccatcacactcagtctcattggacaccatgatagaggctctagcagactcaagctccctaagcgtactcttatacttactcttataatctctcctctcatgagaagcaagcctaagcaacttgtcctaactagctaaaacaacctttagctcatctacctcagcggcgagatcatcggcggaaggcaataccttagaagtggagttgtcgctgatgttctgaccatcatcgtctcaccacatgcatcatcaccaagggccatggtgcaaagacctcctgctatg

SEQ ID NO: 454 - DNA, 585 bp, Zea Mays
cgggcgtaagtgtgcccatgagcccatcgactacgatgcccgacacggctctgaccgccatgaccacgacaacctcgatgtgggtgagctgctttgctagagacgcctgcacgtcagcctccgacgacctgtcatggtaatcggagagaacaataatatacacgcgacgaagcagatgacattgagggatggctgcaaacacaatcatatggtaaccgacatcgacggtgtgctgacctgacgaagacgacgatgtctggtccgcaccacacagaccatagatgaagcgctcatagatcaagggacaatgagtacccgccgccgtggttgttgtggactgctctccttttccccttccaccacggcggacacgacgatgcctgcttttttctacttttattgtggcgcgatgcttcgatttttgcctggaagtttctcatggccttgggaggaacgcgctgtgtggagttctacgatttgcctcctacagccatgggatataaatcatacgcacgccgtcattttgcctttaataggagactatacgtgaggcctgctgctcgctctagctgtcgttcacgccca

SEQ ID NO: 455 - DNA, 590 bp, Zea Mays
atggttgcaccttaggctccttggtacaggaagtcgaggggtccctccccccatcatccgggcgagcagtttctaccgccagggcgtgcaacttctcgacagatgcaagtgcagcagggcggtcgccctgcatggtgaggaccccagcaggggacgacatcttgaggaccaagtacccgtaatgggcaatggccatgaaccggtacagggccagcctgccaatgatggcattgaaagggaggttaacctccgcaacgtcgaactggacattctcagtgcgtaagttctcctcagtcccgaatgtaaccgagagtgtgatgctcccaaggggatacactggttgagggcccacttcggagaatgggcgagagggtcccaatcgggatcttgggatctacagctgcttgaacgcagcatgactgatgacattgagcccaaccccaccatcaatcaggacatgatgtagcttcatgtttgtgatgacaagggcggtgatgagtggtagtatgccggcccctgccatgtttttggggtagtcgaatgccccgaaggagatagtggtgctccgccactgctaatgtggggctacc

SEQ ID NO: 456 - DNA, 632 bp, Zea Mays
ttgaactcatttgatcactagatcaaggttcaattcaaccccaaagatggctctgttacactgaaaacctgaatttcagagtgaaaccagcctgacagccagactttaggcttaattatctcttaaatttccttaacaactatgctcacaaccttaagcaaagttgttctccttagtttggtctacaactttgatgtggtgccctagggtaaaaaccctatgatttgaaagttacaaggctcaaaagttgagcccaaatctctgaaattcagacttagggtgaaatctcaattagggacttttttgcaaatgcatccaaaacttagggtttggcttgtaaattcacatatgagtgacccaaatgacttaagatacttatttaacttggtttttgcactttagtccaaaagtggactaattttgcacataagcccgtagggtttggttttagggtttctagggttccaattagggtttttggtaccccaggggtataaatgcaattcaactttattcttgggaccattttatgaccttttccttaaagcttttaggttttctcaatttgggttatgttttacccctttaatccccctttagggtttagtgccctattcagggtcttatttgca

SEQ ID NO: 457 - DNA, 1336 bp, Zea Mays
gcatggttcacacctagttttctgctactattaaaatttttcgttcagattctggtggtgaattcctatatgataattttcaccagatattgaccatagagggtactctagctcaactttcttgtcctggtgctcatgcccaaaatggtgttgctgaacgcaaacaccgtcatattattgagagtgctcgtactcttttgatatcttcttttgtgccttcacacttttggagtgaagttgtttccactgccgtgtatctcattaatagacaacctttatctaaactttctggtaaatcatcgggtgaagttctttttgggacttctccacgatatgatcatctttgtgtgtttggatgtatatgctatgtcttgttaccaccacgtgagcggactaaattgactgctcaatctgtagagtgtgtattccttggatacagtcctgaacacaaaggctatcgttgttatgatccatctactcgtcatattcggatttctagagatgtgagtttcaatgaaaatcgccccttctttcacaaccagtctactcactccacctattatcccacagaatctacttctttcatgtgtcttccttccattcctgcatctgaaccatcaccttctacatccacatctgatgttctcattcccataacaccaccttccacctccacgtcatccacctcttcctcttccaaaccacctatcatccaaacctacattcgtcgttcccgctctatccctacggctggtcctggtactgatcatgtacctgattcttgtactaacaactctaagtctaatgatgcttttaatcagggatatcgtcttcgtgatcgtggtactattgaacctccagatcgttatggtttcccacgaactgctgttgcaatttttgaacccactacttatcaggaagcttctgagattcttgagtggcagctagctatgattgatgaattggctgctcttgaatgcactggtacatgggatattgttcctttaccctcacatgttgttcctatcacatgtaaatgggtcttcaaagttaagacaaaatccgatggttccattgagaggtataaagttcgtcttgtggctcgtggtttccaacagactcaaggacttgattatgatgagacctatgcacctgttgcgcatatgactactgttcgaaccttgattgcaattgcagcctcatcttcttggactatctcccagatggatattaagaatgcttttctcaatggtgatctacatgaagaagtttatatgcatcctcctccgggggttgatactccatcagggcacgtttgtcatctccgttgcgcatt

SEQ ID NO: 458 - DNA, 819 bp, Zea Mays
cacaactttcccaattttcagactttgcttaacaaggcaattggtcttgaaagcaaaaggaaagagttgtctgatcacaagagaaagttccaagggcagaccaacaggaatacccgtcagaacaactcccaaggttctcagttccgctccggaaatcagagtgggaacaacatttatcaagcacaatgctctggacaacaaggtcagaggagcaaccaatatcagaaacaacagaggaacaacactcagaccagtcaaaggtctagtggtcaacagcagaatcgtcaaggaagcaccgtgaacacactggccaagaacaacaacacaactaccccagtccaacctaatggctatttcaagtgtggcaaacttggccactatgctaacaactgcccaaggcgcaatcaacaaacaccccaaaagaacagcaaccagaggactgatcagaacacacctgctcgtggatctgcacaaaacaagactccgcagaactagagtaggggaagagttaatcacgtgacagcagaatcagttcatgaggatgccgacttggtgtatggtatgtttcttattaactccatacctgcatcagttttatttgattctagagaatctcactccttcgtaacaaagtcatttatggaaaaacataatataccaaactatcccttgaagaagaaactattaattcgatcaccaggaggtgaacttagagccactcactcatcccctcagactaagattgaaattagaggcctaagctttctagtagagctgataattttggaatctagtggaatcaatgtgatacttagaata

SEQ ID NO: 459 - DNA, 727 bp, Zea Mays
tagcaattcagcattgccaaccagcatatgctttgcaatgccagttctcgtcagtaaaaaagtactatcaaacttcctgcatcttgagccttagaagaactacataagtgttttaacgcttctgtaattgaacaagtagtattgaggcttagaataactacataagtgttttaacgcaaagcatgccaataaaatggaagtcaccttagcaacaaattgaaggtcccttcttgtcatgtccaacgcaaagcatgccaataaaatgacccttacacgatccaagaatcaaccaaaatttatggaacaatcttagaagtgttttactgtaccattttttcagcctgccgtcatgttgatcagaattgttctttttcagattcagattgtagagcagctctatgtgtttgtcaccttggaacacagaatccctactactctctccccattttttcagcctgccatcatgttgatcaggagtgtgattttttttctccgttcttgccaattcctgtactaattactacatagcttctggtcctcgacgcttttttttcttctgcacttcactgtcgcaggaactactaatttctattatgtttgagagcaagcaagtccatttcatttcgatcgatcggttccaattttctttgatgcttggttccctgctaatctaatctaatccatccatctatccttggttcgattaggttctcgttcttcagtgcgc

SEQ ID NO: 460 - DNA, 2023 bp, Zea Mays
cccacagatgcagcagcaatggcagcctagagcccacaactgcatcaaccataaatctcaaaagctatctaaaaacacatgtccaagtccaatctagtcgtcccacaccaaatcggacgactagaattctggtcggtctaatcgccttggtgggtctagtcgggttcagtttaatgattagtccgactaatcgtgattagttggatgacttgaaaacactattggaaaaaaatttcttttatgtgagttcttctatagtccaccccttttactaagaaaatatgcttatggatgtcctcttctggttcaaccgcatacatgtccacgtgctagatggccctttatttgcataaacaaacaaaaaactctcctaagctaaccacatgcgtagaagcacatgtagtataagcatacacactgggtcgtgtttattttcctaacatactcagtttggtatgagcccgtaagcaagagaattcccttatccgatcagtgctacgacgatcaactatgcactacggttagtcatgattaattccgattagacgtgattaatcaggctgatcagtgccatggcatctaggatagatgcgcgagggaggctgatcggtggtcggcgtcgcggatcctggcgacggctgacaaccttcttggctcgagcggagggaggacgctcctgcgcccgacgtcaggtggccggaaccacgcgagggtcagagggggaggaggtggtggctggcaggcggacctggcagagggctagcgacggctgtgtggtgggaggaaaaggaaaactggctctgttaccaagttggaatgagaggaaaccctaaccctaatccagggttgggtgagtgttatatagatcgttagatgggccaagcccattacacaggggtagtcaggtaaatacaagagggcacaagccaaaccctaaacaggagtctaacatagacggtttgataacattgcacttggatgcttacaaaaacacacgtcactgacaaaaaggatatcataaccaaggggatcagtctaccaaccaaaacttaaggttctggggcaaacaagcacctgccatgcaacataaactacaatcacaatccactattttcaggagttcctgaatgcttgccaaaactccctcaaaacacacagacattcctatgtttccgcttcttcttaatataatggtatgcagctctcctgcatgtttgtagaaaaagcattcctatgtttccatacttcccaggccattaaaatgatgaaagaattcagccccttctgtatctgcttgggaacatctctgaaagtgcttccccatcatttgaagaagtgagctgcatcaactgaaggcaccctaggacaaggaatacttgttcttcattatattatacatattccacacttagcaactattttttttcgccaagtaatcattttaccactcattctgaacaaatcctcctgtaattttatctcagggtgaatttaactcaggaaagtcaacttttataaatgctttacttggaaggcagtatcttcaggagggagttgtgcctacgacaaatgagatcacactactatcatattctgaggttgaatctgaaaactttgaacgatgtgagaggcatccagatggtcaattcatgtgctatttatctgttccaattttaaaggaagtaagtattgaattgcttttgactgtcatgttgaaattccttctttgcctcttagatgtattcatccagtttattattcggtatgttaagttaaacaagctagctttttcccttagtgcattaaattaaataaggtagctaggtggatgcaatttcccgtttcacccagctgtagtttttttctaaacaaactaatttaaggagcagacttctttctccctccatgcgctgtatttgattttttttctcgaaaacacaggagagtcgcgtttcattatattaagaagaagagtaagggtatggaatagaccaaaaaacaaggactccttatggatgccaaa

SEQ ID NO: 461 - DNA, 488 bp, Zea Mays
gtttggtatattatgtttttccataaatgactttgttacgaaggagtgagatgctccagaatcaaataaaactgatgcaggtatggagttaataaggaacataccatacaccacgtcggcatcttcaggaactgattctgctgtcacgtgattaactcttcccttactctggttctgcagagtcttgttccgtgcagatccacgagcaggtgtattctaatcagttctctggttgctgttcttctggggtgtccgttgattgcgccttgggcagttgttagcatagtggccaagttcgccacacttgaaatagccattaggttggactggggtgtttgtgttgttgtttttggccgatgtgttcacgacgcttccttgatgattctgttgttgaccactagacctttgaccggtctgagtgttgttcctctgttgggtctgatattggttgcttctctgaccttgttgtccaaagcgttgcatttgat

SEQ ID NO: 462 - DNA, 880 bp, Zea Mays
attatttaagaacctgaggactcttgcgcaaaaaaggacgtggatgaaggggtatggttcaattctgaacattggatgcatacccaagatcccaaattagatctttaaatagcaccaataggtatgcatttgtagcggttggattaaagatcaacgatagagcgccccagagcgaccgggccgtctaccaatcaaccgacgacgaggatgcatcccacgaaaatggggggatatgttttaatcctaatcgtccaacgccgatccgactgccacgaccacatctcacaacaatgccccgattccccaccgaatcggtatccactgatctaatattaatcgtcgatgcacgatccaatggtccgaggcgtgcttctaccctttgacctccagagcggcggcgcgaacccgacctacggtggtgctccgccggtggatggccatcacccgtactagcgcaaaatccccatgaaaaatcagtgttacacgcagaggacaccaaggcaaaaacaattggagttgtcttaccgtcgatcgacacatagggacggtagtccatgacggagcatagatttgggcggagttccgcaatgacgagaaattctagggcccctgaggctggctgctccggcaaccacccggattcgggaccaacgcgagcacgctgctcgcaccatacaattttcgagggctagggcgacctagtggcaaagttgggtggtggtggtggaagcttttctccctccttcgtcctttctgtttcgctgcgattgccctcggtgtcgtattctatgaggggaataggggatctcaggcttggcttttatgcaccacgggtggagtccgcgtggggggtaatcgattggtggatctccccgaaacg

SEQ ID NO: 463 - DNA, 512 bp, Zea Mays
ccctcccgtgtgttgcggttgaggagctggcggcgcctggtgttctggccttgtgtgatgctgtggttcccgattattctcctgatggtgccactgctattttggctgctggattgagggaggattcgattttggctgtgtgttgatagtgtttcttctgctagatggaatttgaagccacctgttttcaaggtctactccaggaggttgagaccatctattttggatgatcaggatggcacgttggttcagtcgagtcttgataattctatggtgatttcttcgcccttgtgcgagttccagtgtttggtcactaaaccggtggatgccttgctgccaactccacggtttcccacgagaaggaataagcctctacccagtaattttataccaaggtggagcaggagggtggccaaatttcctccagaactcggttctgaggctgctgcccaggtctgcaggcatctgggtttctgtgatgacaatgaagttatttctgtccaggatgccgg

SEQ ID NO: 464 - DNA, 275 bp, Zea Mays
acaggcaaaaaattgaagaaaactggacgggtctattatacccaggtggctactacaccagaaggtgaactagtgatgatggatacgttccttgttgccaaccacccagcagttatccttatcgattatggtgcatcacataccttcataagcaagacttttgtggagaaatattgcatacattgcactgaatcaagggagggatttgttatccattcacctgggggccgaatatttactaaggaagtagccttccacatacccgtaactttggc

SEQ ID NO: 465 - DNA, 561 bp, Zea Mays
aatcgttaagctagcaccgatccacaccgcacagtcatcatctaacggcctaggcgcactcgatcgaagatctaatctcatcacttggttccccgatccatggctaagacacggcggcgcgcactgacccgcggcagacacaatgccggagtactacgaatcgacgacatactatcccaaccatagtgaaactatgccgagagaaagagaagagagaggcgaattcgccaacaaagtcataccagcctatcgtcacgagaacgggtcggacgacgtgatggtgcagctccctggtccggcccgagtccggcgagcaattgccttcgccccgcggtccgcaccacccaatggctggcgcagacagtttccacagacgagtacgatcctccctgacccaactctaagagtggagaccccccaatgacgactatcaccggcgacggcgtgaatcgcccgcaatccgccccacttctcacagttgcggtgtcctcgagtgaaatgcgcatggtgggttatggcggtccaacccggtagctaggattcttaagtagggcgcgcgag

SEQ ID NO: 466 - DNA, 974 bp, Zea Mays
gtcgattctaggacggcgtccagcacgctagccatccttctcctcttgggagttactgtaggagcctttgataccttcggcaattctggctccgctagcaggctcaagatttttggcagccctaccgtttcccctagctctggctctttggccgcctttcctttggcttctgcaccatgttttggtgtttcgactgacccggctgcaggagccttcggcaattcagccaattcttccctggggacggcaggagcaggatgttctgcctcagcagtggaagatgtcccttcaccaagcttcggcactgtggctgtttcaatgtatctaggccggtgtgttaaaaccttgatcttttttcccttcggcacagcagaaatggccgaagtagcaacttttcttttctttccctgctttcgtgagggatagctataatcagggtacacaaaaccaatgacgtcaaaaactctattcaaccttttcttgcctcgaccttcgaaggccaaggtcattgcatcatcttcggtcgttgtataggccccaagaaattcatcactggttgcctcaataccgctcaaccactcatcatttggctcatcaaactcacctctatatctgaaggtatattttagatagaccgggccaccgtgactagacccggcagtagcttccttcggcatctcccactcactcacgagcggccacactctgtaggcgatgtgctcttgaaccaagtctcttgtgccaataaaagtacacacagtgttgaagcttctctggcattcttctatataattcccaagagtagtggctggcctcctgatgctgaagcgagaccaaatggagcgttgaataatcccttttatatcttccctctcaactaagttattcttcacataaaaccattcttccatccaggctcctggccaccttttccgaaatgttggaactagataacttacatcagagcgaggcac

SEQ ID NO: 467 - DNA, 849 bp, Zea Mays
gctaaactttggctgcaggtggactgcagacctggactatcagtgaaggtagctaatggggacaaaataccaagtgcaggcatttgccacaacatccaactctccattgatcatgcagcctttgttcttactggttatgtcttacccctcgctggatttgacttcattttgggcgttcagtggctccagtccttgggaccaatttcgtggaacttccgtattctgcatcgtcagtggccaaggcattctttgatcatatagtcagattgcacgggtttccatgctcaattgttagtgacagagacacagttttcaccagtgcgttttggaaggagttgtttaagctcgctggggtccaattatgcatgagcttggccttccaccctcgatcggatggccaatcagaggtggtaaacagggtgatcctaatgtatttgcggtgtttggcgggtgacagacctcgcacatggttgcaatggttgtcgtgggcagagtattgttacaatacttcatatcatacgtccctcaaatgctcaccgttccaggtggtgtatggcagggaacctccatccttgcagtcttatgaacctgggagtgcacggttagcagcagttgacaaacagatgaaagacagggatgacttcttggctgaaatcaaagacagattgatacaggcacagattactatgaaacatcagcaagataagggcagaaggaaggttgagtttcaggtggggcagtgggtctgggtccggttacagcagcgtacagcggtgggagtgatttctccatctcattcaaagttgggaccaagattctatggcccctacaagattgtgaagacagtag

SEQ ID NO: 468 - DNA, 273 bp, Zea Mays
gagatattgggaaggtgtcaagtgtgttcctgagatgattaggttttggacaccacacttgtttctaaggatgggctctcacaggctcctcaatcaatccatttttcatagcaggggtggcaattttaggtggagtgagcttgacaagttagggggtgactgaaggtttctctaaaggtttccggccactgcactcacaaccttaccaaagaaatagacacccacatcattaacagcaaagcctaaccccggtccactagttaccctctcgaa

SEQ ID NO: 469 - DNA, 730 bp, Zea Mays
caaccaacaccagccgagactgcacagatggcttgattgttgggaccgtcttgaccttcttcaacgccaacacgccttccgagcagccagtgaccgtagcagcaacttggactgagtgaaacagagagcccacactacgctgcgcgacgaaccagattgaagaaaaccagtgatgccttgtgtcgaacaactgagataccccaagtctactgccaccacacgccgcctgaaatccaatcaccgccaccacacgccaccagacaccctagccgacacagctcgtcggcccaataatcgaagacgatgagggtttgacgcagaaccgtgatggtcgtcagaagaccgcgcgcggtcgcagccactgaagacagagcgagccgtcggtgaaggcttgatgacgccgtcgtagcactgaaatcgcaaccgctcctccacaccgaaggctgctgccgctcctccaacaagggatgtacgtgacctctgcaacacacgactccaacctccacgcccttgtcgagattcgccaagaccaaacacgacccacgccgaggaagagaagagcctttgataccaattgtgacgtcccttggccggcagcgatcaccgacgtgagatcgacccaggaaaatcgccttggacgacaccacagtacgagcgttgctctgtttctattctgtttttgcatacccgacatacggtgcttacagaccttatacacggttggccagcc

SEQ ID NO: 470 - DNA, 546 bp, Zea Mays
cacctccactgtagaataacctccatatcaagttcacggtccagcctcttaatctcctcatggtcatcaacaaccagtcgactcatgtcagattttaagagggatgcatataaagatacatatgtcttccgaagtcttgcatttctcaataattgctcccaagatagcctcccgctgatacatcaccatgaaagaatcaacaaagattgtattgacataaaggcacattaagtcaggacatatttgatgatactaaaattcaaggaaaaactgtcaaaatatcagtgatactacttgaacacacattaaagagaaaagtacaagaataaagcctcaaatcagtcgcctacaaatgtttgagtaccatcttactgctcaactgatttcctttttcttaattaaacactactaacaaatggtacagcactataaagaaaattaatggcagtgcatgttttttattcttcacttcccgaattctgaggttttgagatcatgtgtaacattgtatatagggtagaagctttcagttgagtttttccttgc

SEQ ID NO: 471 - DNA, 380 bp, Zea Mays
aaaaaggatttgggcactcggctcggaaacgatcgctcaaaacgggaaatttggtgaaatttaagcctggaatctcggattggcgtgaaatttggcaagagtgtcactggaagtgttgtgaaggtgcctgaaacatttgggttcaattggagcatttttggctggtttgggcattttaccgaacacgtggtgggcgagatattagggtttcggagaaatggccatatgaggagtgaaaaccctcccgaaggagccaagaatctgcagggatacacaatagggacaattgaacacattccaccaactggattcacaagatttcacaagaatttgaaatgatgcacaaggggtggaaaaggagaagcttaactgcctcagac

SEQ ID NO: 472 - DNA, 404 bp, Zea Mays
aacttgaacacatgtactacatacttcaattatttatgtgtgtaggatcccaagagaagcacttcatgctgaaccaacaactttccttctaagcatagaagggatgccaggtttggactggaaaaggctacgtaagctccagtgtccagatggctcctacatgtcttcgcctgctcccacagcttatgctctaatgcagactggggatgccaagtgttttgagttccttgataaactgatcgacaagtttaacggaggaggtatggatcgaagagcacataaaatgctgacaagaaactatacttcccgtgttctttttacacatgacatttttaagcttgcatgaagtagttgtatgaatgaaaaaaaatgaagaatctaataagaaagataactacataccc

SEQ ID NO: 473 - DNA, 855 bp, Zea Mays
cccaggctcagagaaccgtgtggccgacgccttgtcccgttgtgctccagctgaagtccatgctgtctcagtagtggtaccacaatggttgttgaacatccaaaacagctacagccacgacccaacagctcaatctatgttggctaagcttgccatcgatccatccgttgtttccaattttactctaaccgaaggcatcctcagatacaaaggtcgtatttgggtgggagacgacacaaccattcagtcccgcattgtgtcagcattgcattcttcagcggtagggggtcactccggggttccagtaacttacagccgtgtcaagggattattcgcatggaccaatatgaagtccttcgtcaagaactttgtgcaacaatgtcaaatctgcttgcaggctaagcccgacagagctgcttaccccggcaagttgcagcccctaccagtaccgtcttctgcgtggcacaccgtgtcaatggactttgttgaaggccttcctcggtctggatcctccgactgtattttagtggtcgtggacaagtttacaaagtttggtcacttcattccactttcacacccttacactgccagttcagttgccaagctgtttatgaatcatgtctacagactccatgggcttccagtggcaatcatttcagatcgggacccggtgtttacaagcacattttggcaacacctattcaagtctgttggtgctgagctgaaattgagttcttcgtatcacccacaaaccgacgggcaaactgaacgggtaaaccaatgcttagagacatttcttcgttgttttgtcaacgcttgcccaaagaaatggattgattggctaccagcggctga

SEQ ID NO: 474 - DNA, 674 bp, Zea Mays
cagaaataaaaaccattgcaaaaacatccggataaaatttatctaagcaatcaaaagccaagtaaccattaccttcgtaagtacgggaaaatgaatctttgggtcaatagctggtgcagtctgggtgataacttctttagtagaagtcataagcgcaggcaataccgctgccctatcctcacaataagaccttggctgcttcgccaaaacttttagtctcttttgcttcgacgtagcagaaggtgatttctaagctctctttctcttcttccccttaccttgagctgaggagtaatcaagatatatagagcgaatagaatcgaaaacttgattcaaccttcttttccctcgagcaccaaaagcaacactcaaagcttcatcttccttcttcatgtaaattcccaagatttcattacacgttgattcaatggcctctagccattcgtcatttggttcaccaaactgacttatgtatcgctatgtatactttaaattcaccaaaccacccttcccctcccttgttcagatgcgctgcactcgtcaacctttgagatttcccactcattcacagggggcataccctgaaggctatgtgttcctagactagatctctagtaccaatgtaactgtacacgacattaaaagccaccaagcaagcttgagcttcttcgtca

SEQ ID NO: 475 - DNA, 781 bp, Zea Mays
ttaagggcatgtgtgctagcttttgatagaagttgggaatccagtctaccctacgcagagttctcctacaacaatagctatcagtccagcatcaagatgtcaccattcgaagcactgtatggacggaaatgccagacccctctcatgtggtccaacgtgggggaaaaagcactagaaggacctgcctttgtcaaagaggcggaagaaaaagttgcactgatccgcagaaggttgcttgaagctcaaagtcggcagaagagttacgcagacaacaggcggagggaactccgatttgaggaaggagatttcgtctacctcaaggtttctccaatgcgtggtgtcagaaggttccaagtcaaagggaagctagccccacgttttgtaggtccctaacccatcattagcaaggtaggacccaccgcataccgcctggaactaccagaatttatgtccgacatccacaatgtgttccacgtgtcccagctccgcaaatgcctgcaagcaccagaaagtcacctcgaagaagagacagtgcagattcagaaagaccttcaatatcgtgagaaaccagtgaagattcttgattcagcagtcagaaagacccgcacctcagaagtaaagctctgtaaagtttagtggagcagagaaggagaagaggaagccacctgggagagtaaggacttcttgaggaaggaatacccttatcttttcccaaatccagtctaaatctctagggcgagattcctttaagtggggtaggtttgtaacatcccaaaatttc

SEQ ID NO: 476 - DNA, 491 bp, Zea Mays
gggcggggggttttgaggatacctggcaaaacagcatcaccaggagtggaaacggtaatatcctctttgacctcagattttccggatccagacttcaagcgccagctgaggttccgattctttccccacgactgagaaccctgcggcgcctccttcggaccccatcgatcccagttagggtttcgatttttcgaatccatcagagccgacacaccagaacggcccggaagaggccactcctcaccaagagaaggcgggcgaaacggagaggagatccaccctccgcagaaactttcacgcgacgaactcggaagcgaccaaaggcgagagagacgcaaagcaagatggggaaaggaatgcgacccaaggaaatcaataggaaaccctaccagcgtacctgaaggactccgtccaacccgagccacgccgcgctcctgtagcagtgggccgcactcctgcgcgaccactcgcaagggacgtggagaagacgg

SEQ ID NO: 477 - DNA, 662 bp, Zea Mays
cacgaaggtcctggcttcgggttgcattgattcaccgtcgaggccatcagcggcggcgatagactgcaacaagaagcggcggcggcgacggtcaccttctccggcaaatctcgccgaaggcaacactgacgattgctccgagcagcgtcgctgcttgaagcttccacgagatcgacaaccaccgtctcctattgatcccaccgctcttcttcaagctacaggttttggattattgtttttcggtgaccggtcggtagatttgaaacaggatatgtttggtagcctttgatatgttgctcataaatttgcctaggcaatgccccccgcccaagccaccatcgcgtccatccatgaagcccaacgacgccgagcaggacatgcaggtgctggtggtgcggtcccaaccccactccgaccagagcagtaggaaccactcgcgccactagcaggcgccatcctctcccctcatgcgcaacaacccactgcccctccctcatcgcggtgatgccatagcccatcctcgtgggacgtcgcccagtacctcaacttcctccgcgcgcgctgccgccgacaggcactgacccactaccacgacctcagggaggccactctgggagaccaccacctgtgccacttcgagctcgcctagccaccagactccc

SEQ ID NO: 478 - DNA, 476 bp, Zea Mays
cgtcagccgtccccgacgtggacgaaccaacttcaaaagatctcattgacggagaccgggtcttcgccctacaggccctaaacaaataccaagcccagaccaaagcctggcgcgaccacgcagtcatcgtgagagagttcagcgagggggacctcgtactcgtccgaacagctcggacggagtccaagggcaagctggagcccaagtgggagggccccttcatagtcaagtcaaaagcttcccccagcgcttacaggctcacaacgccaaatggcgaggacctggagcactcctggaacatcgacaaccttcgcaaattttttatttgacccatttagggctgaccttgcccttgtaattcgccgcaaacaatcttgtaccggcccatactcttttcctcccggggggtgaggtttttaacgaggcggagccatgtaatatatgtgacaaaaatcccccgcaaaaacatgtgtcga

SEQ ID NO: 479 - DNA, 1076 bp, Zea Mays
ctgaagtgataaacacttcctaacttacattaccatctaatctgttacttattttcgatataatggtatatttctatatcacacacttaatttttattgtggccggatacttcttttgtggagccattcggtcagaacaatatcctagacccagctaggattaggtgccaacacatgccccctatttttggtagaatttttatgtcggaactaaatctttgccttgtggaagattaacacctctgttagcggtcaagtcatgtcaactgactcttcatcacacaactctacctcaggtttcggtccgacacttccacttcaagttgtttgcctccttatactagtattagtatgcacaagaactctccaaatagcatgaacctgtcgtaagcaatgacacccgttctcccacctagaacaacgactcttcctacttctcttggccatctgatgctcccatcacccctataagtctcctcttccttctccaccctcgctttatttagtcgaggaggattgggacttccactaagacattgaccccttctcgatcgattatgcctcaacgatcgtcgatgagtccgatgcatattcgttgtttgttgcgtgagttgcttgcctcctacatgcccctttgtactctcctcctcggaagatgattgggactgtgatgaggcatacatcgactccactgaggaggaagtctcctctgaggagatcggaggagttggtagagatgtggctgcgtaacagcagctccaccaacgaggagcctgaggaggacctcgactgagatttcagcgacgatactagtgtggagagcttccttgacgtcgctgccgccaatgacggtggtgacaaggaggaactagagcgtaagcgtaggaggttgatcagatacctctgccttttatagataagatttcttatatagggtccccttgtagtcctgctccttctcgatgaaataaataaaacttttggtcaatctgttctatttgtgcttccctgtgcttgatatattttggccaatctacctgtgatgttcatgttccctgttcttgatgcatttgaat

SEQ ID NO: 480 - DNA, 980 bp, Zea Mays
tattgctagattaaacatcattggatcattggcgggcggttgggcctgataggaaactgcttttcctttgcggtcggtgagaaggatggtcttacttgcgcaacttatgatagccttgtgcttagttagccaatccattcctaggatcacatcaatcccttaggatggcaagacggttaagtttgccaggaacactaccccacttaaaaggatgctgacttgggagcacttgagccggcatagaaggtctgaccccggggttcgggtgaccaaaggaatttctaggggtgtagaggggatgccatgcttttccacaaacttagtggctataaatgagtgggatgctcctgaatcaaaaagcacagtagcgggagtaaattcaacaaggaactcaccgagcactactcctggagcttgttgggcctcttgagcgtcgacgtggttgactcatgctctgccctggtactgggtcctgctcagctgactgttggagggaggtgccttggaggtaggtgtcgagggaatcttggggccattcaccgagttggagtaggtaggtccgggtgccttcaactgggggcagttattcttgaagtgactggggtctccgtagtgccaacaagcatttgttggcggttggttgtttgcaacagagggggcctgaagggagctctgactctgctgactgtaacgtgacggagtgggtccagctggtctattgaagcttggtcccctgggtggaagcccaaaggatcgagctctctagtgacggtcttgctgctgagctcggagaacctggaattttctcttgaggtgccctttttcttcctcttttgtcgtttccacttggatgactttgttggagaggtgagagaagttgaggaagtcttggctggcgaggatggtcttaagctcgggtcttagccctttcagaaaatgggccatcttcctagactcggtgctgacatcgtcaggcgcgt

SEQ ID NO: 481 - DNA, 696 bp, Zea Mays
ggactgcgagtcattttctgtaaagtacaggggccaatcaataaaaatccctagacacagagggcacccgcgcaggatggcgggttggttcctgtataaacgaggggctgttccgcaaaatgcgcacggcgaaaggatacgaggtgatatcggtcgtctgatctaaggcttgcgactgcgattagattttatcacgctatgaatcagtgtgtgactggcctcgtcagatcggaatccaatggttatgattttatgaagtctgaatcgcttcaaaccgtccgatcagaaccatacggtcccgattgactcgccaaggggaaagcaagattgaatccccaccgtgcattcacgatcccacggctaccaatcctaccgcacttcacctaatctcggccacccatcaagaaatcgacggcccgcgccatctcttctccgcgctcgcctgggtacggcgactccactatgccggcgacgaacaccggcgaaccgcggcctagcgctttaaaaccccaaccctgagcccgatagcctcaacacaatgcggaactaatggtgaacacgtggatgggtaatttacctgcagtggcgcagaagaattctccagccacggaaccgagctgactgcggcggaggagatagcggagcgaagaattccagactcccttcgaccccaatcgcttcttcccagctccgtaa

SEQ ID NO: 482 - DNA, 532 bp, Zea Mays
atctatagcacacagggatgttgaacgagtgcaaggaagacatgaacggacctgtagagagctagccacgatgagctcactcacgacggagttttgactgatttgggggaacttcaaaattggagcgctctggtggacgatctgaggaacgggctggtgcgttgggtgcgtgactacctagcggagctgatggcacgctcaatttatagggctcgagggtggtggctcttgattttggaatggcgcgctggtggccggagagaggggagagtactggcgcaagagatgcgtggctttcaccgcggcaaggtcacctgcgatgaacagacatgccaaggcgagttactgcgacgtggtagagcacctaggcacatggcaaccaatcgacaggtggccaactctgatgagcttatctgaactggccgtgagtcaagcggacacggcggccagggcggaacagtgtctcaagctcatccgcggtgaagatcttttcatcccgaggcgttatccgggcaccagtgggcacgaatcg

SEQ ID NO: 483 - DNA, 497 bp, Zea Mays
ctaaaaaacattatatacattaattttattgaatttcttgaccaggtggactgcggacaccaatcttcaaaagctcagggaccaactcgtgaaaaataggactggattgcaaggttctttgcactcgcgtggaccgtgggttagtttcaaaggaactgagggtctcttttgtataatacgctagccgaaggggtatccagggttcctggtcgtcggatcacgcgcggacgacacataatagattatgctcacggcgaaccggtatgtaaccaagaccgccggatccaggatcaatggctcgggttttatgagtccggatctaagcgtacgcgtccgatcctaaacgaacgctccggattaaatcctaccgaagcggtctgctagttctgatctggttcgcccatagcgagatcaacggctcaaaacaacccatcgaaggggcactctggtgctctaatctaaaccgtgagcctcacatctaatggccacgaagctgt

SEQ ID NO: 484 - DNA, 922 bp, Zea Mays
aggcatagagatcgccctaagatgagtaattgcaaacgtgcttgtgttggatcgagtaggcgtgagtgcgccgtgccaatttaagtcactaccgacttaaaacgactgctctattagtagggtatagtagtcaccctgagttacgcatgagcatgtcataccaccttaagtcgttgccgacttaagtcgattgttccgttagtatggtatagtggtcaccctaagttacgcgtgagcatgtcgcaccgccttaagtcgtcgccgacttaagtcgattgctccgttagtagggtatagtggccaccctgagttatgcgtgagcatgtcgcaccgccttaaatcgtcgccgacttaagtcgattgctccgttagtagggtatagtggtcaccctgagttaagtaagcgtgagcatgtcacaccgccttaagtcattgctgacttaaatcgattgctctgttagtagggtatagtggtcaccctgagttaagtaagcgtgagcatgtcacaccgccttaagtcgttgccgacttaaatcgattgctccattagtagggcatagtggtcaccctgagttaagtaagcatgcaggttgacagtaaacaatttgagcgcctttgagaatgaagtctttttattgatgatatatttcccggtttacagaatacaaggccgtcccaatagcttttgaaatatagctaggggtaaaacttcctgagatgttctatattccatgagttcccaatttctgtgacgtccgtttgagtaagacgatatgatccaggtcgagtgacttctgctactatgaatggccccttccatagtggcgacaatttgtgtcgtccctcccccgttagaattcggcggaggacgagatctcccactgtgaaggaacgatgtcgtatggccctatcatgatagcgc

SEQ ID NO: 485 - DNA, 307 bp, Zea Mays
cggcggtggcttatcggtgacgaggtcatccaaccggcgatgagctgggggtaaagtacggcggccttagccttagctccatccagtaccggatttttatccggtcaagcttatctgttaaacacggcgcacgaatcgcagcaaaggatcgaccaccggcgacgactcatcggcgacgagcgaaccagctggcggtctgatcttcttcagtcgtgacactataccatggtgaacactccatcagagcagctgacagagcaactttaggtcctattttctccagattttctatggtaccaagtccaac

SEQ ID NO: 486 - DNA, 406 bp, Zea Mays
cctcgacctatgtcagaaatgaggtcttcgaccaaagttgctggagacgtcggagcgaagggccgcacagtttaaaagggggctcgttgtagcctcgcgaaggcgctccatcggctcgaacagttctgaatgacgatagtcctggcaaggtcgaaggctcggtttcatcgggcgaacggtgccgcatgtgcgcgaaggccgcactgcctaggccgcattccgccgtcttttgggtccatttgtaagcccctcctcagggaaggatccatagtatgtttaatcaaaatgtacttaacatcgctataatgaccctataatggggaatattctggagctatagcaggctcattgggggcataacagtacttaggggggcacacccacctactcggttacctataaatac

SEQ ID NO: 487 - DNA, 534 bp, Zea Mays
gggtgacagaggggggtggaagtggcaatatttcttggtgttgcagttgtgggtgatgagggaatctttggttgcagttttgctgttattgggggtggtgtgggtgttcgttttcatagtggtgatattgagagtggtaggtgtgagatatggctatttgattgtttgtggggaccgctctagccatgtggtcattggcttcctttgttactaggcagtttgtggttgaatgccctacatctttgccatggaagacacaataaagctttctttactacttggggcctcttccacgacctctacctctcgctacgccgccgttgcagccttgctgtggagggtaatcatggcgtcaaggggtcgggggcttcacctggttgttactagttagctatattatgcacttgaagctgttgttggtcgcactcttggttatggtggtcttgatgcggacccttggtccatgtcctgctagactaccgggtctcctttggcttgcgctacgactccactttcctataatggagttcctcg

SEQ ID NO: 488 - DNA, 608 bp, Zea Mays
gcgcgggggtgtgtgatctgatgagcgttgccaaagacaccttgcttgctctcttcctctttgggcactgctgcggatcgatgcctttacctgcagcggaaccccggccccttataagcagtttttctcccgatcgatcgccggcgtcagcaggtggtggtggcccggcctggctctgggtctggggtcggtcgacacgggcacacagacacagtcatgcctctcttacgattctgggcgatcggatggccacctttatttgtcgctttcccagattccctagctagccctcagcccctcacaagcttgccactttttgttttccgtgggctccagctccagctccaggatcatgcttgccgcccatggccccttcttctctagggtgagtttggttgcgggacagtaaggggatagtcatgttctcaatccctgatcccaaccaaacaaacttatttaagagatcgtcccgtcccatcccatcctatcattgcaaacaaacgcactctaaaagtccagtctagacgactagactcctctcttctagttccaacccctgcattatattgacagatgcataccgacctgggtctcccctctgcccctcg

SEQ ID NO: 489 - DNA, 895 bp, Zea Mays
gtagatgacattgataaatctgaagaacatatgggatgtgaatttgagcatggtaccgctcttgtgtttacacaaatattgagtgttcaaatgaaagaagctgaaattggacagcgacataatctttttcaaacgagagcaaaagtacaagacaaagtagtaaaggtgatcattgatggatgaagctgtcataatcttgtaagtcgtgagatggttgaaaagcttggtctgaagttgcagtgacaccctcatccatatcatgtccaatggttgaatgaatcaggagatatcaagattggttataaggtgaaagtttcattcaagattggagagtatgttgacacagtggagtgtgatgttgcacccatgtctgtgtgtcacttgctgctgggaagaccttggcaatatgaccgttattctcagcattatggaataacaaatcagtacatactagatctgaaagggagaaagtatgtactcaagcctatgacccctcaacaaatcatggttgaacacttacaaaagaaaactgaaattagtgcagcaagtagaggaggggaagagcaaaagaaataaagtgccatccacaattcagtgagtgagtgctacaagccaaattcaaaagataaaaagaaagaagagggagaacatatagttatgctagccacaaaatctgagctgagagatgtgaggaacaacccatatcaagtgctatttgtacttgtgagcaaaaatgttttgatttctcctaacgacataacatctcttcctagtgttctggttgatcttttgcaggactttgaagatgtgtttccacaagaaacaccggctggactacctccaatttgtgggattgagcgtcaaattgatctcattccaggggctgcacttccta

SEQ ID NO: 490 - DNA, 2154 bp, Zea Mays
gaactactatatttcaggatgacgcttcttctgggccctccgtcatccgggaaaaccacacttatgcgagctctaaccgggaagcctgctaagaatctcaaggttgcatgtttattcatgtggcataatatagcttcttatgattatgcacgcaggccatatgcctcatcacttgtttgctgctacaggtgtctgggaaaatcacgtactgtggccatgagttttccgagttctatcctgagaggactagtgcatatgtcagtcagtatgatctacacaacggggagatgactgtaagagagacaatggacttctccagaagatgtctaggcattggtgccagatatgatatgttgtcagaattagctagacgggaacgaaatgctggcattaagcctgaccccgagattgatgctttcatgaaggcaactgcagttgaaggaaaggagaccaatgtcataacagatcttatactcaaggtgtgtccccgtatcttcttaagttcactttcacgagcagattcttttaacctagcctaaaattcactctcatgagagtcgaactcaggacctgaggggtgctaaccaactcagttagaggtctttcgcttctaactactctttttatgaagtgctttcataacaactatttcataactactcttttatgaagaaattgttatgaaagcacgtttccttaatatatacaactttcttataacaggaactaggcttatcactgtgacagttacacataaatttaatcttgatatcacccatggtttgttccatgatgattgagtttataaatgaccacaggttcttgggcttgacatttgtgctgatattattgttggtgatgagatgaaaagaggcatttctggtggccaaaagaaacgtgtgactactggtatgcctgcatcatgccattttatcaatataaataaatgatttgtaatttctccaagaaactctcaaactattcactacatgtataatcatagctattacagccgttaaatagaggatagagggccgtccatgaaatgcagcatagctatcagttattttctgaaattgcagagcttatgtttattgttcttttctgtagtagcagacctaggtaccctttggggtctagttacaaacacagagccccatggactctaattcgtcacatattttaattgatcggaagcttaatcagtatgattagttaactaggaattctaaaataaacctatggattggtttaagtgatgactctggcactgctttcctctgttatttatacattgtttctgtcatatccagcataaagaatcctgatgttaacttccttggacttcaataattggtttggctgtaggtgagatgctaactggacctgcaaaggctttgttcatggatgaaatatctactgggcttgatagcaacagcacatttcagattgtcaagtacatcagacagacggttcatgtgatgaattatacagtgatgatttcccttctccagcctccacctgagacctataatttgtttgacgacatcattttactgtcagaaggttacatagtctaccatgggccacgggaagacatccttgaattctttgagagtgttggtttccggtgccctgaacggaaaggagtggcggatttccttcaagaggtgacttccaggaaagatcaacagcagtactggtgccacaaccacgaagattaccattatgtgtcagtcccagagttcgtgcaacatttcaagacattccatgttggccagaaactccagaaagagttacaagttccttatgacaaatctaaaacacatcctgctgctttgactacccagaagtatgggctgtctagctgggagtctctcaaggcagtcttgtctagagaatggttgctgatgaagcgcaactccttcctctatatattcaagttttttcaattgtttgtcctggcagtcctcaccatgacagtgtttttcagaacaaagatgcccagtgggaagttttctgataacggaaaatttatgggtgctttggctacttctttgatcacaattatgttcattggaattactgagatgaacatgaccattaaaaagctacaagtattctacaaacagcgagactacttgttctttccag

SEQ ID NO: 491 - DNA, 508 bp, Zea Mays
gccggagcttacctcagtatgacctaagaagtgacataagcatgcaagcctctcacgcagtgctcgtttccatcccagccagcactcaccggacgcatgcatctctagtcgtcgctatcctctaggtcccgctcgacatctacgacatcacaacaaactgtagctaaccacgtttcctgcggggaggttgttacgatccttggaccggtgtataaatccggagcctcgaatcatatcgtcatccacccggtccgccgagcgattatggtggaaggcgcatgcgctaatctgcggccccctggccaaactccttatttcgtggcttgaagcatcttggtttggtgggccaacgctgtcagctgcttcctctcctcgccgaatccatccagaagttgggcgcataaaacgacgcaggttcattgcgattagcttgaattgtgtattccgctgcggtataagacaggacggggcccttgctccatcctgtggccgatgagttcacctgccg

SEQ ID NO: 492 - DNA, 435 bp, Zea Mays
agaacaccactggacaccgtcgatgccaggatcctctgagtggcgtcagctattcagctggatagctccttggccgacagagacgccgttgatgagcaacagccgacgatccgccgccacccctcagttatctcctcctcgccggatctccgaagctcggatgaccgtacactgttacatccgccacctatccctctctccgttgttcacacaccaatatccgcagaagcttgccttccatgcatgatcaagacgcgcggatgactattgactactggtgagccagcagttctagaaccttcctttctttccgaggaaactattgctctagttgagcaagatggaagtagtgcattacttttgcgctcgttgagcaagatggaagtatgttggcaacctgacgagacacgaatgctgctgagaggcaagcatctg

SEQ ID NO: 493 - DNA, 654 bp, Zea Mays
ctccagctttgtctgccctcattggtctgcaagaattgtctctagcaaactttgatcagactcttgaagatatggtcctagaagatctgttgtcagagccggcggatggtggaatgatggatatttgtgctgatgtgcctgatgccgggctggaattatctcgagcagcatctcgtgcctcgtcgaccttatagcgcagtcttaagggtcaggaggctggtctggattgttctgctcccatggaagtggatgaaggtccttcagccttagaggtggctgttatagagagctcaaccctcaaggatggcgctagcgcttacccagcccccgagggtgtcgccggggatgatccggctcggatgggtagcgcgagctatgacccagcccccgagggtgtccgagttggttctccctctcacacttccatggatgttcacgtagggtcttctcctccgcattctggttgcatggcagcagctcaagcttcgggtcaggaagtcgccttagagaccggcgcttctgatgatagagttttgatttctgctatttacactgacctggtcaccactgatgcgttgctggttgctccgggtgttgatccttcatcgagccatcaactgatttctcacgacttgggagttccttcgttcttct

SEQ ID NO: 494 - DNA, 758 bp, Zea Mays
cgaaaatgctcaaaccattaccgttactatattttttgccggaatcggaaacgggaacgagaatgttggacggaaaaacgaaaccggtattacgagatatcgggaacggaacattttcaatcgggaacgagtcgattacgatcgggaatcggtaacacgaaaaagaaacatttgcaggcttacagccatgcataatccatatgcaaacaagagcatcacacataaaattatagtattgtaagatgtaagatcggtctcccagtagaaagatcaaaatgtatgtaatgtactatattagttccacagcatgtcacggatcaaccaaattacagaccaagtgcccaacaggccaacatgtcacgctattacttatagactaacacaatttagtcatgtgccgaacaacagagtagtacgcccaagcccaagtgcccaacaacatagagtagtatgctggtagtctagtattagtaccactacaacactagtgcactatcaatgttagtaaactagcagtccacaggcaaaaggccaaaagtatatggcaagtccaaaattatgcactatccagcaaccaaaattcacaagtgccaagtccaaaagtatctatccactatccagcagccagcaccagaacccaactctacatgtcaaagtagctctgatcatctgcatttagcccatctatatctccatcactgtctatgacatcatcgtcctacaatgtatagaagacaacatatattcatatatagcag

SEQ ID NO: 495 - DNA, 426 bp, Zea Mays
cgttgatccaagctagctcaatgttgtcaccttccaatgcaagattgctcttcgccctggatccgtattctgcttcaggaccatctcgtctgtagcagatgagagaggaattctacaccacatagcggatccactggagaagaaaccttccccggaaatctccgagaaggccgaaacaaggcaacagatagcgcaacctcctgcgccccgggcaaagactaccttctgcaagtcaagagtcgggaattcatttacctgaagaaggcgcatatgcgccacactttcttcctgagtgcccgtatcacaaggatatgcgacacaccttgcagaactgcagagacttcaagcattccatcgggaatggccgaccgttccaacctctaccacctctcccaccgcgaggagggcctggcgagcctcggcggc

SEQ ID NO: 496 - DNA, 1148 bp, Zea Mays
cgggaaatccgccgttctcctcgacctgggcatggcatcagctataaaaccggggccctggacgtcgtatgctccctcaacccacaccgttgaacccgagtctgtaggagcgagccctcaccatggatgtcggtcagtgcaagggagagagaaggagattccggccgtcaccatggaacctcgctggcgtctgcaattggagcgtgtgatctggttgggaagattcgttgggtcatgcaggggctaatcgtgctgtcttcaaaagagtagggcgccgctgagacccggaatttctcaccggcgcaaaacctcaccctcaaatccgccgtacgtcgtggctgggtacccctgcatccttattcctggtatgatctcttgcatcttgaccgtgtgcatctcccctgtgattattggggttggatttggcgtgtgggggtcagaatcgcccggaatctctcgagggcatggcggactcgcggctgatccactgcggtccatggcgtgcctctgcgtaggctcactgtaggaattgatttcccaacgggctggtggggcgtgtagcatggtatagctcaggtcaggcggggatttagggcgttggttgccgggatgccgtgcgtcggtgtgcaccgccgtcgccgggatgggcaccagcgcgacctggtgtcgcgagattgaagatgagcggggaccgtccgtgtaatgatgagcgctctggattgaaagaaaaagaagtaagcccctgaccgtagatccattcatcaacgatggtgattcagccagcacaccgacgcgtctgtggatgatcctagccatcggttgccagatcgacgcttacgattagatttccattcataaaatctcgaccgttcgattggaatccggtgaccagtgtgggtaccgattcgtaataacctaggtctaatctgggcccttgggttgggatcggatggctcagaatccatcatacctcttcgccatgccatttcactaaagagaccctactatttttagaaatgaacccgcggtccattctgactattcgctgtgtctagggattcttctgcgttagcccctgatctttctaaaaatagacgcccagttcagaactgattcaaaatgaataaatgaattagtaaatacatttt

SEQ ID NO: 497 - DNA, 509 bp, Zea Mays
atcgactaacccacaagatctagcccatcatcctaggccacgacctatgtcgactaaaacacagaatgagaaaggcatcaaccgcacgtttgtagcatccaacccccgcttagcgctcgtcctagcgttgtgcccgctgcccaatcggcgtccaacagtcagttcatcatcgttggcctaccgcctagccgcccacccaaccgtcttcgccagccgttaggacaccgtcgctagcttgtagctcgcctgccattgccgccaacctatggtctagccgatagcccgtcatggccggctcgcctccactcggacacggccccgcactagagtgcaagctgccacaaccacaagattgacaatttaatggtgttttcgatgtttttttctatatagttttgttcttttacttatattgatgcttacttaatacttttttcttctaattgtagattggattttctatcgatgatttggtgtcgctaaaaggatttttgatatccacattattt

SEQ ID NO: 498 - DNA, 522 bp, Zea Mays
cgaaaatcgtcttcgtctttaggtggtggaggggggagttgatgggacaggtgtattatttatgctggtgcctgcgagagggtagaatttattagtgtgagagctaagggaggtaattatgtgggtattatggatatagtggtttgatgtgttggtagcaaggggttattggtgttggactgttggtagcaagggggtattggtgttggattgttggtaggtgtggactatggcctttgttagttgttctggtgccattcttgccattgttttttggcctcctttgtgatcggacaatccttggtagagtgtccgacatcttcaccgtggaatacacaatacaacttacagtcctgtgtggatcccctactacagtcacggtctctaccaccttcactcctctactaggctatggaggttttgctgtgtgcaagggggattcgttgggttgttgtaggttgcttatgttgtggacctgctgctgctaacgatcctgttagcccttatgctagggtctactac

SEQ ID NO: 499 - DNA, 426 bp, Zea Mays
atttgccaccctttttcaaccaaatgaacctgagagcttccttgcaaactgggcatgggaacttaccatgaacacaccaggcgcagaatagcccatacaccggtaagtcatgcatggagtactggtaccaaacatgcattctgaagtttgtcttcgtagctcggtcatacgtccataccccttcctcccaggcacgtaccaattcatcgatcaaaggctccatgtacacgcccattttattccccgggtgtccgggaattatcaacgacacgaatatattctacctttgaaagcacacaccaggggggagattgattgggataacaaacatgggccaacatgtgtacggggcaacgctcattccatagggattgaaccaatctgtggccagcacaacacgtacattacgagcctcttcggctttct

SEQ ID NO: 500 - DNA, 511 bp, Zea Mays
cttcttcagtagcaggaaccgaggtaccagcgtcctgatcaaaactggatactcgccggaggcgtcttcttttcttcttttgctcatcaacagaaggatcaggtttctgagcgtccaaagtcgtatcagcttctaggaggggcaccactgccaacgccccagcaggagcagcatcggaagaatcctcagcaagcaaatcaagcatagcgtttatatctgcatcactagggttcaggggcacctcaaaatggacctgtcgttcgtcatcaggaatctccccaagcgaagcaaccaaagcactgacttcttcagcagagggtcgcactctaaggcccaaactgccatcagtaacaggtggattcgacacaaaaagggtgaaggctttgggaggaggcaggttccagaccgagtatgctactggagcaccaacatttgacaccttgcccctgaggatcatttcaagtcggctcaccaagtctgcagaaggaattctcctattggtaacccgagt

SEQ ID NO: 501 - DNA, 861 bp, Zea Mays
ccggaagctagctctatttcctcgagatcctcctctcccttgttgcctacctcatttgcttccatgtcttggtggtgcatctccaggtggtggttggcctccgcaagctcttcctgcacatcgtggagctggatctccaggatatcgatggtattatcccgaatctccacttgctgctctagagtcaggatgcgctggttcatctgttccacctatagatattttccaccaattccgaagacaagtcgactacgaagtcctcccgattatcgagggtgatctttgtagcctgagctagcccagtgaggtgtgtcatggtatcgctctgcaaggcctataggcggtacaatgcactcatgcactagacggtgatcctcccaacctggtcgggatgcatggctcactcgtccttcacgtggctcactctgttgcaccacattgggtcttccctcttctccacggggaagagtcctagtgggtgcaccatcatctccaggagataatatccacagaaggtcgtcaaggcctttagcgctgcggccttagtggtgtcgtccgctctgaacctgacagtctcggaatcaagggaacgccacccaggctggagagggtgagactccagggttagccaaaccctgcaacgtggcacccgatactccttgtatagttgcaccgtgtacagagggggtgtggggtatccagcggagcagagcacctcccacaagatagagggaaagccctcgtgggaaaggtaatcaaagctgaagtgagcgtctccaccattggcgggggtgggtgaagacatatgtgaaagagggttagatgtaagtgctaaggaagcggtaaggagataagtgtgct

SEQ ID NO: 502 - DNA, 280 bp, Zea Mays
caccaaacaaaaggcgcaaaagctcctccaaaaattaaaagcggcaacaatacaaatatacgtccacgaggcgaattaggagttttgtggctagcatgcagtgaggtcatatataacacttccatggacgatagacggaccgggtaaattaaacgtacctgttcatcatatcattgtgtgatgccgattgattggcgtcgctctgtttcttcggagttgctacgcagaaatttcacgtggactgtgttgagagttgtaaggaagtacgggtgatgacaag

SEQ ID NO: 503 - DNA, 348 bp, Zea Mays
gagattttagaccaattagcttaattcatagttttgctaagttggtcaccaaaatgcttgctaatagattgggcccctaccttcaagagttggtggcatctaatcagagcgcctttgtgagaggcagatcgattcatgacaacttcatgttggtgcaacattcaattaagtctctccacaagaagagagtctctagtttgttcttgaagttggatatctccaaagcatttgattcggtctcttgggccttcttgattgaagtgctttcacatcttggttttggtcctgtgtggcgaaatatgatctcaaatactatggcctcttcctctacgcaagtgcttttaaatg

SEQ ID NO: 504 - DNA, 391 bp, Zea Mays
gggcagtacactgaacctcgcggcaacgactacttcgggcgcgtaatagctacttcaacggtcgagcaacacgtggcgattcagtggtggaccgaactggtccggtactagtctgaattggaagggcccattcaagattccagaggcttgctcatgttcccggtctgatgcgcgattgcacaaatcagttttttggaggaaatttcaacgactatgaaaggactttaggctataaatagagttcctagccgacctctactggcacccatgcatcacaagagctacacatcactctgattcatttgtgcaataccaacattcgattttagagagatcctagcacccttttgagttgaaatagacatattttgagtctagtgttcttggtgtt

SEQ ID NO: 505 - DNA, 363 bp, Zea Mays
gcggcggcgatgaggttgtcgcgaccccatggacagggagtggcacaacaacgagtgcatgggggaagttggcggagatcgacgcaaggagcacggggcaagcttggcgtcgacgcagtggaatttgagggcggaatcgcggagaagacggcgaacttctccctctacggcggagctccccgcggcgatcgatggaggtgcgccaggctcaagtttatatgcacaggaggagcggatcagccaccacagccaaccgaaagcctttgagatcggcggagtttgttggagtccgccacgtttgggagcttggaggagatctcggctgtggggcccacgtactcgtgcgcggagatcggcagcgat

SEQ ID NO: 506 - DNA, 319 bp, Zea Mays
catgatttagggtgtaaaagatggatggtatgatggtggaagcatattttttgctgtcttccttgtgatattcgttacaggtaacaatttgtgcattacagttagctttctccttttctttactgttgccaagtttcatgcccgcgctagttcatcaataagcttgagttactgtctaaagtatttaatacacccacatctcaatcaccaatacagcctcatatcacaactcattcaggcaatcaggacctaattaaggagtatatattgtacactccttcccaaaaagaatgtgattctagctttggatctggacaag

SEQ ID NO: 507 - DNA, 349 bp, Zea Mays
acagcaggagatgaagtggtacctcaacactggtgcgtcgaaccacatgaccggcaacgcagacatcttctccgactacacccacgacgtcgtgggctccgtgcgtttcggcgatggatctctggtggagatcgccgggcggggatcgatcctgtttgagtagaaggatggaggacacagggaggttcatgatgtctaccacatccctcgtctttggagcagcatcctcagtgtcgggcaactcaatgagaacggcagtaggatcgacatcgacgacggtgttcttcgtttgtgggatcgccgcagccacgaactcctcgccaaggtacaacgttcaccgaatcacctg

SEQ ID NO: 508 - DNA, 567 bp, Zea Mays
gaagaactgctcaaagacggttgtggcatagtcctgatcatctgaaggagcatgatcaggaggaggtggtgtaggagcctaggaggacgaaggctaatctgggcccaaaggaaatggaacagactaaccttgtccccaaacaacatagtcttcatcatcttcagaagttgagaaggggacaccataatgatgttggtgccactattcaatgtcttcgaagggttggtgtagaggaacatcttgggagcgaggtggcaaaggcacacaggagaagctaactgacgatggatgttgttgtttgtctcccgttggcggcgagccaactcatgcacatccgtcgagatgttacgacacatcgagaataggacaacaatgccatgagcaagacgcgagccaagacctctgcatcgtcctcaacctcaaccactacggtccataggacgtaaagctgaagcagcacaagaggaatacagatgactaggaggcacaggaggaggctcatcagaagagtaatattgccttgcagctccagcaagcgccctctttgatcttccagcaggattggca

SEQ ID NO: 509 - DNA, 612 bp, Zea Mays
cctcaactatgttttcaaagatcagccttggtgccccaaacctgagatcagcaggtagtactgcctctgaaccatagaccatgacaaagggagtgtttccatgcaaagctcggctaggttgagttcttaagctccaaaccacatacgacaactctctgatccacttccctgcgaacttttcattcttgttgaagactttcatcctgattgcttccaatatcattccattagccctttctacctgaccgttggctcttgggtgtgctactgatgcatatttgatctagatgcttctttgttcgcataaatcaaagaattccgagctagtgaaattggatcccaggtcagttataatgctattcggtattccgaacctgaatattatatcttgtatgaattccactgccttagctgaagtcagagaagcgatgggtttgtactctatccatttagtgaatttgtcaatggcaaccaacacgtgagtgtatcctccttgagctttcttgaatggtccaatcatgtccagcccccagcacgcaaatggccatgttacgggtatggtttgcagttgctgtgctggtaaatgctgttgttttgataagtattggcaag

SEQ ID NO: 510 - DNA, 607 bp, Zea Mays
gcatctagtattatatacaaaggatttgcttccgtagtcttcttgaaaagaaaaaaatgcatattaaagaattagtagctcttagtcggtaggggtaaatctgtaatgagtttgttaatttttatttcctgtacagaacccacaagttatggaactataacagccttccatgaatccacccacagttttagcaacaaatcaaatcattcgatacccatgtaaatcccaaacatggacatcagacacatcactgctctatggtgcagctcttagggtctggcacaatgtcacatcaatcctttatatcttttgaaagttactccataacccattaaagtcctggcgatgttgcagttgctgagaaaaactgacactttctctgatattcactacattcaccttcagttcatttctttggtgttcagttagaacctttcagattcctttttctttgggaccagaaaggatctttcagaaattgataagctttagtatctctgatccaagatatgtaattttagtacctgtgttatcaaacaattttaactttggccatcagtaaaaactacttttcacgatatatcattggtttatttaaaatgctttg

SEQ ID NO: 511 - DNA, 637 bp, Zea Mays
gtcggcatatttctatttacctcttcatcgttgggaatatagtcggcatcaagctcatctgatgttttttttcttccttggaggtataggaggaaaaggattgccgtcactagaactatcctccccgctcccttcaccggagctgctcgttgtctgccattcaagtttggtcgcgtcttcatcaactctgttagacgcaccggtgaagaacacatccatcctagtaggtacctagtgcacagctggttccatcaataagggggtcgaccaaggatatactgttagtctgatatactggttccatcaataagggaacttggagaaaaggtgattcaaaagaaatcgagcccaaaccctagctgtacccgaccgccgccgccggcagcctccccatctgccaacaacggtgaaggcgatggcggtgcctcaaggccctcctccgtgtccctcctttcctcccctcttgcccccatcttgtccttggcgtcatatcgctttgggcttctaatagcactgtcggtccggtctccgcgggtgtagttccctactggcagactgtgggcgcggtcagcactgccgtcacgagtgcctcacgaatcagtcatagtagatgtgctcatctatggggtgttgtggt

SEQ ID NO: 512 - DNA, 283 bp, Zea Mays
attcctcacccgcaaacagacttcgtagctccccctcacccacactcgccccagccggcgaggacaacaattcccgcttgccagccccgtccacactaaggcgaccaccttccaccccaccacgatgacgcctatcacctcgcggcaactcactcaccctccgtttcgccgccgcccttcgccgcctatgcccaacactcgcacccggaagatcctcatcacccattacacgcggtgaagcctccgccgcagccacatccaatgccgcaaagtaatccaaatc

SEQ ID NO: 513 - DNA, 319 bp, Zea Mays
cttcgtcatgccgctcgcagggtacgacctcgtcctggggactcaatggatggtcacccttggtcgcatggtgtgggacttcgtcgaccgcttcgtctccttcttgcaccaaggccgccaggtctcctggtcggacatcaccgaccgtcagccacccctgctcgccgctaccacgacaccgagcgccctccttgaggagctcttgcactccttcgacggggtgtttgctgagtcggcgggtctacccccgcagcgagctcgggaccacgccatcgtcctcaagccaggctctacacctgtggcggtccggccgtaccgc

SEQ ID NO: 514 - DNA, 398 bp, Zea Mays
gcatgccaatcgagtctagtgaggtcacgagcaccaacctggtgacgagatgaagctcctagacccgatgccgggaccccaaagctggtgtacgaacgtgtcccccgtggcggcctcccctctctatccttctctcctccgatgtttctttgttcaattgggcgctcggttctccggtgctgagttaggatggggaaggtaggggtagcgacgtgtatttatacaccggagtgtagctaacttgcgcgattaccgggagttcgttggggaggagttctcggcgcacgcacgggtttgttacggataattccgtttcctgggcatgcgacgcggagaagacgggtctgacactagggccccacgcgccagcgtaacctgagagcgcgcgcaataccaac

SEQ ID NO: 515 - DNA, 428 bp, Zea Mays
cgaaggggtatggagtattcagatccgtccgatccaaaacggaccgccctgatcagatcattccacgcaatgaaccagtgccaactacaggccgttggatcaagatccgagggcccaaattcatttctacatgagctaatctcggccctcgcccacggatccaacgattgctaacttttcccctttcctaaccatctgtggccgctcaaccaagtatcagcggcccaggggtcttcttcctcccacgacaccctctctcctccatcgaattctcatgccgcccagcccagtaccggtggcggcgccatggacatcccccaagctcgccgagccattatcctgccccaatggtccaccttgtttctctacctccgcccaatgccacggccgccagacacccaccacgacgctccgaggaggaacccggc

SEQ ID NO: 516 - DNA, 1914 bp, Zea Mays
gagtcgcattgtttcaggaagaaaaaggctatcacagggtaccggtggttcctgtacttgagggtcttagtttttgaggaaacattcggtagtggctgtaccgtttcattatagtagaatagaagattgtgcagatacaaaaaaagagatagggggagggcgtattatagttgattggatacaaaggatatggattacagagttgttgccaaggccaaccgaaatgagcagatctcctcttggatttgtgaggccagcatgtgaaagacttgttccttatactgaaaaaccctacgacatcgctctttccaaatattccatatagtgtagatcatcacttgcagttgatgtgcgtcccgcgccgaccggaccaatgcctgccaccaatgcgatattccttgtgggacttgtgacggcagattaagatggaaacaatttgcaattagttgccagcaacggagggcataactgcaagatgccatcaagtgtatatgagattcaggatcattctggcaaagggtgcaggtaagaaccgcgtgtcccccatgcctgacaattctatccgcagtaggtagtcgactctgtaggagaagctagagaaaaatcttgcatttacttggcacctttgccttccaaatcttcatccacttgtgcttgtttatggtaccgaagaattggacttgatacgccgaactagccgtgtcgcaattggtgttcccaaaattccatgtgacagtgtcctgttggtcagttaactgaacagaccttacaacaagccaaaggtgaaggaactgacgagcctggtcattagtagtaagacggtgaagacccaccatccacatgttccttggaagagcattttttactgagtgattcttcctccttgcaagcctgaagcagctaggggctatgtccataggtgttgtaccattaatccacctatccttccagaaatttatcctttccccatttcctagagtgagaactgtacatggccggaagagtgccatttcagcttcggtggcggcatgaggtaaagtggcctatggtttgcatgtgtcagcccatttataccaaagccatcgaagcctgagtgctctgttgaagcgaggcagatgcttaactcccagcccgcctaatttttttggtcgacagacattgtcctagctcaccaggtagtggcccctcatatgatcatcattgttcttgaataggaaattcctcctcaagcggtcaattttcttgattgcccaattagacaaattcacagaggtcatccagtaaactggtattgcagataaaactgagtttactagaactagtttccctgccctgttcagtagtctccccttccacccagcaagcttgtgtgcaatcttgtcgaccacaagctgttcggcggcacgagtgactcgaccaaaatgcagaggcataccaagataagtagctaggaaagaacccaccgaaccctgaaactgttgggccactgagtgtagcacctgcggatctgtctgtatgctgaataaagtggattttgccatattcatgtttaggctcgatgccttgccgaagtgtatcaggatttgttgtacatttctcacatccggagttgtcggttttaagaaaagcccaacatcatcagcatagagactagtgcgaactacgatatggtcaggctacactggtgtaagcaaatgatgatcagtggcagcatctagtaaccgctgcaatgggtccatagccaatatgaacagcataggcgacagggggtcaccttgcctgagaccaaagtggtgcctgattggtttgcccggtatcccattcagaataatcttcgaggttgtagatccccagagcaagcacaatagatccctccatttttgcccaaagcccaaccgttgcattagctccagc

SEQ ID NO: 517 - DNA, 617 bp, Zea Mays
ctcatatgcactttggcacgactgaagggggttagagccatttctagctgtgcgatcagagatggacggtctggattacatcggaactacattgaaccggtgtaaaattgtggtcgttgatctaaagatctgcggcgcagattaggtttaaacaaactccaatctcgcccctccatcatccgatcaatggtcgtgaagcctcctagccgaacgggtacgcacggcccgatccaagccgttggtgaccggatcagcggccagggccttttccccaattcgacgccccggcgaacggcgccactcaccatacaccgtggcgccatcaccggcgcacagccacccgacgagcccgaagaccaaacaccctaccaatcgatgttatccgaagtagagacgggggcaaacttcatgggcaaggtattaccgacaatttcgtagcagaggaccccgaccatggcgtattgtggcccacggtggtgccaagaattctggtgagaaattctgcctccactgcttgccatacacgcacgggaggaacaccccgacgtccatcgcgccctagcatacacgtccaatcgcctaaccgaggcatggcaatcccacagcccactcctggc

SEQ ID NO: 518 - DNA, 656 bp, Zea Mays
ctcttactgaaatcacagctgccttcgatcgatgaccatatagccatccactatgcaatcatcggccttcgagcaggcgttctatacagccactgcataaggaacccaccaaaaaacctacataagttgtatcagctctttgaaaagtatgcccaatcagaagagctccaccagagaaaagtcgagtcttagcaaaaaactaaggagactccacaatctagaagaacatggaccaggcctttgcaacctgactcagcttggcaagaccgtgcccagtcccaactacacaatattgcaaatcagctgcaaacaggagataacccccctcgtcgtcaagattacccccacaacaaggtcacggtggcaacacgaccaggggcaggggccgaggacctcaacaacagaaaagattctattatcttttccgtgacgaagacttagcacacccaaccaaggactgcccagagactaaagcaacaaaggaccaaatggctagggccatgctagctgatgaccaaagagtcattgctcacacctaccaaccccatcaatacaaccaacatcaatttcaaaacgaacaccaaagagtcgtcgctagaaacatagagagggacttcgtttctagccagcacaatgtacactgcctcacatccgag

SEQ ID NO: 519 - DNA, 384 bp, Zea Mays
tttagaactggttatcgacactggttgcataaaacaccaactagaaggcgcatactatttagatattttaaggttaataattgagccatcttagtaacaattagaggataggtaaatgaccatgcgatgcaattgtcgttatggcttagcattttttgtgtccttaattctccaactttcttttgtcgtgtgcagattaccacattcaatattttcttagttgtccttgaatttggacaccgggcacagagctgatcgagagccatgggacatggaccagctagcgaggacgacgacgatggagatgatggatcgtcaagcaaagcaagccacacacagctgatgaggtgctcttgctctgctctggccatgcatgtatttctc

SEQ ID NO: 520 - DNA, 323 bp, Zea Mays
cttgatatgacagctaatcgtccccaattaaagttaaagctacaaagattattttaccatgcccgttccgtgacgggagggagcactgccgtagcgctttcaagccggcccaggaatttaataaagcaaaactttaagtttttgtccatcccaccacctgcaccgcccgataatagtagtaatatggaacgtatgaactagattcggttctcttgttcttggcttaccgttttctcgagatgggaaactgaaggtgaggtaggtgacgaaacttctctgacgtttaggggcctacacgtcaccatcagggcgggcttggtgga

SEQ ID NO: 521 - DNA, 1163 bp, Zea Mays
gtttggagatcaaatatagtattatcggggataagatccccggtccctagggctgccagtcagcgatggcgctaggaggaggcctctagagacaagggcccatcggtcggatggaggggaaaggaaatgtctgccatgggagcatccgccctaggacgaacctcgtggcaccaagccggggtcgggcgtggcagaactaaatagggtggcagggcgaatcgaagggaaaccactcgagtggacctctcgcttggcccaagctcgacccatcataagtgatcggtcgcattaactacaccagttgtcgatccacgacagaggcaccgatccgcctcccactcatggcctacgagcctcttgggttgcggcacactcataacctacaaacccctcggactactgcatatttatggcccgtgtgtcccctagcttgcagcgcactcatgacctatcaggattaggcctaagtgcgcagaccgcttgctgagcacaacaagacaagccgcaccgagccccaggctacggaggccatggatcggtgtagctcgaatgatgacgctcaagacccatgctgcccgcgtcgttcgctgtaaagaatacgagacaaacaggcgatctcgagcccacgggcttcaccccgtggcagaacactcggttttaccatcactcagtgtctccttctcgaggaagccaccactggctgaccctccttggcctataaaaggaggaggttggtccccagacgagggggtaggcccagatggatacccagcacgaagacgacaaacggacggaggaaagaggacgcaccgatgaggacctagaggtcggagtccgttgccaagccaagacttagttaggactccactctatatcccttagcaccaccacctccacaacaagagacttgggagcctctcctccctctctcgaccgcttgtaacccctaatacgagcatttgatcaacaatgggtgccgatagcataaagtcgtcgaaggctagatgtagggacgttctgcccaaggcagtataaatctttgcgcccaccacgcacaccatctagaacccggaacacgcacacaacaccgacaccgtgtgaattggtttgagggttgaatgtcggatggttcaaggcacatgaaaattacccatatttattat

SEQ ID NO: 522 - DNA, 751 bp, Zea Mays
ggctgcagtcgatagggccaagaatagctgctcttcagctggtgaaattgcatcctccactggcattgagtcatcagcaggaaacaactcccacacctcttggatggcgtgaagctgaaccgtggcagcacaggtatgcccacggtgccatttctctacacaacgatcacataggccacgagcacggcgatatgcacgcaaggcacccatgcagtcggtaggagttcaggccactggtactggcttcgcttcgatagggacagtagggagtgcccctttggctggagacggggaatgcagcaacagatgtggatttgtcgatgccgcagaactccagggaacgaattccgccttacgatattccttacgatgcatcggctccatgacctcttcctgtaacaatgcaagggagcaggcagaatcgagatcgagtggacgctgaataagaatgactgctctaatatcagcacgcaagccatccacaaatcgagtagtaaaatacagaggatcagtgatagttccataagcagcaagacggtcaaccagggtcgaaaagcggtctacatattctgatacagaactagtttgccgaatacgaaacagttgacgcaacagggattgatattgatccttgccatagcgctcaactagcaactgacagagaagaggccagtgcagagtaggaaacttgcgctctactgactgaaaccagcaggcgatagtgggagacaagtgcatcgacgcaattcac

SEQ ID NO: 523 - DNA, 361 bp, Zea Mays
ggcgaaccactggggagcaaagtgaaaagtagaaaggggaagaacctcaccgtgcttggaggagacgagagccagatccaggtgcggcggcgagcaagtgagagccagatccaggtccggcggcgagcaagtgaggtgagaggagaagtggggcgtgcggcggccaaaacgagcgccccaggtgcgacgtaaaaatatacggcgagtgctgtgaaccacgccacactttttgtggctgcctaatattaggcatgaaccaaacacttaccgacgaaaatggggcatgcctaaccttaggttgtgccatctgggacaatgaaccaaacacaccctaaattacttgatcggcatactcaaagat

SEQ ID NO: 524 - DNA, 734 bp, Zea Mays
ctgacgcgtacttgatctggatgctcctttgctcgccaaaatcaaagaattcaaggatggtgaagttggatcccaggtcagtgatgatgctattcgttatcccgaacctgaatattatatcctgaataaactccactgcttttgctgaggtcaaagaggcgatcggcttatactctatccattttgtgaatttgtcaatggcaaccagtatatgagtatagcctccctgagctttcttgaaaggtccgatcatgtcctgcccccagcatgcaaacgaccacgttacaagaatggtctgcagctgctgcgcgggcaagtgctgttgcttcgacaggaattggcacgcttcacacttctggactaacttggcagcatcactcctcacagttggccaatagaagccggatctgaaagccttcccgaccagagtccttgatgcaatatgtaccccacacgggccggcatggatttcatctaacaattgtttcctagtggccgagtgaatgcatttcatgaagactcctcctgcacctctcctgtacagtaagccccttataatggtgtagtggctgactgccttgcgatgcattctgctgcagccttgtcatctggctcttcttgattttttatgtacctgatgataggctctcttcagtcattgggatttgcctctggctgactcaaggcattgcactcctccgcctgatccgtgaggatgctcggctgtgatattt

SEQ ID NO: 525 - DNA, 333 bp, Zea Mays
gcccgttgatgcgaagatgtacgactacgattagatatgggcgtgtgaggttttcaatcgttggatcggttgcagaggtttaaatctggcaaagtgtagaccctcgatcgttgatcgtacagtggatggcgtagatttgatcgagccccttttaagatcagaaccgtcgctttcggatctgatggccaccatttcttaccgattcgtttataggcgcgatttaatcctggccatccgcgcttgatcagacgaccgatgtcgcgtgcagtgtcatgtgagtcgtaggtctaatcggatccgctggtttctaatccgacggtgaggaaacatcag

SEQ ID NO: 526 - DNA, 717 bp, Zea Mays
ctcgggggctgggttgcagctcgcactacacatcagagccggatcactaccgacaacaccctcgggggctgggttacagttcgcgctacccaccagagccgggtcattaccgacgacaccctagggggatgggtaaccgccagcatcatccttgggggctggattttctgcaacagccacctctgaggatgaaggatcctcagccacctccatgggagtcgggcaatcctgaccaacttctcgacactgaagactaccttccaaagtcgacgatgcgcgagatatcgcccgggatacctctaatcccacgtctggagcatcagagcaaacatcatcatatcaccaacagtcggttccaacagcatatctttaggaatgacatcctcaagggcctgatcaaaatctgttatggataaatcttgaaggctaacaagagcagacagagctggagaaggaatatcactatcccccctactacctctgtaacgccggctattcttacgaattagcggaactttttcttcgtcttcttcatcctcgtcaaaaatgcggacaatagatggtgcaggatcacacccattgggatcagcttcaataggatcacacccattgggatcagatggcgcatggatacactcgttgaggtcagttggtgcaaggttacacccattgggttcagtctcaacaggatcgatcagctggcgcacggtcacaccc

SEQ ID NO: 527 - DNA, 485 bp, Zea Mays
gcggaaggggccagggagaatcgcgtcacctaatgaggtggtagggagaaccaacccatcaccaatgatgatggaggaaggaagagaagggtggggaggaagggtggaggataaagtactagcgtacggggtggtgtggtacgaggcaccaaagtcagccacccaatcagtgaccaaagtgggtggcactattgtcatcgtgctaaatgagccagcaagggacaatgtgtcccactcgccacccaaagggccccatgaggacatagaagtggaaggcaggagacccagctagtggtgaggtggagccgggtgcaccagtggtgtcgacgggggcagagcagcgtagaaggccagctatggggcggtagggcacgacgaaggaggacccgtaaatgggccgagccacatggagatcgagctggtccacagagtgtagaaggatggccacgagccgcctcctcgggtcactggtggaccaccatgac

SEQ ID NO: 528 - DNA, 348 bp, Zea Mays
gttgaggagggtgctttggcctgttccctggttagtaagttctgcccagacgattcggcttctgatgagatggcggcgacggctgcatgtgttgctcctattgccttgtttggaggcggcacgtccgttcccatgcagcacccggttgggctggacatgttttcgggtatgggccagggtgaggctacggatgggtgttcccccggcctgctgacaggactgtgtcctcctgccggactccctgtcggcttggcaacggatgaatcccttttaccggcctcgctgtgctctcctcgtcccggctccgcggtgttgccttcctccttgcctcctacccctgcggctgtt

SEQ ID NO: 529 - DNA, 382 bp, Zea Mays
cccgcagccgcctcgtcggcgcaacgctctcttcctccccagtccctccatcggaaccaccctaagcttccttagcccattcggttctaccgaaagaatccccatcctctgtcgcgtccgccacctcctctgcggcttaccagccggactcctcaagcctcccgcttagccccctcgccggtgatggccgcggccccgccggtagccggagaagatattaaagacggcgttgaggtgtgcctgttcgatgaatcagcagatgggttctcgagaactgtgcgcgccatctcggagctcgtcgacatagagcccgaaacagacttccctgaggcggaagttgagcggctctcctcctcaataacgttcctcaggtgaaatcctt

SEQ ID NO: 530 - DNA, 339 bp, Zea Mays
cagactgttacaaacttaaggagctcatcgtttcttcattccgcaatttatgctaatctagcgaccttcatcattgtacttctaatctggctggtcttttgaattatagcttttgtcttcaggcgtggctttcatcttaagtcagtctagattcttctaatggcattggtggatggtatgtccttcatcttgcagtagaaagcacctctttctataagctcttttgtgattcaacttcatttgactgacagcagatgatgcttattgggtgtctgtatctcaaacaagtgagaggccgatcgtctccttgtatgccacagtggagcagccgatcgtctt

SEQ ID NO: 531 - DNA, 496 bp, Zea Mays
atagctgtgtcgtgccggtcatctaaaaatggcgaaaggtggtgtgtgatggtaattgggaaatagtcacgtcattagccaactcatgttaggtaggagctgattgtgttaagtcattgttatatatgttgtgtcttgaattgtgataataataggcaagccgacgtgtatgctgtctagcgggcggtgtcgttgttctagctagtcgactcttagatgactttagttaagcttgtagtcacggtaaattgcttgttgtattctaaatgcgtatggttacggtcgcggatgaaaagtattagtgctcatataatgtttaatttaaaacgcaaatggttgggtgattatcggggagaatgcgtcgttgattggttgtagtagttttagtgcactaaatgacttgaataaaaattggtaagttgacttgttggttctcatttgattaatttaactctaacaaatggtaaagcgctagagtaattcaagtctctcgaac

SEQ ID NO: 532 - DNA, 531 bp, Zea Mays
atggtaagaactccccataccgatccgcccatgcacctacatcgtgtagcaccagattgatttgggaatcgcgcaccggaacgcgcagattgggtgggccggccatggtgaccaccgcgggcggaatgctgtgcgccgcctcgttgacagcttggggtggaagaggggtgagggtcgttggatcctcgatgaagggtggaggtgtggcgatgggtatgaccgttggatcagccacggacgctccggatcagtcgagtggataccccttcggatatttgaatcgtgaccgttgattgccgatccagcgcacctcgtagcataccctttcgtgttatatctgagaccatcagatctagatcggatggctctgggtccccgatacctcttcgccgttgccgatttgctaaagagcccctgggttttggtgaaaccaacccgcagtccgttgtggctgtttactgagtctcgagaacctttgcgtttcaaccctgaactctctgcaaattgcgcgcgtagtccagacaaattata

SEQ ID NO: 533 - DNA, 627 bp, Zea Mays
ccgaaaggttttcggctgagggcgtctgctaccacgttggcctttctggggtggtaatggatctcaaggtcataatctttgatcagttccagccatcttctttgacagaggttgaggtctggctgagtgaagatatacttccgactcttgtgatcggtgaagatgtggcatttgttcccaattaggtagtgcctccatattttcagggcatgcattatggctgccaactccaaaccatgggtgggataattctgctcatgcagcttgagtaagcgtgatgcataagcaataactttctcattttgcatcaggacacaccctaagccttgccttgaagcatcacaaaagacgacgaaatcctggtgtatatctggtagtgtcagaacgggcgcggttgtgagcttttcctttatgatctggaaactttcctcacactttggggtccacacaaacttattgtctttattgaggagttcggtcatgggtcttgctatgctggagaatcccttgataaagtggcggtaatatcctaccattcccagaaagcttcgaacctcactaacgttggatggatgcttccattttgatactgcttctaccttggacgggtctacttctattccctct

SEQ ID NO: 534 - DNA, 344 bp, Zea Mays
acctagaacgagctagccacggcgaggtcactacgcgtggtattttggaccgttttgggggaaatcccaaattgaggctctctgatgagtaattggaggcacgagcgggtggattggatgctggaatacctaacggagccgagggtgtgctcaatttataaggcccttgagcggtggcggctaatttgaaggaaacgcgcggcggccggagagaaggaggggcaatagcgcaatcgattggtggcaattaccgtggcaagctcaccggcgatgatcggatgtgctagagcgagtcactatgacgaagtactgcgtataggcacgtgtcatccgagtggcaggcg

SEQ ID NO: 535 - DNA, 724 bp, Zea Mays
gaactttgttatagagagacttacatgttaccacacaaaaaacggagattaatgacctgcaaatggccctgtcagacagactgaatggtgttctgattgtacagtgactaaataagatcacaggttcagcccccctcaccgctggtgacctcgcacccagattcacgttggcgtcgcgattcacgcccggtcgaacatggataacgctccccggtgaaaaaacgggcactgaggatgagcttaaggcactgttccgccccagccaccgtgttcgcttgactcacgaccgattcagataagctcaccggagttaaccccctgccgctcggatgccatgtgcctagacgtagtacttcgtcacggtgactcgctctagcatgtccggtcatcaccggtggtcaggccacggtgaaagccaccaatcgtttgcgccagtgctctcccctctctcgatccggccgccagcgcgccattccaaattcacgagccaccgcccttgggccctataaattgagcgtgccatcagctccgcttggtagtcaagcattcagcgcacccactcgtgtctcggattgtccaccagagagctctaatttgagatttcccccaaatcggtcaagaacactgtactgtgtgtgctcaccgtggctagctctctacaggtccgttcatgtcttccttgctctcgtttcaacatccctgtatgctatagatgcttagcggc

SEQ ID NO: 536 - DNA, 887 bp, Zea Mays
tccgaatccagttgatccacttaggaccgaagcctttgtggatcagaacctggataatcaactcatgctcaaccgtgtcaaaggttttttcgaagtccagcttgagcacaacgatctctttttttgaggagtgacataagtgaatgtattcaaaagcccaggccaagcagtcttgaatagacctccccttgatgaaaccatactgattcttgtgaattaaccggggcatgaacggttgcagacggtttgccaacagcttcgttaagattttcatactattgtttagtagagaaattggcctgaaatcccccaccttctgagggctctctatcttcggtatcaaaacaatgaaggacccgttgatacttctaaggcagacctgaccatgatagaatttatcacacagatcatagaaatccggggcaatgacatgccaacacttcttgataaaatttgtattgaaaccatctgggcccggggatttatctgaaggtaagagttttataatgctatcgatttccagtttagaaaacggagaatctaacccctgaagttgcccattgctggttaaaagttctgagagatcaaaaccaatgtctgagaagtcagacgaacccagtctgcgtttgaaagcttcccatagaagatcagacttatgctcatgctcaaggaacgtgatcccattgtcatcagtcaaagtagggattgaatttttcctgtgcttaatggtggcatgggcgtggaagaagcgagagcaaatgtctccatcagtaacccacctaatagccgcacgctgcttccaatatattttctgaatattaagcaaatctgccaccttttgttgcagaatttccctgaaattccattcctcaatagatagatcccgg

SEQ ID NO: 537 - DNA, 403 bp, Zea Mays
atcgctggcagggcgtaacacgacatgccgcaccgagccctaggctacgagggccagaggtcggcgtagcccaaatgatggcgctcgggctccacactgcttgtgacgtccgccataaagaatatgagacatcaggcgaccccggggcccacgagcacgcgtggcttcacctcgtgtagaatgcttgtttttacctttgcccggtggccccttcctagggaaaccaccgctgggcgacccctcccttggcctataaaaggaagggttggccctcagacaaggggatgcacacacgcacggacggaccccaaacgagaagaaacccagacggaccgacgaacaggaggaggacgcaccgatgaggatccagaggccggagccccgccgccaagccaagacttag

SEQ ID NO: 538 - DNA, 394 bp, Zea Mays
tggcggacttgtttaaagaacaattattgcagcagaaggacgccgaggatcagaggacccttgcagtttacagcagcgagctggagcaaggcccccaacgactaccgaaatgtatcgaacgagcattgtcccttgcttatgatgaccttccttatgagtccaagctacaatctttatgcatgaccatgtttccttctggttacaagttcgacaatgaccgtttcttcttcttcagatggaacgaagacaatgaagtggcgatgcgctttactattccgcatctggcggacaggaatgtcatcacgcgtgttgctggtgctgactgtaggcactgtccggatgaagaagagggctgccactgtcagtggcacgtcaatcattttatgcagcagtt

SEQ ID NO: 539 - DNA, 834 bp, Zea Mays
cttaaattgggataggaaattggagatttcagataacgggcatagggtaaacaccaaggtaagatcgagagatgagaaaggtggaggcaataagaaacaaaagcacaacaaaggacgggattacaaattcgcgagccaaagaagaggatacgaccaagagaaagaaggtatgagatggaagaggggcaattttaaagggcaggtacgaaacaaacatcaatataggatatagaggtgtcaagggtacatatgataataattaaaagaataacaaagggtatagttaaggcaagactcgtgaagtgacaaagtggagaaaacaatcaagggtaagataggtaaggttccaacagaagggttgatgtaaagattccttaccgagggagataaaatgatcgttcatggattgttaagaaacaagggtagtcaagggcatgttgaatgaaatatcttaaacagacattgggttataaaggtaagcatagaaagataagagtatgaaagatttcaaggagatgagcataccaataccaagagacaagaaattgccaaaagatagcgacttaacaacagaggaggaaagggtctcaaaagacaggaaggtcatggacatataaattgaaatgtttaagtagagagtggagaatcagatgtaagtatttgaaacacgagtattgaagaatccagggatatgtgcatgtcaatactaagggaataaagatagtcaaagggtagcaatttaatgacagaagaggaataaatcccaaaaggcaagaaggttatggtcagggggcatctacaaagatgtcccaagcacaagagtgagatcagatc

SEQ ID NO: 540 - DNA, 700 bp, Zea Mays
ctgtcgtgcctccgcactccctaccgccgatcgcgttgtgccctatgcgagtgtcgtgccgcggtcacgccgccacccgacgcggtcacgccgccactcgcatcccaccctgaggtacgagaaccagctaccccttcctgggtgctacgtgctctacactgttgttttatgacctttaagtgctcgattgaatgcccaaagcgcgtcccttgctccccactcctcctgacgccatgggtgtcttccagaaagacgacgcacaatcgacacgggtagagagaagaagcgtcatggtctccgtcggcgagagcgacgttgcagtgcgtgttctcaacgcattcgatggcctgcggtgtgtatgctcttctcccaatgcggccattcctcatcgcgcttcgattgacgcaggtacgaaaagatcttcgatattcgactcctcggtgttgtggttttcgtctagcctacggtttcgtgcactcccactccacacctgctcatcaccgagcaaggacggcgagaacacttttcgaatcgcgcatcctctgtgctacggtttgtttttagacacctgctatgtgcactctgactccattctttctcatcgtcgagcaagaacgaccacaggacacgcgtgttcccatcatcccctcccccagccacaaattcctttaccattgttttacaataaaactatccgctc

SEQ ID NO: 541 - DNA, 379 bp, Zea Mays
cgagaggagaggagtggcgctgcatcggcgcgcgtcccgttcgcatgatgagcaatgatcggcggccatggaatggatggaagctgctgctgcgtcgtctgtttcctccgtgtccgggccgccagattcccttcgcctccctgctcagcggtccctgcatgcaatgcaatgagcagcgcttttgttgttcccgacagcggtgcgtaggtgagtgagtgaatggaaatgaaaggtccatgtccatctcgcctcgccggcgcagtacaggacgagagcagtagtagtagtatatagtgctccgtattcgatcggctacctgctgcttttgtcctcctttttggccgaaaaagttaagttcacgcggcctctgcaagctcta

SEQ ID NO: 542 - DNA, 996 bp, Zea Mays
ccaccgcgcgcacctgctgcgtgggctggcgcttgcacgtgggtccccaccatcggtctcacacctgcgcgcatcggtcacttgctggcaggcccggtgtgtcagccactccttgcggcgggctcatttcctttctcactggcttgcgggcccagcacgtcaggagcgccctgtagatcttcttgccgccgcgcttgcttcaactgaagccgatttgaccgcacacaaatggcggaggggttgtaacagccgttttcacctggggatatctatgtcgtgcgccacctattcctcccctgctcgcccataaacctgttgaccctgcggtatccaccgtctcggtcgaccaggaggatagccggggggagcgccataggttcgcagccaccgagagaaaaaaaaatacgacagggtagtgtagcttcggcgcaaaaggtcatcgtggcattcagcgtcgctcgcgtggtgccacacctccgcaaatcttcgtacggcacgaagtctcgtccacgggttcgcctagccggggaacaggggcaccgtcgttggcgttgtgagatctacggcgcgctgcaagtctctgtgatcggctacacctgtgcctcgaatgcggtaagaaatcatcctcgattcaccactcgtcgttaaatcctcagcacattggtgttatccgcacttcgacccacaactgcgagtagctgttcatcgctcgccagggcttggcttcctggctctggcaatggccgccctttggaagctaggtagaagacgaacccaggcccctcgatttcgcagtgtgcggctacgattagatcgtgccgtaacggttcgtttggacgagggaaaaccatagatcgatgatcgtggggctgtgggtgattcgggtttcatagaatccggttcatcagatcttaatccaagggctgtcctcgcgtatcacttcactgggggcgcgatctaatctagaccgccaggcgtggatccaacggtccaaac

SEQ ID NO: 543 - DNA, 420 bp, Zea Mays
cgcggtgacttcagagtggtcgaatgccgaagaccgtcgatgcggtctttttcgacacgttgcgtctgagtttttgtttttgcgggggcttttgctggtatattacatggctccgcctcgttaaaaacctcaccccctgggaggaaaagagtgcgggccggaataacattgtttggtggattacaagggtgcgtgggccctgagggttagacaaaaaatttgcggagattgtcaatgttctaggagtgctctaagtcttcgccggagggcgttgctagcctgtacgcgctgggggatgcctttgtcttgacgatgaatggaccctcccatttcggctccatcttgccccgtgattctgttcgggtggtccggacgagtacgaggtctcctttgttgaactctcttgggacgaccgtgttg

SEQ ID NO: 544 - DNA, 429 bp, Zea Mays
atctttagctcatctgatggaatggtgctacctgccatacagcccagacttcctctatctataatatagtagccattcatttaccccccgtaaaactgatggtcttggtaaatgcagagcaggtcacacgggaatgtgggatctcagccagaggatcccaatccgcctcccctcgaccaacggtgggtcggaacctagcgctggatccggaagtgattgctcggtctgcagtgaagtaggcccgtcacttttgtgggtcccaactgtcaacgaaacagcacaacattccttggacgcgtgtagccgaaggtttatcatttccatggccgtcccgtcctcgcgtcgcccattcacatcgcataaaccccaccaaaaacgcaccaccaccaccactagcgttccgtccctgtctcgatgacaggtggggac

SEQ ID NO: 545 - DNA, 735 bp, Zea Mays
cgacgacccagaagactctggggatgacaatgatgaggatgacgatgacaacgaggatgaagaggaacaagtcaacgaggaaaccaactacgcccagcaggactacttcatggggtttggtcctgtcaccaaacattacacatcgatgttcgagatgggacacttccccaacctgttgcaagacgtgctgcacgcgttgggaacctacgtccgacccttgtacgagacaaggcgagtgagcgagcctccccgggcttgctactacatcactcgcattcacgtcatggtgatggatgcaggggataggggattcaggactctgtctgctcatgagtccctaacaccgctatccagctacgctgcttcggtcggcgatgctgccagacggactctatggtctctcagccacacctaccggcagcagttgcatgacacgaggttcaggcatctccctttgtgtctgagtggaggaaaccagaccaacatcgttctaggtgaagctggtgaggatcgcctcaacactctagctggtgtggtggtcggcctcaacactgaccttgacagtgccaccctggatctctctagggtgcatttggaactagaggatgcccacgccaggattgcagccctggaagccctacttcaaggacgggatccgcctgaagcccaggcccccgccatggcgttgtcccctccccgcaagaggcttcactatggggagcccggatccatcac

SEQ ID NO: 546 - DNA, 301 bp, Zea Mays
aataattcaagggtttcacccttcagcatgtcgagcgaagcaagaacgaagaggccgatgcattggccaaagcagcagcctagggcgaggccctgccctccgacgtgttttaccatgtcatcggcacaccggtcgtccgtaatcccgaaggcttacagataacgcaagacgccgatggccaccgaatcgtcaacctcataatggccgatgactgaccggccccaataacactatacctccaaggccattaccatccatccgatcgcaacgaggccaaaaggctgaaacacagagcagggac

SEQ ID NO: 547 - DNA, 661 bp, Zea Mays
ttgatctggtgatgtgatcgagttactacataaaatttggagcaaatctccctgccattcgctctgtcaggctaactgaagaagtttgctatcgagctgtgtggcgcactgttcatcggatttcagaaaaatctcgccggagataagatcaccaccgcggctggggatgggtctgcggccgcggtaaaaatcttccgtggtgtggcatcaaaacattgaggtggcgctgcgcggttagtcggcggtcaccggaccatcgccgtgtcgataccgcgcgggtaagctcgccagcgcggttacactgccgtgaacctcatccaactccggccatcgacctataaattgagcccgaatcctgcttcttcaccacatcacgcacacaaggacttgagcaatcgactcaatttcaccagaagaactcacacagtccacaaatccattccgccctgttcttcgcgctgccgtgaaggactcctccgtggccagcactcatcgggttagtacctaccaaattgcttcctgttgtagcttgtcttcaaccttctattgctcttggagccggccaattaaactttaccgaagcctacactccagaacaccaaatcgtttcgtagaacgccgccgcgacgccctctctgtcgacccgctttttctactcttg

SEQ ID NO: 548 - DNA, 692 bp, Zea Mays
tttcaacaattcaatagcataatcaatcaatttttccccaaatcaccaccatatacaattaaaatcttaataaaataatcatacaagtacacatgtcttttaacaaacaatattctcaacatgacaacgtgtaagggtgcatggggcacaatgtagtgagtctgcaaggctagaaggggcggacaacggtgggaaattgggagcgttagacgtggggttcagtgagttagggtttgctctttgttgtgtaatatgggttaggccaaaaaataaactatgagtcgatttcggatatccaacggataacccgtgggtgggaggtaatatcctaatctgtgcccgcttgatttcgggtcggatacatgtctaatccacgggtcaaaaaatgtatccatacctggttccgtcgagtcgaatatccgacggatatctgaatccgcgggccaaattggcatccctactttcacaccggcgccatgttgcgggtacaggcagccaactggcgacgatctaggctagctggtgaagcctatgagcatattcgctgacgcgcgcaaggtgtttgacgaaatgctcgagctagggccggaacaacataatgttatcgctgtcaatcccaaaacgatgtttcgtgttctattttgacattttttttactaaatgctaattcatgtatggtacttgacctatcg

SEQ ID NO: 549 - DNA, 647 bp, Zea Mays
gtcctatggtgtgggacatactttgggtggccgcagtggtagaaggtgattggtgtctccaaccaccagaagtatttgggacaacggggttcatggcgtgtacctcccggcacgccatcttgaggcaacacttgtcggcgtatgcctcggggctgccaaagatcatgaagcacctcattggctcgaggaaattcacagcggtggtgttctgctctaccacttgggcgatatcctctggctccaccttcctacttgggggattgttgatgaagtgctttaggagctcgtactcatggagcttgtgacggactaagtagttgtggctttggcatgatgcgtccatcaacttctgaaagtggtcaccctcggctttcacctgttgcttaggtgggcgatctatggtgttgaggtcacgtccatcgtgttgggcatggttgccctttcgacgcttctcatggtgctctcgatgctctttctttgtgctgcttggcttgcttgcatcgcgtggggttttcccatgcaaaaatggcccttacgacgtcctccccatcggtaaacttggtggtgatatcgacaaggtcttcagtggtcttcgattgatcacgactaagctcgtgtaggagcgcctcgttcgtggtgccgtagtt

SEQ ID NO: 550 - DNA, 569 bp, Zea Mays
ttgggtggttttcatggccaatttaggggttaacggtccacaaagaggggaggggatagacttacgcgcttcgcccgtgacatactgcgaccgtgcaaattggttgtcggtgtttcatactagctctgacaagtaaatttatgtgtgcgtgtttggatccatatggtgtacttagtgggcgcaagatttatactggttcgggtagaatgtccctacatccaattgtcaaggaaaagatctataagtccctgaggctcaccagttagagaaagtattggggaaaaggtcttcagactaacagggtccactggtcagtagaagggtaagggaaacatctaccttagaagcacccgcccccgaataaacctagaggcaccgagggggaaagccactctagtggattcctcacctagctcaagattgacccgccataaatgagcgactacattaactatgcctagcactgagccatagttgaaagagccggtctgcctcccactcatgacctacgagcctctcagcctatgacgcactcatgacctatgagcccttagcctgcggcacactca

SEQ ID NO: 551 - DNA, 641 bp, Zea Mays
gccgagactgggagtttcactagcatcagaggaggcagaaacatggattagagggacgtgaatggacctgagaatgtttgaccactgcgcgatgtctcacggcggcattctagtccgatttgggggaaatcttaaattcacgagctatggttgatgatttgaggcgaggagtggtgcactaggttcataacagagagatggagcaagggggtgctcaatttatagaggccggccatgagtgccatgaattgcgcgaagatgagctcgcggtggtgaggagatgagtcaccggagctcggctactgtggcgctaagtggggtaaggaatcagggctgtaaacgggttgtccactgctacctcttgcgacgtggtaacgcccttaagtacgtggcatgactgtgaggagcggtgaactccggtgaggtcatctcggtcgatcgcgcgacaagtggcacaatgaatagtctggtgataaagctggagctcccctctgcgtcgagatcttttaccccccctgcgttgtccgtgctatcgcagcataaatcccccaggcaagcccaaatcgtggcgcagagataaccggcgacaaggttcagagaacctgagatcttcttcagtccactgtttatcactgaatggc

SEQ ID NO: 552 - DNA, 360 bp, Zea Mays
gtcttttgctattctcccagtcgacctatagtcctgagtcttgacgcttcaggttcaagaaaaggagctttatgatggaaaaatggagttcagtctgctcaacccttactgttactgtgtcggccgagatgtgctagggtcgctggtggttgagatttcagatcaggagctctggagtctagactctggattgcagcgagccaaagaattcaaatcagtcactggtttgtttcccagatcgcggacagcggcaacctgcagtcgcttgctttcgtccttgaattgccagcgtcattgtcatcaacgcaaagtagtgtagaaaggttgtttggcttcaggcggtctccagtagcagcatgt

SEQ ID NO: 553 - DNA, 339 bp, Zea Mays
cttgtgtgtgtgtaagggcttgtaaaatggagttgtgtgccctcgcgtgcctgtgcctgcgagggttgtgtactttgtctggtgtgattggttatgctgtgccagcatgattataattggtcttggtgtcgtttctgcttttgttgtactgggtcggctgcgcccttgggcggctcttgcgcgaagtctttgcgataggcttcggattttgcgcgcttgtgcttagtccggctgcacctttcggcgacttctgcgcggatagtcttcgcgatagccttctgatttttgcgcacttgttgtgcttagtccggctgcacccttaggcgacttctgcgaacg

SEQ ID NO: 554 - DNA, 614 bp, Zea Mays
tatataataaaagctttacgacgatgacttatgattcgaaattgaggaattgctttattttatatgtactttattttatatccattggctacactcttttagagcatctgtttatttacttactatacaaagtaagattcggcatgagtagcgaaaaactattcatgtgaaatatggttgattcagtcagtgaaacttgttaactagatggcaattttacccacggtttttgcacctgatggatttgaataaagggtacaaaaaaagtcacccgtggttacgtgagggccggagattcgtagagacgtggattgggcgcgagtatcaaatttaatcacaggtaccgtaatttgataatatataatttatatatcacgtggaccataattatagcatatggaactacgaagatagtgttttttatggataactagcgtgccgtgggaaagtttgccgtaactgcaaccgctgatcacgtcttcacggacgaaaacaggccaggttccggatgccctgtgaagaacgttcaacgcgttaacaacctagccggtggtcaggtcaaatcaggcatgcttaggtgcaggtgcagggatgattaggcatctgttcccgtg

SEQ ID NO: 555 - DNA, 643 bp, Zea Mays
cgaaggcggcagtcgtagcagcggggcatcgccaccttcacatcataaacaggtaagaaaaccttctattgtgttcgagtcgacctcattacacctcgggaaatcgaaattagagcatgggattgtggctcgccggcgaatcccgtctggcgaggtcagcgtcgtcatgaatcggtgcttcgccgtgggcaggggcctgggcgcatcgtttcatggatgggggttagccatgagtttcatagtggtcgagcgttcatgaaaaccaagtcgggtgcgtgaatcggacgagggtcaccgtagggcgcgttcgccggtgtgcctctgtcactctgggtgcacgtcgccatgtccggcgcacggaggtagtaggagtgtgccgccaccatttgatcttgatcctgcggtcaccatgccataccggatcgcgtgggcgaagatctaatctgagccacacatcttcaatcctacggtcggaatcggataccgattcgttactgaggccgatctaatcgtggccgtggaatttaatccgacggcgtgaagcacttgtaccccttcgcggtgtaaactttacacaagaaaccgctaagaatttaggaattaacccgcagtccagtcctgtgcgctctgtgtcttaggaatt

SEQ ID NO: 556 - DNA, 673 bp, Zea Mays
gaaatgtcacatggcctcgggatcatggagctcggagaagtataggtctagacccagatcatcttcagtctaggagcctacgtgctccaatgttcctgggagttccctgtacaggttggtgtagatgcttgtcatatacgggtagcccagaggatcaaagctgaacttgaaggggatgggattgaataccgacggttcccctcagtctattggtggagccagcacctcccgacttgtgggatggggagctggtgaagctggtctctcccgacccgcaaggggaggtggtgaagctggcctctcccgacccattgggggagctggtgaagctgtattctcttgacccatgggggaactggtgaagatggcctctcccgacccacagggggagttagtgaagctggcctctcccaacttgcaggggagttggtgaagccggtgttggggcaacatacactgatgtcgatgcttcggccatgaagctaacgcgcaacaggtccctctcaaggtagtctacgtcgtcagcctgcttgggagcattggatggcgtggagcgccgaccatggcggggttgtgattattccatctcctgtggcgagagggatggcgatagaagtctggatgttcctcctctggctaggggagcaggcgtggcttcgctcccctagctggg

SEQ ID NO: 557 - DNA, 697 bp, Zea Mays
taaccaatccattcctaagatcacatcaatcgcttgggatggcaagacggctaagtctgccaagaacactacccacttaaaagaattctaacttgggagcatttgagctggcatagaaggtctgaccctggggttcgggtgaccaagggaatttctaggtgtgtagagggaatgccatgtttttccacaaaactagtgctatgaacgaatgagatgctcctgaatcgaaaagtacagtagcgggagtaaattcaactaggaactcaccgagcactactcccggagcttgctgagcctcttgagcatcgacgtggtttactcgtgccctaccatgatactgggtcttactctgctggctgttggaggagggtgccttggaggcgggcgctggggcattcttggggccattcaccgagttagagtaagtaggtcctgatgccttcaactgggggcagttattcttgtagtgactagggtctccgcagtgccaacaagcattagctggtggttggttgcttgcaacagagggagcctaaaaggagctttgaccctgctaactgaaacgtgacggagtgggtctagctggcttattgaagcttggtcccttgggtggaaacccaaaggatcgaattctctggtgcctgtcttgctgctgagctcggaggacttagaatttcctcttgaggtgacctttttc

SEQ ID NO: 558 - DNA, 415 bp, Zea Mays
gatctgagtaactacttgttgaccaacgaaccacatgtagcaagggtgtcatgttttgcacctgctgatatgatgaatgagattggactctttgtctggccctaggaatttaaccttccaatttcggatcttctttcttaggacacaacagaattaagccagtggcaggcatgatcatggtcatctaataggaactgacctgtttcaggaaaccagctccaaacgctgtcgccaaattctgttctgttctgaacacagaagggatttatttgagaatgttgtgctgaaaagggatgcccttctacctcgcccatatggttatttggaggagatgggtgatgctgatcggatgtcgatcgcatggccgtacaagagagtaataagctatctctttgttgttttttcatatatggtg

SEQ ID NO: 559 - DNA, 629 bp, Zea Mays
atggtatgctgagcttctaatcattgttgttctgagtgacttttgtagctgctcctagaaacgtgctacgaacggtgcccctctgtcttacacgatagtccatgggattccatgcaagtgcactatttggtcaatatagatctctgcgtattttccggacctgtgggtggtatgcacgggcaagaaatgagtagtcttggttagcctatccacaatgacccaaatggaatcgtggtgctgggaggtgttgggcaatcccacagtaaagtccatgcaagtgtcctccaatttccaagatggtacggggagaggttgtagggtacccgctacctttaaatgactggccttgattctttggcaagtattgcactcagatatgtacttagcaatctatctcttcatcttggtccaccaatataaggatctgaggtcatgatacatcttgttacttccagggtgcacggaaaagatggagagatgagcttcatccaaaattttcttcctgagttctggattcttgggaacaaccagtcgatcttcgaaccataaaatacccctactgtcttgacgaaagcatttatacttatccaccttttgattgagcatttccttaatgacttgaacaccgt

SEQ ID NO: 560 - DNA, 1333 bp, Zea Mays
aagaaataaaacatgggtcaccacggacagtcccgtcagctgtccccgacgtggacgagcccacttcgaaggacctcatcgacggagaccgtgtcttcgccctacaggctctaaacaaataccaagcccaaaaaaaagcatggcgcgaccacacagtcatcccgagagaattcagcgaaggagacctcgtactcgtccggacagctcggacagagacccggggcaagctggagcccaagtgggagggccctttcatcgtcaagacgaaggcgtcccccagcgcgtacaggctcgcaacgccatccggcgaggacttggagcattcttggaacattgataatctctacaaattttttgtttgactcctcagggccagctcgcccttgtaattcgcaaaacaattttattctggcccgcactcttttcctcccgggggtgaggtttttaacgaggcggagccatgtaatatacaagtgaaaaatcccccacaaaaatctacgtcgaaaaaagaccgcatcgacggtcttcgacattcgaccaatacaaagtcaccgcgaggggcagcgctagctaccctcgtgtgcgacactccgcgcaaaagtcgcctaagggtgcagccggactagcacaacaagtgcgcaaaatcgaagtcttcctcaaaaagactatccgtgcaaaagccgcctaagggtgcagccggactagcacaacaagtgcgcaaaatcgaagtcttcctcaaaaagactatccgtgcaaaagtcgcctaagggtgcagccggactaggtcaacaaacgcgccaatcgcaggcgcattacatccgtgcaaaagtctacaccaagaaactgtccgcgcaaagaccgactacaggcacagccggaccgacataataaatgtgctagaccaagtgcgcaacgcccctatggacatagccagatgcgcgaaggcacacagcctcatcattcaaactatagtcacacacgtacagcgagggcattacaccttacattggttcaaccttcggaatgattcccatctccctatagttaaataacattatcctaagctcctcaccctgaaaaagacttcgcaactccccttcacctacattcgccccaaccggcgaggacaacaattcccgcttgccagccctgcccacacgaagccgaccgccatccatttcactcactctacgcttcgccaccgcccttcgccgcctacgcccagcactcggaccaggcaaaacttcagcatctgtaacacgcggagaagcctccgccgcagccacatccaaggccacaaagtaatccaagtcctcatccaaagactcatccg

SEQ ID NO: 561 - DNA, 1084 bp, Zea Mays
ctgccggtgggtccgccccctcagccaccttaagccgcgcgcgcttcagcctttcgctaccacgtgggacccatggtcagcttcctccttcgtaacctcaacgaccggccgatttcgtcgctgctccagcgtgatttctgctgaccacgagcgaggactagtccacgagctgggcggggcaccgggatcagacttgtcatctccgcagcttgcgagcctcatgttcattgctggtgagaccgcgtagtcaggccgttcctcttccttcgccgaccatctcgggcggatccaactctcgccgcgttgctcgggctcgatggttggcatacccggtccgacctcgggtgaccataaaagggtcaggaccgagtccttcccgaccccctttcctccgtagccacgaaagcgtccctgcctcgctcatctcagccacgctcctggatcggtgtcgaggcagccattccagtgagcatctctgccgaacgacgtcgggacccaccaccgccattacatctttccgggtgccttgtcggggcttgggtgagcttcggccaccaccaattccacgtgaagaacccgggtgcagtgcaaatttcttgccgtagctgccgcaccgccgtgcaatcgcctagctccatggactgccccccttcgccctcaggcgtcgcaccaggggcctcgcacagcagcacggagggtgtgctaagcttcgccttgggcgggttgcactcaaagccgctgggatttctcatcggagcttccatcgcccattcatccgtcgcgctttgccgctgtaaggactccctacgccaccctctctgttctgaccctatgtcgtcgtttcgctttcctctgcacttcgtttagcgcctgtctgattgggatgtcgaacaccagagcatggggcgcgtgcttcgccgacgaaactccaccatggctctgggcagcgccaccactgtggtggcccaaggttggggaaagtcatgatccgttggatctgttgtgagcggataggattagaccacggtattgatgttgcgcgtgccgttgatcttgttgtttacgactacgatgagattacgca

SEQ ID NO: 562 - DNA, 815 bp, Zea Mays
gtggaatcgcctctttgcaatttgaaatctatagccataatggatatgacaaggacattttgataatagcgatggaagattcatctatttttgttatcgaggaagaaacggggaaacttttgaaccccaacccagttcagacagacaaaccctctaaagccatccttctgcagatgttgggtgcgctttatggcattgcatacttatcagtttttgttgtatacataaactactgatattctaagtccttgtataaaattgtgtgacagagttatcgcccattgacacaccagcagtttcagataaccaagatacagtatcgaaggaatcattgctgctactttgcactgaaaatgcgatccgtttgttttccttgggccacgcaattcaggtatttgtatccctaattatatgccacctttttctttaacatgagttgctgttgttcttatgattctatactccattcagggcacaaagaagataatcaataagaagaaattgagcagctgttgttgtttcgcctctcttattcatagttcttctaatgacattggacttatactcgtcttctccaatgggaaacttgaaataaggtgaggcaacaatttacttaaagacttctcgatgtgtctgtgcctctgtggatactaaagtgacgtcaatgtgcattgaaactgcagatccctgccagacttgtccttgttgaaggatgcctttttacgaggttttgtgtactcaagaaacttgaattcaagtagttccataacatgttcatctgatggagaagccatcttggtatgctctgcgcctgc

SEQ ID NO: 563 - DNA, 576 bp, Zea Mays
aaaataaaatgttgaactcagtgagttcagtgtcgacctgaaacttggcaaaagatctaaagtccctgttgtgggactgttgtctttggtcagtggtgatgtggattggtgagggtatggatagcctttgggactcgaaacatctgaagccactatggatgactaagttatatgtttgccctctgttgaaacaccgttgatctccatccactgcctcactgtggcttggtcgtgcatggtgtcttggggctgtggcctcgtgtccactgcatgcagtgagctagttgctccacgtgtgcttgagtattggggcccatgtcaaattcatgcaagtactggtgattccacgtctgccatcgtgataagaacaaacaccgtgcagcgcgtcttcccttttgccatggcgtagtgtagaaaacttcactgccttcatgtggtcattaaccaaggttggcgagtagctcatttgtccatgttcccgtgtcgtgatgacttgtgctatgccgttcatcttccctcagccgccctttatgccatagtctgctttcagctggtgaccgtaccctgcacctctca

SEQ ID NO: 564 - DNA, 295 bp, Zea Mays
ctatgttgaccctaggtcgttagactagttagaaatggaaagcctagttagtctttcaaaacttgagttattttcctccataaaaaacatatttcatctccaaactcaactcctttataatcaactcttctagtctgattttctctcatctatcggaaggttgctatcagaagaactgcttacaaaagtattacttatgttgctcaagatcggccaacaccctctaccccacctttggatgatgaagaagaaacgtctttctttgccttatcctcattctttttggaaggctttg

SEQ ID NO: 565 - DNA, 780 bp, Zea Mays
gtcggggtcctgcgctgagctagagcgaagccatccgtggtgtttgtgggcagaatcgacggccgtgtgacccttaattgctcgtcggagccacaaatccattgcggatcctcttccccgctgtcgtccgaaacctgggatcgggtcggggtcctacgccgagctagagcgaagccatccgtggtgtatgcgggcagaatcgatggtcgtgcgacccttaattgttcgccggtgccacaaatccgccgcagatcctcttccccgatgtcgtccgaaacctgggatcgggtcgggatcttgcaccgagctagagtgaagcgatcagtggtgtttgtgggcagaatcgacggccgtgcgacccttaattgctcgccggagccataaatccgccgtgggtcctcttccccgctgtcgtccgaaacctgggatcgggtcggggtcctgcgccgagctagagcgaagccatccttggtgtttgcgggcagaatcgacggtcgtgcggcccttaattgctcgccatgccacaaatctgccgcggatcctcttccccactgtcgccgaaacctaggatcgggtcagggtcctgtgccgagctagagcgaagccatctgtcgtgtttgcgggcagaatcgacggccgtgcgacccttaattgctcgtcggagccataaatccgttgtggatcctcttcctcgttgtcgtccgaaacctgggatcgggtcggggtcctgcgccgagctagagtgaagccatccgtggtgtttgcgggcagaatcgacgg

SEQ ID NO: 566 - DNA, 610 bp, Zea Mays
ttgccgatcggtgtggggagccccgtgcctgcgatccgtctcctcgagatgatggtttgatgaccctaaacccacagtcctcactatcctccaccacctccctttttatcctagagggaagtttagaggggtgttatgcttgttggatggaggatggtctgcttgatgtctctagtgtggatctgtcatccgatagcctccccatcccctacctcggtgctagacattgacttgctcagtatgctgtcgcgggacaaccatcttgtcgtcagcgacaactctgccgctcgctgcctaaacaacttcaccaagcgggtgctgaagaaggtggacacgttgctaattcatcaacctccgaagcagtcgtcgcctgctaagccgatgctaccactttggagcaaacgcctagcaacttagagtgtctgggtgcttgcttccgaacaaggtgaaatcctagtcatgtagaccatggggcattcaatctcaagtgcatcggacaaacgaactacgatgagctctttgaggctgggccaaacgtgtccaacgttaaagtactgcacgctcttcccagttgaaaataggtcgcacaggcagcagtggagacgctagg

SEQ ID NO: 567 - DNA, 389 bp, Zea Mays
gcggaggaaggcagagaggatgagaaggtcgtgaagatggtccgaggtacccgcggtcgagcttttatcgccccatcgagcttggtccgttggcgagagactcggtcggcggaagaagcggcagagatccgattctggcggaggtagttgatgacacgtgggtcccgcacgtcatcgggcgaggcagtccgtggtgcggtgtgagaaagaggactgaccaacaggcccgcagagaagtggctcacgcgagagtgtgagactgtaccatggggtcagggtgtcagcgcccacccgttagctgggccgcgcgcgcctgcgagggaaataggaggtgggccaaaatgggggttaggcagcccacgtgaacagttctgttatttttattttcc

SEQ ID NO: 568 - DNA, 771 bp, Zea Mays
atggttttgaaacttcttcctatttcacggggcatagagatcgccctaagacgagcaatcgcaaacgtgcttatgctgaatcgaatagtcacgagcatgccgtgccgatttaagtcattactaacttaaaccgactgctccgttggtagggtctaatgatcaccctgagttaagtaagcatgagcatgtcgcaccaccttaagtcattaccgacttaagtcgattgctccgttaatagggcatagtggtcaacctgagttaagtaagcttgagcatgtcacactgccttaagtcattgccgacttaagtcgattgctctgttaatagggcatagtggtcaccctaagttaagtaagcatgagcatgtcacacctccttaagttattgccgacttaagccgattgctctgttaatagagcatagtggtcaccctgagttaagtaagtgtgagcatgtcacaccaccttaagtcattgccgacttaagtcaactgctctgttaatagggcatagtggtcaccctgagttaagtaagcgtgcagattgacaataaacaattcgagtgcctttgagaatgaagtcactttattgatggtgtatctgccaattatagaatacaatgccgtcccaatagcttttgaaatctagctaggggtaaaacttcttgagatgctctatattacatgagttccctatttccgtgccatccatttgagtaaggcgatatgatccaggccaggtgacttctgctattatgaatggtccttcccat

SEQ ID NO: 569 - DNA, 319 bp, Zea Mays
actcggtttgagccggaataccgtatcatcccgctataaataacggacgcctactcctcccttaatgctccctccgcatacttgtgtcgaacaccgtacatgtgagcagcgagagaatcgggtagccgtcatcgccatcccttgcggatgtcaccgttcggggaccaggaagagcgtagttgagtgcgccgatgcgtaggcatagtcgcgggctgccttagtctccctggggtgaaacctagccgcgcgtggcacctgtggtcgtgcatgcggccggccatggcgccatggcaaatcaaagcggcgctaccggtcttca

SEQ ID NO: 570 - DNA, 351 bp, Zea Mays
tggagctaggcgtcgggcgccaccatggctgtgtaggcgagcagctgatcgtacgcacgggatgggtgcaagagcttcgtacctggatgacagctgtaatcacgtcctctctctttccgacgaacacggtgatacgaacggaagctggaacatggtgtttgcatggaaagactatggcagctaccggacgggaggggcctcggttcctatttgtagcccagagacggtgggctagcgtccggctgctgtgctatggaggccgatggtgaatgcacggatcgacaggactcctcgtggccgcactcttcggcgccggtgagagcaggaccacaggttcgtcttccacctcgg

SEQ ID NO: 571 - DNA, 464 bp, Zea Mays
cagcagctgaagaagcctcctcgccaaactcaggtatcacggccggttcaatatagcgtggctggtgggtaaggaccttcaactttttgctcttcggcgcaggctcatctggagtggccaaagcagcagttttggctgaagcagcagcttttctcttctttccccgtcctcgcagcagatagcggtagtcggggtagacgaagccaatggcatcaaaaactctgttcaatctcttttttccccggcccccgaaggatgtggataatgcattatcttctgctttggaatatgacccaagcagttcatcacttgtagcttcgatacatttcagccagtcgtcatttggttcatcaaatttatctccatatctgaatgtatatttcagtcggaccaggtcaccttcgttagactcggtgacagtctcctttggcatttccagttctctacaagcggccatactctga

SEQ ID NO: 572 - DNA, 369 bp, Zea Mays
gggactttggacggtagctgcgtctgcgtggtggtggtctgatcgggatgtctgtagtctgttccgtagagctagcgtagcggtagtgtctttgtactgtggtgtagtggagagtgtttgtgtgttccatttccatgtcatgtgtatacggtgtacctgttgtgtcttgaactccgatgaggatgagtggtagcagcgcgcggctgggtgtatggtttgtagtactagtaggcaatgtatgtgtgtgtcccactttcactttggtgtgttgttcatggaactggcagaagcttttgtgatgcgatgcatgaatgattccccgagagagcatgaatcccagaggaagagaagggcggcagagaatctctt

SEQ ID NO: 573 - DNA, 399 bp, Zea Mays
atgtcgtgttccgtggcttggggtcatcgtcccaaatggtgggttgagatcaccaagggtcatcatgctgaacgctagggagtcgtcgtacaagtgcaaatgggaacgatgaccggtgctcgttcgttgacagaggaagatcatgcaggttggggcagggcgccacagattaggtcaaggcaatgcagatgacgaccgagcgacgtgtatggtggtgaggacagggatccttctgtggccagcaagaggtggcgctctagcttcctgcgtcgacgcttctgcatcgtgagctctatggctcccatgtgcgtctagggcagaagtaaagggttccattgctataatgggttggtattaggctggtgttaggttgtgttaagctggtattaggctgggcca

SEQ ID NO: 574 - DNA, 554 bp, Zea Mays
tctcaaggacctaggtacttgcgcctcggcagatccgatgacaacaaaactacatactaatccagaaacacatcgaagtgttcgtcgtcgtcttgattaaccgcaccagctagctaggtgagcttagttcactggtgacagacagacagcttgcccatgcgctcttgatccatcctctgatcacacacgagcaggccgtgatgggaggcgggcggcggttttcgtggcgggcgaagacgcaagaggccggccagaacgaccagaaaagcaacattatcgactgtactatatgcctattctattcacatggaagcatgaagcatgtacatgacacgggggcccagcccaggcatagtttagtactaggtgcaagaggccaaatcggcgagcgaaggctaccaaccacactttagttttgttgtgtgcaaatgcgcgacgcaatcagcagcccatcgtcgaccgaccacggctgttcgttcggctgttgacctcttggcttagcagaagagccgccaggccggggttctcagcagcctccagaggtcaaaactgtc

SEQ ID NO: 575 - DNA, 534 bp, Zea Mays
gccacggtgaggtgttcatggtggcgcggaaacccgatttgggggaaaagggaaattgggatgctatgatggacgatcagaggcgagagctggtgcactgggtgcataataacctagtggacctggttgatcactcaatttatagaagccaacagcgatggcgtccaatttggagaaggcgcgctggaggccggagaaaggagaaggtctctgacgtgagctactgtggcagtcactggctgaggagctacgacggtcactggtgagctattacggctggcaacgacgtggtgaaagggtcacggcatggcgcaatcacgacaaccaacgtacaccttggcgatggccgctcgaccacgtcgccggcaattgggtacggcgtctgagcaaccacagtgccccgacaacatccacggcgagatcttttaccccgggtcattatccacgcgacaccgggcacaaatcgtagcgccggcgtgaatctgggcgcgggggtcaccggcggcgaggtgcactgcacctgggatctttttc

SEQ ID NO: 576 - DNA, 527 bp, Zea Mays
catgtgttgctttcgctcgcatattgtatttgtgttgtcgttgctaacttacttgtcttaatttatttgcagagattggatacaccgggaactatatcgcagacgaggctcgtgcaagatacgttgtggaaaaaatggcgagggtggagctgatggaggaggaggacaacacatcaaggttgagtgtgctcatcgcgctagctgagacaggattacatgtgcaagaggaggaggacgagtttatgtctcagccgtcgatgaagcaaaggccgcttattacaagcaaaaggctaatgaagtggagggtgagagtaagctattttcccaggttgtagatatggcagaagcagcttactacaagagaaaggaagaaggaaatgcaaaacaatcaagcaagtggaacaacattgtcgttgaagatttgtgcaacggatgactctgacgacgagtttcttatagattatgtttcagattgattttgccatctggttgctttgtagtacctttgtattttaatttgttattac

SEQ ID NO: 577 - DNA, 635 bp, Zea Mays
ggtggatgtgttttaacacaaaggatgaccactagagctagcacctcaacatgtttggcagggataaggtcacgactagcacgatgtctgtttggtggcggatgggtttcaatgcggagatatgtcttcttcttgcttgcacacacacacacacgccaaaagagctagcaaccttcttatcccttgcacataatgcgtttgggcggtaaaaaaccggagatgccgtccttatccacaacgaggcgatagaggggatgggatgctatgatggcggcgtgagaggcgggcagatgatgcagtctcgaggtcatggctggcgtagagtcggcagatgagttttagtgcggaggatgcagaagcggcttgggggcgaatgggtttgagcgcggacgatatggtgccgagctcgcggctggtgcagaggccaatgcgtggagaatgcggtgcgctcccaaggtcgtggttggcgaggaggcggacacgcggatggtttcatctacgcgtgtgacacatgagagtggaaacttgtgttttaaaggagtagagaagaagagaagagaaaggatatgcatgccacttttataaaatttttagcaagccattgtccaattactttaattcaatgtggatcagag

SEQ ID NO: 578 - DNA, 373 bp, Zea Mays
tgaatattgactgcgccctggcaacacgacgcaatatttgtgtcgtttgaacttggctgcgtcatgtgattgctatgtcgcgctctccattaatcggatcgctcccgttgagtcagaccgccatcgctgagtcgcgtattttttgcatgtcctgtaggcactgtctgtctgccgcgagccacaattgcgcttgttgcgcacgttgcgtggatttatcgtgtaccccaattaccgagccataattgtgcctgttgcgcttattacgaaggcttgctatactgtcgtagccctgatggccgcacatgcgttgacgccagatacgctagagcttgtactcgcgtgggttgtggtgggttgttcaaggtcctgaagt

SEQ ID NO: 579 - DNA, 429 bp, Zea Mays
cgctggagataaactccagccactgttctcaccgtcgtggtcagtcacgctggcatcaccggagttctccgttaccaggcctagcaacgtgcctcaacgttttaccacgtcgtagtgagtcaccgtaagccactctctgctactggttcgtcgccgatgaggccgccacggtagatgccaccgagctctcgcgacagtgctctcttcactctccgaccgccaccgcgccaactcaaattcacgagccaccgcccccaagtcctataaattgagcacaccgtcaggtccgtagggtagtcacgcatccagccaccaagccgtgccctcaattgatcaccagagctcactaatttctcatttcccccaaacctactttccgccaccgtgaaagaggcctcgttgtggccagcttgattcaggtccgatctt

SEQ ID NO: 580 - DNA, 486 bp, Zea Mays
cggcaagcagtagcgcggctccacacgagcagaactagagatgagcagggagaggcgggtaagcacacagcacacggacgacatttatatggccgaagaggtaggtagaggggcaccgggagggagatgaagagcatcagacaccattaatggggaaataacagtctgcagttagtgagaaaagaatggctgggttagttggggagatggatcgacgtggttaggtgggtgcgtagcgtgctccacactgaagatgcgagcaggcaggcaagaatctgactggtcggcgcgtgcatgcccgacgaagaacagccgagatgaaccatggagaaagtgatttgctctgacggatggggggcccattgagcagggatcgtgtgggaggaagggagccggaaaaatggtaattgtgcctcgcatgccaatcaaaggagaagagaggggatgaaccatttggaaaggctcaccgtcggcctcatttttttc

SEQ ID NO: 581 - DNA, 342 bp, Zea Mays
gtgcaacctgtctcttagctagtagtgtgtaggtgttgaatcggaagacgatggtcgacgatgaaggtgaaggtcatgtaggttcatgggtcttgactaggggactagagaagtcgggtgactaactatagtggttgacaactacggacaccaacgagcgtaaggatatggtggatcagatcatgttgccgatgcagtttagtactgataggacacatgtccaggatgtgggggatacgtatggagtaaggtacctatggaggtttggtggttgagcctcaaaaccaccctagcaacattttgtaggtttcaccgggtttgggcctcaaaatccagctaaat

SEQ ID NO: 582 - DNA, 534 bp, Zea Mays
gagctcgtctctcctccggccgccagcactgttcggccgaattcgtcaccgccgctcgctacgtctataaattgaccccgtcgcgagctccgtagggtagtaagctgtccagccaccacgaatcagcctcggtcattctctagaatccacgaatttggaattctccccaaactggtttccgccaccgcaaaactcagctcgccgcggccagctcaactcaggtcagtccaagtccctctgttgcttgttctagcgtccctagtccctcctaaagctcttagacccgcccaattgaactagaccgccacccatcgccgagaacgcttgtggtcatccgcctcacccgcggtcaccgtggtcagggcgtctctgtgtgtcgttcctgaaattaacctaggggaaacggtctctaggtcctaaatctggtttaagccgaagctgggcgccgatcttggagctattgggccagtgcgcgagcttgccggagctctgtgcagcgccgttcgtcgtcaggggtttatctggtgaagaaac

SEQ ID NO: 583 - DNA, 531 bp, Zea Mays
tagtgccaacaacagttgtagtacaacattcgggaagacatggatacacgagtcagaatgtgttggtcgtatgtgactttaatatgagatttacttttgtcgtggcgggatggcctggctcagttcatgatatgagggtgtttaaggatgcacttgacaagtatggcgacaagtttccacatccacctcaaggtaccataatgttattttctcttatttcatatagctttaaatgttttcggttaactgacaaatttattttaatgtgaaggcaagttctatcttatggactcaggatatccaaaccaatcgggttaccttgcaccttataaacgaacaaaatatcatcttccagagtatagacaaggaccaatgccgagaggtaagaaagaactcttcaattatgcccactcttcacttagaaatgtcatcgagagatcttttggagttctcaaaatgaagtggaggattttccttatctttaaagccggacggaaacggcgtctataacgttgtccacgtcggctcaaa

SEQ ID NO: 584 - DNA, 739 bp, Zea Mays
gttttctaaatggttttataagtgttcttcactgactgaactgcgcattaatttcagagaagcacaggggcctcggagtaattctcctaagacacagagcgcatgcggcgtggatggcgggttagttctgcagaactgcgagggctcttttgcatatcgcatctgcgaaggggtatcgcgatcacacggccgttggattagagattcacggaggggattacatccatttatttgccgaaccggtattaactggtgaccaccagatccaaaatcagtggccatgattcaaaaccacccagatccgttcatccagtgttcaacggtcctgatttaattacagggaaaggggtatctagcacttaatcagagccatccgcttacgatcctatggctaacggtcccttcccagctttccccctcccagcttgggccatacggcgacgctgcccaacggtgcacggtggcgcacccaccgaagaccccggaatctacaacgcacgaccctaattccctaatcgagcgaagctacacgatcctgggtgctcgacgaacatggcaaaggacttaccggaggcagatacggtctcagcggcggcgcccacgacgcgaggcggactggcagtcgattcatggtacggcgagcaatccgcgagatactgcccactgccacgagcataggcccaccggggagatccgaagagcatcgaccatgctccacgacccatgcttgaacctcgag

SEQ ID NO: 585 - DNA, 777 bp, Zea Mays
agctttcaccgcacgccgccagggccatccgtttcacccggcgctgaatgctccggtaagagaacacacacactggccatgtccctttttactgcagagaatatgctctgtctgtgcagtgcacctgcgcttactacataccatgggttactattactacagagaaatcgcatatttttcccccttatcagaagcagataaaacggcagcattattacaaagtggagtacagttcatttggtcttttctccctgaggattagatcataatcaagggcaaagaattgatgttactctgataagattggcagtactgtttgaccaggctagctagaaaagcaagtattattccctagacaagacgacgtcctacacacggctacaacctgcgaagcatctaaacatgcttggcggtgctcggcgatatatacacggtagcaatttaggaaagctgtgatagcgcaatgacaccgtcgcggcctttgcaaaattgcttttgtttttctcaggagtttaacactgaagcacagactgacagacatctggtcctgcaatgagcaggaggtccctaatcctggcgagaccccacggcggcccctccgtgaccgtgaggtcgctgctcatgaggagccgtggctgatgccgctgatcagtgcttgcgagaggatcgggcgggtttagggtttagagttggccgacggcgaatgaagcgagtacgcgttggttgttttgttttgtttgatatgctgtgtacttgttgttgtttttttggttaagg

SEQ ID NO: 586 - DNA, 593 bp, Zea Mays
aaaacttaaagcagcctagtgactgatccgggctctccatagcgcagcctcttgcggggaggagacagcgccacggcggggacctgagcttctggcggatccagtccttgcagttgggcttctagggctgcaatcctggcgtgggcattctccagctccaagtgcacactatagaggtctagggtggcactgtccaggtcggtgttgagaccggccactacaccagctagggtgttgaggcgatcctcaccaggttcacctgggacaatgttggtctagctttctccacgcagacgctgaggaagatgtctgaacctcgtgttctgcagctgctgccggtaggtgtggctgagcgaccacagggtccgacgggcagcatcgctgaccgaggcagtgtaggtggacagcggtatcagggactcgtgagcagacagagtcctgaatcccctgtcacctgcatccatcaccctgacgtggatgcgagtgatgtaatagcaagcccggggaggctcgctcactcgccttgtttcgtacagggggcggacgtaggtgcctagcgcgtgcagcacctcctgcagcaggttggggaagtg

SEQ ID NO: 587 - DNA, 496 bp, Zea Mays
agcaatgtggttactagcaagcgggtctggatacataagcggaaggctgatggtactctagataggtataaggcctgttgggttctccggtgcttcactcaatgtcctggtgttaactacggtgagacgttcaatcccatcgtgaagccttctaccattcgtgtagttctcacttttgccctcacacgttcttggctagttcatcagttgggtgtcaagaatgcctttttccatgggactttgactaagacccgttggctttgttgaccatgctcaccataacatagtttgtaagctcaacaagtccctctatggtctaaaacaaggcccccaaacttggtacaacctatttgccacatatcttctctcccttggttttgctgaggctaagtcgaacacatctctattcatctaccgggcatggcggtgacattatatacctcctcctatatgttgatgacatcgtgctcattgtctcctcttcgggcctcctgca

SEQ ID NO: 588 - DNA, 746 bp, Zea Mays
gtggaagttcccgacgaagggcttttagaggttggcccaatcatgtatggtgctagctgacaggtgctcgagctaggccctcgccccttccacaaggtggtcggggaggaactggatgactaagtggtcatcattgatccccaccatgtggcacgtgaggcggtagtattctagccacatgccaggatttgtggaaccgtcgtacatggaaatgttggctagtgcatgtagctttgtgggggaactacgctttttggatcttgggtccaaaagcacgtggtactgacccaggtagactggggccacgtgcgcgcattctttcatgtggttgctcgacttattccagttcttgatgccatctatcgaggatgtgtcgagtgacgcgaatgcctccgatgcgatgctttatgtggatccgtgtcagagtagactaggaggtatgcacccccttgctccaggatgaggccgtgtgtgtgccatgactctctgtgctggtgtgttgccgtcgatcgacctcatcttgttgtaccgcagccctctccaccaagttgcggaggttctggtacaccgcctttgccttgggctcgtccggttcgtggatcgatcggaccatcatggccgtcgtagccatgttttgcccagagttgaggaagtattgtgtgtcctcgcaacttttagttaccagactacaaatcttactcgctcggggcctttcggcttcaaggcatctctgctcaatgttgtcg

SEQ ID NO: 589 - DNA, 486 bp, Zea Mays
actttctgaggtgctctatgttccaggagttcccaacttctgtgccatccatctgagtgaggcgatatgatccgggccgagtgacttctgctactatgaaaggtccttcctataagggtgataacttgtgccgtccctctcccgttagaattcggcggaggacgaggtctcctatcgaaaagaaccgttgccgcacagccttgtcgtgatagcgccttagagtctgctggtaccgtgctgattggattactgcattcagtcgctcttcctcaagtacatcaacgtcctccagcctggtggcctcggcttctgctatgctttcgaagatcaatcttggtgccccaaacttgagatcagcaggtagcactgcctctgatccatagaccatgaagaaaggagtatttccatgcagggctcggctaggttgggttcttaagctccaaacgacataagacagttttcttatccattttcccgcgaattttt

SEQ ID NO: 590 - DNA, 844 bp, Zea Mays
gtcgcaagttgatgtttcgtctagttcgcaaggtattctgaaccttgaatgtgttgtgcgaccacctggaaggagcaaggaggcaaccccagaagatgcaaccgttaagactatccttttttgtgctcgtaagtgtgttatgatcgcattccaaaggaaagtctttccagtgcctccatatccagataaaaagaagaatccaaatatgtttgataggacagtatcaactatagtattaaaagcatgcaactgttgatcattcagtttcacacggagattgtatgcagtttgtgataaagtatcgaagttatatgataactcttcctcaataaatcgattgccgtggattgagcccgttgaattagttttttgtggcaagttgtattcttttatattggagccacatttgttgaaaagcacagataatttgtcaattaaatgatctcgcaattctattgttggcatttgataggaaggaagattcaatgtttttctcattctatattgaatatcatctgttagttgtttccatactttctcgaaaaatgcatactcatctccaacctcacaataaagaagcatggtgacaaatagatgtcgcaactgctcggaagtggcccatctgacagcttcgtcaaaggcattgtaccactcattgtcatcgttaagaagacctcgtgctctacatgcttccttaaatgtgggatgtaatatgttgttatatcttctcaaatcctcgtagcttgtagcacctttaacgatcataagaagcattcgtaaatagtatctttctcctgtagatggatgtacataatatatacgacctattttcccttcctttgca

SEQ ID NO: 591 - DNA, 380 bp, Zea Mays
gccgggtcacaatcgccactaccctacccactagtacataatagagcagctgatggcctcctcctccgtttcactgctcgtcaccatcatgctgctgctgctgtcgtcatcacctgcttgctcctcgctgatttgcaggcttgacttcacgagcgtggcactgcactcctgtcaggagacggcaccacaaaaccctactgcctcatgctgcgacgccctcctctattccatcaacatctggccaattcatgaactagaaaagggtctttgttgcctatgtgtgtacatggtttcaaggaacactacctttgacctgcctacgtcttacgtctcatgcgggggtaaagactcaagtaatgtgctgcagtggaatgtcatca

SEQ ID NO: 592 - DNA, 844 bp, Zea Mays
ctaaaaagaaaatacctcttaccccaagaaaagttttctcttctcttccccgattttaacaagacccttcttttcctattccagatggaagactctctggccattaggacatcctacttctcagaggtggaagggttcccgcatctcttgcgaagttgtgcgcttcgcatgggaatccgcaaaaagccggaatacgtctggacggagcatatcgaaggcggaatagagaaatgctctatggcagtctacctgggagaaagccgaaactatccataccatccttccttccaagtcactgttaccggataccgtttccccgatacttgccaaaatgttgcccgaaaagccctccgacaactatgtcagaactacaacaaagtgatctttgaaaccccccttcgctactttccacccagcaacaagaatacccccacctggaggaaaagacttcaggccctatcaggaggagatcctattgagaatgatcccaccattgtctacatggccggataccttcacacccttgacaaccaatataatgacctcgccctccactgcacctccctaacctcccgggtggaaagcctggagcaaaaagtcagggaactttcagaagaaaaggcgtcccttcaagagagcctctcaatagctgaaggcgaagaaaccaatacccgggaagcctaccgcaccctaaaaatggactatgacaagaaactgaagaagctcgccccccaaggaaaatccgcaagaagacaaaaagtcaaggatgtcagactgagcagaaggaagaaaaccctccaaggaacccgtccgacaccgaagagatgtccctggccagccttga

SEQ ID NO: 593 - DNA, 443 bp, Zea Mays
atttgaaagcctaaactaaccccaaatgtggaatttaaaatctagaaggatttagctaaaagtccatataccaaggttgtagaacttggaaaagtgaacaaatttcatatctggagaattccaagttgtgtggagaaatttggagtaatttgcaaaatttcagattgggttcagtttgaattgggctgaaaacagtttcatatagctgtttggacccttataacttttgatctatggacttttggtaaggagttactataacaaacttgtaaagtgactgttggagaacaatccttattaagtgtaccagccctaaaactatatgcaactggctgaaaaagtggtccaatttagggctgtcagatttcagacttagtgtaaatgcaaatcctgaatttcagtgttttggtgtaactttggagctctctattgctctatccata

SEQ ID NO: 594 - DNA, 911 bp, Zea Mays
cagcattgaaggtcatgaggacaccttgtacgtggagaacgggatccaattctacctgcagacctcgatctggggcaccgtggactttgtatttggcaatgcccaggccatgttctagagctgcccgctcctggtgcgccgcccaccaaaaggcaagcataatgtgctgacggcccagggctggaaaaacgcaagccgcgagtccgacttctcattccacatgtgcaccatggaagcggtgtcgggcatggacctcgacgacgtggagacctacctcggccgcccgtacaggaacttctcccacgttgccttcatcaagtcgtatctcagtcacgtggtcagccccagcggctaggtcgcgtggaacaagaacaaggtcgtcgaggataccacccagaccatcttatacctggaatacggcaacgatggcgccggtgccgacacagccgaccgcgtcaagtggccaggcttctgcgtcctcaatgccgacgccgaggcggccgcgtacatggtggacatgttcataaacgcgagcaagtgggtccctgagcctacccagtacgaccacaccctcggcgcggcgccgctgccgcgcgcctaacggtgctcccttcggcgcacttaagttagtattgtactacgtaggccagcgttccgtttcagatcccaccaccttattactacggtattgtatgtctctagtatccaaccatgcatcattgacaagatgaattaaggcatattatggcatgcatgacgccgtatatttcgcgtatgcatgcatgtacctggacggctggacctctacctgtagctaccatttctctaccggtattgtacatactccctctgtatgtgtgtctatataatatatatgtatcctcgatctatataaatggattatatctatc

SEQ ID NO: 595 - DNA, 606 bp, Zea Mays
ctctgtcagaacaagctgaatgtgattctgatggtacagtaacttaactagatcgatgattcagtgaacctgtcgccgcccgtgagcatgcgccacaatcctcgccggtgttacgattcgtgcgctctggcgtgcggataactgtcgacggtgaaaagatctcgcgcgaggatggaattggggcactattttgccctattgtcgtacccacttgcaccggcgacgtggctgtgcgaccgcctccgtcgtgctgccgtttatcttgggtatgacacacccttagtcgtttcaccacgtcgtcgcaagccgttaatactcggcaataaccgccgtagattgtgagctagtgaatgccacgttagcgaactccggtgactcttctcccttatcaccgccagcacttctccgttcaaattttccctcctcgcgaccgtcctctataaattgttgcctcggcctgttccacctacttgttacgaacccagtgaaccacttctcgctcccgatcgtccaccgtagcgccctaattcggattttcccccaaatccgttctccgcatcgccgtgagcaccccctccgtcgacccaccgtcctgtccctccaccc

SEQ ID NO: 596 - DNA, 370 bp, Zea Mays
cttttgctttcctgcgatccgtgtccgccgaagatgacgttgacctccctgtcaacgcgtggaaaagctgctcctcctcctccctcctccggccgatgaggttgtcgtggttcatctggtcctcccctcggcggaggaggaggtagaggttggaagggtcggccgtgtccgacggaatgcttgaagtctcggcagttacgaagagtgtggcgcatgtccttgtggtatgggcactgggcgtcgaggatgtcgtccagcgtacgttcgcctcctcgaggtcctcctcgagcgcgggcggcaggtggtccggcggcgtgtacttcttcgcgtggcctcttctcccatcgcttgtcaggttgctggttcgcgt

SEQ ID NO: 597 - DNA, 703 bp, Zea Mays
tttcagtactagtagaaatcaaaggcgcgtttcaaaaggagtaccatcaaaagagctcgaaatattctgaattttttaccactgatccaaaaacacaaaggatggaagcacacaaaatttcacttgaaacagagttgtattgtggcctagagaaattcacaaaggatctctgaaattcctgaaaacacttaaacaatttttttaattatcttcccgatttttttgaattttttgaccgaaccaaataggccgaatttttttgaattttttgaccgaaccaaacagtcaagaatctgctgtaaaaatttgagctcaaacggagcaccgagcgaaaagttatgcccgttttatggaaggtacctcaagttatggttttcaaaggcacaactcggcaggaatcgaagcgacagctatggagcacaggttcagttttagagataggatttgttttctggatatggttggtttagatataggatctgttttgtggatatagtcggttttagagataggatatgttttgtggatattgtcggttgtagagatatgatctattttgtgaataggatcggttgtagagataggatctgttttgtggatagggtcggttttataggatggaagcggatggatataatcaaactgaaccaaaacaaatctaatccagcaaccaaactcaactagaacacgaactcagaattgc

SEQ ID NO: 598 - DNA, 453 bp, Zea Mays
ctctgaatgacaaagtgtgagtagatgtaagaattgaactcgctagggtggcagaccttgttgtccacaatggttctagctgcaatgctcccgctacaacttgtttgaccctatgtttcgcaaaacttgaactcggcaaggtggtggagcttcgtgttcataacagtctggctagaatgtcgtacccctgctcgtccaactttacgtatcaaagagggcaaacctactgtgatggcaaactttggtgtctatcacagttataggtggaacactagtccccccactcatccgacctttgagtcccacaacatcggggaagctagcgagcgtgacaccgcttttagcaatgatcatacgccatcgacgcgggttagagacaagcgtccaacttcggaaaacctttgtctccctcccgattgtcggcatcgtctttggtcggggtccccttttcac

SEQ ID NO: 599 - DNA, 1056 bp, Zea Mays
gaaatgggtacgtgttgcaatttgggagagaggatctaggtgtcgatctttcggaaagatcacgacgagtcagacagtcaccaaagctgcagagcagaaaacagaaaagaaaggaggagagaagagtatccacagaccaaaaagaaacgaataccacgcactaccaggtgcgtgggcccccaccataaaaaggacaccaacgtgagtgacgcgtgggccccacagtggccgtaacgacatctcccaaaagcatcaacagcaccttttccttgctatggtggtctggagggaaaaaaaaagatgaatagaaaatggtggagatataaaataacagagcagccgcaccagcacacctgccgcccccctccagcttttcttttgcgcagccaccctctggcttgccgttaatttctttcccgtttcactcctcgcgtttttacacttggcccccaatccaatccccgccaggccgccatgccgacgccggtgcccgccgcgcgccagtgcctctccccgcccgccgtcacggccctcgacgccgccgtcgcctccgcgcgccgacgggcccacgcgcagaccacctcccttcacctcatcgcctcgctcctcgcccccaccgccgcgccgctgctccgcgacgcgctcgcccgcgcccgcagcgccgcctactccccgcgcctccagctcaaggcgctcgacctctgcttcgccgtctccctcgaccgcctcccgtccacccccacctccgcctccacccccacctcagtctccgcctccgcctccgccagcaccagcaatgacccccagcagcacgagccccccgtcgccaactccctcatggccgccatcaagcgctcgcaggccaaccagcgccggaacccggacacgttccacttctatcaccatcaggcggcgcccacctcccccaacgccatcaaggtcgacctctcccaccttgtcctcgccatcctcgacgacccgctcgtcagccgcgtcttcgccgacgcgggattccgcagcaacgagatcaaggtcgccatcctccgccccgcgccg

SEQ ID NO: 600 - DNA, 926 bp, Zea Mays
cgagccgatcaagcctcttttcctgctgagggggagaaaaagaagaagagacgtcttcatcgggtgtctagcttggatcagggtgccggtccttctgttcctgttgctgaggaagtgccagtgcctaaatttactgaagctgaccccaatgggtgtgacccatctaatgctgaccccaatgggtgtgttgtccgtgttgttgatgaggatgatgaagaagaggacgaaatccctctgatttggaagaacagccggcgttacatagctagtggggaaagtagtggtgttccttctcctgccttgtctgccctcattggtctgcaagaattatctctggcgaactttgatcaaactcttgacgacatggttccagaagatctgttgtcagagccggcagatggtggcgcgatggatgtttgtgctgttgtgcttgatgccgggttggggtcatcccgggcagcgtcccatgcctcatcgaccttggagcgtggtcttgagggttaggaagctggtctggattgcactgctctcatggaagtgactgagggaccttcagccttagaggtggctgttgcagagaactcggccctccaggatggcgctggcgcttacccagcccccgagggtgttgccggagatgattcagctcggatgggtagcgcaagctgcgacccagcccccgagggtgtccaagtgggttctccctcttgcacttccatggatgttcacgtaggatcttctcccccacactctggttgcatggtgatagcccaagccttcggtcaaggagtcgctttagaggccagcgtacccgacgacagagttttgggttctgctgatgacactgaattggttcctgctgattcgttgcaagttgctccagttggtgatccttcgccgagccatcagttgatctctcatgactt

SEQ ID NO: 601 - DNA, 526 bp, Zea Mays
cgtcgtcatcgcgtcgtcgcacctccgcctatccccgcggccagagagctccttgcgacaattcgcggtatggactccctccctgtactcgcatccgcctccatcatgtgtagcatcgtcctgggcatcggatttgggcattcgggccattggtggctctcgccggagatggcgccaccgcgggcaggggtgctccgccgtgcctgttcaccggaggggaaacgaaggaagagtgcggggcgttctgtgccgtcgatcgcgggatcaacggtccaatttaggctctgcgtaccgattcgggttggcgtagcgatggccgtccgattgcgatcgtgtgggcgggagtcaggttagggtaattaaatctggggcgtcagaatcgggttgtgcggcacagatcgtgtaccggttcgctgagtgggaaatctaatcctaaccgcaagatcaagatcctgcggctgataataaagaataccccttcgtttgtgtactttgctaaagagtccccgtaaaacagagaaatcaa

SEQ ID NO: 602 - DNA, 497 bp, Zea Mays
caccatctgatgaacctgctgaaaattctgtttctgaaaattcatcacctgttgtggagtctcatccccagtctcttgctgaaggccgagctaggaggcagatagttcgaccccaaagactgattcaagagtgcaatgttgcttttgctttggttgttgctgaagaagttgataatgttcaggaaccattgaattattcagaagctatattgtctactgatagtgaaaagtggatgggtgctatgcatgaagaaatggattctcttgataagaatggcacttgggaactagttcggctgccttctggcaaaaaggcaattaagtgcaaatggattttcaaaagaaaagaaggtatgactccaaaagagcctccgcgctttaaatcaaggctagttgccaaagattttagtcagattccaggaattgattactctgatgtctattctcctgttgtcaagcatagttcaattcgtatttttcttagtcttgttgttgta

SEQ ID NO: 603 - DNA, 621 bp, Zea Mays
caatatcaaaacacatatttgcatgtatgcacaacatccaatatcatgacctttcctctccctagtgtggggcctttcctctcttttatatgccaagggatgggtcaattacaatcaagaagaagaaagaaagatgaaatctatgggatgggtggtcgtgctccattctactgatgtccttcctcctcctcgtctgttcccctgtagccatgaccttccagacttgtcttgaccgaaggggttgcatgcaactcgttggggcacagtgatccgtagcagcgtctgtcactagatcaggcagagggcctttgacagagttggtagtatagtgtcgcctgtggcggtgattcccacctctgggatggaccaacataccaatggtattttcgtaccgccattatcaatcggttcatcgtgccccgtagtctgtccatatcatcatttcccatacctttacgagcggagtggatgcttatagttgatttagacgtaacaggatgtcctccattattctccatgttgcgatgactattgtgatgatgggggctgagtacagagcggtaagcctcgcacgttcgtcccttgaattgtgtgtggttcgcccgcccatgttcgatttgg

SEQ ID NO: 604 - DNA, 953 bp, Zea Mays
gtttttctctactttagggcatcatagtttttgttcaataagtttttagccctggagtgttataccaaagtgatagggcttggtttggagagtaattttggttaaggaagtctagtatgttgttaagaggaattgtgggatccaagggcttaaatagtgaggactagaatggagcagtagtgctttttcagttaaccttagagtttggttttagaaactgaacaagatcctctctctgctgtactccacctatgtgctcgaattggaatacatcactgaagatctagggtctctccatactgtaaatatccagggtttggactgttgtggggggctgtgagcagtagaatccttatccatttgttcactgtctctagcatgggacaggggggatatttgtgtgttgggcttgtgtgtgacctgcaatttatgttgggcatccacgtgtattagccatgcagtgttggcaccttgagaattatctccaccatgtgctgaacaaattcagtgaatcactgccctgtcttcttgtctattgctttagggcacaatccagtgaggggatccctgctctcaagctcttgctggtcctttagtacctctgcagtttgtgttgcggtttaagttcccctctcaatccccaggtcgatttgcccttgttcttcacagccaacgcccaacctggtgaccatacccatcgaaaccaacacctcgtcgtggccaaagcattccagaccgtagcacgctcgtgtggttctcgttccgtgctctctaaaggttagcgaagctcacccagttggaaattttagctctattgttgtgtgttgcatagaacggggttgcgatgtctcggtttggcgccgtggacagcttccgcgtggacccattaacctacattgtccccgatcgacttaacgcgagcaccgagaccctcgtaagtcgttgaagcttcc

SEQ ID NO: 605 - DNA, 355 bp, Zea Mays
gtgtattaaaaactttgttaaacttgaacattctgcatgcatccttcccttgcttgaagggatttgtgatgagaatatcaccattttcaccaatataatcaataacggttgtttttccatcttgaccaggaagaaatggtctgacacggcaatagactctgatattgcctgatagcaaatagtagagtggaaaggagaatattaaacagccataaaaaatgtgctccaagtgtaagcttatcattgcatgaacataccttttagttcctgtacctcattaaatagcttctgattttcagcaagaaccttatgataattgtcagcagcatcaaccaagcctttcaaatcatgtcct

SEQ ID NO: 606 - DNA, 487 bp, Zea Mays
cagcccgagaccgagccagaggctcttttccctctgggctctcagttctctgcaactgctccctctctccggcgatcctcccctcaccgatgatctcccctccccggcggcgatcctccagcgacctcgccagtgctcctctcctctcggtgagcagcctcctcttttcttctgtcttctctctctctctgttctctaggctgtgcactcccccatttccacccttttgcataactttcaattccctgtgaaatccagtgaaaccaagtggccatatgtgttcctatgtgtgccttaaacatccttgcaggttcctagctcctttgggagggttttcacacctcaaacagccatttccccgaaaccctaaaccaccgccctccacgtgttcggtgaaatgcccaaaccagccaaaaatgctccaattgaacccaaatttttcaggcaccttcacaacacttccagtaacacttttgccaaatttcac

SEQ ID NO: 607 - DNA, 512 bp, Zea Mays
gagcaaagcatcatcttgatctagcttcggcataagagaaagctttgtcaaaactgtaaaaatcatcagcttcgtaaaaacttgtaaggacttcaacgtcagatggccagggtacgctcaattgcaagggtgactcatgaaggagaggaggtcgaagccaccaagacagccccgatctccaaagttatgaggcaatcggggttggttgtgacggaagaagttattgacgaagttgcacctactgtcgaagcagaacaagctggcatcaaagaagaaaacgttgatgaggaagaggaagactacaacactctgaccccatcaaaacccagccacttggactttgaaaaatctactgtgtctgaggctgatgtacccatgatgatgaagttgggttactttggagaagctgagaagaaacttattcgttttgccggagaagagaccactccagagcccaaaaatgacgaagtagtggttttcaagagctttttcagagcgggattgcggtttcc

SEQ ID NO: 608 - DNA, 371 bp, Zea Mays
gggagatgaatgcatggcgaccgtcagattcacgtcgtggggtctggattagatcttggggtagcgcttcgacgttttgataagagaggtcagatcggtggcagatgatccagatctgatcctagctaattaaatcgtggccgtgcgggttagatcttacggtttagatcccataccggttcacgtgtcaatctgggccaaccacaatagatctgacggctagggtgaactcatacccctttggccaatgcgttttgcatatgagtcctcaggtctctgggtaataaactcgcagtccgggtatgggtagaaatcattacggataggtactaaaggttgtacggagccccctgatcgtttgcagaattgtg

SEQ ID NO: 609 - DNA, 436 bp, Zea Mays
gggcctgggcgcatcgtttcatggataggggttagccataagattcatggtggccgagcattcatgaaaacgggtcgggtgtgtgaatcggacagggttcaccgtagggcgcgtacgccggtgagcttccgccgctttgggtgcgtgctgctgtgtcgggcgcagggaggtagtagaaggatgccgcgaccattggatcttgatcccgcggtcaccggatcgcgtgggtaaagacctaatctgagccacacaccttcaatcctacggtcagaatcggatgccgatttgttattgtggcagatctaatcatagcccttgatgtatgatccaacggcccataatgcaccataccctttcggcccgcactatttgcataagagcccctccatttctgcggattaaacccgctgtccagcgtagatagatctgagtctag

SEQ ID NO: 610 - DNA, 774 bp, Zea Mays
ctgtaattaaacagcattatcctcaattcctcaccctcaaaaagcttccgaagatccccctcgcctatgctcgcctcagccggcaaggacaacaattctcgtttatcaacccggtttacacgaagacggccacgctccatccccatacgacggcgcctgccactccgcgaaaactcacccacactatgtttccccaccacccttcgccgcatacgccctccacccgcactaggaagatccccggcaccctccatatgcgacgaagtctccgccgcagccacatccaacgcaaaatcatcagaggactccgtctaaggaaacgaactcccagattcaacatcggactcaaaatcatcagacatagaaacagacaaattatcattggcatgcactacagttgaggccgccacaaaatcagtataatcagcagcgattgcttgcgcgggcccaaacatcggaacttgcgcagcaaccgaggttcagtatcacagagacaacagtttacacttaaaatctccaaaacctattctgccacctgcgaaggcccggccgccgccgcgtggtcttcggcagctgtctccaccatcgccttcgaagcatccccacccgtctgcccaccagctggcgcgaggtcttcgccagctccagtcggcgcggttgtcgtgggggccgtcgaggggccttcgccggcatcggttggcggtgccacctccacccccgaggccacgggcagcaagctgtccaatttaccaaggtccttgacctcttcggcac

SEQ ID NO: 611 - DNA, 520 bp, Zea Mays
atcagcactctaccgtgctacaacactcagatccgatttcacattattacttgaaatgtcgataatgaatttctcgatgccttccaagcctatgctacaagtaacatattgagtcatgggatatagcatgccacatctttgtgaagaaggatatttgcaccgtgttacatttatagtccaaacattatgtagcaccagtcaatgattatttgaaacttcgaattatgttcatgaaagaatctgagtaatgtccttgtcttagcagtctaacagtctctgaatgcagagtaaattagagatggtactgcacaaactacccaatcattagtaattgtgtattcactttatgccatgtatgaattaaatcctacattcgtcgtcgtctggttcaaaacatgctaatgacatttcatattaattttatactccaaaagagtctccaggggtgtttctacacttctagggatctaaatgtaatggttccctagcggccgaggatggcgggttaataataaaagtt

SEQ ID NO: 612 - DNA, 917 bp, Zea Mays
gaggtgctcacacacgccgagtcaatggcatactcggtcttctgtgcaaggaacactgccctggcatggttgagtacgacgcagtgatggtgccagcctactcgttcgaccactacgccattgcccccgatgctgaagatcgagtcggtaggatattcaacaacaaggcagagcgggtgaagcaagagttgtgggtaaatctttcttatcccatattgctcaatacattgcattcgttggacatttttgaaataatgaatggatgcatcgtgtttgtatatataggatttctacagatgtcaggagggatataagggcagggcagatgcgttggctaccagatgttgtaaaaaactcgtcgtatatatgcactacgaggcgcgcatccaggccatcataaaataccatggggctatcctcagagagaaggtctccaaaaaggacgcaagaaccatgaagttgactcgggaccagtacttggaggtaaatacaaaacattaataccgattacttttgagattaggtagccttaatttcatcttctcatatatcatgtacttgattttctatagatgattccttattggtgtgccacgcatcccgagtgttgggaacgaatggtggacaaatggtgctcagacgagtgggaggaggtgcacaacacttgtcggggtcgacgtttgatgatgccaggtgtaccacaccatcaaggcagtcgcagcctcagcggatacgcacaagcatgggtatgtgaattcatttatttattgaaacactcaattatgcataatttctaatcatctcgctggttttctcatagtcggtgtcacatggtggacagacttgttccatctttaaggcatttgctatgtcccacaaggccaaggcgacgtccgacgtcaactataacctaaagg

SEQ ID NO: 613 - DNA, 556 bp, Zea Mays
tgggactccccgtcgcgtctgttgccccggtaagctccgccctatcacccgccacctagaacgccccttggttcaccttctccccctctggttcgtccggtccgcgctcactggagcatttcttgccccgtcggagaaccgccgctgtcgacccacgtcctcgtcgcgccccagccttcgttcgtgagcccctaagtctccacttgaggtaaccgtcctatccccgcccttattttcccctactgcgcgcttccttgcccgcaattgctctccggagtgcctcagtctgccgaggatctccctctccgatgtctggtcatctcagccccgttcacacaaacccgaccccgccatcgtgttcgccagaccctccccaacctctctagctacccggaccgacctctcacgccctaggagacccagtctgcctcgcctccagcgacggtgccgtcgtgcctgcagggagcgctgcccctggcttctgggtggagacaaagtcccctggcgcgcatcctgtccgcccaaccctaatcggatagcccgatttcaattaaac

SEQ ID NO: 614 - DNA, 297 bp, Zea Mays
acgatagcgttaggagttagctgatgaaggtagatcccaaacttattcaatacatcagcaatcatcttgttcaaaggaaatcttaaaccagccttaaagaaacttttaaagaccactacttcatcctttcctggcttcggagtagtctcttccccaccaaaacgaaccaactctttctttgcttcattgaaatagcccaaattcaacatcttaggcagatcatcttcggagatggtggatttcctgaaatccaagtggctcggtttacttggcactgcgctgtaatcatcttcagac

SEQ ID NO: 615 - DNA, 551 bp, Zea Mays
gggtgatgtagttgccacacaaaaattgaagaaaatgccgttggaaatcgggctgtgtggcgcactgttcatcagatttcagaaaaatctcgccggagataagatcgccacccggctggggatgggtctgcggccgcggtaaaaatcttccgcggcgtggcgttaaaacattgaggtggcgctgcgcggttagtcggcagccacaggaccatcgtcgtggcgatgccgcgcgggtgagcttgccagcacggttacagcgccgtgaacctcatccatctccggccatcggcctataaattgagcccaggcacaacttcttcaccccatcacatacacgagcacttgtgcaattgactcaatcccactggagaactcacgtagtccacaaatcccctcttccctgttcctagcgtcgccgtgagggaccctttcgtggccagcactcctcgggttagtaactacccaattgcttcctgttctagcttgtttatagctttctattgctctcggagccaaccaattgaagtttaccagagtcccatcaccggaac

SEQ ID NO: 616 - DNA, 620 bp, Zea Mays
caaaagtctagactcgtgataccatgtaagtaaatagaattgcaggaattatgtcttgtattgatagagaagaattataggtacatatataggggaggagtgcaagaggcaaaaggaaatctcataaacagggaaatcggcaggatcctaattgatccatcctggactcctccccaaaactctctatcctagcctgctatacaaggctcaccggctatagaagccaagcatcaggctgctatacaaggcaatgaatattgttgtttaatagcgacgacgacggctggcaagttggagtccagcaggatagcctgaccgatgtccttcatggcgactcacccagtaggatggtgcatcaccaacgcctcctcctcctcctctccctcgattgttcttgctccgctgccagcaggggcgcatggtggcggagacccggttgtttatccacgcatcgccatcgtcggtgcctcctcttcctcgttgttcttgcctcgctgcctacatgttaacggttcgagacacttggcgatggggagggtaaaggcggcgacagctgacgagtcggaggcagcaggatggcctactcgatgttctctatgacgacacgaaagaatctaggt

SEQ ID NO: 617 - DNA, 441 bp, Zea Mays
gattcgttagtgaacgaccgagattagaatatgcgatccctgttcgcgtgattgaactgaggtcgtcgatccgcaatgctgcggttcagattaggtttggcttcattaaatcgtggggtaggatctagatcctacggtttgcgttgcgtaccggttcacgcggaacccaggtctaatctgggccctctgtttctgatcggacggccagaatttctccgtacccgttcggccgaaaattttgttaaagagtcctcggagaagtgtgaaataaacccgccatcctcggcaacagtaatctgagtctgggaaagttttacaggttagaccccgagctttttattatttggtgcgctgtccagagctcagagaaatcaaataaacaagtttagaaattgattttgaatacaaaaataatcctaggaacttatataattcatatca

SEQ ID NO: 618 - DNA, 603 bp, Zea Mays
gctgagcttctcattgcacgggtcccaagtgattcttggagttgctcccaaaagcgtgccacaaacagtgctcccctgtcagacacaatggtcttcggaattccatgcaaacgcactatttgatcaatatagatttctgcatacttctctgtcttgtgggtggtatgcaatggcaaggaatgagctgtcttggtcaacctatccacgatgacccaaatagaatcatggtgtcgggaggtattgggcaatcccacgctaaaatccatgcaaatatcctcccatttccaagatggtatgggaaggggctgtaaggtgcctgctaccttcagatggctggccttgactctctggcaagtgtcgcattcagataaatacttagcaatttccctcttcattctggtccaccagtacaaagatctgaggtcatgatacatcttgttactgccggggagcatggagaattttgaaaggtgagcttcatccaatattttctttctgagctcggggttcttgggaacaaccaatcggtctccaaaccatagaatccctttgttgtcctgacggaagcatttgtatgtttctgccttttgctcgatcatttcc

SEQ ID NO: 619 - DNA, 450 bp, Zea Mays
gcttgacccaactcttggtctatttaatacactcccaaccttgcttagggttatggtttcccatatggtaatagccaagttactttccagttttctcttccatccctcccttccccatagccgtcggcgactccccaccactttcgcaacgcctcctcccccaggacgccgaccatggtcttctctcgcgctggcgacgtctctctccccatctccagcgtcgatgacgcttccagcacggaccaccatgccaccgcccctacacgtgggcccgctccatctccaacgtggttgtgggagccataggcacgcacgtgcgtggataccaccgccgtgggtgcgactgacctcctcgagcccagcgtggacaccgacgcgggtgcgactgacctcctctctcccgacctcctttcccgctactctacctagtgacttcgagcttttccgaca

SEQ ID NO: 620 - DNA, 330 bp, Zea Mays
aagcttcggaggaaggtttagcactcaacccaggagattgttctgcttattctgtggggaggataagggacacacaacaaggacgtgccaagtcacgatccaaaagcaaaagaagatagctaaagctgaagcatgacagaatcagccaaagcaattcatgcatactgcctcatgctattcgccatatatccctaagtatgtgggcaaccagcaacccacgacatcagttgcttcgacaagtcattctcaagctgcatgggctcagttaccaccaccaccaccattggcacctaccttggatcataatcagtagccagaagggcatcgcca

SEQ ID NO: 621 - DNA, 585 bp, Zea Mays
gcctctcgcaactgccttgagtccatctccagctcaattctggaaatgacatacatctcttctgtttccagggcaaacatacgtgcctccatctctgccgacagagcgtccagggactaatctttgtcgcccctgctagtactggttctcccaggtggttgcatataatgaaaccacatgctctcacattctcctcccttctaaaagatccgtcaatgttgatcttcaactgatccatgtcaggcatgtcaggtggcttccagacctgccacggtgtagtcgtgcgagtttgctgatcgccatcatcctggataactctgatcattgagttcacagcacatgcaacctccagataggtcgaggttatctctcccacattgagcttgttccttgcattccaccacttccacaacagcacaaagtcttttgatgattgtatatccagcaaaagacatctgacatcctcgagctgtaattctttccagcactgacgaacctgtttgtcctagtggtagcgttgatgctcagtggaactgcaatgatatgatttcttgctcgacaacttcatatggcttgagacatccc

SEQ ID NO: 622 - DNA, 693 bp, Zea Mays
gtagttatgctactctggcgatcgagttatgtaattatgttactctggatcggcttcgatttgttctggacaggatcattacgctgtgtggcttttgtttgcttcacttttcgagagcgtccctttcttgttatgcatgctgagtttgctataaacatgtagcagcactgcactgcactacaacctcgttggcactctatccgtcctctgtttttttttttggtgatgacaattgttctgtttcccatctggttctactccatgtttgtagaaggcggtgctgcgattattcagtacttgcgagcatgtgttttttttgtactagcactaccgtgtgtgcacgattcctatttttgtagaaggtggtgctgcaattgttcaggacttggttgttcatgttgtctcgtgcggagttgtttaggatactgatgtcatctcttcgtatattgcttgactaagatcatgctagttttgattaggtagcttgcatagaaaaagcttgagtatgtatgtactaatcaaatcgcgccctgtggcaatcccgtacatacattaatttcacttggcattgttcattggcatctttctttatgctatctgcagtaacgtagaaggccactttccgtttgtccttttctgcttttgtatggctttgaagttactcaggagacagagcttttctgcgttctcaat

SEQ ID NO: 623 - DNA, 713 bp, Zea Mays
gctagatccgttacaaacaaattcctaagttaattcagcgaatgtagccaacaattgtagcaagaaactcgaaaccttaactgtctctgcgcatgcgcggaccgtccacaccaccagtgcggaccgtccggcctcagagccggaccgtctgcacagtcatttttgctctccaacaagaccaatgtattcaatctatgattgaagtaataataaacatggataattatgtttgtctaagtcaaattacagtaataactagaacggctgtgtcgagggggctccgctctccctcgcctctgtagccacccttgccccctcctttcgctcgccaccgctggagtgggctcgccggcacaacctgtgtgggtcccacaaggacagcggcaggggctccacggtcgtcttcctctcttcctaatcactcacctctgaccgtcagccagaactcgattcaaaatctaatagcccagtcctcccgtgcacccgctccaatagccactccgtctcctcgtgctttgcggagtcccagttctggcacgacttcttctcacccaccctcctccctctcgtctagccgtcgtcggcgctgctcgtggtgtcactgcctcggtccggctctagtggttgtgcatatcttcccttctcctcgctgcaccgctagaccagcgccacctcctgcgatcaccggcatcccacctcttctcctcagtgct

SEQ ID NO: 624 - DNA, 592 bp, Zea Mays
aacaagcgcgcaaaatcgaagtctctctcaaagactacccgtgcaacgaccgactacaggtgcagccgaaccgacataataaacgcgctaagacttagtgcacaagtcccctacggacacggccggatcagcaaaggcacacaacctcttcatacaaattatagttacatacgtacaacgagggcatcacaccttacattggttcaaccttcgggataatacccatctccctatagttaaacaacattatcctcagctcgtcaccctcaaaaagacttcgcaattccccctcacctacactcgccctagctggcgaggacaacaattcccgcttgccagtcctgtccacacaaagacgaccaccctccacctcactcactctacgcttcgccgtcgcccttcgacgcctacgcccaacacttggaccgggaacttcagcacccaccacacgcggagaagcctccgccgcagccacatccaatgccgcaaaataatccaaatcatcatccgaagactcttccgtccacaccaccgaactcctagaatcatcagactcaaaaaacttagacacagaatcacccgaatcattttc

SEQ ID NO: 625 - DNA, 275 bp, Zea Mays
caacaacaaggagagatgaatcctccaaatcctccaccagccggaactgacccagctgtttcagcccagatgcggataatgcaacaatgactgatactatggcggatatgcacgagtagatgcggcaggaacgccaagagatgcaccaagagagagaggagatgcgctaggagaggagggtgcaacagcagcaagcaccactgccaccaccaccacttccaccccgggacaagcaccaggaatttatgagccacaagctgccgacctttgctagc

SEQ ID NO: 626 - DNA, 360 bp, Zea Mays
ctagcacttggttggttctctcggtctgcccatcggtttgaggatggtaggccgaactaaaattcaactgtgtgtccaagcactcatgcaacttttgccaaaaccgagaagtaaactgagatcctcggtctgacacgatcttcttaggcacaccgtgtagacaaactatatgtgccatgtacaactctgctagcctggcgcccgagtacgtgatcttcactgggataaagtgggctactttagttagcctgtccacaatcacctatatagagtcatacccagtagatgtgcggggtagacctacaatgaagtccatgccaatctcttcccacttccactcaggtatcttaagcgggtgca

SEQ ID NO: 627 - DNA, 754 bp, Zea Mays
ccacaatcatcaaatccggcatacatatatatcgatgcgctcttcacatagtaatttgcattttaacttgggcatcacatgaacactactaatttttacctgcgaccgtaaccatacacatttagactacaacaagcaaatcatcgtgattacgagcttaaccaacccatctaacacttcggctaactagagcaacgacatagcccgctaaataacatacacgtcggcttgcctattattatcactatctaaggcacaacatacaccacaacatttttataaacatacatattcacatgtatattcacatatcgaccaaatcatacgaaccgtaaaccactaatctctaactcgaaaccatcatgcgcttacttcccaattcatgaacacataacacgtattgacccgactcaagatatagaggaagcgataactactttggcatgtcaccacctcactatataagccaaaacaatttctaccatcgactaagagttctaagtattaaacacattattactttccacgcacaaataaacctcaacgtaacactagtggcaccgatggatttttactaaactcatcatgcgcataacctcgtctcgtatgcaaccatatggtggcgtgcactcgagacacttcgatcaacgtggcacgaccactaatatgaactccgacactcacgtcttaataacacatcctccacgcaaactagcattttctaaactactcgtcacattactaaatatattcc

SEQ ID NO: 628 - DNA, 538 bp, Zea Mays
aggtggaagatcggtcagtgaatacgtgcacaaattcacaaagttggcccgctaatcgccgaatgacgtcagcaccgaagtcaagaagatggcccgctttttgaaggggctcagaccagaactcaagaccatcctagccagccaagatttcctcagcctcttgcacctctcaaacaaagccatgcaagtggaaagggcaagggaagaagaaaaaggccatctcaagaggaaattccaagtcctccgagctcagcagcaagaccggcaccagaaaactcgatcctttgggtttccacccaagggaccaagcttcattagaccagctggacccactccgtcatggttcagtcagtagagtcagagctcctttcataccccctcagttgcaagcaacgaaccaccagcgaatgcgtgttggcactgcggagaccccagtcacttcaagaacaactgcccccagttgaaggcatcaggacctgcttactccaactcggtgaatggccccaagaatacctcagcacccgcccccaaggcgccc

SEQ ID NO: 629 - DNA, 320 bp, Zea Mays
ttgtgcacttggtctggtgtgtttattatgtcagtccggcgcgcctgtagttggtctttgcgcggacagtttggtgtggggtttagcacgggtagtctcttgaggaagacttcgatttttcgcacttgttgtgcttagaccggctgcacccttaggcgacttttgcacggatagtctttttgaggaagacttcgattttgcgcccagcttgattcgttcggctgcacccttaggcgacttttgcgcggagtgtcgcacgcgagggtagctggcgctgcccctcgcggtgactttgtattggtcaaatgtcgaagaccgtc

SEQ ID NO: 630 - DNA, 860 bp, Zea Mays
gctcttaaaatgaaaggaagataggaccatagacgaaacattgtcatcgtagtaatcttcaacccctccatcatcactatcagcttcgattttcttcgattctcgttcccttcgatttttgttccgagggggtggccctacgttagtcgagcaaacaaaaaaggagaggtattagcgggaccatatctattggaaggacgtaaatgttttgacaagggacaagttatccagtgttttctgaggatggtcagtcaagttattgacttctcctcagcccccgcttctcgatccatggggtcgtcgtccctgggtcggggacaatacaaaggaatggctacaaatgtcgagactttgttaagggtagaattgtcgtagtcgcttgatattccacacgttggtgagcgtcctgtctttctcgtcctttagcttgtaggtacccgaccaaagtacctctccaattataaacaacccctcccggggcgaagacagcttgtactgatctttgttgctttgtacccgttgaagtacaaggtaactctcttagcttacctgtaagggaccctacgttccaattgcctacatggattatagtctgctcaactagcttccttacccctcgcacctattgagacaaatacgaagacccttacacatttgtcactacacctgatgtagcgcgccactaaggaagcgacgactcgatccttgcccacttgacgccgcatctagatcacgacacgacacacgacccttgcccatttaaaaccatacccaagttccgatatggcatgtcgctgagagggttacaccccaacggttttctattgaatttcatctccatttgagtggctaagtttttt

SEQ ID NO: 631 - DNA, 827 bp, Zea Mays
cgctggatggcgttgttagcctgtacgcgctggggcacgccttcgtcttgacgatgaaaggaccctcccactttggctccagcttgcctcgtgactctgtccgaatcattcggacgagtatgaggtccctttcgtcgaattctcttgggatgacggcgtggtcgcgccaggcctttgtttgagcttggtatttgttgagggcctgcagggcgaagacacggtctccgtcgatgaggtctttggaggttggttcgcctatgtcggggatggctaaagcgcttgtccgtggtgacccatgtttgatttcctgcggggtcatagcctccgatccgtataacaggtgaaaaggtgtgaacccagtcgcccagcattcggtcgtgttcagcgcccagactgcttcgagtagcaggtcgacccatttgcccttcttgtcgtcgagaagcattttcttaatggcagtgaaaatcttgtcgttggaacgctccacgacgccgttagattgtgggtgatatactgaggtgaaggctagcttggtgccaatggagaagcaaaaatccctgaaatcatggttgtcaaactgtttgccattgtcaactgtgagctcagacgggactccgaatcgacagataatgttttgccagaaaaatttctgtgcggtcttcgacgtgattgtggatactgcccatgcctcgatccacttggtaaaatactcgatggcaacgaaggtgaacttgaggtttccttgggccatgggtagtggcccgatgatgtctagcccccagcgttgaagaggccatgtgtgggcgatcagctttgtgaattgcgag

SEQ ID NO: 632 - DNA, 450 bp, Zea Mays
ggcaggttcaagtgaggaaagaaatttgcgccgtgagagagcatcgccagtgggtacccggggtggagttgaggtgctccgcctagtcacctggaacgctttcatggcagaatcaaggtgggggagcgatctgggcgcccccaattcgtcgccgtcgctgcaaatctgcggcacttcgtggacaggatctccacgacttcgatcagcggtgagcctcccgtagtaattccccgtcattaccgtcgtcagttgctactattggatcggagtttagatgcggggatcgggggtttgggggctccagccatggcaccgctgtctcgggttggttggagtgcaggaagtgaggggtaatcgtgggggccgttgatctggcggccaacgactgagattagacggtgcgtaccgattggggagggctgtcctagagcgttagatcgtgatccggtg

SEQ ID NO: 633 - DNA, 456 bp, Zea Mays
ttgggctttatggtttctcacgatccatccgtgatgtaacggtccatctgtggtgtaacggtccattagtaggcgagaagcgagggagaggaacagacttacacatttgccacgtgacacgcgacacacgaaactggtgctttaaaggagtagagatgtgtcagggatcggaactccggaccctggggcccacaagtcagaagggagactgaggacacctcagaagaactcgccccggatggccctaatgcgccaagctcggggactgggcgagacggaactaggaggaggggtcagacaaatagtcaggagtgggttccgcgtctgaccaacggactgccccgccattaatgaccaactgcatcgatggcacctagcgtcgagtcgtggcatgtgaaggagtcgatcgtccttccacacatggcatgtacgccctaggacacaaccccacttatg

SEQ ID NO: 634 - DNA, 297 bp, Zea Mays
ctctagtttgtattttaacttagacatcacttgagcactactaatttttacccgcgatcataaccatacacatttagactacaataagtaatttatcgtaactacgagcttaacctaagccatcgaacaatttggctaactagagcaacgacacggtccgctcgacagcgtgcacgtcggcttgcctgttattatcgcagtccgagacaccacatctatttatatcacaatcacttacgccatcgactcctacttaacatgagttggctaatgacgtgactatttcccaattatcaa

SEQ ID NO: 635 - DNA, 378 bp, Zea Mays
cgcgagttgatttcgacgagaaccaggggctcatatgtgaaaaccccaaacccgaaggggtagccattgatgagggccgttcagatcagatcgaacggtcccaaaccctagctccaacggtatacgaacatgatcgcctgatctaagatccacggctaaaaactcgccacgccccctgctgatccctgcccttgatccactaactagtgaccacgattttacgcaacgaaccggcattcgccagatccgtttacgaccgcccgatccacgatcaacggtacccatgcttctgcctcccccgacggcgacgcacgcaccccagcggcggcgccattgccggatctccctcacccacggattcaacacactaagctccca

SEQ ID NO: 636 - DNA, 390 bp, Zea Mays
aggttcatcttcgcttttgttttttcctggtccccacccatgtgaaactctatctgttttctggaattattgcctctcgttatacactctggtaaaccttaattatgcagattgatcgcaactcttaatctttcctggtctatgcaggggttctcgacactgaggaattagccattgtaaacagcacctatcgtaaggcccaaggttccaggctgcctggaatcattgaggaaacgaggagatcaggggagtcaacaacctcaactctggaaagtgaaacctgggcgatggaaagccttgagactgaactatttgataatgtccgtgcttcgatccagagatctcttggcaaacctgataaactttcaggtcggcccgttgctgcctcaa

SEQ ID NO: 637 - DNA, 599 bp, Zea Mays
tctggccgaccatggcgccgccgcgggaggagcttaactccgacgactggcgagtgagagggggcgcgatgggagacgtgtgccgtcggattttgtggcaacgctccagattagatcgtggccatttcgtttcaccaccgtggatcaatcaacggacggtcttgatttaatcaggcgtactgtttcgatctggcgcgccctgaccgtcgatcggcgatcgatcggtttctgggtgattcgttctgcttaggatccatgccgttgatttttaatcctgtggccgagctgatgtagccatccgcatgatgatcagatctaatctgatcccttaagttttgatctgacggtcctggacaacggataccccttcgcggttgtaaatatgcataagagaccccgcgaaagacagaaaacaacccaccgtccccatccgctgagtctggggaatcttgcacagtggcccttgagtttctgtttatttggtgcgcagtccatccaatagtaaaatctgagaaattcatttctaaaatgattgttaatgtaaaataattactagaacttgtataattcctagaaaattcatattaggtccaaattgg

SEQ ID NO: 638 - DNA, 639 bp, Zea Mays
gtcagtcctaaagagttcaacgaaggggacctcgtcctcatcagaacaagcagaaaagagtcccgaggtaaactcgagcctaaatgggaagggcctttcatcatcaagaggaaaatgtccctaaatgcctacagactcacaacacaatccggggaagacctcgagcattcgtggaatatagacaacctgagaaaatttcatgtataaggtaacaaattccaaggccttcgcgcctttgtagcacttacagatacattattctagtcatacccgcactcttttcctcgcaaggggtgaggtttttaatgaggcggcaccatgtaatacatcaccacgaaaattcccccacaaaaaatagacaccatgacaccaagatgtcaaaaaagaccgcagagtcagtctttggcattcgacgctacggctagtctaaacagtcattgcgtgcgacaagtcctatccaagcaaaagtcgcctaagggtgcaactgaattagcacaagtgtgtaacaacacccaagggtgcgaagtcgtccaagagacacatgtttctatccatgcaaaagtcgcccaagggtgtagctggattagcacaacaagtgcgtaacaacacccaagggtgcgaagtcgtccaagagacgca

SEQ ID NO: 639 - DNA, 870 bp, Zea Mays
ggcccagcttcatcttcggcctggactctgacagcctcggcaactttcttgataggagcaggggtcaaggctttgtcgtctccataacagcgtccagcacgctggccatcctcatcctcttgggagttgtagtaggagcttttgtcatcttcggcaattctgcctctgtcggtgggcttaaaatttttggcatcatcattgcttttcccaattctggctctctggccatatcatccttggcttcagctggccagactgtaggcaccttcggcactacaatcgattcttcagcgctctgcacggtgggagcagcttgtcttgcttcggcagttgaagaggtcccttcaccacattcaggcactatggtcggttcaatatatcgcggccggtgggtcaaaaccttcattttcttgcccttcggcacaacagtggtggccgaagcggcagttttctcttctttccttgccttcgcagtgggtagtgataatcagggtatacgaagccaattgcatcaaacaccctgttcaatgttttcttgccccgacccccgaaggctgtggacaaggcatcatctttggccttggaatatgtctcaagcaactcgtcgctggtagcttcaatacatttcaaccagtcatcatttggttcgtcaaacttctctctaaatctgaaggtatatttcaatcgaactaggccaccttcgctggattcagcagtagtctccttcggcatatcccagctctccacaagtggccacactctataagatatgtgctcttgaactatatctcttgtgccaatgaaggcgcaaacattgctaaaggccttctggaatgcttcgacgtcactttcaatagtgaccttcgacct

SEQ ID NO: 640 - DNA, 647 bp, Zea Mays
tgaatttggtaggtccaatttgtatgcagctgaaccaatcttggacataatctggtaaggaccaaagtagcgaaaactgagcttctggttggcacgagagaccagggatgtttggacgtatggttgaagcttgacaaacaccaaatcccccacttggaatgtacgatcggaacgacgcttgtccgcttgatgcttcatacgctgtttggcacggtgtagatgttgctgcaataacagatggatacgctgtttgtcttggatgaatgcagccaaatcagacgaagaattgtccaatgccgaaataccgaaatgtcgtgggacaaccatagagagcttcaaatggcgatctgtcaatagaggaatggtggctagtgttataccaaaactctgctgaagctatccaattagcccacttggaaggacaagagtgtacaaagcatcttaggtacgtctcgaggcattgattcacgcgctcggtctgcccgtccgattgaggatggtatgcactgctcatgtggagactgaccccgactcgcttgaagagttctttccaaaaattacttgtgaaaatcttatctcggtcagagacaatagcaactgggaggccatgcagcttgtagacttgctgaaagaatgcctgagcaatg

SEQ ID NO: 641 - DNA, 516 bp, Zea Mays
gttgaagttgagccactgattcgcccgagtgaaggtgatcgggtgctccgaccatcggtatggggcgggaggaccggtagttgccaccagtatctggcgatcgttgagcttttgttgtctcttgttctcctgcgatccgtgtccaccgaaaatgacattaacctctctgtcgacacgcgggaaggctccacctcctccctcctcctgtggctggggttgtcgcggttctcctgatcctcctcgcggcgggggaggaggtagaggttggaagggtcggccatgcccgacggagtgcttgaagtctctgcagttccaaacggtgtggcgcatgtccttgtggtacaggcactgggcgtcgaggatgtcgtccagcatgcgttcgcctccatgaggtcctcctcgggcgcgagaggcgggtggtccggcggcgtgaacttcttcgcgaggcctcttctcccaacacttgtcgggctgttggttcgtgtcgcgtcgcggtgccactggtgtaagcttcgc

SEQ ID NO: 642 - DNA, 425 bp, Zea Mays
gcccgatatcaccgctgattcctcagccatcatgggcgcgtggacggcatactagtcaccgagatctccgcgggcgagggctgaccgtggctcctgcggtaactacccaaccgggtgctgctggggataagatggagggggaacaccgcatctgcacctctcctcttccttctctactgcctagcgacgagagagcgaccgagagagtagtgggaagaaagtgctgacacaatgggggagttcaattcggccgtggatgtcgtcgtggtgctgtctagggccatcaccagacatggggaggtgaggccgaggccgtgctgctcgtgattgttggccagcttcaccacaatttctcgctgacgatttctgtcaaccacagatccgcccaacgccatagacaacgctgcttagtcgttggcccccag

SEQ ID NO: 643 - DNA, 274 bp, Zea Mays
ccaataccatttttagttcattagtgtgacaaaacgcataaacgagagttcggtacgtaacttcatcaacgacattcctctccccaccatattgttcttcacctccactgcctcaagaacacgattgtttctgcagagaccatacatcaacacattgtatggcacaacactgcccttaacaccctcactttccatcctcgccaacaatctccttgcgccatccaaattccttatctcacagtaggcccaaatttcggccgtgtaaacatactcg

SEQ ID NO: 644 - DNA, 583 bp, Zea Mays
aggcactagggcggagcagccgcatcagcgcgtcgttctggcgagtcatcgaatttgtcgtgagatagcgttggtgagacgacgacaagtaggaggagcgagtgcaggaggcaaggtagcgatagatgatggtgacgacaagcgacacccattgtcgtgttgcaatggcgcggtgggactctaatgagttagcgagggacgggtgatgccatggtcccaccaacagcttgcccatgtgctggtgcatactaggaggcaaaatatcaatgttgtgtgtaggatcccgacgagtcgacgagctgatgagtgatgagaaggcaaagtgcgcagtagcggacgggttaggtcaccgacttactggtcaatcgatgaccgaagaagcgagtgagccacgagtgagcttgcgctagggaagagaatcaaatggctcaggtgaaaagtggactgagtagtgaaggatcgaaagaaaaatagatcaaaacctagttttcattagatttgtccacgctaactatacaaaaatttgcttattttggtgtgtacctaaacctaggtataaggggttaagaaaaattgaggtggg

SEQ ID NO: 645 - DNA, 674 bp, Zea Mays
tatatatatatatatagtttaggtatttagagccctgggctttgtgtaggtagagaaagccccaaccacccacacgaccggccaaccaggtgagttaagcgtagccaaacgagactactcaaacaatcgtcagaccatttacgatctcctgcacaaacgtttatgatggttacattcccgttttatgcaaactaacacaactcagcgcaacttatggtccacggctccacgcccacgtttccgccccagtccgcacaccatggcccaccagtcgatcaaccgagtctgcatcctggccagaccccaccgcatgccccaaacctaaccactcgcccgaacatctagcaaccctaattgatttcctcgtcgctctcgccgtcgtgtgctcccacaatcgccgtctccaagcgcccccgcccctgccacaccgccgtcttcgtgcgtggcgtctcggtcccccaacatcgtcgcacggtattgcctcatccatctgtcatttctcgtcttcgtgcactcttctgtcgtcgctccacatcaacagtgtcgtcagatcccactcccgctcgccattgctcggcgatttggtgcggtggctccacggccctcgcctccacctcacacggtcctacgcctctcggcgctgctctctggccccaggcggcacgccattccct

SEQ ID NO: 646 - DNA, 576 bp, Zea Mays
gcgcgcggggaggtgctcgcgcaggaaggagcggtacgcaccggagagcgcgcgggggcgggtcgcccgcggcgcgtgcgccggcgcgacatgcacaatgtacgtggacacaggctcctccgcttcggactccatggtcgccaccgccgcggagacaacgacggcggcggccagcagggcgcatatagcgagccttgccatcggtggcgtctgggtttcacgtgcacgtgcacgtgcagtgggagagatggatgtgttgtgggaggggatccgtggcgtggtggaatcggcggaagggggcgccaataagtaggcgagcttgatcggattcggacgaactgctcatgtgccggctcggcttgttgtctgcaccacaccttacggaggttggggtcactcacaccaacacggcaaataggcggaggttggcattagcacgttactatcactgaagcacgacctgcgcgcgatgctttaaaattacaaagcgcctggaaatgtccctacgcgtgttgattatattacgactattttaatggatctagatacaaaatagaatatatagacgaatctttt

SEQ ID NO: 647 - DNA, 665 bp, Zea Mays
accaagtcctagccgagcaactcagcgaggcagaggccccaatctggttctattgacccatgtcggccacgacaggacgtgtcgtcaccaaactacatcaggaccagtggcgcgacatatcgaagggatgccgagcagtctctatcaacgtgacggtatgccaccgcatacagtctctgccttgtgggaccgatcaaccccagtcgtggagaacctaagtatcgaagtcgccacagtaacccacatgtcgggcaggacggagcaatacaccatatcgagtgtacgcatgctaggagggtgacgcagggtttctgacagaaggcagggccacgccaagcacgacctcgagacatgccctgactctgccctgtggggccagtcgggcgtcactatggggaccttagcgtcggactcgctatagggacccgtataccgaacgtataagacggtacaccatgcctggcgaacaactacgcacaatctcggagacgacgtcaggaaggctacatcggcgggactactaaacacaacactacaacatatcatacccttaccattaggaaacaagttctcactgtaaggtcctacccttgagcttaaggtcctacccttgagctataaaagggtaggactccctccttcaccacacataggtaccagttgta

SEQ ID NO: 648 - DNA, 666 bp, Zea Mays
gaggaactagatttggttgagcactattgctgattttgagctatgacttggtttttacgtctaggtagtggtgttgagcccttcttcttcctattcttaaggactagcttctcttgctttgctatgttgagccgttgcccatttctttggagaccaagctttgcttgctctaaatgatatatttttggtttttgtctgactttggtcattcgagtgagttctctttcctcattctctttctgctaatctttgagtccatatgatggtggtgttgacaatacattcatcaagggggagattgcaaacataaggttgacttgtcctttgtggttcgggttgatgatgagtgattctttgttaccaacaaccacacaacgtacaccgtcttgctaggaaggaacggtatccatgccaactactacatcccatcaacaatgcacctgattcagtgggacaaagacaaagtggaagtagtccctgcggatgactcatgcaaaattttactcgccgatatgaacgtgtgggatgcagatgaacaagagccaatatcaagaattgacttggaaggttgtgactgtgtagaagcatcagaaactaggcttaggctggtcttatccactagccctacagagtagaaggagtggcatatgtgactataaagggcga

SEQ ID NO: 649 - DNA, 506 bp, Zea Mays
ggctaacgtatacaaatacctcagacccagatttaacccacggtggacggctggttaattcatcaaaactcgaggggctctttaagaaagtgaccgtggcgaagggttatgcgcaatttctagccctccgatcaactacgcacggtaccgattagaatcaatctcctctgaatcgataaccaaccccggccactggatcataatcccatggccacggcttaacgcccccacgctctattagaaaccgacggatatgatttgatacgaccaagcgctatttatgttccgatttggaccatccaccgctgattcgacggccaaaccagcttcttcccaccccggccaacagggtacggtggcacacaggctctgccgtggcggctcccccggatggacctccccactaccagctccgacgcccatttctagtttggacagctgctacacgttgcggagagagaggcaaactcaatggaggcgtccttaccaaggattagcatgccgac

SEQ ID NO: 650 - DNA, 590 bp, Zea Mays
gtggatgacacccccagcccacgagactctagctctagctaggcgaggtcgaggagagcacgaatgacaaccacagccgcatgcacgctcaagctctagctactcctacttgcacggtgtggccggtcttttgtaatgcgcgggattgcggagccgagaggccaggtggcgggcgttggcagggggtgctcctgtccaggaggagaggcgctctgcgtggttcgtgaaaggggcaggtgaggcatttcgctccgcgctagcagccatcagccatggcagcgggcgggagtgctgcctgcgctccgcaaccagacgaaacggcgcgcgtggagcggttcagacgttgtcctggtggagatggcaagtccgttttcgtatgttggcagatgactgttgtgtggtgcgatgtgctgtggtcgatacggcacaagtagttgtgcttatctggcgaaaccatgctactccattagtccagtgtctagagggcaatgcatcacaagaccatcctactatggataacaataggggtggtaatctctactaactattaaggcattagtgtagactgacctcacccccctctacgcgtg

SEQ ID NO: 651 - DNA, 472 bp, Zea Mays
gtgagagcgaacctagagacggaggtccatgacgcggtgactcatggcggcacggagaaccgatttgggggaaatcgcgattcctcgggatatggtgagtaatcggaggcgaggagtgatgcattgggtgcgtaacaagagaacggagcacgcggagcgctcaatttatagacagcgaccgtgagtacgacgaatttggacggtgaagagcttgcggtgagaaaggggaggagtcaccagaggccgctcaacgtggcattcactgggctaagtcctcgacaacagagggggctatctacagcgatctactgcgatgtggtaacaaggccagtagtgtggcgtgccagggggtaagggcgatcatcacagcgatggccgcgcggccacgtcgtcgagcaagtgggtacaacgaagctggttctatccattcccctgctgatcttttcactcccatggtgatatccgctacaca

SEQ ID NO: 652 - DNA, 511 bp, Zea Mays
tcgccggtgagcttatctgcccaagccgcaaagcacgggggtacggcggtgagtcaccggagtcatctccaggcgcatagctttcacctggcggccttatcgggtcatcgacggcgtgaatcgcaacggcggtggcgcgaatcgcggcgaagattggtcgtcggcggtgagactgccgcgctggcgatctgatctgttcaggcactgtacatggcaaagtcagattcagtgcgcctgacagcttaagttcagggccaattttctctcaatttcctatggcatcttacccaaagatctgcatcaaagttgtagagctacaaaccagttacacttcggctatagggactgaactcagttgagcactagatccaggttgaatcctagtccaaagatggctctgttacactgcaagtctgaagttcagagttcaatcagcctgacagccagactttagacttaattatctccaatttctccataacaaccttgcttacactcttaagcaaaattg

SEQ ID NO: 653 - DNA, 410 bp, Zea Mays
ctaaatgatctctgagtattagtgacctcaataataagtgaacgagccaggggcgttagggtgctttggttctccgactttcatgactactttgtgttttggttctccgacttttcacggcaagtgttagttctaattgttttctgaaagcgatgtggtctttttcctgtatctataatggtactaacataaaaactactctttgttgaagtagaatgatttatgggagaccaagttctgggacaaagctgaaggtggcctcataattcatgaacgagccaggggcgttagggtaatcggtagcttttgacgactggattaagagattttttatccttcttggccgatagttagtcttaattgtttggtggatcattaactacgatcaaatttccatgcttaaattcagc

SEQ ID NO: 654 - DNA, 657 bp, Zea Mays
tttcagtcgactcccatattatagaagtgttatttgatactggagcaacgcattcattcattattgcatcatgggtagaagcacataatcttccaataactaccatgtaaacccccattaaaattgactcagccggtggtagaatttgagccgatagcatttgcttgaatgtaagtgtggaaataagggggatagtgtttcccgctaacctcatagtaatgggtactcagggaatagatgtcatcctagggatgaatcggctagataagtatcaggcagttatcagttgtgataagaggacaattaagttggtgtccccactaggagaggaagtggtgaccgagttagtcccgcctgggctgaagaaaggaagttgttatcagatggctgttgatagcagtgaagcagatccaattgaaattatcaaggttgtgtccgagttcccagatgtgtttccaaaggacctaccaggtatgccacccgagcggaaagttgagtttgccatagagcttcttcctggaactgcccccatctttaagagagcatacagagtatctggaccagagttggttgagcttaagaagcagatcgatgagctgtcagagaaaggttacatccggccaagcacctcgccttgggccgcccctgtcctattcg

SEQ ID NO: 655 - DNA, 327 bp, Zea Mays
cgccggtctctgcgcgatttgcgcagacttctcaaccgaatcctccttgagggcataaagctgcacgtagggagccgagttcctccctttccttccccagaaaccctattaccgccgccaatttggagggaggcaacgagtgccattgccgtcgggaaaggagaaagcgagctcgggtgccggggggagtgtgtctgggattcctcggcgcacgtggcgcctgtggtgctcctcgtacagtcggtgtcgtccctaacgtcaccacgttggggctgggacctcgccatcgatactcgggagaacaccgtgggcggagctcggtccgcc

SEQ ID NO: 656 - DNA, 661 bp, Zea Mays
caggcaggttgcacccactaggctcagtttcagcaaatgctggcactggcacttccttagcaacaggaacagaaggaccggcatcctgatccaagctagacacttagcgaagacgtctctttttctttctcccctcagcaggaaaagctggttggttagaacgcttcgggcgggcaccatcagtcctctgaatatccaaaactctactagcctctaggatgggcgctactaccgatgtctcagcaggggccgcgtcagaagagtctccagctagcatatccagcatggcacttacctctgcatcactcggattcaaaggcacctcaaagtgaacctgcttctcgtcgtcaggaattccttcaagtgaggcaaccaaagcactaacttcctcgggagagggtcgcactctaaggcccaaaccgctatcaccagcaggaggatttgacacgaaattgataaaggccttaaaaggaggtagattccaggccgagtatgcaacaggagcgccgatgttcgacaccttgcctctgagtatcatttcaagccggctcaccaagtccacagcagaaattcatctattggatacccgggttgaatcagccaggcctcgatacagataggccggatatgctctatctttcagcggctgaatgttcttgaa

SEQ ID NO: 657 - DNA, 381 bp, Zea Mays
tcttctgccacttcatcaggtgcatatctggatggctggatgaatctgtcgtggtactcacttacttacatgctcccctgcttcagcgacagaaattccttcttcttaatcttcatcagtccagcaggaatatggtagtttctgaactgagtagcaaactccgcccatatgatagtatcaacagcatcgtgggcaacagtgtaagaatcccaccaatcagcatcaggactagtcagacgatcagaagcatagagaaccttctcccggtcagagcattgggcaataatcaacaacttctccatagacttcagccaatcatcagcgtgcagaggatctggagacctggcgaacgtcggtggcttgtgtctcatgaactcccgg

SEQ ID NO: 658 - DNA, 481 bp, Zea Mays
gtggcgaagccgagtctgcgcggatggcgagaaacacggccaggagaatcaagaacagaggcggatggggaccaatgtttatgcagccggagaagggagatcggttgcgcgcatggcggagttcgtttctgggtcagcactgttcttctgtgtatggtccaaggagcggggtcgttccataggtgcgttgggatccgatcaaggcacgatgcagctggaaatccgcggaggttgttgaggccgcgcgggttccgggaagacaaagacccagcacgcgggcccaccggtagaggcactggtacgcgcgaccaccattcgagctgagccgcactagtgcacgagagcatggctggcgcttgggcccatctgccagtgaaacagacgcaaggtgcgcgcgcgagtcactgacgggagaggcccacttgtcggcgctgtcacacagtgttgagctgcccacggggaagctgttcctgggccaaaa

SEQ ID NO: 659 - DNA, 463 bp, Zea Mays
ctttgaaatgattgttggtgtattgtgtgacttttgtccacaatgacatcagttagctagaaaaaaacttagatagatgggttttctctgctctctataatctgtctttgctcaaccctcttgtcccttccattctttcatacccatacagatgtcagaccttggaatgtgaactacaagtgaggtcactaagtgcaaagaatacatggtgttagcaactcctccagctaaggatcagatggaacagttcaagaaggcacatgcacagtttctgcaagcaacttctcaagtggtagctagactccaacaagttgatttagcagaatttatagcacatgagcagaccaccgataaccatatgacatcaaccacaacatcaccctcgatagttgacttagaaaagttgttacatgcacaagctctgataatacagaaagcatctcaactcacctcctcataccag

SEQ ID NO: 660 - DNA, 273 bp, Zea Mays
gaacattgctcaattgttgtccaagacggcagagcttgacacacggtacatcggaacactatggtcgggaaggcggtagacgatagagtggggtaggtcgggcggcgttggaggatagaggcgagtcggaacatcgacgttgatggtgtgggaggttctaggaggccagacgaccgaatctacgtctaggaacaagattgggaaacaaccaacggggcatgcgcatgaccaccgacagagctaagtatgtgcacatgcccgggcaaactaggc

SEQ ID NO: 661 - DNA, 791 bp, Zea Mays
agtaggggttacaagcggatgagataaggaaggatcctaagtatttattgatttaaatgcatgatctacgtatcctatgtttgctctcatttctgggctctcgtatctcttctgttgtgtagcatctcacgtctggattatccctctctcatttctatttctccttgttaggcctaccctctcccttttatagacaaaggagggggtcgattataggtgtcttactttagaagggattatcgtgctaggtaagatgaagtggtttaccttcggttaaaccttgttgtgcgttgatatttgtcctcatgtaaatctcggtcgtgctcctttaagtctattgggaaagcttgtcggcgatgggagtctgagcgtcatcattactcctcctgtttgctacttttcacgctgatccctggtcttcgtagcctaacctctagctttgctttgtcgtcttgcatgctctgtagggtgtcggaggactcaggcctagggcacataggtcataagtggaactcaggcctagggctcataggccaagcatggggctttagcttagggcttgtaagccatgagtggacgaggtctagctctttcctataccgtggctcagtgccaggcgtacttaatgtggcgtgtgtggtattgatggtgagaacagtcctttggcctcatgtggaatccactagagtggttccctggtggttcgtttggccccatacctgccttcgcttgcccgaccctcaaactctactcgtgggtgtcatccgagagcggacttacctaagtaggtc

SEQ ID NO: 662 - DNA, 493 bp, Zea Mays
ttttggaatagacgagtatgaggcgtgcagttaagtcgtgattgaagtgcaaatcctatgcaatgtgatgggattcatgattatataggagttgtatttgttgatgtgatgagtagggttaaatatataggcttgtgcgaaggatgtattattgagcttgggtcaaaatgcgaggtactagtggtacgctaggcaggcggtgttccaaataaataaatcggttgatgtggtagctgtcatgcgtggtttattgttagtgagtagttgaattacgagttatgcgagaatcatgttagaaactagtatgcggcatgtaactgtgttcgcgtggttaaataataataataataattgtaagaacagtcgttcaaattggtcagtccgattaagaatgattttgcgtgtgaggtgaggtggtgacatgccaaagtagtcatcgtttcccccatgtttataagtcaagtcaatacacattaggcgttcataaaatttc

SEQ ID NO: 663 - DNA, 553 bp, Zea Mays
ccgatatcagcaaactctgaggcgctatcaagacaaggccatacgacatcgatccttcgcagtgggagacctcgtcctccgccgaattctaacgggggagggacgacacaaactgtcgcctctatgggaaggatcattcatggtagcgaaagttactcggcctggatcataccgtctcactcagatggatggcacagaagttgggaactcatggaacatagaacatctcaggaagttttacccctagctagatctcaaaagctattgggacgacaatgtactctgtaaactgggaaatataccatcaataaaaagacttcaaaagtactcaaattgttcactgtcaaccggcacacttacttaactcgaggtgaccactataccctactgacggagcaatcgacttaagtcatcaatgacttaaggcggtgcgacatgctcacgcttacttaactcggggtgaccactataccctactgacggagcaatcgacttaagtcggcaatgacttaaggtggtgcgacatgctcacgcttacttaactcgaggtgac

SEQ ID NO: 664 - DNA, 458 bp, Zea Mays
atacagtgtggaaggccattaggcacgcttgcacttcattcccagttgcgattgatggtcttctaatgccgaagcgcgaccatatgggacgttgaatgatgccccttacattctccctctgattcagatcattctttacgtaaaaccattgcttcatccaagagcccggccatttctttcgaaatgtagacacatgataatttgccttagagcggggcacgaagctatagaagtcgaagttgttatggtattgttcttttccgattgcctttgtctcgtaaaataactcatgaatattgcggaagcacctagcatccggctctagcccctgactcttcatagcccatataaaaacccccactttgataagagcttcgggggtaagttgatgaaggtatattttgaatgtcttcagaacttcaaccaacatcttgtgtaatggaaagtgagcccaactt

SEQ ID NO: 665 - DNA, 680 bp, Zea Mays
cgggggtgaggtttttaatgaggcggagccatgtaatataaccgcaaaaatccccgcaaaaactaagacacaatatgtcgaaaaagaccgcatcgacggtcttcggcattcgaccacaccaaagtcaccgtgaggggcagcgctgactaccctcgcgtgcgacactccgcgcaaaagtcgcctaagggtgcagccggaacagcacaacaagtgcgcaaaatcgaagtctttttcaaatagactctccatgcaaaagttgcctaagggtgcagccggaacagcatgataactacgaaaagatcgaagtctttcacaacagactcataccaacgaaggcgcacaacattaccatacaaattacggtcacatacacacagcgagggcatcatacattacattggctcaatcttcgggatgatacccatctccctgtagttgaacaacattatcctcaattcctcaccctcaaaaagattttgcaactccccttcacccacactcgccccaactggcgaggacaacaattcccgtttacctgtctcatccacgcggagacgaccactctccatctcactacgatgacgcctactcactctctgttttgccaccgcccttcgccgcctatacccagcactcgcacccggaagatcctcagcatccaccacacgcggcgaagtctc

SEQ ID NO: 666 - DNA, 1267 bp, Zea Mays
ggggattatacaactagttctgcttataaagctctcttccttggttcagttcagttcgaaccagcagaacgtgtgttgaaatcttgggctcctgggaagtgcaaattctttatatggcttgtggaacataataggtgctggactgctgacaggcttataaaaagaggacttgaccgacctgagcagtgtcccttgtgcgaccaagaggctgaaaccataaataatttgctggtcaaatgtgtttttgccaagcagttctggtttaatttccttagttcagtggggatgcaggaactgtgtccagctcatgaggattcctttgagtcgtggtggaagtccagcagctctcggacatctgatcttttgagaaaaggtttcaattctttagtgatcctaggttcttggaccatttggaagcataggaatagatgtgtctttgatggttgtaatcccagcttggccacagcccttagggtggctagggaagaggtggtgctctggtccttgactggagccaaggccctgtccttcctccaagttgatgagttgctggcttaaattagcattgtgggtcgtgtttcctccatgatagtcggtgatccttaggtagtctctagtggtgtgtgtgctgtaatggggttctctcccccctttcttattcttctattaatacaaagatgtgcagctctcatgcgtattccagaaaaaaagaacagacctacgggatcagttgcaagcacagacctataggatcaaaggaactttggctaaatctaggggatttttgcaggacattacctttcaagcagatccatgaatgtgtggcttgccgaggatgatacacgtgctggagtggcgaatggacggcggatgccgccggtgaaggacccctgcgcgccggcggggaaaggggttcgggaggggatgttgttgccaacagcaaggggagagtaaatgggcaatctcgcggtgggggagggcatctggaaggaggtcagagaggggtagtggcggtcggatggagaaccggaagaggcggcggcggcggccgggcggcaaacaggaccacctgtttcttttctaattcatcgcaaaaacaaatggatgggactagtgatggaaaagttaccacaaaacagatgaacgggagcaccggatgccgaagcgaccaccggcgtcatacaactcagcaacaacatcgtatcttcgcctcgagccatgcgtgaggaacggtgcctttatcaaggatcgagtcttcgaaaatttt

SEQ ID NO: 667 - DNA, 1125 bp, Zea Mays
ttttgattaggtggcccatgcataaaggtgcgacatgtgaaatgtgtacttatggagactctaaaaggaagggaggtatgactgcaaccgtcctattttggttaagtacagatggtgacattgatcttttagtattgatcatagcatcattataaaggtacagaaaaataagaaaggaataaataggatatcaaaaatatcatcaacaaaccaaacgagttgcatattataaaatatagtgatcacaatttatttaaacaatttgctacggttgttttagtgtgtatggggagtactgcattaggtggcgctagaagaaacttaaagcaccataaagtaagattggtaggtagatgcatttaactcattgtttttgtacaaatacctataaattttgttgtgcatagcatagctaccgcaaaagtgagtagtcttgggaatgctcccttataacaggggaagaggaaagactcagaaataaatattgtgataatatgtttgtggatttgagcatatggagaacgaagcaaaaaataacaataaaaatcttgcaaattcatgctcttgttatcgtcgctaaaatcacggttacacctacacgatattagcacagaatagaaaatataaaaggaatttgtagaacatcccaatgcagtcaagtaaaataggttaccacctacacgattgattttatgtcatgaagctctagaatttttctatgaagcacaggattctatcgaagagcacaagtgaaatgggaaaaaataggtacttgcagtactgcttctctaccacttttattttcgtagtgttcaaccctaaaacactaaaatcatggatataaactacttactatagacaagaataaaatttgcaaacattctaggttggtacaaaaacgatcctaatgcagtattggaatagggtacctcctttacgactgatgtggtctcacggagtaggatcctcgggcaccaaaatcaaatagaaacaggttacttgagcctatatagaaagatagagacatcactaatgatgaatacaataactctcaactcggaacaattaaaccagtttccaggtgaacattaagtgatcagtttaaggatcttgcatggaaaatct

SEQ ID NO: 668 - DNA, 552 bp, Zea Mays
ggtcaaagatgcaaatacagggatcatatgtcctcctcatagctcaagtcaaccgcaagtacaaaggccataccgatgaccataccgactacaggggttcagacatgtccctgctcctatacgcgacaaaccacagcgctcctaagagccctccttgatgctataaaaggaggaacccagggcttcgttcaaagaggagaagacctcacgtttttaacctccacgactgatattggcacatgcctcaatcatcaccatggacttaagaacttctccctccccgaccggcttgtatcccctactacaagcacttaggtgcaagtaatataagtctcatcccccttgctagaagtaggatcttctcttgcctgaaccaagataaagacttgtgtctccttgcatcaccatctgagtctaggcacacaacactaattcactagttggtaggatcctcgagtcaaaacaccgacagttggcgcgcatggtaggggctcgctgcgtgtagacaccacattccaccaagactctatatggccaatcctcagcaccctt

SEQ ID NO: 669 - DNA, 328 bp, Zea Mays
gaaatacctggctggattatcgccgagagcatgccgaaactcaggttccttcgcctgtcgtcgaacatgctcagtggaagcataccccagcagattttccagttcacccagctccagctactagatctatcacataacaggctcactggtcccatacctactgacttggcaaattttactggcatgacacagccacaggaacgtgggcagatcgtttatttctttgcgtactccgagcagctccagctagtctggaagaacgagaactatgtgtacagcaagatgataacattcatcatgggtattgacttgtcgtgtaatttgcttt

SEQ ID NO: 670 - DNA, 432 bp, Zea Mays
tcctcccttcgtcaagttttccggcggtgacggtgagggagaagtgggttggcaatttgacgaagacacggccgcccaccgccgtggggtcatccattagtgcgacgtccgacgtcgccatgggtgatccggctgctcgagcttgctcaggtttccttttaggggctattttggatcgaagatcgtttcttggcggaaaactcccagatttacagaagctcacctattgcccctttaatattttttccagttccagatttcccagtagcccccttcaaatctttgatcggggttgggtgcaaagcaacgttatttctgcttcattcatgtgcggtctttacgagttcaattctgctgccccttcaagatttgcccttgcgtcctcctcatctttatctcttttatatatatggtgtttgcaggaagagagac

SEQ ID NO: 671 - DNA, 403 bp, Zea Mays
ctttggtttgaatttgaaaattatacttaaattccaattctgaaaatggaaaacaacaaaatagtgtaaactgtgcgacccagccgaattcagcccaacaagccacgtgtgcccgctctccccttctccctctcactaagagtcggtccccgcctatcggcactgacccctcacgcgtcgtgccttagtcactgatgcctaggtcccagttgtcatcaccgaccttccgctccccctctctgttcaccagcagacacaccactgccaatcttgcccttgcgagaccagaccaccactccctcacctgtcatttggtgacggagatctcgcgcattcacctcggtcgttacttcccacgtttcctccccagatgcccgctccacaattcctccccagatgcttg

SEQ ID NO: 672 - DNA, 291 bp, Zea Mays
gcactgcagcttcggatggatgaggagcttccagtcctccaaggcctcctcaagaaagtgaagcccttgccccgttccacgtctcctgccgccgacgagaagaagaactatgcaccatcacctgcaggacggtcatccacatcaggggctcctgttgtgtcgcgtggccacgacgtcgacgctgcgtcgtcgtcggcactgcagctccggatggatgaggagcttccagtcctccacgacatcctcaagaaagtgaagcccttgcccccttccacgtcccctgccgccgac

SEQ ID NO: 673 - DNA, 272 bp, Zea Mays
ttatatcttacaaataaaagatttaatgaccgaaataattttctattcttgtctctgagatttttaggaataaaactagacgacaaatgttgtataacatttagagatttatttatacacttttctctagtacacgtctaaggcaaacaaccaaacacgagcggtatctatcctgaatgcatcaatacaagcagccaaacacaagcatacacatggatttagcctgtacaccggagacctggctcctcacatacaggtcaggctaccaccat

SEQ ID NO: 674 - DNA, 394 bp, Zea Mays
cgaaatcgtgcaactaactttcgcgccctcttctttctatatatatacacacaccttatcatcgtgaaccacctctcttttcatcctcgcgcgacaactcctcacgcccggttcagctcggtcgtgtgccatgtcgcgtgcaccaaatcacctaaaaatgtgcctgacttgagtcccgcccgtcagtagcacaagcatacccccttgctcaaccgtttcactgatctatcggccccacatgtcgtaatcatcctttccaaaaccgcctctcctcttgaccccgcacctttgtgtcgtgcgtgcgcataaaatggaactagcatccgtgtgtgcatgtgcataagtgtcggcggcctcctctgtccctccccacgcagcagctagagcccaccgt

SEQ ID NO: 675 - DNA, 299 bp, Zea Mays
aacagcagagatggcagccataatatcaggcttaataattgtccagcaaaccttgtagaaccttcatgtgttaccatcagggtgttaccatcagggcctggagccttatctgaaggaaggcatttgatggcatcccagacttcttgttttgaaaagggggcttccagatcggctagatcataactaggcattccaagagcctccaactcaatcgcccgttccctatccatactgttccccaacagatcgatgtagaattggtccacacaggcagctttctcctcatgactggttaggac

SEQ ID NO: 676 - DNA, 436 bp, Zea Mays
ccttttcacttctctgtggcattttctctcgactgtttcttgcagggagttaacgtcgccattcatgacgattgatgcgcccgtttctcctcctcgttcctataaatcgcagcccgtgtcacaccgaaccgattcccggcctctcttctgctcccgagctccattcccctgcccacgaggaacatctgctactcgactctacacagccatgccggcatgcacgccgccacacctgtgctctgcatgtcgctcagctgtgtgctttataccgcgccgtggtgctgtaaccacacactcgtctacgtcgttcgctgtctgcacccacatcgccgaagagcctggtcgcattcctacacgttcttctccgcgcctgctgctgccgtcgcgccatcgccacaccgaacaccgtcatcatcgtcaggaagatctgtcccag

SEQ ID NO: 677 - DNA, 652 bp, Zea Mays
gtgtatgtatttattcacatttcatatacttatgactatgtgactaatacgtgctcacctcttctgtcatttcagcgatctcgcctgcccgtgtgcttgtctcatatcctgcctggattctgtctctctcgtgaggtttccaggtacttatcacttcagttatgatcttatcagctgctatctactcgtgcttagcctttcactcacttatgcagcactcaagctaggatggtgcacacgaagaatgtgtcagcgctagggagaggagacgatgagaaccctcctcgccccttcaggcaggttaagggcaagacaatatacctagagcaacaggaaggccggaagaagcggtggacggacagagccgcccgtgcagcacttgcagtggcagcatcagcagagaaggcagagcaaggtggccagctgcagatctcctcagaccagatttcctacaaagttcgtcgcctcgcgtctcggcctcgctcctccgctccctctacaccctcagccagagatactactccacctcccactgcatcaactcctgtcgctctaaagccatccaccacttccgccatacccaccacctccaccgctgcagcttccactgttccccctcccgctcccatttccgctccacccattccaccac

SEQ ID NO: 678 - DNA, 685 bp, Zea Mays
gctacccctcttctgcaactgatccagttgtgtcgcttgctgtgcaccttactgtgccactgctgcgctgctgttggtacgtcatggccgcggttggaacccacggcgccaaagtgaacggacagaggtacagtagatgcgcccagggcttcactgcctcttgtcgatcgatcggcctcacacacacggtggatccatccatttcctgtgccttcttgtccttcaagcgcgagccgtcgtccgatcggcgtggtcgcctggggggtccagatcgccactctcctgctgatggtaacccgcagtgagtggccctgctagctttcagctcgagttgcatgcatgcttgcatggcggcacgtacagcacatacgctagctagctagctgctagctcactgtgcacgtgactatcgtcaggtcgtcctggacatggcgatgccccatggcgtcgccatgcatgccaccagcggccagcctgctaatctctctgtgctcgaccgcactgcatgggcatgtgaaggcctctgattgaagtgcttaattattggctagctttccgtgagtggcagagagcgtacgtagggctagcttaagtcggaagagatgatgactttgctgttgaacgctgctgctggtggggtttacatgtttcttgcattcagtagattaattaactctgggtaagt

SEQ ID NO: 679 - DNA, 435 bp, Zea Mays
ctagtttggctaaaaattagctccagttaggcatggcatgcctggttaacaactggttggagacttggctaaaaagttagccgacctattagacccagctaaaattagctagctaacaactaacccaacatagcctccgattatgtccagaatttgtttgtacccacacacacatggttataccaggcgagcataacttcggccccacatcaggcgatctgaaaaatgaccaaactctaacaagaggtttagaatctctgtattctaagcaacaaatcacagcattagctaaatcatcctaaagatggaagttaatccatccttgtgaatcgggtctatgtgaagcacatggcatctcaggataggcacagtcacatgaaatgggataacttacgtagcctcttcaaatcagaagcaacaccatggctatggctc

SEQ ID NO: 680 - DNA, 275 bp, Zea Mays
gtcaaatcatcgccggtgaactcgccacgactgtggacacgaatccactgcgccagggttctcctttatctccggccgccagctctgcccgaccaaattgaacgccaccgttgaagccctctatatattgatggcccgggcagctgcgctacctcatcgcgaaaccagagcccccactcccaccctcaatcgttctccagagttcaccaatttcgaattctccccaaatcagttctccgccaccccgaaatccacttcaccacggccagcccttt

SEQ ID NO: 681 - DNA, 688 bp, Zea Mays
tgatgctaaggtcataacttctatagtttaagaatgacttcgggggaggaagaggtcgaagatcatggcatgctcacctatggctcaaatcgatggtgagggcttgtcctctagtttgaagagtaaggcacacgttgttcggatgtgagggtgacaatgagatggtggctgtactgtgaggttccgcggcaagggcatcgatatttataggcggaggaacgatagtttataatggagggagtctcgaccggcgtactgtgattggcgatgttgccacagtgcagtcgcaacatcccgaggttggcagggtaacttggctcatggtggggcattcatttaattatgattgcgacaagtgactggcgtgtgttcaggcgggtgcacgaggtcttgtcggagtgactttctgcactgaggtatcacttcaaggtctgcaacccggtccctttaatatagcagtttggcgtgcatgacaaggctgccttagggcagagggtgtaggtggggcttgccaggacgcacaaatgccaaggcagctagaggcaggcttacgatttatttacgcatgtgttttgccataggtggttgtgggctccctctgtctattatgggcgggcattagacgttttcaataatttaccacggtgaaagacaagcttagcctataatttagaagaatatcgaggaa

SEQ ID NO: 682 - DNA, 458 bp, Zea Mays
gaagaatgctgaagccactctagaagggtttagaagaacctagagaggaaggtagaggatacatgggagagaggaaagtggagaagggagatgaacaacaatattctgatattcgatgcatcatcctggtgaccgcactgctcctttgtagtgtttcccttagcacatggccgacatgggtcgtcacattccctaacagatcgccgcctgcccgcctacgctgtgggttaggggtgtcgtgacacaattcgcaggtaagaacctctcctctgagtctatcgtgtgcctagctacgtatagagcatgttagaactggggaagggtcactagagggctgaaccaccgctctccgtcgtggtcgccgctgcggctggcaagcgccacctcttgggtcgctgcgcctgaggagggaatgctccgggccgttgattctagagcaaacgatccagattaggtct

SEQ ID NO: 683 - DNA, 423 bp, Zea Mays
actcaaaagttcaaagttagtatacccgcgtatttcttgacaagcgtgccaacaaacatcaggatctgtggagaggactgaccatcattgtagatctgttctccagggaataagctagcttgcccaccccagagaacaacatttaccgaactgttgttgctgtttttagtttaagtatgtaggaagagtcatacaatgaagcatatgtagatgaaggcagaggaaacaaatccctatgcggctaaaaaacagtaacagctatgtataacgaacctgacactgcatagggaaatagtcctcttagagctggttgtatgttgccctctggatcggtgcggcgccacggccgagatggaagtgacaattccaatggcatctgtattggatccaatcaatgaatacaacaaaattatagccttttaa

SEQ ID NO: 684 - DNA, 861 bp, Zea Mays
tccagacatcacagtggataagatcaaaattgcctactgctctagaagagggggaagaaaaagaaagtctcacatatctacctaactgacaggcatgacacaagtggtcaaaagaaccccgactacaagagatgacaaaactgatagacaactttgacatcacatcacgcccgagatggccaaggcggcggtgccaagtgatggacgaggtagcagcggtcagcgcatgtggggtggaggtcgaggaagaggcggcaggcaggcgaagggtataaagtggcacggggctgtcatagcgggcgagaagggtcctcatagcaagatccttcacagacaagccaaaggggtcaaactccatagaacaagagttgtcagtggtaaattgacgaacataaagaagactatgaatgatgttgggggcaacaagaacatttctgaggcggaaggggaaaggaaggaccgcatcacctactgaggtgacggggatgaccgacccatcgccaatgacgatggaagacaagagagagggatgaggagtgagagtggaagtaccgacgtaaggggtggtgtggtagaaagcaccggagttagccacccaatctgagaccgaagtgggcggagcgagagtcattgtgctaaaggacctagcaagagactgtgtcccatccgccaccccaagggccccacgagtgtgcaggggaggtgggcagtaggggcaggagacccggctggaggcaaggtggtgtcagggtagccggaagcgctaacaagggtggagcagcgtagaagataggctgaggggaggccgagcgtggcccaggagggcccgcaggcagtgcaggccacatggagatggagcca

SEQ ID NO: 685 - DNA, 802 bp, Zea Mays
gtcacctgcttgtgggccctcttggtcagtgacccccacaacctccatgactcagtcgcatgctgctacaccctcaactaccgataggcggggcccacgttgtcagctgtgtatgtggtgcgtgtgcctgggtgtcccgtctcactgccaggtgggcccctgttaccgggtctccttctcccccacgcgactcgctcgcgagctcaccggccgccgggaaattcggggtagttaggccggttgattacctccgcccacctctgcaactataagtccctgccgcaacctcttgcctcacctctctgtttccctggtcgagccatcatcacccccgcgcgccatagccgatgcagagaggagaggattagggagggtggttgcgccaccgttgctgctcaattcgccgctgcgcagagccaagacagggtaccagggagatttgctgtgacgtcggggtcttctaatcatgatctgggcgaccaaacgcacgggcaacgactgggccaggaaggatttctcgccgtaattcaatcaccgccgtggagctccacctccgcgtggtcagggccaccaccgccacaatccgaggtgaagaaaccctcatctagtttgtctcgttggttaaatcgtgtagctccgttcaatgtgacaaagatagggggtagcaggatcggtctgcgccggcgtggggcacgccgccgtggagatcgaagtgtcgctagctgtgcactatgggtagaagaaaaccctcgtccgctgatctaaccaccaatggctaggattaggtcgagctgtatccttc

SEQ ID NO: 686 - DNA, 672 bp, Zea Mays
cgatcaacgcgatcttcctcaagggtatgcccttgaggtttcttgagccagcttctctctaaggtataccttagagagaggtgcttgacggggacaagggtatgcccttgaggtttcttgagctagcttctctaaggtatgccttagagagaggtggttgacggggacaagggtatgcccttgaggtttcttgagccagcttctctctaaggtatgccttagagagaggtgcttgacggggaatttcctgccgatggagcgcgcaaatatattttttgaacattattaacatagaatttcaatttccacgtacaacttaccgcatatattcacgataatttatacatatgtgtggagtataattatttttggcatgatatcgaccttagcacttgttcctgatttcgtataaacaacacgagtcgaagaacataattcttccacgatggcaaagaagacaaggaacggtatatcaacatgggggcttttcttaccttgcagtagacctttctgatagaccacaacggcgtatatgcccgtgcagtgtgatctctctcaagggtatgcccttgagattgcgtataacccgacgatgcgaccttcctcaagggtatgcccttaaggttgtagaaccagtttctttctaaagtatgctttagacagaggtgtttg

SEQ ID NO: 687 - DNA, 515 bp, Zea Mays
atttgttatgaataagatatagatttctttacagaaatcctgtggaaatagtatatcttttaaaggtgtggatatggttttatattagggagaaggagataccggatacctgacacatcttgcatgtgattggttggaggtttgaagagaacggcacatgatggatggcaggatgcatggggacgtgtccatcgggaccagaggtaacgacgttcgtctccaggatctagacaaaaaacacaatattcctgcgtaccgtcggtacaccgttagtactacgcgcacgcgcgtattttatgtgtgcccgttgcactacagaaagtgaagtgggttcgatgattattaaaatcaataccgagttaattagtgcataacagttccgtcccatccgtatgctacggaattacggacgtcgtcccggtcccgagtcccgacaggacaaaagaacagaggaggaccaccgtcatgtgccgcccccccgtgtacgcacgcacggcacgtacacggaccacacg

SEQ ID NO: 688 - DNA, 463 bp, Zea Mays
gctaagactaagatgactgtggctacgatggaagagcaaagacaggccgtggaccgccatgagactaccgtgtgacaaaattgatgaagacctcttcaatgcctccacaactgttacggtaggcaatggaaagatagcgggattctggaattctcgttggatccaaggccaagcccctagaaatattgtgccgtcactgttcaagaaggcaaagaggaagaacatcacggtcgccaaagcgctcactaacaacacttggattcgattatgctacccattctcgggtgagggagagtttagtgagttcgtctccctttggcaggccattggtagcatgccagagctcaacgggttagaggacaacatttcttggagatggacggcagatgggcagtacagtgctagcagtgcatacaaaatacaattcgcttccaatttcagcagaatgaatctctgccccatt

SEQ ID NO: 689 - DNA, 514 bp, Zea Mays
gattttttagtcaatttaagatcttacctaacactactgctaccactagtagtagtattcaagtaggagtgtgtacatgttccgtgctgaaaacacactgtagaagttgcactcttccagttgctcggcttggcacgtgccttgtacaaattcccttcctcctcctgctgctaccaatcacacgctggacaagtatcggtccactgacagcaacgccgtggaattccgtgctagtacttctttctgttttcatcactgccaccctcgctactagtggtgggaccaatacgcaaccatcttgtatcatcaagacacaaccatcttgtgcaatcaagacacaaatactcccaaatactagtggtgggaccgaccaatacataaccaccaaccagtactacagcacaataccaatcccaagaaacggacgcaaaaaagtctcggtacgaagcgtagtctgacacagcaaacctacgcgcgaaatcttctgacagtgacaggctcactcagaccgtgc

SEQ ID NO: 690 - DNA, 522 bp, Zea Mays
cccgatcgcacctctgtgcccgcgcccacgcctattatagcccacaagacctcgatcgtactccctcgcatgtcttcactcccgcccgagcctgagatcaccggagttcgccgctaagagcaagcaccaccgcctgccatcaccacacgagcacggccgccatgaccagccattcctgtagaccccaacctcgcccgagccctttgacagcttacccgagaggccgtgaagatttcccaagcttgagccaaggccctacatcgccggaacagtgagatcggcctcaccggacttcggccgctagccgccgcacgtggaccggactacaaggtgagccattcccaaagtccatgcacccacgacctcactaaccttccgtgaagctccctgactcactagatcgaactctaccactgtgttcagatgagcttctcgccgccgacgagctcgcccgcctgcgcatgaggccagaatagctctagccaccacaggcgacgagccgaccatcaacgtgagcctcgt

SEQ ID NO: 691 - DNA, 634 bp, Zea Mays
tcgggatgctggtccttcggctcctgctgctgaggaagttcccgtgcctgagcttactgatgctgaccttaatgagggtgctctacccgctgctgaccctaatgggagtgctccacctgttgctgaccccaatgggtgtgttgtctatgttgctgatgaggacgacggggaggaagaggatgaggtccctctgactcggaagaaaagtcggcagtacgtcgccagtggtgaaagtagtggagttccttctcctgctttgtctgcccttatttgtctacaagagttgtccctggcaaactttgatcaaactcttgaggatatggttccagaaaacctgctatcagagccaacggatcttgctgtgatggaggtttgtgctgatgtgctcgatgttgggttgaggtcatcccgcgcctcatcgaccttagagcgcggtcttgagggtcaggagactgacttggatcgtcttgctcccatggaagtatttgagggaccctcagccttagaggcggctactgcagagaacttggtcctcaaggatggtgctgatacttgcccagcccccgaggatgttgccggggatgactcggcttgggtgggaaacgcaagccactgcccagcccccgagggtact

SEQ ID NO: 692 - DNA, 387 bp, Zea Mays
gggagctattggcgtccaggtacagcttgtccaagttgttctgggagtcaagaagtttctgcatctcgtcctgcagatgggagaacccttgataataggtcgaaagcatgggataagagacttggagctcccgacgagttaccttgtgagttttcttctccgagtcaagcttcacatgcagggaggaattcatggcacgggcgccgtcaagaaacatagtcacctgatcaagatccgcctgacttcatgcacacctctcctcagcatcagaatgccgtcgagtcaaagctaaaaaaaagcagcaacggtctgtaatatgaacaggaaggaaacaagcacaggaagcgctatcattttgctcactggcgtttgtagatttcatttcat

SEQ ID NO: 693 - DNA, 373 bp, Zea Mays
tgaacgggaggttaacctccgcaacgtcgaactggacgttctctatgcggaagttttcctctgtcccgaatgtaaccgggagcgtgatgctcccaaggggatacaccggttgagcacccactctagagaatggacgagagggtcccagtcgggaccctgggatctgtagctgcctgaatgcagcgtggctgatgacgttgagcccagccccaccgtcgatcagaacatgatgcagcttgatgttggcgatgacaggggcggtgatgagcggcagtatgccggcccctgccatgttctcggggcagtcggatgcaccgaaggagatagtggtgctccgccaccgctggtgtggggccgccttcgggacccctgg

SEQ ID NO: 694 - DNA, 693 bp, Zea Mays
gaaaaagtggaagggaatatgagaataagagaaggtcgcatagaggtgcctcacggcgacgtagacctcagtgcacggcgcggtgcctgagctcgcgcgcgttgaccttggcagccgtggcagtccgtgctgtcgtgaagaggcagtcaccatcggggacggttgcgcacggggaggctgacgcacggagtgaacgcgggggcagctcgcgtgggggatgtggggaggcagcggatgcagacggacaagcgagatctaggttcctcagaagacgatgtcgtggagctgtctgtggatctgcggtgcacgcgggggtggggacggttgaggtcgccgaccggtggggtggtggagtccgccggtgggggaggaggaggccgttgtggttgtgccgcgcgttgaagagagggggagttgcaggtcgctggagttggaggatgttgttctgccgtggtggaggttgcgcggccgaggcaatggatactgggccgcacgttgaagaggaggggcgctgggctgctgggccgcacgtcgaattgctgggctgcactggtatgggatttgtttgattagtaccataccggtcattgaaagagacggaacgtggcttataagcgttgttgtggatcatctgttgctcattctaacacctccggctctagtgccacactgaggtacgtctttttgcgcggg

SEQ ID NO: 695 - DNA, 370 bp, Zea Mays
gtcagcactgtctctccacgcgagtcgacttcggaagacctccaggtgcagcaggcggaagcagccgtgtccgaggagctacagcagcaacagagcaatgtggagactggtgggcctcaagaggagactactacagctgggctgagaaggggaacacgccagcgtaaggccaatgtgagattccagggcccagaatggagaacctgaagatatacgctcgctgagacctacggaggaggcaggatgtaacagaactacgtttatcttcttcctcaagtttcttcttctcctctcgctactgtcttccctgctactgctactctgtaattctgtttccaccaagcgaatacatcctcgcagcaaataccgg

SEQ ID NO: 696 - DNA, 641 bp, Zea Mays
tcaagaacatgggttggggccgattgatcagtgtttctcaaccattgctcaacttgaattagttaacacacaagtcacctaaatagcacatttttggggtctatcgtggaggcatttacacatggcgtaaaactccataagactacatttgctactggcatcaacaatacctaccgacctattattcaccatacgaacgcaggttacccgccgcttactagtttttaacataatcctcatatagctcggaattccaactactcactaacaataaattacgcacgaccactaccacatcgacccggttaatttatttggacaccgcctagcgtaccactagtaccccacattttgattcaaggtcaataatacatcctttattcgattataccacagtgacctaagcgtcgtgttacccaatgtgtacatcttttcttgttgcgagtataaccatatcacggcatatacccgcacacctcaaacaaatatctcacgccaccactaccatatcacaccacagcacacacacacatacgtgcactaattaaatcctcgcatcccatgtatttgcagacttactcatcacataaaataagcacgacacatttatttaccaaaacatgaatgcgaccttgccacgg

SEQ ID NO: 697 - DNA, 309 bp, Zea Mays
aaaattagtaaacttaaggaagtttgacactggacaactctagaagttgatttagcagggggcttagggagtatattgctatagtcaaggaacgtcagctcagtagtaacacaaagatcaaatctttggaagtaatgtcgcaatcggtgttctcgtaaataatatcaggggtgtttctgcagatgcattgtcattagggtgtcagccacaaggtaggattgcatcccttgtctccttaagctaatagctatatataggctggtaggatatgcatttctccatttttgttttatgttctaactcattctt

SEQ ID NO: 698 - DNA, 455 bp, Zea Mays
ttgccatatatttttttgtcacacttgcctaagattaggcgctctaattctacaccacatcttggcaaagcctaacaattgtggctacaaaccaaacacactcctaagccggtcaaatctatctaaccttaggcgtggcaaactgtgacaggttaggcagcgaagagcgaaccaaacatccccatagagtacagagacttgggagacaagacacctcccccgacacatatggtagaactaggttacaacatcctacctaccaaatatactcttaacagtattgttaaagtagaactataatatacatcatcctaccttcctttcttaatataatgatgcacatctcccctccgcattcgagaaaaaaagtagaactataataggcaatttgataattttgtttggatatggtgctaactgctaagggaactcaaagacatctgtgtatgtttgca

SEQ ID NO: 699 - DNA, 348 bp, Zea Mays
ttgcagaggggtgcctttgtgattaagacagatcacaaatctttgacattcctgggagatcagcagttacaatcagatcttcaaaagaaggctatgaccaagttaatggggctgcagtttcagattgtatataaaaagggggcagagaatgtggttgctgatgctttatcaaggaggagttcagtattggagttagctgccatttctgaagcgcaaccagtttgggtacaggaggtgctaaattcttattctaccgattctgaagctcacagttgataactcagttgctggtacgcagtcctgatgaaaatgggttttcattgtatcaaggcattattcgcaaggcag

SEQ ID NO: 700 - DNA, 677 bp, Zea Mays
gacggggtcggggagcatcaggggcacacaaggacattgaaacgaaagagcagagggtatgagcggacctgagacgagctagccacgacgagacctctttcacggtggtagaaagcaagtttgggggaaatccataattggtgagctctgttgagtaattggagtcatggctgggtgtcttgagtgcatgactaccctacgaacccatcagcgtgctcaatttatagcgtgcttgggcggtggtgttcaatttggacgaattgtgctggcggtcgagaggggagctgagtcactggcgcgctgattcgtggccttcaccgtggcaaacccaccggcgacgagccaaggctgaggagcggtttatggtgactcaccgtgatgtggtaaagtgttgaggcacgtagcctggccggataacgacgaactctggtgatgccaacgcgactaaccacggcgggacatggcgaccggtgagaacagtggccagagtttatctacacgacgatctttacccccccccccccctgagccacatctggtactttgcagagcccaaatcacaacggcaacgagaatcccggcgcaagatcgccggcggcgaggggatatgaacctgatcctatctgtttaatgtaccatgggattgttcttcagtcagcctgacagaccatgtttgg

SEQ ID NO: 701 - DNA, 692 bp, Zea Mays
cctgcggcgttgatgactatggtcaacaggtaaagtcttccacatttttttaatatgtacaatcattgcatatttttccatacttctgaatttgtattcgtttgtgttccaataggtggtggccagagactcacactttccacctgcagcgagatgaccgtgacgctggaagattgtcagaagattcttggtctcagcatttggggttgtccagtgatcggtcaggcagcagctgatggttggaggcagagggttgaggccttacttgggagactgcttcctgatgacctactaggtagccacaccaccagaatcgcaatctataagtaactaatcatcagagtcatctgtcgtgcaatcctcaatgataacctcattccacttgttgcattgtcctacatcacacttttctgcatttctcttgtaataattggcttctacttcatctacagcttgggagaatagctaatcctcatcctcagcctcaacctcagcctcatcacacttctgcttgtaataagcggcctctacctcttcggcggcctaagacataaactcatcctcctcctcctgagcacgtaatcctgcctcagttagtgcgatgagctcactcaaccttgatgtgtcgtcctcctcttcccatgtaatcctgcctcagcgagagcgataagctcactcaaccttgatgtgtc

SEQ ID NO: 702 - DNA, 432 bp, Zea Mays
tagtattggtaaggacaccagatgctgcttcaactcttgaaaggcttgttctgcctctttggtccaagagaatgggtcagacttccacaacagcttgaagaaaggcagcgccctctcagccagccttgaaatgaagtggttaagggcggctaatgacctcgtaagcttctggacgtccttgatacgggccggaggcctcatcgcctcaatcgctttaatcttctccgggtttgcttcaatgccccgctacgaaactaggaaccccagcaactttcctgtggagacaccaaagacgcacttgtacgggttcaacttcgtgcgtgttgcccgtagcttgtcgaagaccagggttaaatcttccactaggtcgaccctctcttagtcttgaccatgatgtcatcgacgtatacctctactctgtccttgatcagg

SEQ ID NO: 703 - DNA, 434 bp, Zea Mays
gtttgtaagaacttggactactttgtaatgatcctcgtatatgggcggactgtggaaaaataataaaaaccacagggtctctttcgcataattgcgtcaatgaaggggtacactctattcgaggtcgttagatcaatttcggatggcctagattaaatcaaggcaagacccgaaccggtatgcgctgaacaccattgatgccgagatcagcggccaagataagatctcatcccctggtgaaccggtatgctatgactgccctccgatcttgattcggtgtccaggatctaatgcccaaataggtaaacaagacttctaatcctggccatctaccaaggatcccacggtgtggcaatcatccatcgaccgaccgccccaagcggcagcatagacgccctggcaccatggccggagcacgacctatcctcgctccc

SEQ ID NO: 704 - DNA, 408 bp, Zea Mays
cagcctcgggcccctctacacgccctgcctgcttcccctacatcgaccactgctccgcctgtccttgcagcgaccgcatcctttgtgacttggcatcatcgtctcggccaccccgggcgtgatgtgatgtccaagctctctagtagtacctctgtttctggttgtaggggatcttttgagcacctctgtcatgcttgtcagttaggtcgccatgttaggctcacgttccccctcctcctcctctagggtagcaggcacttttgatctaatacactgtgatgtatggacatcccctgtaatcagcatttctggctataagtattactatttgtgtacttttcccttacatcagaagttggacacctttcccaccctgtctcacttcttcgcttgggtctccactcagtt

SEQ ID NO: 705 - DNA, 620 bp, Zea Mays
ctaaggagtgccacgcattggaccaagcagacgcagatcccaatgactggagggagccaattatcaaatacataaaaaaatgaggaagaaccagatgacaaggccacggcagaacgcatcgtgagagagtcagcccactataccatcatagggggtctactatatagaagaggtgcaggaggagtcctcatgaagtgtgttcactcggctaccggaaggcagctgctggatgaaattcatgcggggcaatgtggcgtgcatgcagcatcaaggacatatgtagggaaagcttccaggtccgggttctactgaccaacaacagagaatgatgcagcagagttggttcagaagtgtgaagcatgccaattcttatcaaagcagcaacacttacccgcccaacatttgcaaactattcctgtaacctggcctttcgcgtgctgggggctggacatgattgggccattcaaaaaagttcaagggggtatacacacatactcgtcgctattaacaagttcacaaaatggatagagtacaagcccatcgcctctttgacctaagcaaaagctgtggaattcattcaaaaaataatgtttaggttcgggatacctaacagtattatc

SEQ ID NO: 706 - DNA, 491 bp, Zea Mays
aagtaaaacacacccaaagagtctctatcaattcggggtgcatgtttcagtttggataactaaacttggtttagttggcgtgaggtgcactgaacctcaccgtcgccaacgtgctttgcgcgtcgtgatttggtttgagtcattagattcgtgctatgggcatgcaatcaatagcgccactgcatcgttctacaggttgaacaaagatttggctttaaagttatccgctcgccatgccacttcattgttggccctattctggataagctcatcgccacaacgatcgttgtagcttcgggtgtggccacacagctggtcagcttgggcacgtcctctgctgcggtgtcaaagttctaggtgtttgtgtgccacgcaatcctgtaatgtcgccattgttttcacttggagtttcctgtcaccgcgccatcctctctcctctctatccaaattgaccaaagtgcgagtagcttccattaaactgagcaaaacgt

SEQ ID NO: 707 - DNA, 555 bp, Zea Mays
cggatgcggcggttgtaacagccaccaagatcaccggagggagggttgttaagctttgcgcagatccagcgaagaagacggagtccgttcgggtgcgattctctgtgatctggtgcgactcgataaagatggtggagctgccatgtgggacccacgttccagcgccagagatagcgggtttggtgggcgcagaggccgattgacaggcgggacccgccaggcggtgagtacgagcatgagctcggttggttgggctgctcagagcaagggagatgggccgcatggggcaatttcggcccaggtgaggtagaattgttttgtttttttgttcatttccatttcccatttctagttttcaaacttgaattcaattatgtgttttaaattctcatccaaaattctagcatgatgaaattattttgaattcaaattcgaatctaggttcaggattcacattcatatgcatcattataacaacacctccgcatgcaaaatataattttatgttatttatttctcatctcattcatttatgcttatgcttttaaatgtgca

SEQ ID NO: 708 - DNA, 467 bp, Zea Mays
gcgactggtgtcggctggaaggaggtttcacttttcagtcaatggggcagtacgactagggagaactcaagaaggtcagctactttctcacactcttactatccggctcttagttgctttcgaccttattcctggttaactacttgataatctgaccaaatctgataccttgttgacgctatttgctaggagtgggaacagagatcaaaatggttccacatacctatatctgacgcttctattccagcgacgaggggtcaacgagaagtctttgagcatggtaagataacctatgtggcatctttggtaacccatcaacataattgttatttgtatattctgttttactttcatataaaaatgagtggtaatctctactattctataaggactcaatgtgggcgtccactcttggcttcaccgtgcacctgcccttccccaccgcccctctagcgcctccatcgcac

SEQ ID NO: 709 - DNA, 548 bp, Zea Mays
ctttaccgcgctaggtccccgacgacggcagcgcgcggaggagctccggcgagccactgcaccggccgattgaggcgatgaccggcgccaatctttagtttacaccggattctacccctaaggagtatttcccctcactcaattgcgcttataatcaactatggagcgctggccacggtggccgtgagcatggcggctatactgtcgtgttcccggcgaccagaggacccctagtccaattggatggtccagtaagcatcgcagacatgtgagagagctcaaacgaggaagagggagggttggactgaccgaaaaaagggctggcgacggtgaggtgaactttgcggtggcggaaaccagttttggggagaactaggaattctcgagctctggtgaggaactgctaacaattaacggtggctgagtgcgtgaggatggggtgaagctcactgcggggtcaatttatagaagggtaagacgatggccgcgaattttgaggaggacgcgcggcggccggaggtggaagaaagtactggtgcacgcgaatt

SEQ ID NO: 710 - DNA, 855 bp, Zea Mays
tactagatgatggtcatgtatggatgggtatcattgtacactcctcccgtcgcaaatcagcgccaccacattttcagaccggttaaacattttcaaacttgattaaatttatgaaaagatattagtattgtttttatattaaaacaagtttattatgaaatttgtatgcaactgaggatttgggatgctcaatattctttgtatttggaacatatgcatcatgattggcacgctaggaaggaggtgcacctttttgctctaggttcgtttcttccctctcttcgtgatgcttcttatgttccctaaagcttgtgcccatctcgctgatcttggctaccctttgacaattcaatcagtaagttaggcgtcaagaaagaggaggcatgggttagattagcgtatagctggaactaagattgatcttgacataggtgcactttagagagcatcaggatatgttccataaaatgttctagtggagtgttcatctcgagaagcttgcaaaggtactgagaagatgttccacactgcttttggaccaaccagcatgcctaggacgtttcttccttatctgatcactactttcaatgggataagcattagaccagattgccaaggtttttaagctctatatgttggtctgggtatgtaagttagctattattaacacatgtccttagttctgtcaccttctccctgatgttaccttgttcattcatcaaatgttgtttgataaagtgctaggatgtgaaagaataggtaacacttcccttacagatgtatggaaatatggtaatgatcagtatgtgttgactaaccccaaaataggacacactacactgcaaaccactaagc

SEQ ID NO: 711 - DNA, 434 bp, Zea Mays
ttggggagggagaggggcgagccgcacggcaggagagtgtagatgtcgcctgtgacagagatctgacagtggagagtcgatgctcaccgcagggtgaaggaaaggggattagggttagggattggggatcaagcggtggcgagcgggtgtgggtgctggtgtgccgcactctagtggacactggagatgtcatcgactagtgatggagatctagcaccggtaatggagactcaaggcggtgacagagatctaggaagaccgagcgagcggtggtgagagtggggaggggcgagcagggaggaagggacatgggacggcaggatgagcaagtatgggagtcgggagtgtggcatgtcatgtgtgggcaggcctaaatgtcctcgcctcgccaccgggccagcgatgtgcctgttgttttctagtgggccacccgc

SEQ ID NO: 712 - DNA, 765 bp, Zea Mays
atagcaagcacccaaaaagtagttaggtctgagaagacgactagaatgagcatgcatcatgattgtcgcataattgtctcttgtgcactaacatgcttctctcacctttattccaataataaaaacttgtgaataatgtgttgtatcgctatgttatgaaatataagaaataccttatctcttgcctaattagtaagtcttgctaggtcgtgttatgtgtctctcttgccttgctatctaggtggtattgaaattgttcaaccttttttttaaaaaaaatgttgtttgtttcctcaaaaaaaacacccccactttaaacaacctagtggttagcaagtaaaacctcaaaaaaaaatatttatgcttgtgttagtgttttctaacccttgtgtgttttaccctgacatgcacctgcacagcttatagacccccacaacttgaccgctagaccaacccaagtctccttgtgcacttgtgtcaaaaaaaaattgttgttggtgtctagttgcgcaaaccctatcaaggccacgtttctttccataaatccttgctcctaaaacttcatagcatttctgttaatcatcctagctgatccagtttgcctacctctccttttgtctggatctggtaatcctttttcttgtgaatcatgttggctttatcatccgaatctctaatcctttaatgattctgccccgttatctggttatctgctataacccgttctcaagtaccggatgttgatctcgcctaaatctctcattt

SEQ ID NO: 713 - DNA, 655 bp, Zea Mays
gaaaccggtttggctctacgtcgtctcttgtgaatccgctgcctttttgattggagaccgtcagcatcatgagaaatcaagcccccgccatctccctccattgatgatggtttctagtgtcgaacagcaatatctgtatcttttggaggatgttgattatctttccttctccacaccattttcttcaccttgatcactgaagatgaagagaggctcctccagaccgagatctgtgtctcaggtcgaggctgcttccttagactatctccactgatcgcacttggctccggaaggttgatcctcctccaaaccgagatcttagtctcaggtcgagaggcaacactgttgttcaccaccaccttcccagactcaatcctctaccacaccggtcttttaagcagactgcattcaaaagaacgatgtccctgttcccggcaccgaaaacacctcgtcttctgcgtacactggaaggaaaagtgatcttgagagaggcagttaaagcatctgccagccaagtcttctgggacgggccgccgttgtcgttgcggctccagcttcaatcggcgccgttttgactgtttggattccaccaactgccatccaccgactagcttctctgcgctccgagcaacctgagccatgcccgaagccgtcg

SEQ ID NO: 714 - DNA, 691 bp, Zea Mays
gcagaattgatctacctgccaacccattcaacggaagggtacttagacagcaacaacaacaagccgagatgaatcctccgaatcctccaaatcctccacccaccagaactgatccagcagttgcagcccagatgcggataatgcaacagatggctgatactatggcagatatgcacgggcagatacgataggagcgtcaggagatgcgccaagagagagaagagatgcgccaagagcgaagggtgcaacagcagcaagcaccactgccaccacctctaccaccacttccaccccggtacaagcaccgagaattcatgagccataagtcgcctaccttcgccagctctccagatcctctgcacgccgatgactggttgaagtcagtggagaagatgttgaatattgcacaatgttctgaccggaagaaggtttttatgctttgactggccctgctactgattggtgggattcctacactgctgcccacgatgctgctgatactatcacatgggcggaatttgctactcagttcagaaactatcatattactgttggactgatgaagatcaagaagaaggaatttctatcgctgaagcaggggagcatgtcagtcaacgagtaccacgacagattcattcagctctctagatatgcatcggatgaagtggctgaagatgagagaaagcaagaa

SEQ ID NO: 715 - DNA, 554 bp, Zea Mays
cttggttggtaatcccgtcgggcaagaaataacccagacagtttctcacgtttcttcgaccttggacggcggcctagctcgcgggaacacactggctcttgacattgcaggccagggttacccagctccggtgggtatgactgagggtgcttcagcttccgaaggtgccgctgaggataacccaaccctcgagggtggtgttgaggatgacccaacccccaagggtgctgagcttggttcgtcttcggctgcttccatggacgttcatgtcagatcgccaccggttcaatctgaggaacttgatgtgacgagtcctcctactgcccttgtcggttcggtcactttagaggccagtggctcagatgccgggaatccgccgcatgttgtcggagctaaggtctccctgagtgatgctcacaacattgtctctaccgatactccatcatcagacactgcaccgatgcctctggctctgggatttccgttattcctttctaacctccaggtgagccaatctttgccttgcattatttatgttgacaaacaggttccct

SEQ ID NO: 716 - DNA, 745 bp, Zea Mays
caatgagcatccttagcacaccagggtgcagtaacaagagcgatgagggtgtgaacggacctgtagagagctggccacagcgagctcacacacggcggggttcttgactgatttgggggaaatcccaaattggggagctatgggggacaattggaggtgagggctggttcactgggtgcacgattacttagcggagcaggctggggcaccaatttatagtgtccaagggcggtggctcctaattttggcatggtgtgctagcggctggagagaaagaaggtcactggtggctcagtcgtggcgttcaccggtgcagcggttctgagatggtaagcctaggcttgccacagttactactgcgcagtaaagagccacggcgtggcataattggggtcgccggagttccacgacgacaccgacggtccggccacgtcgcacggctacaggcgcggttgataagcttcaccccgcgaccaaatccgctccccctccgatcttttcaccccccggtactatcctgcccgagtcctacacaaatcaccgcgatcagcgcgaatccttgcgcagaggtcaccggcggcgaggggggctaaacctgagatctttctgcgtactgtaccatgcgatgcttattcagagtgcctaaccgagtgttttgctaggcttagatctctaattttcatacaacaacttgttaatccacctgtaacaaagttgttggtctataatccaacttttattttgc

SEQ ID NO: 717 - DNA, 579 bp, Zea Mays
atgaatttaagttagcattccgtgagcactatattccagaaggggtgcttcacatgaaacaagaggagtttattcgactgaaacaaggagggatactgtgatgtagtatctcaacacgtttaatcatttatcccaatatgcaattgaccaagcaaacactgacctaaaaaagaagaactgctttatgagatgactcaacaaccggctccaaaggaaaatggccacctgcctagatcttacatacagaaggctgtcacacggcgctggcagtagaagccaagaatacaggccaaggaaaatccaagggatttggaggtgacaggtccaatcagggacctaagaagcgaacaaggttggtaatccgacctttcaatcagaatcgttcttcgcctcgtccaccctcctatccattcaaacagcctgttttcattcgccctgccactgcccccacttctacaaatcagccaagagcccctagtgctcgtttccccgccctccctagttcctcaactggctgcttcaactgtgggaagtttggtcattttatcaaagactgcccatatccgaggcagaataagt

SEQ ID NO: 718 - DNA, 813 bp, Zea Mays
caaaaatcatttcagtatttattgaagacgccttatctatacattatagtgtaaattacaagtttttgaggtaagccatgtacattcaactatgtgcttctgtagggcaacacaaactaccgcatcatatagcccaaatgtcggtttcacaacaagtcattacttacaaaaacggtggaaaaattctcgcttgatcaaacacacagtttgcatattaacactttagcagcaaaatgacttgtcgtcttgcccttgtgacaaaacataagaatcagaaactctgagatgaatcatcgtgccataaacctaaaaaaccaatgaaccaatgaaacagacatagtatattacaacccatacggtggatgtaataacataaattcttttaggttccttttgtttttgttctttctctcagggagcaaacctcccagataaaccaagcgacaatgaggaactaaaatcggcaccataaacacgaatgattagatcccacagtgcaactggttgtctgcatgcaccctaggtcaggtgatatacttcgaaggtaacctaaaactgagaccactctctatctatccatttattagctatttcctcatttagtgtttttgtaataaaaaactaacatgttgagctcagatgctctgtttttcctctgcatatatgtaaaacatgcttgtgtcctcctcttgtctgagggggggatcggttactattgggggttatttctattcactgagagctcaagcattgcaatgtattttgcgttgatacacgtctttacttcagtataaaataaccctgacctcaccg

SEQ ID NO: 719 - DNA, 685 bp, Zea Mays
gcttgcagatgagaagaacacactattggaacagataaagaacaaggtaatccttgtagggtgctttaagccacatcaccatcattatcatgtttgtttccctaatgaaagcaaatgcagtcaaattaagctaaaagtgcctggaaccaatttgaattgtttcagtctttcaacttgaagcctgttcttgcaaagagaccaaatgtaatgggtggtccaaaaactaacttacaagtggtggccattctagagagagcccatgcgattcgccaggttacaagtcattccattgcttcctagctacaatttcagtcaatcgtagctgtatcatctatgattaaatgatgattatttcttttaaaacaggctgttgctgatgacgatgacgacgatagctggagtgagtagctggctcttccccaaagcgatttcggctcctgatgtttcagaagtgattgcatcgatcagacctttgtgtccctgttcttgcatggagcaaaagatgaaatagagccaagttaccacaggttttcatgccaagacaattggcatggaccaggtgatgcccatggatgggcaggaacggtagaagcaacgttgcaactgcaaacgtagtgtgtctctacttgtactatctgtgaagtttcgaagtgcgtcaatgtttattacctttcgatgcgcctct

SEQ ID NO: 720 - DNA, 627 bp, Zea Mays
aaagccgcctaagggtgcagccagataagcacaacaagtgcacgatacgaagtctttactaaaacacggatccgagcaaataaaaagccgcccaagggtgcagccggatatgcacaagaagtgcatcatacgaggtctttactataagtcatccgagcaaaggccacctaagggtgcagccggacatgcaaatacgtgacatcaccctaatggcacaaagtctattacgatcaccttaacggtgcgaagtctatgctatctgacatggtcaaacaaaaaccaccaaaggacgcaaccaggtacgcgtcataagcatccacacatcgttgtggcaagcgaagtccccatctcatttcacaacaagcaatgtcatcatagtttacatacaaatagcgaagggccaccggccacattgcacaaataacacaaatcgcattttgttgccctccctctctattgcgagtcgagggacggcagcgttttcactcactaccgcaacaagaaagcaaggacagcaaacatgctacatcggctcagccttcgggataaggcctgcctcatgaaaattaaacaacatcatcctcaactcctcaccctcaaaaagattccgcagatccccctccccaa

SEQ ID NO: 721 - DNA, 746 bp, Zea Mays
cagccgccatgattctgtgctctctggtgtgcggattatgatcggcagtgaaaagatcttcaccgtggatgagatcgtgagttggccccatacccacttgccctgcggccgatcctggtgacctcgctagagtttgccgcctgccactcggatgccacggggctcgaagatttaccacgtcgcagtgaactagaataagaagcgtgtccatcgcctgaagcattgcctcagtgaccgccacggtagctcgcgccagtgacttccccttctctccggctgccagcgtttccctttcaaattcggagccgccacccaaagtttctataatatgatgccccagctttctccgctaggttgttacgaagctagagcatcagccctcaccttcgattagccaccgtagcgccccaatttcgttcttcccccaaattggttctccgctccgccgttagcatcgcgccgtggccagccgcccacatgttgattcatgcttctctgcttggtgttctagcatcccttaagtctcctgttgctcgtagactcgattgattgaactagaccgcgctgaatcacctagaacacctcagttttccttcgggtctcgccgtcgtcgtaggcagaagaattcagggccggattcgtgcaattggtggagggattagggtcgccacgggtggaattaggtgtcaaccaagttagaaccctagtcgttgcgtattccagccggtataggttcgccggagcac

SEQ ID NO: 722 - DNA, 984 bp, Zea Mays
tatgcgcgccgagtgtgccgcgccagtttaagttagtattaactcaaaccgatcgctctgtgagtgtggtttagtggccaccccaagttaagcacgcgcgagcatgtggcaccgtcttaagtcatcgccgacttaagccgattgctccgttagcagggcatagtggtcaccccgagttaagtaagcacgagcatgttgcaccgtcttaagtcgttgccgacttaagccgattgctccgttagcagggcatagtggtcaccccgagttaagtaagcgcgagcatgttgcaccgtcttaagtcgttgtcgacttaagccgattgttccgttagcagggcatagtggtcaccccgagttaagtaagcgcgagcatgttgcaccgtcttaagtcattgccgacttaagtcgattgctctgttagcagggcatagtggtcaccccgagttaagtaagcgcgagcatgttgcaccatcttaagtcgttgccgacttaagccgattgctccgttagcagggcatagtggtcacccgagttaagtaagcgcgagcatgttgcaccgtcttaagtcgttgccgacttaagccgattgctccgttagcagggcatagtggtcaccctgagttaagtaagaatgcagattgaccatgaacaatttgagtattcttgaggcctttttattgatgatatatttcccagtttacagagtacattgtcgccctgatagcttttgaagtgcagctaggggtaaaacttcttgaggtgttctatgttccatgagttcccaatttctgtgccgtccatctgagtgagacgatatgatctcggccgagtgacttctgctactatgaatggtccttcccatagaggtgacaacttgtgccgtccttcacccgttagaattcggcggaggacgagatctcccactgcaaaggatcgacgacgcatggtcttatcatgatagcgtctcaaagtttgttgataccgt

SEQ ID NO: 723 - DNA, 544 bp, Zea Mays
aacatagcaagaaatgaagcaaatcggctgtactaggctcggggcgcctgcttaagcccatgaggcacttattgaggagacaaaccaagtccggatgtggtgggtcgacgaaaccaactagttgagtagcatatacagtctcaaatagtgtgccatgcagaaaagcattcttcacgtcgagctggtgcactagccagtcacatgagaatgccaaggacagcaccatgcggatgatgtccggtttaacatctgggttgaaagtcttgtcatagtcaaaattgagtgaaagcgtgacacacccaacgcgcattgtagcgctctaaggatccatcagtgtgtcgttttatgagtccaaacacatttgttgttgacggcattggcaccatctagacgaggcaccaggtcctaggtctggttggtaactagagccttgaactcctccatagcctggcgccaattaggatcaatgagggcagaacgagccttcgaaactagtgacacaactgaagatgacagaactagacggtcaataggttgttagaac

SEQ ID NO: 724 - DNA, 637 bp, Zea Mays
cgggactcggccagcgacccaccggaggtcggtggatgctgggatcctgcactgtaccgtgtgcacggtactctattgctcgaccaccggtaaatcgccttccctgttgttcgccacgatcctttatgtgattcgcatatgtctgcctcacgctagaagcaccaaaagaccggggcgccgctctccggcgaggtaccgccgtgggagccgtctccctcgccaccgcgtgctggcttgtggatgaagatgtgcgggagccctcgatctacggatgaatggctccgattgatcaaggttaccccttcgcgactttgtctggtgaaggttagattgggatcctatggctacgattggaacctggcattccagcgcgggtgtgggttggcagccgttgatctcgtgatccgcggctcgactgtgtaggcggattttgatctaatcccagccttcaatactcgatcggacgaccgaagtctatccataccccttcgcgctggcgctttacaaatgagaccctgtattttcacagagtcaacccgccgtccgtgccctgtgtaaagtatttatatctgtgccctggaaattcataaaacagcccctgaactctgtgatattagtggccgcagtcctgaactag

SEQ ID NO: 725 - DNA, 296 bp, Zea Mays
aaagttatgcctgttttatgaaaggtacctcaagttatggttttcaaaggcacaaatcggtaggaaccgtagcggcggctatggagcacatggtcggttttagagataggatttgttttatggatatggttggtttagatacaggatctgttttgtggatatggtcggttttagagataggatctgttttgtggatagggtcggttgtagagataggatctgttttgtggatagggtcggttttagagatatgatctgttttatagatgttggggacttgttctcaaatgctataa

SEQ ID NO: 726 - DNA, 515 bp, Zea Mays
ttttatcccttttattcaatgattggactggggacactattctgtgaaagaccaggggctatttcgtatatttctccaagactcatacccaccccgcgcgtggatggcgggttgaataagaaaaacaacaggggctctttagaaattatccaccgccgaaggggtaccttcagatatgagccattcgattgatatctgatggcccagattagactagaactgagacacatcggcaaccctcaaatcttgatccatcggttcagatcatacattgacctttatgcactgatgaccggacatcatcagatctgtggtcccaatgcattgagcgcatgcatacaagttgacccaatcctagccgttggtggctagatcgacggacaagggttgtcttcctcctcaccatctctccccaacctccagtcaggcgcgctggccgcacggcggcgcccaccactggcgttcggaccacagacgccctgtgccccactcaccaccaaccgcttcgagatcga

SEQ ID NO: 727 - DNA, 705 bp, Zea Mays
agggtgaccactataccctactaacggagcaatcggcttaagtcggcaatgacttaagacggtgcaacatgctcacgtctactcatcttagggcaaccactatgccttatcagccaagcgattggcataagtcaggaaagaactccaaaaccagcatgtcgcgtttacttctgcaatcgttcaagatgactgttacatcctgacaacagaaacaaatgttatagttgtcagcaccaggggtaggggtgaaaacgggacggatacgggtggatactaggtcatctcgtatcctaccctaatacaattttctcggatacaggatcggatacggatagttaaaatccgggacggatacaggacgggatcggataataattggggcgggtaagaaacggatatcggatattacccggatagataacggatattagtcggatagtccgtcctgatgatattagttgtccaaccatcgaacaaatgaataaaataagaaatacataatcatgcatatgatagctcaaatatagaaaaaataccgacaaaattgacaccatacaattcaaaattactaatcacaagttcattatagaacaaaaacacaatttcaaaaaaaatcagcaatatatcccctcttttaggcataatccacaagtatataacagatagtagatagttcacacaagttcattatagaaccaacaacac

SEQ ID NO: 728 - DNA, 528 bp, Zea Mays
tacagatctgggcatcggtataatagacgaagggaggacgagggagctgcgtacctagtaaccgctgcttgtgagatccggatccaggggagaagtttgtatctgtgtagagggaaggagttttagcgatagagaaatagaagaaggaacgtctgcatatataaatagaggtgggtgtggcgagacggttgagcatacaacgcgcggggcgctgcgcgacgaggcgaggcaaaacgaggtgactgcaaccgattctaagttgatactcacgtgtgaatcagataacaatttaagaaaaacggatttgactcatgggcatgagggatcagcgagaggagcatgtgagacagttgtgtctgcgcgatacggtgagggcggggagaaggttgcacgcacgagagttgcgtgacaagatgacgcgaggtgagattgatggagggtagacttagacagagggtagacagagggaatagacgaaaggtcgacgaggtagtcggggatagcatatgcaagcgacttgttgttcgc

SEQ ID NO: 729 - DNA, 1152 bp, Zea Mays
caaaaacagaggtgggagcaggttaattagtttttcttaaccattttctcaacttaaactggacaacacacaagtcacttaaaagaccatattttaggagacctcacatgtcgagcatcaatttataacgtaagtgactcaacctctatcacgcttgacaactaccacatcacccgatttatctatttggaacaccgcctgcctagcgtgctactagtaccccgcattttgactcgacttaaaaacatagaggaagcaatgactacttcggcatgtcaccacctcactacacaagccaaaattattattgcttacccacacgcctaaataagaatgatttcaattcaacgcgcccatattttaaatctcggcataagcttggctattggctaacgaagtgaccattttctaactaccaacatacactcctttcaccatttgtggatacttgtatgacacacggctattgtaatacatcacaagtacatacaaccccatcagtaaggcaccagcacatttccaaaaattctcgagactacgacgacaaggcatcgatccgccatacaacaaaaatcatgacgaagacgataggtgctatcaactaatcgttaaaaaaatattagacttacttctctctttgccactactccactctttagtcacatgaccatcatgtgcatcctttattcgattatataatagcgacctaagcgtcgtgtcacaatacatacatatttcctcgttgtgagtataaccatatcacgacatatacccgcacacctcaatcaaatatcttatgccaccatcactataatacaccacggcacacacgcacaagatacctcaacttaacacaagtgataccgatggaacttttactaaactcatcatgcgcatcacccctgtctcgcatacaaccattattatggtgtgcactcgagacacttcaagcaatgtggtgcgaccactaatataaatgcactccgacactcatgtcttaacgatacatcctccacgcaaacgagcattttttttactactcgtcatatcaacaaatataactcctctataaccacgaatcccatcacattgcataaaacaattatacttttcacacaaacacatattgatgtatttcccaaaacataatcc

SEQ ID NO: 730 - DNA, 843 bp, Zea Mays
ctgccatcatttcatacatgtacaagagcattttcaaatttctagctttggacaaatcattttccatacatatgatagtgtcatcggcatattgtaacaacatcacaccattagggatcaaatgcctacccaatccattcaaaaccccattagcacaagctttgtccataattctagcgaggctatccgcaacaaaattaaagaggataggcgagagaggatctccctgacgcacgcctttgtagctcttaatatatttaccaatttgattatttattttcacactaacagtgcccccctcgacaaccatatgcatccacatcatccatttatcgccaaagccccgatgttgaaggctaaggaataaaaaatcccaattgactttatcataagccttctcaaagtccaatttcaaaataataccagtttctttcctttttttagtctcatgcatgatttcatggagaatcataacaccagtcattatatttctccctttgataaatgcagtctgatgttcactaatcaacttctgagcatagggttcaattcttatggtcaagaccttggtaatcaacttatataagcagttaagaagacagataggtctatactgttgaattttagtagcttctttggtcttaggaagcagagtaatgatgccataattaagtctactgacatccaaatgcccagcatgaaagtcctgaaaaagactaacaatgtcacttttaacaatgtcccagcaactctgataaaactcagcaggaatgctgtcaggaccagcggctttatttttttccatctgaaagagagcctctttaatctctttctcaaagaaat

SEQ ID NO: 731 - DNA, 624 bp, Zea Mays
ctgacccactagccaactcgacccatgttggtttatattcaacctcaactacgatatctaagtgatgagataattcatgcttagttttttatttggtgaccctggtatgtataattttttacccactctggtatttttaacaacaacttacacacttgcaggtgatagactattgcataaatttaataaaatctcaaaaattacgcatcaggggcatagttcacatggaaaattgagtattataaaaaatagttcacatgacaaacttgcgtggcaggaaaaaaacgtgtattagttcacatggaaattttacccgaaaaggtggtttagttcacatgaaaaaaaacacaggagggaaaatgtggattaattacatggtagttttatatgtttaggctccttcgaaatgcagaaattttagagagaaaaaatcaatttatgataaagccaaaaagataccccattgaagcttaattttctgcattttaccaaaaattgtctgaaatcatctacttggaggactgcgtcctttgtcatctatagtcaataatggagggcatgttttttccttgccattcacaacagtcgaggaaaagcttgagttgtattgcaacattagggtcg

SEQ ID NO: 732 - DNA, 519 bp, Zea Mays
ccactatttgtatcacttgcgcatgggtcccagttatcaaatcctagatctatctcctaacgcctctctcttgctttgttcgcaggaacgtcggcgcgctgtcgctcggctcctgcccatggagagtcgttcgcccgggttcatgctgcctgctcgtctcctcgtagtgaagccacctcactgtatgtttccctgccgtggctcgtcctcttcctcccactacagtgtttcttcttctgctcgccattaatggcgatgtttgcaacagtttctcttccttgcgcgattcaatcgtctgccagtctttcttctaccattagcaaacttcattaatggtgtgattgtttcttcgaatacagtgcagcaaatagcattcaaggcgcgtgaagtcgttcgattcctcctcccatcatcggcctatttaagcacaaccgtcattgctgcgtcgtcgcttgccaccaacgtagttcctgctcccgtcgcgctattgcgaagccgcgcccacaatcgcctcctcgc

SEQ ID NO: 733 - DNA, 651 bp, Zea Mays
taaaggttggtataagataaacatcaaggtaagatataggggtgataaggataaaggtgataatgatgaaaagcataatccatggatagagttaaggcaggactcgcaaagtgacgaagtggagaaaacaatcaaggataagataagtgaggttccaacagaagagttgaagtaaaaattcattatcgaagaaagttacaaggaaacaacgagattaccacgggcatgcaaaataaaatgaccgctcatggatcattaagaaacaagggtggtcaagggcatgtagaatgaaatatgttaaacagaccttgggatataaaggtaagcataaaaagatgagagtatgaaagatttcaaggagatgagcataccaataccaagagacaagaaattgccgaaagataacgacttaacaacaaaagaggaaagggtctcaaaagacaaaaagatcatgggcatataaactgaaatgtctaagtaggcagtagaaatttagaggcaagtattcgaaacaagagtattaaagggatacaagcatgtcaataccaaagaactagagttcgccatacagtagaaatttaatgacgaaagaggaaagaatccccaaaagacaagaaggttatggtcaggggcatctacaaagatgtcgca

SEQ ID NO: 734 - DNA, 923 bp, Zea Mays
gtgcagaggtcctcaactattcgaaaaaccataaagaatccttattcactattcccttgtgtctctgacatgtgcactaaggccactctattctttcttcttcgcaagaccggatccccgacgatggacgacggcgtgggctctccggcgaacttgtaccggccgccatactcaataatccatgctctaattcggtgtacgcctatttctaaccttggcgctccactgggaatcaccaatttggtccgaacgccgttctagaactcggtccacgcgcacccgtgaagtttgagacattcccaacacgttcctaatgatctagcgtggtatagcttaattggccgagccgatgagcatcacaagcatgcgtgggcattgaaacacggacaaggagggtgagggcggacctggaggtggctggccacgacgcgacgtctcacggtggtgcagacgatagatttggcggaagaacgaaattctctggctatggtggctaatcgagggtgagagtgggtgctctgggttcgtaacaatctagcggaataggccgaggcatcaatttatagaggacgaccacgaggagggtgaattaggacggggaagcgcttgctgtgagaaagggggaagagtcaccggagttgctaacgtggcgctcactagtttacggtctacgacagtcactgccaagacttcacggcttgcgacgagtggtgagatgacttaaggcgtgtcacaactgagctagacggtggcacgacggcaacggtcgcgcagccacgtcgccggtgcaagtgggtacggcgacagggcaaaatagtgccccaaggtcatcctcgcgcaagatcttttcaccgtcgaccgttatccgcacgccagagcgcacgaatcggaacaccggtgaggatcacgtcgcggagttcacc

SEQ ID NO: 735 - DNA, 367 bp, Zea Mays
gagccagctttgcaagaccagatcatcatggcccagctcagtgaaaagggagtacagattatcaaggagaacctccatcagaagaccgagaagtataaatgtttccgccaagatgggaagggtatattgtggtttgaaggtagattggtagttcctaaaaataaggatctcaagaagagaatcttggatgaggcccatctctccaaattctccatgcatccagggagcaccaaaatgtaccatgatttgaagcccttgtattggtggaccagaatgaagagggagatagccaaatatgtatcggaatgtgacacctgtcagaggataaaggcaagccacttgaaatcagttggagctttgcaacccc

SEQ ID NO: 736 - DNA, 856 bp, Zea Mays
agaaaacttcgcctcacccgagcctggcctcggccaacagcactgacagagatatgcacgtcgtcgccgaccctcccgcgaaccccgctgaagacgggatggctacagaaaccgcaaggccggtgtccaatccgctttccgccatcccaaatgacgcacgagccagactaccacacactttttaccatgtcgagcactatttcaaccactacgaatcgacatacttataaatgtctcattcgcgcccctcacatgataggctcaggaacgcgtccgttccctcgaccccgacatcggttctctacccgatcaaagcaagggttatagggatcagacatccttttgatgatcaaagacaacgcccaggacaagggccatcccgttgaccatactgccacagggtctcggactcgtctcctccgatcacaacaacagtgtgacaacccttgtaactcctgggcttccccttgcaactataaaaggaggagtccagggtctccaaaggagaagaggaaaaacacaatacacttcactgtttgctcttcactcccgatattggcacttgcctcaatcactcttagagacttgggactcactccctctcttgaccaacttgtaccccctactatgagcacctaggtgcaagatgatataagtctcatccccctcgctggaagtagggccttctcttgcccgaactaggataaatcttgtgtcttcttgcaccacacttatgggccagggcatgcaacataaattcacttgttggttaggaccctcaggtcaaaacactaacagttagcgcgccatgtaggggctcgctgcgtgtttatgacacattcccattaaggatcca

SEQ ID NO: 737 - DNA, 504 bp, Zea Mays
cacagatggtgcacacatccgatggtgaagcatggaaacactttgattccattcaccgtgagaaagccgaagaggctcgtaatgtacgtgttgtgttggccacagatgggttcaatccctatggaatgagcgctgcctcgtacacatgttggcccgtgtttgttatcccaatcaatctccccctggtgtgtgctttcaaaggcagaatatattcgtgtcgttgataattctcggacacccggggaataaaatgggtgtgtacatggagcctttgatcgatgaattggtacgtgcctgggaggaaggggtatggacgtatgaccgagctacgaagacaaacttcagaatgcatgtttggtaccagtactccatgcatgacttaccggtgtatgggctattctgcgcctggtgtgttcacggtaagttcccggatgttgtgtataaggtatcgccgcgtgggaggttacctgttcctaacaatgaagattacaacttagacccgga

SEQ ID NO: 738 - DNA, 355 bp, Zea Mays
gctgccgtgaccggcgtgcaccgctgttgccgcgtctgggtttgggggggaatggatagaggtcatcgactccgcgatctatggtggggattgatttagtggtaccgctttggggtgcggtgatccgtgccgttggttttgttgtttgcggctcggattagatcacgacactttgatttcggagccattggatctggatcgggcggctctgggcgcgtacccgttcggtatagattaaatctaatctgagccatcgaatgggaatcaaacggtcgtgggatcacgataccccttcggtggggcaagacttcataagagacccaacgctttacatatatcaacctgccatccctcg

SEQ ID NO: 739 - DNA, 296 bp, Zea Mays
ctagctagttattagtgggttgtggttaggcaataaccatccatagtggacattgaatgtttaattcgtgtttcaaatagatggacaatttttgagcttatatcatggaggcaatgtggaagaagatccctatggaaatgccaagttcattgacatgcgacatgtgcccgtgctatttgttggtagaccatccttgagtgatgtgtttactaaggctaaacaaaagctaggttaccatgaagatgatgacattgcggttgacggagtgcttaacattggtcatccaccaaatgtca

SEQ ID NO: 740 - DNA, 569 bp, Zea Mays
ggggtgcaagttttatattggttcagactgaacgtccctacttccagtctgtggtggcatgcgctaccgagacctgattgctcgtagtgggggttacaagcgggtgagagagggaaggatcccaagtctctatggattgcactgctagaggatctacgtttcgagtgttggctctcgagtttgtctctttctttttcgagccgaccccctttttatataccaaggaaggaaccgattacagatggcttctctcggaagggatcgttgtgctgtaaaacgaaatagttttccctcgataaaccccttctcgtgtgtcgttatccgtcccatataactcgcctgttgtgcttcctcatgactgctggtgaagcatgtcgatgacgggagtccgagtgtcatcattactccgtctgtccacctctgccgacaccgacccttggtcttcgtagcctgtcctcctgtcttctctttatcgtattgtgtgcctcgtagggcgtcggagggttcaggcctaggtgccatagaccatgagtaggctcaggcctgttgaacaattagacaaattccag

SEQ ID NO: 741 - DNA, 537 bp, Zea Mays
aagtaaagagaatttaagaattgaagactaggttgtatctaggtgcaccggactagttcggtgttgcaccagaccgtgtgcatagagagcacaacttcggcacactatgcatgttagcacaccaaaccactccggtgaggcaatggtggaacacaagatcgagtgcgcaaagagcgcattctttggcatctcgagcctagctcactacaccaatctggtgaggcaccggtagcgcaccagaccaaaggctcaacgctcgaccatggctagctccaacaactttctgatgtggtggtcaccatcaagtccaaacatgcactggatctctagtgtggtgcagagaatctgtcatagcagcaatgtcaagctaacatggaagggcacggaccatcctaatttgggcttcgagtttggtgtgacacagaaaagtctgctaccttcaaacagctcttttggcttcaagttctatatatacccatcaaacctgccattctcaagtgtggagagatgataaacattgctaagtgcatagagaca

SEQ ID NO: 742 - DNA, 712 bp, Zea Mays
gcagcaccgggttgacctccgcctcgggctgcgcgccattcagatgtctgaggtcttccacatcctcggcacgcaccatctacagcaacagcacactgattcagcaaacccacgcgtacccacattcaacgacacgaaacaaaagacaaactttacctgctccctcgccaggtcagaccgctccctaaccgcctctcgaccatgagggccccacatccaatcgaagagtgcccccgtggaatcctttaccacatggtcatcaaccttaaaaatttcccgctcaaagttgtcatctgactggtcgaagacctcatagtgtttgcacccctcgcgcgacaacgcgttcatggccccctcgcatgtgacgagggaggcgtaagacatgaagccctgcacaatcgtcgggagcaccaacagctcctcctacaaccattcaaggaagcggaggctggcctcgcggtcgggcacttcgaaatctgcagtccgcgcacccagatcgtggtatgcctccacgagctgcgcgtgcgtccgcacgacttctgagcgcaccgaggtctcggctttgtctacgcgactgcgcagggcattgaacctcgcctcccactcctcggcgcgttggctggcgaggctacccttcgccagcgccaccttagcctccgcttgcgcagcctgcgcttcagcgacggcctggttagcctccctcctctcctcc

SEQ ID NO: 743 - DNA, 470 bp, Zea Mays
atccttggcttgcttcagggcttcaacaacaatgacttcacgactttccaaggcagttgcacgggcttgagctgtggtgagatccacatggagcttacggttgcgcttctctgcatcttctgctcgggcaatcatctgacggtggtgccgagccaagaaatcatactgcgcatccagggtgagcaggtatgtagtgaggtacacgactgtggggtcgtcctcaagcagttgctgcccttccaatgcacgcatcctggccatccaaacggaatggtttctctgaaagggctgaaagaatctgagcggggtgtgggccacttcttcttcatagatctgacacagggccctcaatgccttgcgagcgacgacttggcaggtgtctttgaatctgtgcccagcagcagtgacactccattccacatggtgcagactggatccaatgtatacagtcacgacacacttctctgtgc

SEQ ID NO: 744 - DNA, 474 bp, Zea Mays
aggggcctcagtgaaaaagagtacaaggctcaggctatcactggactggaccgcgggttaatttataacaataacagggactcttaagcaaaacgtccacggcgaaggggtatggtggcatcttgaccatgggatttgatatggagggctcggattaaatctgcataagcgctgaaccggtacacgatcgtggtcgtcggattcgcgatcaatggctatgcttttaagatgatgcgatatactctggatcaccggatccaaatctaacggcctgagttcaatccaggtgaaggggtacacggttctaatcttgatcgttcaatctaaatctggcggctgcaacatcatcaaccctagatcaaatcttggcccttggtttgcgatgaacggttaggagtgcttctcccacctcgcaaccacggctgagcagaggcgccccgcgcggcagcggcattctcgccgccgacctcccgc

SEQ ID NO: 745 - DNA, 406 bp, Zea Mays
catcaatcatcatggagcagatgccatgcgcgagcgagagggcgatcaggtgagacggctgtggcgcgtggcgtgcggcaccaatcgttctgcaggccaatgtttcgagcgggagcctgacgaaaattcagacaaaccaggtaacgaaccaacaagctccaagcagaagtgaacagaagcctcgcacaccagctgccagcggcaaggacgaaactttgcgataaaacaatgaccgcccaatgccttcccggcgaatcatgcgtgggcggcaccaaacggccgatggcaacaggggagagggaatgatgccctgaactgaaactgaaagccatggctacttgtcaacggcgaccaatcgtcccccatcacggcacccctccgcgcaaactaattatattagtgccac

SEQ ID NO: 746 - DNA, 783 bp, Zea Mays
ctggcgcaatattatagagaaaggcagggtttaaatcgtaaaatatcccagactcagcgaacactacccccaggacggtgggtttattcgagtaaacttgagctgctcttttaaaagacttccagggcgaaggggtatcgacaactgtgggtcgttggattagatttgaacgcgctagattagatctgccaaacagaaatgttcccacgccatcccagccgttcgatccaaccctatcgttccagatcacaacgcgaaccagtatgagcccgcgagcgcaggatcccgatccaacggtctaggagcatggttccctttcacccgtacgtccgctgatctccggccgagattgactcgaccgaaacggaacgcagattcctatcgtggccgttggcaaggaatctaacggctgcgcccggttcatcctagaccatcggattgacatccagcggacaccagtccttgtcgcgaatcggtgaatgcctaatgatcacagtcgtccatctacccatccacggtacagacctactcctctacctctcacgccggagcgcggcggtgcagactagggcggcgaactccggcgaactgcccaggtgcaaccccgccctaatacacgccccgattaatactacatggtcaccgagttaaagcgaaatgggtggtaggcgactcaccggagatcaggcaatggagatagctgcccacgctcacgcggatctgacgttcaacaagagcgacgacgagaaattacgagcacgccagtggcccccgatctcctag

SEQ ID NO: 747 - DNA, 519 bp, Zea Mays
ttagaatattctagccgctcagagccatcagaagagttatgctgatgtgaggaggcgggacttggaatttgtagtgggtgaccaagtccttcttagggtatcacctactagaggagtcgttcggttcggtgtctccaggaagcttagcctgaggtacattggaccgttctctatcttggcccgggttggcatcttggcttatcccttgcaattgctagaatccatggcaagggtacacccgatattccatgtctctatgttgaggaagtatttgcgggatctgaaccatcaaatcaagttggaaccgattgctgtgtagcaagatctgattctggagtgtcgcctggtgcgtatcttggagtcctcggagcatgtcatgagaaggagaacaattaagtatgttaaggtcttgtggactaatcagtctgagcgcaaggctacctaggagctgatgcggcagaagtacaccgaacttttcgttatgggtgagtttttgtcttcgctgatctctcttttgtc

SEQ ID NO: 748 - DNA, 868 bp, Zea Mays
cacgtttgcagtcccctacctagcgcgccaattgtcgtggttttggaaaccgaggggcaatagatttgtgtttggtggcgatgcaagtgtggactcacggagattcaaacaaggaactgaggcacaaggtttatactggttcaggcattcaccctagtccaatgtactgctgattgtagtattgctctatggtgtgttacaactggtgtgcttctatgaagaaagaaagttgcccaacccttttatagctcaagggtggactttacagtgggaactcgtattctactgggagggagcttggcttgctgcctttggatggcgtagtcctcctgacatcgtctgtagggtcgtgcgttgtcgtacccctagtatggcgttccatcttgtccatttggtatacaaatccctatagcttgctcgacgtcagcgttacggtacctagtgggtcccacaaagtgggcttatggtaaggttcaaggtcgtgtccggtactgcttcatcttccgtcataccccttgcgtcattataaaacatgcataggtatccacccgatatggggtattgtctcgtcctttttggtgtatgggtcattgtagagactctggtgctgaggtctccgcgactggagttgatcggccccacaagtcagtgagggtatatccacgggattacatgggggtgttccatcgtgtctgcttaaggccttttggtactgtaggtacgatctagtcatggtttggtgacgttgcgttttgtcgcggaggtcgtgggccgacaacgttggcccggattcgttccttgcagatctgcttggaagaggtttgttcgttcgcccacctcgcatacttgctcggttggggcttggtcg

SEQ ID NO: 749 - DNA, 581 bp, Zea Mays
cgaaagcgaaacgtattaaactcgcgtacatcatcaaccgcatgcgctgatgcgcactgccactgccccggagaaattcaaatcccaagccccacaagcaaattaccccagcatcaaatcagcggccggccggccggcagctctcggtcgatccactgcggtttccagtcccgaataatcccaattcccaatcgattcgaagcttccttccttcgaggagagggggaggtggaaggcgcgggggaagctctgcttagggttcggaggtggccggcgccgccgcggggcggggacggcagggggatggatccggagcagacgttcctgcgggtgcacgcgcgcttatcggggacgctttcccagctgctcacgccgcggatccgcctcgtcctcgagtacctctacctcgccggcgccgtcgcgctcttctgcctgctcgtcgtcatgcacacgaacttcgtgcagcaggtcagtcacggcccgtctccccagaattaccctcagtgggctgcttatcattctccatagctcctgttcctcctcctcctgccgctgtgatggattgggagcggatatgacgc

SEQ ID NO: 750 - DNA, 421 bp, Zea Mays
gtccgattaggcgtccagatcgtcgattaggcgtccgattagagggtttctggtcgtccattggcggctagggtttactattgggctttattgtttttacggcccatctacagtcacataaacagcttgcctcccctcaccaaaccctgtctgcgcccctctccaacccgtggcggctagggtttagtggcggctagggtctagtgcagtcaccggcggttgtccagtgcagtagccgacgtctgctgcagttcacccgcaccggctctgcacccacttccggcgtctctaggtcaccggcgttggctccagaccagcaccagtgacaacttacgacggacaagatgagctcccctcctcccccctttctatcttattatcagtatgtccgcagtctctagttcttgccttcatggttctt

SEQ ID NO: 751 - DNA, 475 bp, Zea Mays
ggtcaaattttttgttttgcgctagtgtagccaccccataatccttaagagcctaggccaggggaacagtgccgaagggcctctatcaaacacgacccccaatacattctcaaatgtgcccctactgaccagtgggaccagtcaaccccagtcacagggacctcaggatcggagcctcaatagtgaccagaatacctaaaagaacgggatagtacgacataccaggtgtatgccaatgtgtacaaaaaggtgacgcaaggtcatgacggaagatgaagttgtactgaatataacccagaacaccaccatgaggccactctgtgggacccgccaggtaccgctacattatcatcagacaagctacagggacacaaacaccgggtagacaagacgaaatgccacattaagaatacgacagtgtgcgcccctatggacgacgctaagagggctaaggcaacccaaggcaataggccaa

SEQ ID NO: 752 - DNA, 599 bp, Zea Mays
cgaaaagtctcggatttctaccgtgtgccgtggtcgggtcgcccgggagcttaatccgcggtatgactaccactttcatgttcgccacctgtccctctccgttttgcacaaggtcgcgtaagaattagggctccttggagcgctcggggttcgtggccggcggcgccgccgcaacagtgctacatcaccaaccgtgctcgagctaggggagaaataacgctagtgcgtagatcggggaacggacgactcagattgattgagcgaaccatttcggtagagcacacctaggtcgtcgatctgatactaaacgaggacggttagagaatggtataccccttcgtgcgatcaacttcgggtcgtagatccttggtcgggcggctgccgtgcaatcacgcaacgtaaaaccctagcggtctgattcaaatccaagggtctacgtagcacgacgtgtcccattatcgtggatctaatcctggccacacgaattagatctgacggccagaactctctgataccccttcgctggccacattttgcatatgaaccctatgtgttctcctaaataaacccaccatcctttctcagtgtcgaataattat

SEQ ID NO: 753 - DNA, 768 bp, Zea Mays
attgaggtttgggtttttttggtgtgttgcatcccccagcacacacacactctttatttcctcacttccacataatggtcatttagaactcttgtatttataccaacactccctctcaagataggccaaaaatatttctcatgtccatcttgttacaacttgacttctctttaggacctagatcttttgtgaagcagtcagctagctggctacgagacttaatgtactctagccttaagaccctactagcttctccttaatgaagaacctatcaagctccacatgctttgtgtgataaaattgaacagtattgcttgtaatattgatcgccgcaatgttgtcacagtgaaacatcagtctcattcctcaacacccgtaactcacctagcgagacctttaactacatcatctcacataggctcaacactattgccctgtactcagcctctgcagtagaccgagccactacgaatttgcttcttgcttgttacttcgctatgagacgagatttcttcctacaaatacacaatatcaagatgtagacctatcatctatgctattcgcccaatctgcatcacaatatccttcaaagtccaagtggccattctttttgaaccataatcttcatatacctgctcaccacactcactgcataggagatatcaggccttgtatgacataagtatatcaatcgtccaaccaatctttgatatgtttctttgttggctggatcacctaattgggcacaagtttggtggtctctatcag

SEQ ID NO: 754 - DNA, 656 bp, Zea Mays
gtctgtgtgacatctccaccaaatcgatagttatcttcaccggacggaagatcgggcacccctgttcctatcaagtggtattcaaagactcgggtattactgtcaggcttaccctagtttagtttaggttttttcatcctataactccagataattgccatacaaaaagaattccgctgtcctataaccctgtttagccttgcaatttcatttcagattgctttgttgaatttgtgtccgtgttcgagtcttgttgctggtttaggtcgtgtcgtaatcgtagttcaaccgctccgtcgctgttatttgtttccgccgctatcccatccacctttcccggattacaagtcgagacaccacattactcgatttgccctcgctagccgccttgtgtgaactctcgccacgctagccctagattaggttgcaagccgcattgcattgtagcccctccttgtttcataatctagcgattacctattgcttatacctaggaggtttgtgcccctgtgctctatagccgcctctagccgccgctacggttcctaccaatttgtgcccttgaaaaccataacttgaggtaccttccataaaacgggcataacttttcgctcggtgctccgtttgagctcaattgtttatagcagattcctgac

SEQ ID NO: 755 - DNA, 927 bp, Zea Mays
caaatttgtagagctactaaaggagtataactttgtttaagacataaggcataagtgttgtacaaaagttggagttaaatggactcaaagtctggctgtcagtcacctgagagtctgaacttttactgacagtgacatggggtcaactttgggagtgagtatttgagcctgactactatagcaagattgtagctggactatagggctaaaactttgttacagagaaattaacaagttgctacatagaaatcagagattaatgccctgctaatgaccttgtcagactgactgaatggggttctgatggtacagtgccacagaaagatcttaggattcagtatgcctcgtcaccggtgaccttgcgcccggattcgcgccggtcgtcgtgattcatgcttagcacgcagtggatatccatggggaggtaaaaagatctcgcggggagcggatttggtcgcggagaaagcttatcaccgcgcctgtagccgtgtgtcgtggccggaccgccggtgtcgccgtggaaacttcggtgacctcggttatgccacgtcgtggctcgttattgcgtggtagtaaccgtggcacactcagaattacaatcttcgagccgttgcaccagtgaacgccacgattaagccaccactgttctcccctctctgcagccgccagcgcgccacctcaaattcacgggccaccgccctcgtgtcctataaattgagcgtgccatcagctccgctaggtagtcaagcacccaatacaccaacccgtgcctcagatcgtccaccagagcgccccaatttgagatttcccccaaatcggtcaagaacaccgcgtgtgtgagctcaccgcggtcagcccttcacaagtccgatcaagccctccttgctcttgttttatcatccttgtgtgcttgtgatgcttctcgac

SEQ ID NO: 756 - DNA, 598 bp, Zea Mays
agcctcctctttttcttcttcttcccctcggcaggagcagttggatgactggccgggcgaaggcgctttgggcgagcaccatcagatttttgagcattcaaggttttttcaggttctgggatagttgcaacagctatggtttcagcagggaccgagtcagaagaatcctcagccaacatgtccagcatagcacttatctctgcatcgcttgggtttataggcatctcaaagtgaacttgcctctcatcattggggagatcaccaagtgaagcaaccagagcctcaacttcttcgggagagggtcgcactctaagacccaagccactgtcactagcaggaggattggacacaaaattggaaaaggtctcggaaggtggcagattccaagcagaatatgcaatgggagcaactacattcgacactttgcctctaagaatcatctccagtcggcttaccaaatccacagcaggaatcctcttgttggtaacccgggtcgaatcagtgacaccgctatacaaataagccgggtacgctctatccttcagtggctgaatattcttaaaaacaaagtctgcaactacagcttcagcagtcagac

SEQ ID NO: 757 - DNA, 974 bp, Zea Mays
aacatatattcagatgaatattttctaggtcaaaccactggtaaaaatagtagctgataattgtctgacatgttcgtccactatcgaatgaaattgcattttgcacaaattgtagcctcctaagctcctaccatgaacgaaccacaatgagctaagcgatactctgatctctcggcaaaaccaaaagatgcctggaacacaaaccgatgaaaagcacccaacaatcagatgataagatgcactggcagaggtcagtggcaaaacaaacctgcacccacggaggtcttcgcaagatctggtttaggaacgctctcagcactaaccccatggaatgccggccagaggcctgacgacacgggcgtggagcaggggtaggaggaggcaaggcggctctctggccatcgacggcctcgtctcttgtgggaaaagggggtcccgtgcatggtagatggcttaatcgtgtccgtgaggagcaggacgtcctctgggtcgacgcggggagcgacagagcaggcagagggagagaggagtgcgtgtgggagtgggatgtgggcgaggctaggtggtagtggaagaggtggaagaagagatagatggacggcgagttgaatttttgagaagccaaagggctgatttgcaaaatacacagggcacgtgtcatcgctgaaacggctgtgcctccgcaaaatgcggtcgtgcgtgggaggtctggtccttgagagaaagaacaaaaaagaaaagaaaccaaatgttattctataatagataacagaactgattaagaaacaaagaagcaacctaacatatattcagatgaatattttctaggtcaaaccactggtaaaaatagtagctgataattgtgtgacatgttagtccactatcgaatgaaattgcattttgcacaaattgtagcctcctaagctcctaccatgaacgaaccacaatgagctaagcaatactctgatctctcg

SEQ ID NO: 758 - DNA, 559 bp, Zea Mays
ccaactcgttaggcgataagcaagtaaactccgcctttttatcgagttcatcaatcagttttaaaagttgttgtttctccttttttactaaccccgctgagttctttgcccacccccttaaatattgtcgaagggacctaatcttgttttgccatatctgaatggcggtttcacctctcttttcttgttgccaaatgaaagaaaccatataaaaaaatccctctctaatgaaccatcctaactcaaatttaaactcagagaaattccctaggttcgtcggggctttaccattcagtaataaaggtgtatgatcagaccgagatctatcaagcgccttcactgagacgttagggaatttaagttcccactccgggctcattaaaaccctatcaagcttctcaaacgtgggtggattcaaatcatttgcccaagtaaattgacgtcccgccatatcaatttcgcgcaattctaaatttgctatgatactattaaacaaattaggccatcgaagactgaagttatcattacttttgtcttccgcacttcgcatgatattgaa

SEQ ID NO: 759 - DNA, 471 bp, Zea Mays
gtgggagggagaggggaggaagggattcctgcgctaggcccggggtaggaacctatcgcagtagcaaaccatgaatgtacgacaatgactcaggccaagcaaggacaagaatacataggatgtcaaccaacacacgaacccccacaccaaccctattaagccagacatgatcaccaaagatcaccatataagcatcaggctacaagacttgaatgacatcgagataagcacgaaaagaaaggagacccctcataatcacgatagaagctcattgcctattcttaccaaaaaacaaaagcttacaacaagacacaatgctctacatcctacatcttaaattcccttacaaaatatcacaatccccgatagccgattatgctatgattgatgacacatacccaaagatcctagcataatcatcaaggccgctgaaagaaggcaacaaaagattagacttggtagctaccagcc

SEQ ID NO: 760 - DNA, 610 bp, Zea Mays
acgggggagtggtgttttacggtggcggagaccaatttggggaaaacccgaattgcggagctacggtgagcgagtggagatgagagtaggtgcaatagcttgacgattacatggcgcaactatccctgccctcaatttataggctccaagggcggacacggtgaatttcggatggcgcggtggcgttcggagaatgaaaagagtgctgttgcaagagataggtggctgtcaccgtggcggggtcaccggcgagcaccggatatgcacaaggtgaactactgcgacgtggtaaaccaccgaggcacgtggcgcacagtcgcaaagtggctaactccgacgagcttatccgaagtagtcgtgatccatgcttggtacggcggccggagtaaaatagtgaccggagtgcacccacgccgcgctatttcctatccttatgagctatctgcatcccacgacgcacgaatcgcaacggcgatgaggatcgcggcgcgggatcaccggcggcgaggggatcagaacctgagatatttgggtggcactgtaccatcgaggaacttgttcagagtgtctgacagacaatgtttaagcctctttttctctgattttcaaa

SEQ ID NO: 761 - DNA, 397 bp, Zea Mays
ggcaattttctctggagaagagcttgaagcttttattgtctccagcacatctagtacactagccatcctttttctcttgggggtcgctgctagacatttttgtgtcttcgacacctccactcctgccgaagggcttagaacttctaatgttttcatcccttcgattctcggttcttcaattttgtcagtcttcggcattgcagccggctcttcaatcccctgcgtaagagcaggtcctttggcttcaatagctgaagaagtctcaccgccaaattcaggcactatggccggttcaatatagcacggtcggtgagtaaggaccttcaattttttcctcttcggcgcaggctcgcttggagcagccgaagcggcaacctttctagaggttgcacccttt

SEQ ID NO: 762 - DNA, 452 bp, Zea Mays
ggtggggcccggccgtctggagcaaagccccgcccttctccgctcaagccgttgacagatggggccctcatgtcggatcctcccctaacgaaccgtctgcaccggccgggaccgcagctcgtgggcgcagcaacttcggaacgtcctcacccccgggtccgcgacctagaccggggtataagtgctatgcgccgcacctcccctgctctatcccatcacccagaccgcgccgcattgtccacaaaaggctgacgccgccattggagcgaaggttccgccgccggtgaatctcgccaacccgccttgtctaccctctgcgataggtcggggcgatccgcctgggcttgtggatcttgtccgtggcggattggggccggaaagcctcggtcgttgacggaattactcgccggagtcgatagagtaccgccgagccgccccaacgcgagaacaac

SEQ ID NO: 763 - DNA, 718 bp, Zea Mays
ctctatctctgccgaccgaccgaccgcccgcccgcccgccagcttcagcaatcagcaatcagctagaagcagacaacactcaacagagcgagcagcagctacccaccctcttcattcttcaccgtactgtagttgccatagacagacatcagttcaagcacaagtgatcaatctcttatacttctctgggatgaaggaaacagtccgattacgaccaattcgttctaggtgtgtgtgtgttaagagacgacatactcccccagtcaagtcagtttaccaacgacccatttggaggctggagctgtgctggatcggtggcagcagagcactagctgtaaccctaaaagctgggcgccgcatgacccagcacacacttcaattctctgcacccggtcacctgtcacatctgcaaagagagggtactgaaccacgaagctagcaagctttacgaccaagctgatggtacaaaggcaggcagcacgacgacaataataaaggcgcaggcaggggggcaggcattccagctaatcgcagcgcagaagtgtagattagagtagagtggagtagtctctccttaaaaaggctaccgaagcattcgctgttagtacagtatagaagaaaaaacagaggctctgtactcatttcacttttgagggggggctgtttgatcggtgacctctgcctgccagacagcgattctggtagctctgtctgaaac

SEQ ID NO: 764 - DNA, 377 bp, Zea Mays
gcaacctcctatgccccagacaaagactacctcttgcaagtcgagagccgagaattcacttgcccgaagaaccccgttgtccacttcgcccacaaaggagtggacacggattacaagaaagaaagaagcaagcgttcctgaagaagggacggaggcccatcgagttatccttccgacacctccgccctcaaagaaggacggaaagaactcaccaccacagtaactcctttctacctcgacatcctcttcatcggggggagattggagtcatctcccatctccgacgacgagccaaccatgccaggggaagaacctccccagcgagaagctcggcgacgaaggaataggcgccggaatgttcggcgacatcacaaggc

SEQ ID NO: 765 - DNA, 422 bp, Zea Mays
actcacccgaggccatgcctaggtgggacaagcagccacgagtctcccatggacaccctcgggcaggacaagcaaacacgactcactcgaggacaaccccgggcggtactggcagtaatgacttgcccgaggcaaccccgggcgagaaaggcagcaatgattcgcccgagggcaaccctgggtgggagaggcagtcatgattcacttgaggccatcctcggggggagaggcagtcacgactcgcccaaggccatcctcgggtgggagaggcagtcatgactcgcccgaggccacactcaggcgggagacacaatcacgactcgtctaaagccaagcctgagcgggacaggcagccacgactcgccccgaggccattatcgggcgagacaggcagtcacgactcgcccgaggccaacccccag

SEQ ID NO: 766 - DNA, 568 bp, Zea Mays
atggtcaatagataagctcgggcaggtaaatatctggcgccgggattgggttgagcctcgtggcggctaagcccgccgtacttcctccccagctcaccggtcgctcggataactctcaccgccgtcgagcggtcgccgttgcgcgccacgtgcttatgcgctagctctcgtcacggtgaatcatgcggtgcatgtccggtgatcaccggagcacctgccacggtgaaaggccacctgtgtcatgcgctagagcccttttcccctccggccgccagctttgctcggctaaattgagcgccaccacctaagcctcctataaattgccgccaccactcgctctgttaggtaattgcgcaaccagtggaaccatttgtgccttgaatcgttccctagagctcgagaatctcttgttttccccaaaacagttctccgccgctgtgaaagcacccttgccgtggccagccctccacaggtctgatcatgccctctctgttctcgttttagcatccttatatactggtgatgctcaccaacccgctcaattgaactggaccaccacccatcaccg

SEQ ID NO: 767 - DNA, 833 bp, Zea Mays
gacacacttaagcattgtcacacaatagatgacgtgactgctacgtagtcatgccatcacttcaccacacactcccaagtaacaaaacaactctaaccgaacttagcatttggccgatcgattcctaacccctttttcgtagcaccaccacaccacacatcgcaaacatagactaatccaatcatacttcacatggcaattatacagagttgcagagtgacaatattaacacataggtaagcgacatttcttcacgactctcggctaagtcaccaaacagatgacatgatgactacgaaggcatgtcaccatttcatcacacacattcatctcctatatgcgcactaatccatttcttgcgacatatgtactcaaaatcaatccacactacacaagtacacttatctcttatttatgcgcagatttaacacctttcgggataaagtgtcactataaacaccttacacataattgctttaggagcttattagttaactcgaaaacacccattcaaagtcataaacacaatcatacactatatgtgaagcacaatttaaggaacgcataacgcgtatagactcgacttataaacatagaggaagcaacaactactttggcatgccatcacctcactagttaagccaaaacaatttctacttatatcgaccgaacattcgcgtcgatcacaccttatattaccttgtctcgcatacaaccatgttgtggcgtgtacccgagacatttcgatcaacgtatcgtaacctactagtatataagctccgacactcatgtcttaacaatacatcctccacgcaaactagcattctctaaac

SEQ ID NO: 768 - DNA, 702 bp, Zea Mays
gccgcaacccccatgccccatccccctccacctgccaaaataaatccatgcgctctccagctcggtgctgcaatcccatcaaaagctagggtttcacgcctctcccgacttcacagttcacattcctctcctccccttcccacctccccaactcggccgccgtagacgcggtggcgcacgaactgccctagatttgagcgagccaccctgcgaatcttcacctgacgcacaaagtctgtcagagacagtgaagaattcgaacacgatcttaaacatcgttgattaagaccacacacaaacacatctacctggcttcccccctatcagttgtttttgtgtgtttttttttgctgtttcggacgattcataagaaccgacctgcaaggcttgcagatctaccttgagaaccagggcccttgttttggacgtccagaacgaacccttgaccctgcggatctgcttgatccgttttggatctgcttgtttttttgctggatctggagagaatgttcaagtcgatggtttattacgtgaacacctcaatcggagaggtggaggtgtggcccaagggcgaggcgagcgcgggcctgaccatggcggcgtgggcgcgagaaatccgcgttgaacgcatttccccgcccagcgagcggtgccctccgctggccgtcatgcacaccgtggccgtcggcgcccgatgcctcg

SEQ ID NO: 769 - DNA, 732 bp, Zea Mays
gacccatctaaaccctaattccatcttgcaagtttccatttttgtacatctgtgtgaggcctatctcggtattctcccccatttcggtctctggaagtacctgtatcattgtcggccgaggatggctgggggacaacaccagctcattggcggcgcgagtctggagcttcatcgcgggaggaaaacagagtacctcaacatccccctcaaggatagcatcaaggggtggcgtctcgagtggtccattatggagaaccactgcaagtccctccccccctcggtctgggagccagccagatgtccgcacaccgagttgggtagaatctctgaccccttcggagacaatagaggctaaagtactgcttgccgaggtttgcttgctgaaggacagaggtctgattgttgaggctgtggccgctgatttcgttttcaagaacatctagcctttaaaggacatggcataccctgcttatttgtacagtggcatcaacgattctacccgggttatgaacaagagaatccccactgaagatgtgatgagccgactggatatgatcctgaggggcagagtttcaaacgtcggtgctcctgttgcctattctacctggaacctgccaccacataggccatttttcgagtttgtgtccaaccttcctgctcgtgatggtagtctgggtcttagagtgcgaccctcttctgaggacattgaggctctgattgccccacttcgga

SEQ ID NO: 770 - DNA, 1077 bp, Zea Mays
agcaaccttgagtatggcgctccatgagttaaggcgtacgtagatcgagggaacagatctagcctcgaagacgtcttgggcgagctagatgaaccctgtgatgttgcaatattatggtcagccaagtaccactagatgatgtgtcgttatcataaccatcgtgtacaagggagatagccttcaacgtcggtgacctcgtgctctaactgtccaaagtaataatggccaacacaagctatcgccgctgtgggagggctcgtttgttattgaagagatcctccgatcgatcacctacaagatgaaggacaatcaaggtctaatgctcgccaatgtctagaacatcgagcagctacgccacttttatcctatgttcaatctctgatacttaagcttcctactcatataattaaatggccccttcaaaataagagcatcacgtgtcattgtattcttttttttcttggcgtttctggcaatgagacctgaccctaggacaacgaaaccaagggtcatcccacaccggggttggtgaagggatgagcatacatttttgcttagattttgctcatgataagagcttcttacaaagttagtcagaccgcatatgtttgtgccctgaaggctaaagcatcgctcactaacaaagaaagaaccgtacgaacgagacccctagggtcgacgatgatgagaaggcaaaggagggagaggagtcgggtgcacggaagcaactcgtgtgtgcaaaagtaggacacgacacttcgtatttacgaagcgcacaaagggccaggggtgggccatgtgtacgacaccaccaccatcagcacacgtcccatccaattacccatgcttgcctcgataagcatcattcctctaatgacttctactataagcaaatgtcgcagattgtatgggtggctgctgcttgtgctcgccccaacctcaaaagtggttgaccacttacgcccatggctatcgtaaacctgcatgggctaccatcgtccgggcatgacccgttcgttgtgatctcccctcggtaagtgactgaaccgcttttccttttcataggaactaacttcc

SEQ ID NO: 771 - DNA, 678 bp, Zea Mays
cccctctctgcatccaagtttcgtgcagcaatcacctatacatataatctggggagagtacgtaccaacctggtatcggatatgccagaatttaacgccggtgacagcatggctttgccacgacaccaatgtcattggagttgatcaccacgatccttgctgatgtgcaacaccaactatggaagtttgccacctagatgtcatccatatcatctcgcgtcgcggtagtggaacacaacccgggatcgtcgacaactacaccttcatctggttgcccctacggcatgccaggttacgacgacctgcctccatccacggtagggattgatggatacctccctccatagcccacccaaacatcagctgtcgtccgccgcatacaccaccaccaccacaccgctgtcgctccacctactacccttgccacactcgccatcaactctaccaccattgccgaacatcccacatctcgtggacaacaactcatttccattgtccatggtcggtgttccccatttccactgactggaattcgccatgttcgatggcaaggaggacccccatccaatggttaaaccggtgtgagcagttcttcaacgactaatgcacgttggaagagaaggtctagctagcctcctatcatatgacaggacatagtatggacacctccaacgtgat

SEQ ID NO: 772 - DNA, 322 bp, Zea Mays
tcttggtgaggaaactttttccattgctattgtccatgcgaaaaccttgcacttgttttcagcatgtgctctccagattaggctggaccggaacagcccgaaggagcctctaaactagatatgatatgctgagcgagcggagtatgttccgtctgccatccatctccagagtatgcagtccctcgtgcctggtataaggtgggtgtcctaggttctgatccaaagtgagaagaactcttgtatctaggttgcagtggtgattcggcctcgcatcgcattgatccagtgattatcccgaagctccatgtagattggtccgttt

SEQ ID NO: 773 - DNA, 513 bp, Zea Mays
ctcttggtctgtccatcagtttgaggatggtaagccgaactaaaattcaatcttgtatccaagcactcatgcaacttcttccaataccgagaagtaaactgtgatcctcggtctgacacaatcttctttggcacaccatgtaaacatacaattcgtgccatgtacaactctgctagcttggcacttgaatacgtggtcttcactggaataaagtgggctactttagttagcctgtccacaatcacccatatagagtcatacccagcagatgtgcggggtaatcccacaatgaagtccatgccaatctcttcccatttccactcaggtatcttaagcgggtgcagtaaaccagcaggtctttgatgttgtggtaaacatcacatagtgcaacatgtgaagcaacatccttctttagtccataccaccaatacttctgcttcaagtcctggtatatcttagtactaccaaggtggatggagtaaactgagtcatgtgcctccttcaatatagttt

SEQ ID NO: 774 - DNA, 968 bp, Zea Mays
aggccaccatcgaggactggggcaaaagagtctgctcccagttccaagccagatgaatgccaaagtcttctctttcttttctccccctcggcagacacagctgggtgacctgttcgacataaccatttgcgacgaacacctccaggatagcaagctccttcatcctcaccggacacgggtccagctgcagcgctcactgattcagtacgggtagattcagatgactcgcccgctagcatactaagaacaacgttcacttcagtctcatcagcggtcttttgcatctagagatgggtttgtctctcctcttcagggatacttcgatatgtaacaatgatggcctcaatatcttctgaagagggtcacactctatggcctggactgccatcttaaacaggtgggttggatatgaactctgaaaagggcctctgcggtaacaaaacagcatagtaaggacattacacattacaaacgcaggaactcataggcaacaacgcttaccgcgggtgcaagattccatgaagaatacgaaaggggagcactagcattcgaaaccttgcctctcagcatcgaatcaacttgactcaacacgtcatcctcagatattcgcttgttggtaattcaagtggggtcattaacaccagtgtacaggtaagcaaggtagactctatctttcaaaggctgaatattcttgaaaacaaagtcgacaacaacagcttcagcggtcaagcccctgtccctcaacgcacatatctctgcatgtagcaccctggactcggcaagctctaaatctgtggggatctctatccagctaggcattcgaacgtcaggctgtctccctgatcgagtgggaagtgaattgttatgattttccatagtaaaccactcgaagcgccatcccttaatgctgtctttcaaaggaatgacgagatactcatctttcctgcctcggcgaagttctaagctgg

SEQ ID NO: 775 - DNA, 337 bp, Zea Mays
ttcggactcatctcgaaggtcgcattgttgctaagcgtggtgatgcccttttggctgttgaccgcgaagcatggcagctgctagcggtggtggtggtggcaactgggtccaagaatcttgagaatggcttttcgaagcgacagaggccgtaggctgttgattgcctacatattccaggacataaggataatagcacaaagcggtatgcaggacctgcttcggttggttctgctgtgcttcagcttcaacaatttctttctgtttctgaatcataacttggcacgtccttgtggtatgccctttgtattcaccgcagaacaaacaaaacaacttcctg

SEQ ID NO: 776 - DNA, 431 bp, Zea Mays
gcgctccagaggaagtatcgccagaaggcgaaaatcaaggagcgtgccttcctcgcctccctcagcgacctcgatcacgactccgacgagtccgcttctgcctcgagcgatgaggaggtcgagaggcacattgaggacaagctcaacggcctgtacttcttcgccgacaccgcgggaggcctctgcaccatggcacttggtgagaacgcggtcggcaccagcaacgacaaggacatcggcgacgacactacttctgaggtactaccttccgccgatgatctcgctgctgaggtagaagagctgacgactgctttggctagtcaggataagttgcttaggcaggctgctcgtgataggagagagtttagatccaagtacgagagcacgcttagggaacttgagtctgctagagcttcagttgtggtgtccga

SEQ ID NO: 777 - DNA, 686 bp, Zea Mays
atcgacttcagtttcagagttcagtgttattgctcgatctttggtgctatttatctctcgatccgttaagttttgatcaacaatccttatatcaaagttgtagagctatgattgataaacaacttatgttctcgggattgatgtgttgctacatggattcgggagaaaactcaagctcaagttgcggttttaggtgatgaacagtgctctctctatctatcagcttactctctgtctgctcaccggtcgccgccaacgccaccgtcatccaccgcgcgcgctcgcgcgcgaagcacgcaattgctttgtcttatacacgtccttggtggaggtggcaagctctggagtagctcgcgccacgtgaagatcaccagcgacgccatgacctccttatcggcgtttccatcactgtcgtcgtttcctcccttctccagccaaattggacgatcttggcatgtctctctttaaattgagcacaccactcgcttcacctctattttatgcaccacatagaccttttcttgcttctcctcctcaaccgtatccaccacacgccgatgtcttctccgcgggcggccaccggcgccgccgtaggtaggttcatcgtggacatgccaccatggtgctttgcttagtaattagtcactcgttctttgttacttatcttctctggttgctcaccaacc

SEQ ID NO: 778 - DNA, 1708 bp, Zea Mays
gcagcctgcggaagcggcccaggtggaggctgcggctgtccgtcgagtgggccagccctggcggccggttgggcagcctgctggagcggtccaggtggtatggcgctggtgcgctgcccagcagtggacgagggcaatgcgccaatgggtggaaccgggacctgttcagaaaagaaatccaaaaaatcaaggttagtgggaagagccgagctgggaggggtctcggcgaacggaaaggaggattcgtcgaacacaacatggcgggagatgatgatacgattggtggagatatcaagacaacggtagcctttgtgttcagacgagtaaccaagaaagacacacatggtggagcgtggagcgagtttatgggtggcagtggcagagatgttgggatagcacttacagccaaagacacggagatggtcgtaagatgggggcgaccaaagagggcaagatggggagtggaggaattgagggtgctggtggggtggagattgagaagatatgtggtggtgtgaagagcctcaacccaataaggagcaggaaggtgagcttgaaagagtaaggaacggacgatgttgttaacagcgcggaggacatgttctgctctaccattctgctgggaggtatagggacacaacatacgaaggtggacaccgtgggagaggaagaaagctcgtgcgtgggagttgtcaaactcacgaccattatcgcattgcaagctttttatggtggtgccaaattgagtggcaacaaaagagaaaaaattagcaatagtgggaaatgtgtcggatttgaggcggagagggaatgtccacaggaagtgggagcagtcgtcaaggatggtgagatagtacttgtaaccagaaatactgggtattggagaagtccatagatcacagtgaacgagatcaaagtgacgtggagcacgagactgggaaatggaaaaaggaaggcgaacatgatgaccaagttgacatgcgtgacagacatcgggggcagtagagcctttattacatgaaatagaggatgaactagttaaatgacgaagggcgtcgtggctgatgtgaccaagacgacgatgccaaagctatgaagaggcactggtgaggaggacttggggggtagtggtggaggacaacgggatggagagtggatagaggtcgcctgagctattgcacctggcgatcacgctccgtgtcctgagatccttcacagaaaaaccagcggggtcaaattcaacagagcaattattatcaattgtgaattgacgaacagagacaaggtttttgataatagatggtgagacaagcacattattaaggtggatcagacccatatgtgtggatcccgtggagacaacgggcaaggaggtcccatcgccgacaataattgaagaaggagtggaagaggaagggggatggcaataagttaggataccggaggtggaagccatatgagcggtggcgccggagtccatgtaccattcaccggctggcggggtgagtgtcatggtgttgaaagcacctgctaaagcatgttggtcccatgggccaaaaggaccaggagccgcctgctgctgggtcggcgaggcccgctggacggcccagggtgcagccggaacgggagcaggccaggtggacgcgtttgccgtgggccaggtgaatggggcccagccggtgggagtgggcgggggaggcccaagtgc

SEQ ID NO: 779 - DNA, 728 bp, Zea Mays
cccgccgggggatctggaggccgcggagatcgatcggatttggattttggaggcgcgggtggaggtggtggtggtggagctgaggcgacgaggccacgagggagtcggtataaagaaaaggattaattaagctataactggatgttctgctgaatggggttgggtttgggtcagaggtggaagctgctcggctggctcgaggtctcggtctcggctattggtgcttttgcttctttgtggtgggtttccaattggaggcaggaggaacgaaacggaacgaaacggaacgaaaagagagcaggacaagtgtgtgtgtgtgtgtggtgggctggtggccgtgggggctgaggggggaaaaatggatgcaagtaacgtttgggcgtgtgcttttgcgtctcgcgaactggtaaacttttatcgttccgagctataagtataactggatgttcttcttctacctggaagctttccttaaagaggaatacctttgcgtaaatactcagcttgctgtaccgttggtagaaaaagtacatgcatgggctgggtagaagcgagtcgagtgcgagaagtgcaggcaccgaagggatatcggcacgcacgcacgcacgacgccaaggccaaagagacaagaaccttttgagacgctaacggagagcatggacaggggaagaaacggctggatctacctagcagcgacaataacttctgcatggtggtgatggtgcccg

SEQ ID NO: 780 - DNA, 518 bp, Zea Mays
tgtaggtcatggaaactgtttttgaattttttgacatttgttagggagatatgcgtacagatggggacataatgctgatatccaagtcgataggtgccatagagttataattaaaattcagagtacagtagtaggataggagagcagtacagcttaccttcgagatgtaccatatccatcaaggtagaggatgatgggagatgagaggagcaggataggagaggtggtcggcgttccgaagcaatcccaccctcgttatcgctggcatcgacgttctcatcggcgtaggtgtcgcggcgcagctccacctcgatggcgtgggcatcgacaatctccacctcgtcggagtgggcatcagcaatctacaccttgtcggagctccacctcattattatccctcctcttcacagattgaatgacgctgatgtcatctccctcatctgcgcgtgctcggacctccgcatttatctccatctatgacacctctagctggcagaacatagagatcgtggagctgg

SEQ ID NO: 781 - DNA, 345 bp, Zea Mays
ccacgttcccctcacctcgctaccctctctctcattcttgcacggccagcccagcgccctcgttgtgctcgccttcccacacaactgtcgtcgtcgtgtgcctcgccgtgcctcgtccgagctgtgcccggcgtcgcgacatcccgcgccggccctggtgcggccgttcccgaagccacgggcagccaccgtacagcgccccgtcaggccacacgtccagtccttgcgcgcaattgcattcggtcgacgctgtctcgccgtgggtctgtgctactctcgtcgtcgctgaggttagtggccaggtgaggctccctcttctcctccctctatccctctcctctctat

SEQ ID NO: 782 - DNA, 473 bp, Zea Mays
gggggagccagtttggaactctgatgaggtagaaaaattgtatacttggatattccgttgaaggataatatcaagggatggcggtacgattggtttactatggagaatcataacaactctctctccttgttctagaagacaaccagatgtgtgggtccctagctagatagagcgcccgactgattccgagatttctgaagcaaaagcattgctagctaacattcccaatttgaagaacaagggcttgaccgctgaagttgttgtaattgacttcgtgttctagaatattcagccattaaaagatcgagtacctcccacttatgtgtttacccagcgccaggatccttcccggttactgaaagggtaatcgcagagggagatgttttgaaccgagttgaaatgatgtcgagaggtgccattgtcaacgagggtggccctgaggcttattctgcatggagtctccgctctgcggt

SEQ ID NO: 783 - DNA, 454 bp, Zea Mays
aaatgctatttttacctcctgaaacttgtctcggtgtgtcgtcatttaggtccaaaactttcaaaatgttatttttaggtccacaaacttgtctctgcgcgtcatctaggtaggtccttcaactcgtcatagtgtcacttgggtccaaatagacccgatgtactctctgcatcataatgtcacatgccacaccccattcttgatcagggcaggaatttaatggcaaagcaaatcgttcgactacctcttccgttcaggtgtactagtcttggcattgctgccaccactattgttgacgtcgtggtctttgatgtggaggatggtgaaggtatggattgaggatggtgagttggcaaccatgatgcgaatatccactagattggaaaagcagagggaaggggagatatggagacggtgctagaagagatcggaggagtatgtagatggagtgcta

SEQ ID NO: 784 - DNA, 781 bp, Zea Mays
gatcaacgaaaggttgattccataatctttaggtcatgcttgcatcatgttcaaactatactaaataaatcttcccctcttatggaggtatggcacgtaccaagaccacccaacgaaaggcaaccggacctcgtggtgtgccccgacaccaaatggctccttgacatgaggggagcagtagtggaagcaatgacccaataggggatcttgaggccagggtggaacgacttatgtcagaactaagccatggaaatagggagcgagcgcaagatagccgccacatagttgagctgtcagcggaggttaatcgcttgcagcaggaaatcgtggaacgagacacggctaccgactgggccgtaaattcgcgccctttcgcttgggactgcgaggaaaatgatctagcccgggtagcggaactaagcgcagctttggagaatctgcaagcataatgtaacactctcatgaggaagtgcacgtgttatacgaccagctgcatccgaatgtaccaccagaggttgcagccatgggagctggaacatctggagcggctagtggaggacctgatggggagttggaccttttcgaagcccctccttccatgaaccccgcagatcatgaacgttctcccgatgctggcagtggagcaggagcggccaaggacgaagataattagagtagtgtagttgaagtagtgtccttatgtaaattaaataaggaagttgagttgtactaatgagtatgtataattagtactagtttggcatgatgtaataaaggtggt

SEQ ID NO: 785 - DNA, 358 bp, Zea Mays
cgcgacacccggtcgacaccctcacacgcgacgatgttcatgacacacattgctaaccacttctcagccagcaacctattctggttttcctgcggcataatggtgtccatcgcgtcgaacattgcagcaaagtatttgagggcctcacggaaccttgacacaaagaaagccccgctgtatgatccattgaggatgtcatggatgaacacttctggcctcatattggcgatgtttttgagcaccgtgtctctggggtttggcctgtcgacagtgacactctcatccatcaagtttttgaaacagaaatgggagatgacgacaagcacctcatcgggatctatgtccaggtcctcggcac

SEQ ID NO: 786 - DNA, 451 bp, Zea Mays
gaaggagagaggtctgactgccgaagctgtggttgctgactttgttttcaagaatattcagcctttgaaagacagggcgtatccagcttacttgtacagtggtattactgactctacccgggtcaccaacaagaaaattcctactgaggatctggtgagccgactagacatgatcccgagggacaagatatcaaatgttggtgctcctgttgcctattctgcttggaatctgccacctcataggtcatttttcaattttgtgtccaaccctcctactagtgatggtggtctgggtcttagagtgcgaccctctcccgaggacattgaggctctggttgctccccttcgtgattttcccaatgatgagagatagattcactttgagatgccagcaagtccagatgatgcagaaatagatgttgtactcagtatgttagctggagaatcttct

SEQ ID NO: 787 - DNA, 558 bp, Zea Mays
ctggaagcaagagcaagcggatcgggctggcattgactgaagggataacaaagatgacggctctgcagacgctgtctgggattgaaatcgctggaagctctacggccggtagtgatgatgttgccaggggtggatcatataaccaaggaacagacaagaagaaggaggcacagccaggctgctgctcaacaaccgcgagcaccaatgcaacagatggctatagtggccgctgctggcgatgcaaggcggctagcaaagggtcgacgagaggactgcatgccctggagaatctgacgaacctgaagaagctcactgtctacaggcttcggaccttcaccgagatggacaacgttctactggtgtctgccattgagcacctcagcagctgctccctcaaggttcttgctattgatgatgacttcacgggcttccttgacagctcgctcgtcgcttcacaggccccaccggagcacctgcacaccctggggctctccggcatgctgtccaaggtgcctgactggatcgtccacctgcacaacctggagagcctgacccttt

SEQ ID NO: 788 - DNA, 652 bp, Zea Mays
gggtatgtgtgttatgatctcaaccgtccacataggatctgatgtcccaggcgctttcttcctccctggaacacgccagcggtggagcccgagcggaccacggcagaaggctcgccggagcacgccaagttctgggttctggccgtcgatgtgggataagactaggcgaaaaagggaccgaagatcctaacgaacgcgatagagagcaccatacctgggatggatgcgctaactgacctacccacggtggtgagtagtagtggtgcatcggtgaaggattccggccgcctgaagcgcggcttcgcccaagcaaggccacggacgagtcacgcccagcatagcgaagctccctggcccagatccgaggctcgaacggcaacccaaacgagctcccgcgatggagtccattctctctctccctcggtccgtggcggactggatggcggcccgacgccccacacggcgctggagcagtagtgaggccggacgacgggcactgcatactggccatggcacaagctcccatcatcatacatacaggcaatggcgctcgcggttccttcttatccccctgctcaccctctctgcccttccgtcgctcgagtgattcctggcgcgtatgcataacagaaggggaaacggcagaaggcgg

SEQ ID NO: 789 - DNA, 435 bp, Zea Mays
gccgccccatagctcacttttccttgccccgccgtgccagcatcgttaagggcggatattgccgccgccatagaatctcgggccgtgactagccaaagctttaggcgggagttcaattggattcgcttggtcgcggtgaaggttgccagcgacgtttctggggcgaatcggggcccagcaccttggatttctcgccgttgagttgcagtccaccgcgtaccgcactgctctggagccagggcacgactcgacataaacctaggtataaacgcttatcccatgctcgcgttgtccttctgctctcgttgcgcgcttcggcagggtggttgggggattgttatcgggttgggtttgctcaccggcgtggtctccgccgtgaacggaggtgagcgccgccgtgcccaatgtcagattaggggaaggaatgtgcaccgt

SEQ ID NO: 790 - DNA, 538 bp, Zea Mays
gctgagcataagaaagtatctgaaatcaaacacctgcatccattcaagcatgaggtggttcctttcatgctaatcgactacatctttttatacactcttcttatgtgcctaagagaacaatgctaacctctatactgcctcatttaactgttctatagaaagttgagtggttggtaacagttaccattcttaagattgatcaactatggtggtacgagtcctgtagaaagtgcctcaagaaaacaaagcctcatggtgatgcctataaatgctcggacgctagttgtggccatgttggtccgcctaatctaaggtatgtgatgtttcttggtctggtacatctatgcctgctgactccttaatcatagatctgtgactgctacttaatgcgcaggtacaggttgctcatcacagcaggagatgagacaggcgagactgatttcatactatttggacgtatggcacaacgcattgttaagaaaccacttgacatcttgatcgcagataatccagccggatttattcccgatgaaataac

SEQ ID NO: 791 - DNA, 678 bp, Zea Mays
gccggcaggaagtagctgggttaggcaagcccgatccaagacgacaaagaccgacgtctgagttaggcgctactgaagcactgatatctcaggtgatgcagttgcaagcacccggggagctatgcattcggtgataactcgggcgacaaggcgatcaagactccggataaattggactacaagttgcaacaaagaaggagataagtaaagtagataatgatcacaacttgtaaaggaataactctctggtcgtgtatataaggccaagggggaacccctacaaaatcatctcatcttacaccatttcacccctgtcctcatcaacaacaactgagccatctcaaagctcaattgtaatcctcatactccagaaatcaatacctagccacaacaggacgtaggatgttacacaattcaaagcggcctgaacctgtataaatctacgagcaatactgacgtgcctctgcacgtaccattgagtcacaatcaacgacgtcgtcctacccaaaagcaccaagtgggtaactctgtggtgcgcggtcgggtcacaaacatcgatagtgccagacatgtccttcccccaaacgattgtcatatctatcgcaagggccagtatgatatgtcacatctatgggcaacaaggcctgagttgttcaatatgatgtatttggtagctgg

SEQ ID NO: 792 - DNA, 486 bp, Zea Mays
gaatgctagctcagctcaccgtcgttgatcgccgtccggattcgtgcagggtattggatggataacgccagaaaaagggtaactcgtacgtggcaccatctcctgagctcggccggagttactcaccggccgccgtgactcagtgagctctcgccgcgctgtcgcacatgctttgattcacctcactatgcctcttccttatgtggttgccatgcgttaatagcccacctcgtagccgtggatcgatcaccggaccgccgtgcctatatataggacagggagccacggcgaggtgctcgctgttcttcaagtaagcttgagtacaaccaggaattcacattgccctctccaccttctcccaaatcgaatgcgcacggtgaaagcacagcctctcacggtcctatagccccgatcccatctcccaatttcgcccagagccgccacgacaccgttttcccctttctctgtctccggcgagcgaaaagc

SEQ ID NO: 793 - DNA, 593 bp, Zea Mays
cacgccctacctcccttttgagcaccgctcgcgcccgctctctctcccctatctcatttcacccacgcccactctctcgtgtgctctgccgccgacgccaaagctcgccggagatccacgcctgccgtgccaaccgtccaagccactcggagccgcatcaggccttcccgagcatcgtcccgaggtgaggaactcgctcccgtgctcagtttcccttatttttgtcctgctttgggccaattcgcgctcactggagctcggccgcgctagttcgatgcgcccacgcagcgaccgaccaaattagcctcacccctgctttggtccgtagcgtttcccttacctcgctggagctagtccaagccttagcacgcccgattccccctccaccattctctcggctctggtcccgttctcgcggccggagaactgccagtgagttcgtcagacgctcgtcaccagttccagccatccccagcgaccctagactcccggagaccactcctgccctgtctccggcaacttccctgggcggtcaagatcatctgatacccgttcgtttggaaaacttgttaaaagcccccctcggctttttg

SEQ ID NO: 794 - DNA, 567 bp, Zea Mays
gtttggagatgcgtcgtgggaggaagactgactatcttgaaatcccgctcaaggatagtatcaagggatggcgcttggagtggtttattgttgagaaccacggaaattctctcccccctcggtcagggagacagctagatgttcgcacttcgagttggaccgagtcccccacggatcaggaggtggctgaggcaggggctttgctggctgaagttggactgctgaaggagaggggtctgactacagaggctgtggttgctgattttttcttcaagaacattcagctgttgaaggacagggcatacccgacttatctgtaccgaggtctagctgactcaacccgggttaccaacagaataattcccgctgtagacttggtgaaccggcttgaaatgattcttagaggcaaggtatcaaatgttggtgccccagtggcatactcggcctggaacctgcctccttccaaggccttcactcattttgtgtcgaatccacctgtcgctgatggcggtttgggccttagagtgcgaccctctgccgaagaagttagcgctttggttgcctcgc

SEQ ID NO: 795 - DNA, 686 bp, Zea Mays
gcaaagagcttagattgcaaaaattataacttggaggcccaattccaaagatccgaaaaacaacttcctaaagcttgtttaagaagaaggtgatacatttgaagtaaaaacggttgacctagaagttaaatcatcgaggggggacttgggacgctgcgcgggaacaatttccatgacccgtgtcgcttcatgtgcattttcagtataaaagtggctgaggaggtgagggcagatcacatttactgccttcacctaacaattgccaaaattcactttgctccaaagttatttgtttaggagcacttcaagagttaactttggctgaatcagtcttagtgaaagatcattgcctctgctcagatggcctacataggtgtcactagggagttgattagtcctacctccttagaggtgcaataggacactttgcctaccgatgaggcgacgaagacctcatcgtcgagagtagctacagaaatgccgaaggacaggccttcgaagccgagttataatgagattgagcgatctacattgaaagagaaagattggcaatccatgaggagacttggatactttagtaatagagtgaacgtgtgtcttcccggggatgaaacaacgccgatgcccaggaaagacaaagttgttgtgaacaagagtttctttaaggctagactttggctccaaat

SEQ ID NO: 796 - DNA, 748 bp, Zea Mays
ggcatgaaccgggcaacgaaactgggtggagacccaggcgaaaaagtgagtgagggtggcgaacgtgtcaaacttcagacgaaggggaaaagtccaaagaaagtgagaaaaatcaaccaaaatcaccaaatagtatttatatccagtaagactgagtacaggggaagtccagagatcacaatgaactaaatcaaaagcctgctcagctctagaagaagatgtaggaaatgggagacgagtgtgtcggcctagctgacaagcatgacagagcccctcagaatgatcccgactacatgaaatatgtaaactgttggtgagcttggtcatgacgtcaggtcctgaatagccgagacgacgatgccaagtggtggaggaggtggtggagaccaggacgggtggggaggacgcgccggtggaaaaggcctaagcgtgtagaggggccccgagctatcacagcggacgaggggggtcctggtggccagatccttcacaaagaaaccaaaagggtcaaactcaatggaacaagaattgtcggtggtgaatcggcgaacagaaagaaggttgtaagtaatgtgaggagctacaagaacgtcgttgagatagaacggtccaggaagaaccgaggcacctactgaggtgaccaacagagtggaagtggaaccgtttccaacgacggtcgagtagagatgggagggatggggaggggaggagtgggggtccccagaggcgggagctggggcgaagtcgg

SEQ ID NO: 797 - DNA, 691 bp, Zea Mays
gccgttggtgaactgctgatcgccggaacgcactgcgcgagcgacatcgtccagccgagtcattcagtgctcgtcaagacacttgcgactccatcttggcgaagtaccgccgcggcatcgtggagttcgtctccacaacggcgtcgtcgacctgttcgcttcgggtgcggtaagatttcttctccgcgctctgtaatatttcctacatttacacgcgcggggtggtgagcggttcgccgtcggggagggtgtcaggcagtcggtgtggcgcgtaggcctgtgcgccacttcggctctggccagaggtagaagaagccagggtgccatcgatcttaatatggacgtacgagatttgatcgtggctataccgcgggataagaattggacgactatgattcagtagagtttacctgttcggccagggtatgtgctagccgttgatgcgatatcaaacgaacgcaaatagatcttaggattttatatctgaaccgttgaagttagatccgatggtccgagttagatccagggttcccctttcatgtaatctaatccgagcccctgattttcaatcggacggttctggtgaatcgataccccttcacccgagacttttgctaaagagaccccgagtgaaatagaatttaacccgcagtccagggaccctattctctgtgtctgggatatcttgcgc

SEQ ID NO: 798 - DNA, 910 bp, Zea Mays
aaaatggcatagcctccagttgaacgtcgatcatcaatgcatctcgcccagtctgcatcggtgaagatgcttagtaaactagatcttgatggtcgtaatgacagtccagtattcaaagttccttttacaaaccggagtatgcgcttgacagcctcccagtgtaggattgtgggtttggagaggaactgacatactttgttaactgagaatgacaagtcaggtcgtgtgagagtaaggtattgaagagcccccactgtactccgatagacaaaagcatccttgtctgtaagaggtttcccaattgctctggataatttttcagtggcacaaagaggagtggcaactgacttacagttttccatatgaactcgactaagaatatctctagcatatttctgttgagtgagtgtcatgcccccagaattgtaagtcacttcaataccaagaaagtaatttaactaacctagatccttcataggaaaagagactgagagttgctgcagtaattgccttgttgcttcaggagaggagctggtaatgacgatatcatcaacgtacacaagcatgaacatggtgatgtcgttggccaagtagataaacaaagaagaatcagcaactgaagaagaaaaaccaagctggtaaaggcgctcactaagtcgagagtaccacgccctgggggactgttttagaccgtaaatggacttgtgaagcttacaaacattgtcaggtcgagaggcatcttgaaaacctggaggctgttgcatgtatgctgtgtcatcaagaaaaccatgaaggaaagcattgctgatgtcaatttgcctggtgtgccatccacgagagactgcaagggaaagaacgagacgaacagtagccggtttaacaaccggactaaaagtctcatggcaatcga

SEQ ID NO: 799 - DNA, 401 bp, Zea Mays
ttgaagttgagccactgatccgcctgagtgaaggtgatcgggtgtttgtaccatcgatatggggcgggaggaccagtggtcgccaccagtatctgacggtcgttgagcttttgttgcctcttgctttcttgcgacccatgtccgccgaagatgacgttgacttctccgtcgatgcgtgggaatgctctgcctcctccccccctcccgttgttggggttgtcgaggttctccaggtcctccttgtggtgggggaggttgcattggttggaaaggtcggtcattccccatggagtgcttgaagtctctgcagttccggagggtgtggcgcatgtccttgtggtacgggcactgggcgtcgaggatgttgtccagcgtacgttcgcctccgcgaggtcctcctt

SEQ ID NO: 800 - DNA, 1044 bp, Zea Mays
acatcaacttcttggataaaaatcctaatacaaactaaggtctcctttataactcaggtggcctaacaacttatctgctaaacttaagggataactgaaacagactccaacaaacacagagataaaccaggggataagcccttgctacgactcagggctgtgcgctggcctactgtcgcgccccccttatttcttgttgtgcttgctatactgacgccctacaatggagtctacaacatttccttccttcccaacaaaaagctcgtcctcgagcttgaaatttggatagtgttgcttgaagtcttcaatctgttcccatgacgtatctgtctttgaacggcccaaccactgcaccaataattcccaaacgcctctgttaactcttgcacacagcacatgttcgggtgttggaatcactcggccatgtaacaagggtggcagtgaaactatctggtctggggccgagccttcaaacctcttcaagagcgatacatgaaatacgccatgaatctgagcattcctgggtaattgtagtttgtatgaaactatcccaatcttttgcagaacctgataaggaccaaagaacttggggactagcttggtaggagctgctgatgtaacacccaccattgtgcgtagctgtagtcttagccaaacccaatcacctacattaaactctacctccctacgacgcttgtcgtggtattgcttcatggtcacctgagcctgtatgagacgatccttaatgtctgccaagaagtcatctctatcctggagctgtttgtcaaccgcggccacatgggaacctccctgtcaactctaaagggggggggcatttgaggacagtctgataggacgagttatagcaaaactctacccatggaagccatttaagccatgactttggccgatcacccgcaagacagcgaagatacatggttatggttcttattggactatttgttgagtggagaaccctagctcttggggtacaaatggagggaaccctaatgggccagctgacataaggcccagatacataaa

SEQ ID NO: 801 - DNA, 417 bp, Zea Mays
ggaggccttcgccttggggtctttgaggtcgcccaatgaacttggcttataatatggcgttgaggtagaatgattgcccttcgcgtcgctcaagccctcatcccggcctagatggaccgcgctagaggaaaaaggtcactaggagcgaagtccttgggaactttggcctcttgagatggagcctctgatgtgggttaggccctcgtcccccacagaccccgactaggatctacaaacccttcatgttttatgagggggacctcgcatgcacgacgtagtcctcgtccttgggacttgctggcaccacatcggtgtcttgcattcgtagacaaggttagtaagcgatcggcgtgagacatgatcgaggtttggttcgacattcgtcccaataaggcactaccatcaaaactctccatc

SEQ ID NO: 802 - DNA, 600 bp, Zea Mays
atgaaccggtaggcgacggagatcgtcgaccctaagatcaacagccatgaggcagccacgatctgacacctttctgcaccctccatcgacaatcatatggcccagatcaaaccacaaagcggtatatgatggttctaatctcagccataggctagagatctaatggacaagattttattaaacgctaacaaacctccatgatccaacactagattgatggtgcagatttacctgaccgaaaccatctgcacgatcaaacctgaaccgttttgtatgatccaatggtcaaaactctatcttccccaactcgccaggaatcacggcggccaccccccgcccgcgcgctgcgctcacagtggtgcacgccggagctctcggcactggtactctatccctcattccaaaacgttctacaccattctcagaccatagcaattcacagggaagaggtctcaccagagttttcattatgcagattgccgcccacggtgagacacgcacccacgacggtcatcaattctgatgacaaatcggggctggctcgggagaggatccttcaccgagtggcctcggtaaccatccccgagccatggcgaagac

SEQ ID NO: 803 - DNA, 376 bp, Zea Mays
tgtttctaactcagatggtcaataccaggaagggtggtggaattgatttacctcccagatgacacactcggaggatatttagacaaccccggccacaaccagcagagatggatcctccaccaccgcctccaccaggcggagttgacccaatggttgcagctcagatgaggatgatgcaatagatggtggacattatggcagatatgcgtgtgcagatacaacaggaacgccaggagatgcaccaagagagagaggagatacgtcgggagctacatcaagaacgagaagagatacgccaggagagaagggcgcagtagcagcagcagcaacaacaacaacaacaagcaccattgcctccaccaccaccaccagttcc

SEQ ID NO: 804 - DNA, 689 bp, Zea Mays
gtcaataccaggaagggtggtggaattgatctacctcccaatcgacacactcggaggatatttagacaaccccaaccacaaccagctgtgatggatcctccaccgcctcccccagttggagccaatcccacagttactgcccagatgcggataatgcaacagatggcagacaccatggcggatatgcacgcacagatgcggcaggaacgccaggagatgcgccaagaacgagaggatatatgccaggaaatacgctaagagcgagaggagatacgataggagagaagggcacaacaacaacaacaacaacaacatcagcaagcaccattgcctccacctccaccaccagttccacccccgggacaagcaccgaaaatttatgagtcacaagccgccgaccttcgccagttcaccaactagatgctgatgattgactgaagtctattaagaagatgctcaacatcacccaatgctctgaccgggaaaaggttctttatgcttctggtcgtctgacaggtcctgctgctgactggtgggattcttatgttgctgcccatgatgctgctgacactattagttgggcggaattcacaactcagttcagaaactaccacattcctgctggattgatgaagatcaagaaggagtttctgtcattgaagcaaggcaacatgtctgtcagcgagtac

SEQ ID NO: 805 - DNA, 405 bp, Zea Mays
ggaaatgtgtacgtgaaatctagctagatgcaggtttttctggggcaacccactaacccaaaacccaatttgcaaaaagtagacaccataggttgatccaaaaccccatttgcaaaaaagtagacaccataggtttggcgatgatgcctgctacgtcgagcatgatccgcgctggcggcatcgacgccgacggtgacattcgtgttgttcgatcagttttggcatatgatgatgatgtcgtgtggctcctgtgtcttcctcttgcggacttgagggaggttgtttacagacaatacagtggtgctagacacagaaatcattagacgaatttgtgaaacgtgggtactaatgtcttgaggaaatattgagttggggtgctattgacttggagaaatctccgcctcg

SEQ ID NO: 806 - DNA, 285 bp, Zea Mays
ggggattctcgcgcggcccaggtacctaacgccagcccaagtcgcatccgcgccggcgggtggggccctctcgtcagtcgctccctctgctgctctcttgctctctctggttggtggtacccgggtgtcaacaacggcttctccacctccgcgcacatgtcggatctcctcccttcgtgcgcatgtgtcgccgcaggaatcgggtgccgctccccttagctcgccgacctcgggaaggatttaaggcagtcgcatgcctttgtaccctagaccataagacccggg

SEQ ID NO: 807 - DNA, 575 bp, Zea Mays
gcgcggtggcggtcggagaaagaaaagagcactgtcgcaagagattggtggctttcaccgtggcgggctcaccggcgatcaccggacgtgtgtaatatgagctactgcgatgtggtaagacaccaaggcacgtggcgcatggtcgatagatggctatctccgatgagttcatccgaatcgaccgtgactcaggcgggcacggtggccggagcggaacagtggcctgagttcatccacgatgcgatatttcttacccttaagagttatcggcacccccacagagcacgaatcacaacggcgacgaggatcacggcgcgggatcaccggcggcgagatgaactgaacctggcgatctgatctgaacactgtaccatcgaaatcctgattcagagcgcctgacagacagaattgcaatgcctagatcttggatttttgtgcaagaacttgtcaatccatctgtaacaaacttgtagccctatataccagctacaattctgctatagggatcttgcccattttcttattcctttgagcatgaatcaacccaaagttccttagaactcactggtagtcag

SEQ ID NO: 808 - DNA, 331 bp, Zea Mays
aggaaaacagcacgcaagtcaactggcccaatcggtgtgccccgacatcaacttgcccctcgacatgaggatagtagcagcgggagcaatgatccaataggggatcttgaagcacgagtaaatcaacttcaagcggaattgcaacacaagaccaacatatcgattgcggatggagatagaataaatgaattaagaagtgacatccgccgcctacgggatcagcttgctgatcgggacttggcgctcgactgggcagttcagtcccgtttgctggcttgtgctaaggaagcaagggctcaagcccgagtcaaggaacttagctcagctatcg

SEQ ID NO: 809 - DNA, 655 bp, Zea Mays
ggcgatcgaagtccggcgaggatgatcttgggtctccggtgaggttctgtcgggttcgagcgcttggaaagcttcacgggtcactggcgaagctaaccgagatgctggtgcaacttggacgcgattagagcgggatggccgcggtggctgaggcttgggcagtggtggcgggcggtggcgcggcgtgctcgaggcgaagtccggtgaacttcggcttaggcaaggcctgagagcgcgcggggaggtacggccgaggccttaggctgctttataggcacggcgagcgcgagggcgcgcggcggacttgaccggacgctagggggagcgcgcgtgggttgggcgaatgccggcgtgccgactagggtcgaacacgtgtgcgcgttcattctacccgagttctggcacgtgtggtcattcatccgagcctgctcttgccttggtcagtgcacaaaacatcttctcctccctataagctaccgatcttgtgtgggggtcataggatttggcctactggtttcaaagatttggagctctgaagtctggtctgtctcccagcccgtgcccgaggcaaatcttcggttttgtcatgtctagggctcgcgtcccgatgccatcttcagatatgtgatagaggggttagttagacacgtttttg

SEQ ID NO: 810 - DNA, 611 bp, Zea Mays
aagaatcaagagaataagtgggtagaagggggtcggttcaggcaaactttgaagatccagtgcacagaaatatctgagacaaggatctgggcactgttgaatcagatgagctcggatgaatcggtgggggatttgattgcggagaggtaactttggacgtggtaccatcccgcgaactcagtcgtgcgtggccggagatatcccaccggcggtcgccgtgactcggtcacttccgccgcggtgtcacccatgcctcgatttccccttactgtgcctcttctatatgtggttgccatgcgtgaacaaagccttccacggtcgtcgatcgttagccggaccgccgtggctataaatagcaccatgggtcacggcgaggtattcacatctccaccagtgagttcagttgaagcccaaattcgcagaatcctctccacctctcccaaaattggtagtgcatggtgaaaccgtagtcctttacggccgtgtagccttaatctcacctcccaattccacccagaaccgtcgcgacgccatttttcccctttttctgtcaccggcgagcacaaattcaccgtgctccatggccagaccactctagtatggctctgcac

SEQ ID NO: 811 - DNA, 368 bp, Zea Mays
ggggaactagatggaagggtagtggggtctttgggacgactaagaaaacatgtatgataggtgttttggaaaaagatgagaaggtggaggcggagacgacacaagtggggctggcgttatagaaatacatggagtaggaatgattgtagtggaaggggaatgcgtgggaacatcatcattagaagaaatagaaggaagatgactctaggtggatatgatggtcgagtagaggggttataaaagaaaggacaatcctcaacaaaggtcacatcatgagagatacgtatgtgacaagaagagggaccataacactgataacctttttgttcaagactataccctagaaaaacatgttcaacagactgtgc

SEQ ID NO: 812 - DNA, 441 bp, Zea Mays
ggcggagacccgacgctgccacgcgtcctacttcccgtgacgtgagccagagggtggagcctgacgtaaggcctctgggccacgcgatatctgcatttatcgcggataagacgcgccgcctaacaggcgatgtgccacctcagcatttaatgcgcctgtcgctctgctggcatacggtgaccagaccatcccacaggcggcgtgcctgtccattaccgtggcagacggcatgaccatactgccgcatgtgccacgatcatcatcactcgtacgttgccagggaagcttcccctgaacgctaatgctacgcgcgctgcggatatcagggcgcaaggagatagcactggcgaccagcattagttgctccaagtattacatctgttatgttcctgggcccgcatgtcggggctcagcacccttgtacgtgcccccttgagctat

SEQ ID NO: 813 - DNA, 456 bp, Zea Mays
ccggcttctgcctcagcagggtgtgcaggcacactagggtgtagttgtgagtatagtatatggacttcctcatgcaacgtattgcagtaaacctgcaggttgtcgatagttgagctaagttctttaattcgggcctgagcccttgcttccttagcacacattagcaaacgagactgtacggcccagtcaagtgctaggtctcgatcagcaagctgatcctgcagatgtcggatgtcccttcttagttcattgatcctatctccgtcggtgacccaagcatcggtcttgtgttgaagcgctgcttgaagtcgactcactcgggcttcaagatctccgatggggtcattacttccactgctgctgctttcatgtcggggagccagttgatgccgaggcaccccaattggtcccgtggacttgcgtgccgttagcctggtgcgtggcggcatctttcta

SEQ ID NO: 814 - DNA, 296 bp, Zea Mays
cgaatctgtacccatggatatggatacgggtaccacttgatatccgtggatatttttaaacggttacgaaaaattaatatccatacccaaatatccgaatatccgttaaacccataggcccacgagctacagcccacaaggccacaacccacaagcctagtcctccaggctgccagcgaagccctcgctcggcctccatctctcattctctcctctgtcctctcccacccgaccactcctatcgccaccgcccactccatgctctatctctcctctgtcctctcccagactcccgc

SEQ ID NO: 815 - DNA, 495 bp, Zea Mays
ccgagcactaattacagagaactccgggggcaaatccagaatttttccccagactcaaattcaccccgcgcagatggcgggttgattcacctattctccgggggttcttttgcaagaaacgcggctgaaagggtatccgttgatacggaccgttggatcttcattaggcggccccgatttaaagtatccgcgattgacccgaatcccacagatcccagatcgacggctggggattcacgcagcgtgattcgcgactggccctaggattaaatctcaacggcccacaccacaacaccctactaacctaatctcctccactcaatccaaatcggacggtgagcgcgccatcttccacctcttcacgcgcgccagccacactttctctctcatctctcacgcacaacccggttctcgatgtgttcacggtggccgccaaggaagaggagcaggggcacccgctccccagacgacggcaatcccacgccatcggttgct

SEQ ID NO: 816 - DNA, 347 bp, Zea Mays
taggattcgttgctggagacatatcatgaaatgttgcgtgaagctccagaaagcgaaagaccagaactgagacaaaaattagatgatctcctttttaatgaagaaaacccatatgacagtgttagtgatgcccttctgctggataaatatttctactgtggcccagctacaattctttaaatgtctattgcagataagactaggcttaccaggatggaagtctcggttcttcagggagcatttcggtgccaaaacttctagtgaaattgggaagctgcagaacgacatggttagggaagctgcagaactggcattttatatctgccataatccgccctcctttaatt

SEQ ID NO: 817 - DNA, 999 bp, Zea Mays
cgctggactactctcaaaggtactccagtttcacgcgaaacaaccttagtgacccctctatctaacttaccgacactagttcgctctaaaagcatgccatagatagattgcttcaattcattactgtatgcgttcctcctcctaatatctccaccttgatcaacatggtgcacacgaggtccttctagttgtgcgtcacttgagccctcagcatggggttcatgctggacgtcctcctgcctagaagttgcatgaacacgccttgtgagttctagactcgcccaactacggttggtgtgaacagggtcatcgcgttgcccacgcccaacaatgaaaccaactccacgccctcgaccagccagaccaagcctagcacgaacacgacctgctactgcatctgccgatggatcactcatttgttttcaacacaacaagaattcatatggatttcagattttgggaacgccatgcttactttgtgtgtgcgtatggccaccgacgttatgtgttgtgtttgtgtggccgacgtcaacattttgaccttctccatgttcatcgtggactgcacgagattaaatgaattgttcatttgagtagcaaaagacaactagagaaccatgaggtagtgactagtgaacgtaattggattggcctaccttcatccactacgacgtgaagatcttcacctggaccaagaagacacgccaggagcagcatgcatcgtgcaaagagggccatgaggtagtgactagtgaaacaggaagcgaatagcgcatcgttcttcatgggtatttatcgctaattttccctccaaatttttcaccggccagcaccacgcgcgcgcaattcctttgcccgccaccgcataatgagccacgaagcgcgcccaaaattccttgcatgcatggtgctaatatatttccatccatgaagtttcctgcatgtgcatgcatgtccataattagctgcccacgattctctctcacgcccacaaatttc

SEQ ID NO: 818 - DNA, 500 bp, Zea Mays
cacgtatcggcactggcccggcccgatttatgcccgggcacggcaatggcccagtagccagggaaaagacctaggccagcccccatcccacgcggccactccctcagccccctcacatttttgcgctagccgccccagacaatgactcgacacagtggattcaaatccgatcagcgattctgttaccctagccccagtcccgtcgtcgcccgccgcatcgcgctcggtcatcgccttatcggtgtggagccatcaccggtggctcacagaatctccctcttctctccctcctgtcatccacggcgggtacgatatggactagctctctccttcctcccttcctgacttcccgtgcattgtcggtggtctgctcagctcggctccgtcgtcggtgtgctccctgcgcgtcttgtggttgtggatctacctcttctctcccacctctactatctactcccaagcagctaaccctaatccctaagtccctaacctaaatcgca

SEQ ID NO: 819 - DNA, 445 bp, Zea Mays
gtgaagtcatcactaaataaagttaccttatctccttttgccatgaggcaagtaggggtgtaggagtcgtcgaagaggttggtgaagagttgagaggtcgaagtggattgaatggcgacattagccacctcttcttcttcctctgagcttgaactctcttcgtcggagttccattcttcacctatgtgggcttggccatacttcttcttcaagtatcccttacccttgcctcccttcttcaacttgtcccttttgtaatctttcttggcatcttgttccttcttgtttggacaatctgcaatgaagtgaccggtctggccacattcatagcatgccctcttctttccttttctctgatatttgtcattcttccgtacaaacttcttgaaagtcttgatgaacatagtcgtgtcctcatcacttgagctatcttcatcgcttgatg

SEQ ID NO: 820 - DNA, 507 bp, Zea Mays
agcgcagggacctccgcgcaaaaattctcaatactcagactattctgagttggatggcaggttttttacagggttttacagggtctctttagcaaatattacatcacgaaggggtacaggtagaattcagtcgttggatcggcatttgagggctcggattagatcaccatcatctgtgaaccgatactcaatccgggccgcaggatccgggatccatggtctagatttcatgggcgaagggttatgtggtcgctctaatcacacccgcacatcgtccgatagacgccctagatctaactgtacgaaggggtatccagatatctaatctccaccgcccacatctggatggacgacagagagatcatcttccccgcagccctccatagccaccgcggcgcgacccaatacccgacggcgccatggccgaggcaatccgcccgcgttttctaatgcccgactaccatgcgaataggtgcctaccgaaggcacatcataccgaggattagc

SEQ ID NO: 821 - DNA, 587 bp, Zea Mays
gtaggagatctatcgtatcctaaagaaactaacatacagaggagctgttaggaaagttatcccttttgctactgctgcctcccagagatgtctttcttcaccagctagaatctgagcagtcgtgatattatgtgaagtaacatcaaacacacatttgtttctatgaattcagatggtctatgcccccccaccagaataatcaagctatttaatcccatgtcaattgttcatccaccaagtcattgtcactactagacctgagaataaaaacggaataccgaaaccgaaatttagtacagtgttcagtttctactttctagtgcggtttaaaccgaattgttactgtccaagttgcacctgtccgtgggctggccatgcgagcttgctgctttcagtcttctcacgccaaagtcaccagccacggcccgcgggacgctagatcgccggcctaggaaccaagcagacagcaagcgtttaaacaatacgtacacaattgttgcacgggtttcagcctcattggatttaaggcctgttttaggataactccagctctagaaaatttggtagagttagaacgtgtttggcat

SEQ ID NO: 822 - DNA, 548 bp, Zea Mays
ccaaccattcatataaaccaaatttcgttttaaaagtcgttttccattcatcaccgagtttcattctaatatgatggtaaccgctacgcaaatcaaccttagagaaaataacggcaccactaagctcatctaacatatcatcaaggcgtggaataggatatcgataacgaactgtgatgttattaatagcacgacaatctacgcacatatgccatgacccatctttctttggaacgagtaaaacaggaccgagcaagggctaagagactcacgaatgtaacctttatcaagcagcgtctgcacctagtgctggatctccttcgtctcatctagatttgtacggtatggggcgcggttcggaagagaagcgctggggatgagatcgatctgatgctcaatgccacggagtggaggaagacccggttgtaagtccgtaggaaaaacatcagcatactcctgcaaaaggttaacaacagcaggggtatatccaaagacggtgcatcatcaagcggaacaagcatgcgcgagcatacaagtgcataacaggg

SEQ ID NO: 823 - DNA, 548 bp, Zea Mays
ccagtgcctgcatttgctgaagctgaccccaatgggtgtgacccgactgctgtggatcccaatgggtgtgacctagatgacattgatcccaatgggtgtgatctggccaaagctgaacccaatgggtgtactgtccgcgttgttgatgaagatgaggaagaggaggatgaaatccctctaattcggaagaatagccggcgctacctagccagcggggaaagcagtggtgttccttctccagcattatctgccctcattggtctacaagaattatctctagcgaattttgatcagactcttgaagacatggtcccagaagatctattgtcagagccagcagacggtggcatgatggatgtttgcactgatgtgcctgatgctaggctagagttatcccgggcggcgtcccgcacctcatcgaccttggagcgcggtcttaagggtcaggaggctggtctggattgttctgctcccatggaagtgggtgaaggtccttcagccttagaggtggctgttatagagagcttggccctcaaggatggtgctag

SEQ ID NO: 824 - DNA, 534 bp, Zea Mays
ctcgggcagccccttcatccttcggacagatcccatcctcgagtcccaccggagctctgaaggtaatctgtgcagggcaagattcagctacgaagagaaggccaaatggcaggcagtcgaagcccattcaaactctcctttcccaaatcagaaggtcggtcgtttcgccagctttaatgcaacgtttgaaccggagcatgcgtgctacagtaagggagtgacagcccatcctccttcagagcattcaacgcctacaagcctgagccctccgaggaaggaaagcagcaacattgaagtcgccgatgcaggttgggagatggttaagcctcccttctggtggaggaaagacaggcgcaacgctcgctctgcccaggcctcgcaaagatccatctccaaagaggagcaagaagagagggaaaaaagatttttgaagcacgttcaaggtaagtgctgtaattgtttcgccaccaaccacagagctgcagcctgtactaagcccactaaatgctggagatgtcacaaggatgggcacca

SEQ ID NO: 825 - DNA, 669 bp, Zea Mays
tcactaccaattcaaatacaaatgcagcgcacaatctaacatatattgaattcccatctaaatggcgttgggacgacaaaacaagaacctggaaaccgagacatggaagagaaagaaaaattggtcgtatatactatgtacatccatctacaggggaaagatactatttgaggatgctgctaatgatcgtcaaaggtgctcagagctatgaagacttaaggacatataacaatatattacacccaacattcaaagaagcatgtaaagcacgtggccttcttagtgatgataatgagtggtataatgcttttgatgaagctgccagatgggcaacctcggatcaactgcgacatctattcgttactatgcttctttattgcgaagttggagatgagtatacattttttgaaaaagtatggcaactactagcagatgatatccaatataatatgagaaaaacattgaaccttccctcttaccagatgcccataaatgaaataaaggatcatttaattgacaaattatctgtacttttcaacaaatatggctcaaacataagagattatagtttgccacaaaaaaacaattctacggggtcttcctacggtaatcaatatattgaagaagagttatcatatgacttcaatgctttattaagtgaatcacagg

SEQ ID NO: 826 - DNA, 589 bp, Zea Mays
agctatttcgagacagttactattgtggtgcggtaataacgggtagccatcatgatgttacttggtgtgagcgacctgatgggacgtgaaatggttcgtctgtcatgtcgtgcttgggttgcgtggtggtctggctaacctccccggtcgttactattgtacctctcgtggcttatcttcctggtgctctaccccaggcggcgaggtcctgcaaaacacatggtctctttgctctatacccgtggttcctccatcgtttgttcgtggttgtccctggctttgcataaataaaggaagagtgtgctcaaggtcagtttacgcttaccatacccttgcgttatgccttttggaacctctcgtgttgttcttcctccctgtgtcgttccgacttgctccctatgtgtatggcatcattcccagccaactcaatctgagagagtctcctccatggcctagagaagaaagggttcattcccctgaaggatgtttcgaggtggagattggatagagaggggaaagtgccatgtcctggggatgatgaggtggtcatgctcgcgtccttttatgagtgcgggttcggcctccccct

SEQ ID NO: 827 - DNA, 676 bp, Zea Mays
ggcggagatttgctcccgagggctggtccgcttcttctgtcatattagatgtcccatcgggggatggcaggcggcgtgcatgcatagtagcgggagcgtaatcatgctattgcatctagacatgaccattgtcttgttagtcactgtgctcatatgcctctgtgtggggtaggtgtgcgcattaaatgcgagtgtcccctattagtcttcagatgcctttatcctatcttcctgggatcggcttgggcgagacagacagagtggtggtggcttcgggcgagacggagatttgcatgaggtgggagaccctcggggaggggccctggtgtctgtagggaagaccttcatggtagtcctcgggctaggaggtgtctcgcctgatttcctttagggcttatgtcttaacctcttctgagtgcgttttttggagtacccctaattatcacccccaacatatgccaaatatcaaattcatcgaaagagaagattatgtcccaacatttttcaagataactatttaaagtaccatctaaacactgatattcctctaaaatcttttggacaactagctgagaaccaccgaataccttcacatgcttcactcccatataatctaaaagttctgaaccgaataagagagcttcaaattcggcttgattgttagtgcaataagttt

SEQ ID NO: 828 - DNA, 753 bp, Zea Mays
gcattgaagaacaagttggtgaatgctcctatcttagccttgcctgagagtggtaagcgtttcacagtttatacggatacttctcgtattggccttggttgtgtgttgatgcaggaaggcagagtgattgcttatggctcgaggcagttgaagaagcataaggggaattatcctactcatgacctcgaattggctgttgttgtctttgccctaaaatcgtggaggcattatctttatggcaaattttgcgacatttacaccgatcataagagtctcaagtatattttcacttagaaagagctgaatttgaggcagcgtcagtgacttgagttcataaaggattatgatctatccattcaatatcactcggggaaggcaaatgtggtggatgatgcccttagcaggaccggtgttccaaaagtggccatgcctttgattgcagatctggatcgtatgggcgttgcattgtgctatgtcagcatcgctagagaggagactcggatgctcattcaatcctcccttctggagagagtgcacgtggctcagcagtaggatcgtttattgcaggaagctcaaaagagggtcggcgatggtaaaccccatgagttcaccattgatgaaaatgatttggtttgtttcaggggccgcctttgcgtgccacataaatcagaggtgaagatggatatcttgagagaagctcataaaacgccttacaccgtccaccctggcgaaaccaaaatgtatagggatttg

SEQ ID NO: 829 - DNA, 289 bp, Zea Mays
agccagagcacccgcccctgcctccgattagccaccatagcgccctaatttctttcttcccccaattcggttcttcgtgccaccgtgagccgtcgcgtcgtggaccgccatttccaggtccgttcataccctccttgctctcgtttcagcaccttggtgtgctatggatgcttatcggcccagccaattgaactagaccatgctggattgtcgggaacacctcgagtcatcctcggttcttgccgtcgtcatggacagagtgattctgactcggattcatgaaattagt

SEQ ID NO: 830 - DNA, 548 bp, Zea Mays
caaggaggggaagctcaatgagcgacatgtcatgaattgcactgttgaaggcactcgccaagcagacattgaagttgtcattatttttgtcacttggctcacgaacaagattaaaatcgccagtgaccaaccaggggcctgagatcaagttggcaagggaacgaagttcaccaaggaattcggcggtgtagcggtgatcagcgggagcatacacgttagtgagcgtgaaagtaagatcagaagcgttataggagaggactgttgagagagagtgtgtggtgctggaagtggatacgagggtaaagtgagcagcattccaggcagttgcaatccccccacgagagccatcagctggcaggaaactgtgcccagaaagggaggcaggaagaaatgatttaaacttttgagcagagatttcactgagtttcgtttcctgaatgcaagcgatatggggacaacaagaggaaaaaacatcacgcacgtcgacacacttattgtcctcaccgaggccacgagtattccaggagatgacagttataagacgattt

SEQ ID NO: 831 - DNA, 880 bp, Zea Mays
taaaaattaccataactacctccaacactggagggcaggcgtaggcaagaaaccaggcgctaacacctgttctgtgcatcgcggatggttcgacacacaaacgcagacggtctaggacaccgccaaatagtccggatcattccagcggacggtccggcaacgcccatgaaccacgaagaccatgtaccttcaaaccacaacgaccgaaaataggtatgtgaaaaactaacacgtttaatgcagctggtcgactggtcagatctggcccaaccttcgatcaattattgtctaattatgtaaaaaagaaggctggcccaagtaaccggccaccaaagcgacctcgctcacccacttaggagcgacaacaggtaagaccaattggaccacctcaccaatcggaaaagacgaaaggtcatagtgtacagttaaggcctaacgtacctgcatggacacctccaccccatatctacctatgccatatcaatatgcatacatatcaccatcatatgccctgaatcaaatgtggagcgtgccaccatatcagtttgggatgccacaacaccccgcttggggggcacctcaaacatatgtattcaataggttggcaccaccattacaagattgattgagcgccactcaatccggtcaccaagcacaggcccagcaagattaccggaccaatcggccgcaaaggccgaccaattcggcaaggggcatatacctacagctgccaagagaacgacaaaaggagacgtcatcgaaataggaacatcagatgtcgtcgtacaagaaaataacgaagggccgatgatttttggtgatttggacaacacaagcaaaaaagaggatacagatgtcaacaaaacagttgatccaaaat

SEQ ID NO: 832 - DNA, 591 bp, Zea Mays
agaagaggcaatagcacagacttgggtgggccacaggcgccgcacacacaggcaggcagaaagaaggatgccgggcatccacacgcgtgcagaaggcttgggcgatagaatttccatttgtgaagaccgcgggctacagagatacctcgtgcaacaggggacctgcgtggtacgggccacgagcagaggaaagattggcagcgcgatgacgggccgctcgaatcagacgaaggatcggcagcgcgacgacgggccgcacgaagcagaagaaggattagcatgatgatacgcctgggccttctaggagtgcgtaagggcgagtagaggagcagcgcagcctgggacagggacctgagagcgtatggttgagaagagcgagaggaagaagcaggagcaagatcaccgtcggccagggtgaccgaggtaatcgccccacagggagattgtatttccttcgatgcctagttacatgctactgcttcccctttatagaccagggtcggcatcaactgataagagataaacttgcttaacaactccctgctattatttagctaacaactcccttctattatctagctaacaacccag

SEQ ID NO: 833 - DNA, 590 bp, Zea Mays
ctggtgttgtacgatttttggagtaaatcgctcccaaacttagtctgtcaggcgcactctatggagctcccatggtacagtaacctgaatcaaattctaggttcagtgaacatcgccaccggtgaacttgcgccgcgattcatgccggccgccacgattcatgcctgtgtgaagtggataaccgtggcgggtgaaaagatcttgatagtggatgagaccgagagctggtcgccatacccacttgcaccggcgacgtggccacgcgaccaccgccgttgtgctgccgtttccctcggtcatgacacgccttaagctgtttcaccatgtcgtcgcgggtcgtgaagacaaggcagtgaccgccgtaaaccgttacccattaaatgccacgataagcgactcctgtgactcacctcctctccggccgccagcttacctttcttgaattcgaagccactgcttgtggacgctataaattgagtgtgtggtctgctctgttagattgttacaaagctagaacaccaaccctcgcccccaattagccaccgtagaccacgaatatgggttttcccccaaatcagccaaaatcgccg

SEQ ID NO: 834 - DNA, 398 bp, Zea Mays
ctctaatcacacaagccagttaacaagtagtggcaggagtgttgattcactggaagtaagctaaacctaaagttgcattaaaatgatcacattaaacttattcacataaccaacaaagccattaaaccccaataaactggcagtttctttgcacaccaattaaactggcagttttcttgcacacctctggatgactcaggctttatctatgtttttcataatcataactactggatgtctaggaatgctttccttggagtaaatgtaaaaaacaaattgctagtacttcaaatacacaactaaaccactgtgatgcatcaatgctactttgtggtagaattattctgaattccaatgtttatacttctaaatgggcttgattggatagctgcacatgt

SEQ ID NO: 835 - DNA, 973 bp, Zea Mays
gtcggtggctcgaattgattaaagattatgatttgtccattcattatcacctggggaaggaaaatgtggtggctgatgcccttagcaggtccggggttccaaaagtggccttgcctttgatcgctgatctggaccatttggggatcgctttgtgctatgtcggcaccgctagtgaggagactcggatgcttattcattcctccctcatggagagagtgcgtgtggctcagcagccggatcgattattgcaggaagctcgaaagagggttggcgatggtaaaccccgggagttcaccattgatgagaatgatttggttcgtttcaggggccgtctttgtgtgccacaaaaatcagaggtgaagatggatatcttgagagaagctcataaaacgccttacaccgttcaccctggcgaaaccaaaatgtacagagatttgaagcaaaacttctggtggaagtggatgaaggttgacgtttctaagtatgtggccgcctgtgaagtatgtcagcgcgtgaaggtcgagcataagaggcctgcaggtttactgaagccattggaaattccggagtggaagtgggagcatatcaccgttgattttgtggtgggcttacctcgttctcctcggggaagggatgctatatgggtgatagtggatcgcttgactaagtctgcgcactttattcccatgaagaccacaaattcagcttcagagttggttcccttgtatatgaaggaagtaatcaggcttcacggggtgcttaagtccattatttctgatcgagactccaaatttgtatccaaattctgggagagtcttcacagtgcattgggtaccaagctctcgcttagtgtcgcttttcaccctcagactggtggtcagtcggagcgaactatccaaaccttggaagatatgctgcgtgcttgtgttctgtcttggaagggtagctgggaggatcatctctcattggtcga

SEQ ID NO: 836 - DNA, 332 bp, Zea Mays
caccaccctacagtcacatgaccatcatgagcatccttcacacgatatacaatagcaatctaaacgtcacgttacacaatacatacatctttcctcattgcgagtataaccatatctcggcatatacccgtactcctcaatcaaataacttatgcgaccactaatacaatgcaccacggcacacacacacgtccactaatttgatcctcacataacttgtatttccaaacttactcatcacattaggcaagcacgacccgctcgtttctctaatctacctacgcatccacacatatactcgttggctttccgaatgcaaacacacctacgtg

SEQ ID NO: 837 - DNA, 482 bp, Zea Mays
gtcgcacggccttgtcgtgatagcgccttagagtctgctggtatcgtgctgattggattactacattcaaccgttcttcctcgagtacatcaatgtcctccatcctagtggcttcggcttctgctatgctttcgaagatcagcgttggcgccccgaacttgagatcagcgggtaacactgcctctgacccatagaccatgaagaaaggagtgtttccatgcagagctcggctaggctgggttcttaggctccagatgacatagggcgattcccttatccactttcccgcgaacttttcattcttatcgaagacattttttcctgagtgcctccaatatcatcccgttagctcgttcaacctgcccgttggctcttgggtgtgctacagaagcatacttgatctgaatgcttttttgctcgcagaaatcgaagaattctgaacttgtgaagttggatcctaggtcagttatgatgctgtttgg

SEQ ID NO: 838 - DNA, 630 bp, Zea Mays
attttggcccagtaatcgcgccctcgcgggccggccttggctctgtgctatcctccgcgcgcgcgtagctcatctggctgtcgcgtggggcccggtcgtcaggctcgaagcgtacccacgccgcccactcacctcactgatttgtgggacccaagcgtcaggcgtcttcaactaaccacgaaaccaccggagctgctcctcgcgatggcgcgggcaaaatccgaacgaactctgaaggattcctcggaccgagctgaaacacgccaacggaagaccgatgctgccggggtcgcgtgttgatgttgctcctgtgctcgggcgatggcctgggtataaaatcagtcgaagccagcgccccttaccttgtccatcgcgtgctggggggcgttgtgcctaacctgggagccgccgccctggtaactcgcccacgctgccgctttgtgcaagtggacgggtcggggagcgtcgctcgtgggtggtggtgtcgaccgtgggctcggtggaatggatcgaccatcggggcgacagaaattgttcactggaattcctccgccgctgtcaagccgccggtcaccatgggcgagggtctgcgccgcatgagcaccggtatgggagctctcaccatgttca

SEQ ID NO: 839 - DNA, 394 bp, Zea Mays
atcggagtcaatcgcctaataattcagagaagaagctatatatatactgtatccgtccagaattccaccatcagtttcgtcccgcgtctgcgccggatcttgcatccatcgtggaggagttgggtacgctgccattataatttcttcagcaggcagagaggcagccaacacagccgcagtccagaggaacacgcatgcatagcatacatgcagcagcagggtaccaaacagtagcaggagatggatgcagagaagggaaagtttcagccatcggtgtgtagtggcatacattgtgtcgtcgttgatatgaggatcccccacaatgccacaatgcctactaccagtctgccccacacacacacaacacacagcagccttctctcctactatacat

SEQ ID NO: 840 - DNA, 453 bp, Zea Mays
gcgctttggaaaaaagtgttcgacaagagcgaaaagcttgcagggaaatggatccgagaactaccatatgtggtctggagcctgcgaacccagccaagccgggctttgcatggaaacaccccattcttcatggtatacgggtcggaggcggtattactagtggatatgatctttggagaacctaggctagcattcaaaagcatagctgaagcagaagcaaccaggctggaagacattgatatactagaggaagaactgttaaatgtggtcatccagtcgaccagataccaacaagccctgagacgctacctcaacaaagcagtgtggcatcgatccttcgtagttggagatttagtcctccaccgagtactaacgagagagggacgacacaaactgtcgcccccatgggtaggaccattcatcgttgcggaagttacccggccaggatcctac

SEQ ID NO: 841 - DNA, 682 bp, Zea Mays
caacaggcccgcggcgctcacgccgctccggacaccggagagggagacggacaagaaaggggaccaggcgaccacccggccctcggcaatggggtcctgtcctcctcctccgccaccgcagatggctcctgtcctctcgcgatttcccatcacccccaaacccgaccccgacggtccaagcccttcgcaatcccccatccccgtcgcagaacggtcgtcgctgatgctcgcgctcaccccggagctttgcgagattcaccaccgggagcttgctccttcccccgacgacgatccctccttcgctcactgccttcgccaataccaactccacctcgaagccctcgccgcccgtctccgcccgccctcttcctcctcacccgccgccacacctgttgcacgagtccctcctccgcctccatctcttccccctcagcaggggcagcaacaacaagcaggcgcaggcggaggatccaactccagctctaagaagcgcgcgcgcgccgccactgaggtggtgcgcgccacccacctgagcccggctgaccatctccgctaccgcgccctcgtccgccgcgcgcggctcaccttcgaggcgctccgcagcaggtaccagcgccaggagacctccgccggcgtccgcaaccgccatgacctccgcgcctcgagccagatgctctccgcc

SEQ ID NO: 842 - DNA, 579 bp, Zea Mays
ccgtccgaagatgttgattacattatttgacatgcttggggaagagattatccgaagaagaaatcttagaagccagacactacgcccagaaactaaaatattcgaagggggccttagtgttcaatggcacagacgaagatgatttcctgtactgcctcccagtggcggagctccgtaaaaataacgccccgggccactctacaaatataacaatgtactactcgctttttaatttttcacattttagaggtagtaacatttaaaacaatccaatggaactgtggcagataggaaaaaggaatcagacgttcgggaacaattactcacaatagaggagaagcactcagcacataacgcttgccgctcagatgtaatggtaggggtagatttgggcagtggcgcggcgctagtgcaggccgcgcgcgtcattgctacagggacgctagaggtgaactggtggaggtggaggccggactggcggtggcggatgccagagtcagagcccgcccggccgcctcggaggttgctgccttgtgcccttgccgaattcgtagagcctgaaggcgtggagagcgatag

SEQ ID NO: 843 - DNA, 822 bp, Zea Mays
tcgctcaagtaattttctattcgatatgggagtgtaaccttcggtggtttagtgaagtgtagcacaaaagaagttgtctcttgagcaacatcgacagaagcaaatagtttcagcttcccagcattcaaagggtctcttttaataccatcttccagcattccttctaatcttctaaatttcaagaaaaaacgaccaattgatgaaacacagattggtccagaccaactgtatccaggttcttttggacagaactggataaaaatgtgagaatcctcaaaaacatttctgtgcttcttaacaaataaatcaaagtaatttacttctcgttttttcccaggtttccatgtctgtaaagcagcccgctgtttagcttcaactgtcaatccatcaatgccgtgctacataattggtaaccacatccactagtatcagatgagagtaactacaaatatattatcttggatctcaacattcaacaaaacatgttacagcataagtgtcgcacctcaacaaaacattgacgaacagcaattgcagcatcagactcatttgaaagaacatatcttggagctattagtactacttgtgatggcacaggcaagttataagaaacaggttgtaaagacactccaaaagcagcaatacgatggggaaatatattatcttggatctcaagaaaaaattcagtgaagccagacagtgcttctaaatcaataataacttctgatcctttctcactttgtgggcttattcgtaatttgcttgacctgccatgtataagttacatagttataaacaagttttgagaactccgccagggaa

SEQ ID NO: 844 - DNA, 521 bp, Zea Mays
gtctgcaggggatggagcacgacccatgctagtgttggcgagtaggcgggagaggagtgaccgtgctggcgtatgcaggggatggagcacggagagaggaacgggatgtgccagggcaggaaggagcatgggagaggagccgtcggccgccagggcgggagaggagctctgagtgtggcacagggatggagcacatgagttagagttgagtacttgagttgggtatgtaagactgtaagtctgttgggatacttgatagtcaaatacggatgggtgaagacccatgtagctcatgtctatacaaatccatctacacccatagatattaataaatttgacatgcaataaaaaataaatacacccaacctaagccgttcataattaaaacccatcaaaacaaatttatttttttaaacccacctaaaatatccgttgacacccacccatttgcagccctaccaccgatcgtctcgacctgccgtttttttacactaacagagagctcactctctatgtagtag

SEQ ID NO: 845 - DNA, 655 bp, Zea Mays
ccggggaggggtgaacccagtcactggccggaccagccatcgtgtcccgccgcggtcagtcgcgttggcagcaccggagctcaccatttctccgaccgtgacacgcaacgatctctcctccgcgtcgtaagggtcatggcaagcaaccggtcatcatccctggaccaattccctctcgcacgccatggtgagccggccaccgtaaaatatcctagctgcggtaaccttgatcttaatcgaaaattcgtgataagcttggccggagtctataaattggaagcaccccctgttccgcctactcgttacgaactcagtgaaccactcctcgcccccgattacccaccgtagcaccctaatttggaatttcccccaaatccgttctccgcaccgccgtgagcaccccctccgtcgacccaccatcctgtccctccacccgccttcctagctgccgttcttgagccttggtacgatgctaaagcttaccgtgctcccaatttgtatgtcgggaacacgtcgggaaagtctcaagctctgctggtgtacgtggaccgagctctaggatggtgttcgggttaaattagtgattcccagtgaatcgccaaggtcagaattaggtgtagaccgaattagagcatgaattattgagtatgatggc

SEQ ID NO: 846 - DNA, 878 bp, Zea Mays
cgttgtgacgctggcgtgtggggctccggtgtcgggcttgtctcccccgtatcgcaagctacgaaaaaaaaatctgccatctgcgcgaactccgcggggtcgttccaaccgaatccgcgcttctttctagctcggcttccgagatccggctcgctcggggctatataggggctggagcgccgcctctctcttcgcttgcgaccacccaagaatcgcagcagaccaccgccggagaggggagagaaggaggaaagctgccgcgcgctctgattgccgcgccgccgcagtgaacctcgccattactaccttgctaccctcggagagttgcccggggtcatcggagtgaaactaccgacgttgcttgggctctggtgcgcggttgacggagtcaccgggaaccaatttctcgccgctgggacgtgggcaccaccgtactcgccccagaccaccgcgccacccgtgcccgttttggtgtgcggggagtctcgcctgacgccactgaagcttctcatcgcatcgctagtcgagaaggacccctggacctcggtaatttctcgacggcgaccgctacacccccgccaatccgctgctcaccgaggaccgatctccagcgcacgccatctccggtgagtacctgtccaccgtgttcgcgcaaccttcccttcgccctgcatcagttcaattggggattagggcgcttaatcgccggaagggctgcgccggcgaggactcgatcgcagagcgagcgccgccgtggccggccgtagtcgctgggagagggaagaagaaggacgaccgtggaccgttgatctgcttgtgttcggtcgcgattagatgttaggataccggtacggcgggagcaatccggtccgtccgtc

SEQ ID NO: 847 - DNA, 370 bp, Zea Mays
gggagcggtggcaccatgccaggatccccccacatagcgcacccccgattgttaactggcccaaaacaaagaggaggagcgggtgaactcggtagtaatttacctaccggtgctaagggcaggagaggtgtcgccccacagcaaagggcggatccacggcaaaactggtgcgacggcgagaaattgctagagcatcggtcgtccaattgccaaattagtggtaggggcagcatctttgtatctccatgattcttcagagacaccgccgaggacccattgatgcccaccagcaagaacgatgatggcgacacaagctcatctctcactcccaatcgcgaggtcatctctcactcccaatcgcaacaaccca

SEQ ID NO: 848 - DNA, 563 bp, Zea Mays
gtgcagtgcaaaacagcgactaatcattttcagcttctatttactttaagaattagtcgtgttctagatactcgacttattctaacttatatcaagacacacttaagcatagtcacacaatagatgacgtgacggctacgtactcatgccatcacttcaccccacaatcccaagtaacaaaataactctaactgaacttggcatttagtcgatcgattcctaacccatttttcttaccaccactacacgacatgcctaatacgttaaatgacttgttcacaattcacatacatctttaccaaaacattcccacatcgcttgcaacttaacctaagcttcactacacaatttcaggacatctacttacttcatgaatatcatcgtcacacacattgactcgatttgaattaaccacacatgtctatcacatgaatggagcatttcacaaatatcctaaaacaaactaacttcatcacacatctaagacatcttgcattacaaacctacttgacttatttgaagtgtctacttgaaaccgtgagcacaatcatacactatatgcg

SEQ ID NO: 849 - DNA, 676 bp, Zea Mays
tgactaaagaagatcctggtggtacagtgacaagaaagatctgttggttcagtgaatcggccgctggcgaccccgcgtgtggattcacgctggtgaggtgattcgtgctcaccagtgcccggataacgtctcgcggtgaaaagatctcccccgtggatgagcttaaagcactattccgtccggccgccgtgtctgctcagccccgatcgtttgaatctaccctcgccagagttagacacctcacggtcttgtgccatgtgcctcagcactttaaccacatcgtagtgagtcgcgtcatgatgcctggtgatcgccggtgagtctgccacggcgaaagccactaatcgctcgcactagtacaactctccttctccggctgccaccgcgccattccaaattcactggccaccgccccccggagcctataaattgagcgtgccttcgggtccgtagggtagtcaagcaccaaagcaccaagtcgtgcctccaattgctcaccagagctcgtcaatttcggatttcccccaattcggtccgaaacaccgcgccttgtgatctcaccgtggtcagcgtgttccaggtctgttcgtgctccctgctctcttgtttcagcatccttaggttctcctgatgctcctcgaccaattcgattgagttaagctaccctagatcaccg

SEQ ID NO: 850 - DNA, 325 bp, Zea Mays
gtgcgacatgctcatgcttacttaacttagggtgaccactataccctgctaacggagcaatcggcttaagtcggcagtgacttaagacggtgcgacatgctcacgcttacttaacttagggtgaccactataccctgctaacggagcaatcgacttaagtcggcagtgacttaagacggtgcgacatgctcatgcttacttaacttagggtgaccactataccctactaacagagcaattggcttaagtcggcagtgacttaagacggtgtgacatgctcacgcttacttaaacttagggtggccactataccctactaacggag

SEQ ID NO: 851 - DNA, 365 bp, Zea Mays
ttggaatcttttattgcaactcgtacttgctactctcactttcattattagtacttccagagtagctacaagtgtttgagatggatttattttttacccagcatacttgatcattttgtcttctcattcctcaagtaacttatctataatagtaaaacgtttaataatttggaaatggacagttccacgtaaagctcatgttcgtgtagataaggcttcataaacacttgttcgataagtgatcttatgtatatgctgtagtgctgtactaggacagtgaatttgcgttgatttagtatggtaaactgtaatgttagtgttctgtcaacacgtttggcattgtcaactacaaggttacattaggc

SEQ ID NO: 852 - DNA, 585 bp, Zea Mays
tacttcttcagcagcaggagcagaagggccagcatcctgatccaagcacgacactcgccgaagccgtctctttttctttttcttctcctcggtaggtgcagttggatgactgacctagcggagacgtttcgggcgagtaccctcaagccttcgagtatccaaggttttttcaggctctgggatagttgcaatagccattgtttcagcagggaccgagtcagaagaatccccagccaacatgtccagcatagcacttatctctgcatcacccggactcataggcatctcaaagtgaacttgcctctcatcattgggaagatcaccaagtgaagcaaccagaacctcaacttcttcgagagagggtcgcactctaagacccaaaccattgtcactagtaggaggattggacacaaaatcaaaaaaggacttggaaggtggcagatttcaggcagaatatgcaacaggagcaccaatatttgatactttgcctctaaggatcatttccagtcggctcaccaaatccacagcaggaatcctcttgttggtaacccgggttgagtcggtgacaccactatacaaataagg

SEQ ID NO: 853 - DNA, 496 bp, Zea Mays
cagcagcagagcgcacccatctcgccgatcgccatcacatgcactgccctttatattattgcacacttctggtctctctcatctcatgtgagcaagcccaaggtcacacacaccaccacctgcctctctgctctggtctcaacagctcccccagtacgtcttgccaacctctctcaccagccaggcagccaccacagtccacaggccgccacagtgtgcctgaccctgacgcgctcttggacgcgtgcgatcttcagggaatgggagtgtgtgcgagacacatcatacgcgctgcctgcacactgaaccaaagctagctgggtttgtcacacagcacagctgccctgccctcctctccaagctccatgattccataccgccacagctacaaaaacaaaacaaaacaaaagaaaacaaaaatcatacgcagagcaagcaacagacactggtacggtacgtagaggtaaaaggcattaagcaaagggttcaagatcgg

SEQ ID NO: 854 - DNA, 438 bp, Zea Mays
catactcatacacagcatatctaatgtgttcaataaattacacgtatgcatcaaaattagctatacatataccctaatgtcctttttacccatcggatactgccactaccaggaatcggtacaaatatcacaagaaattgacaaaagatctaaaaaatagttacttgaattctgattaaaggaggaaagaagggatcgttaatgccctgcaaccgcaacttccaattttgggtcggactcaaaagctaaggaaactggctgatgcattatcgttatccatccaatttcgggtcggtctccaaaggcctgatctagatgcagtccagctgcttaaatccaacgccctcctttccattcccttctcctggcgcttcctctagtgcctactccgtgctcgctcgctgtcggcttccgcgatcaacccagtctctcttctcc

SEQ ID NO: 855 - DNA, 1003 bp, Zea Mays
ataatattcaggttcggaataccgaatagtatcataactgacctgggatccaacttcacaagttcagagttcttcgatttctatgagcaaaagagcattcagatcaaatatgcttcggtggcacacccaagagccaacgggcaggttgaaagagctaacgggatgatattggaggcactcaggaaaaaagtcttcgataaaaaatgaaaagttcacaggaaaatggataagggagttgccctacgtcgtttggagcctaagaactcaacctagtcgagctctgcatggaaatactcctttcttcatggtctacggttcagaagcagtactatctgccgatctcaagtttggggcgtcaaggttgatctttgaaaacatagcagaagccgaggctactaggctggaggatgttgatgtactcgaagaagaacggctgaacatggtaattcaatcagcacggtaacaacaaactctgaggcgctatcacgataagaccatgcgacatcgatccttcacagtaggagatctcgtcctccgccgaattctaacgggggaaggatggcacacgttgtcacctctatgggaaggaccgttcatagtagcagaagtcactcggccgggatcatatcgcctctctcagatggacggcacggaaattgggaactcatggaacatagaacacctcaggaagttttacccctagccgtatttcaaaagctattgggacgacaatgtactctgtaaactgggaaatatatcatcaataaaaagacttcaagagcgctcaaattattcattgtcgacctgcattcttacttaactcggggtgaccactataccctactaacggagcaatcggcttaagtcggcgatgacttaagacggtgcaacatgctcgcgcttacttaactcagggtggccactataccctactaacggagcaatcggcttaagtcggcgatgacttaagacggtgcaacatgctcgcgcttacttaactcag

SEQ ID NO: 856 - DNA, 983 bp, Zea Mays
gaaaaatctaacggagttttggaatttgaggatgaaaagaggggaggggtagattagggtttcaaacctagtttaggattttgggatgttacaaacctaccccacttaaaggaatctcgccctcgaaattcagacggggctcgagaaaaggtaagggtattccttcctcagagagtcctcactttcccaggtggcttcctcttctccatctctgctccactgaaccttacagagtctcacttccgagttgcgggtccttctgactgctgagtcgagaatcttcactagcttttcccggtattggagatccttttgaatctgaattgcatctgcctcgatgtggttttctggtacttttaggcatttgcggagctgagacacatggaacacattgtgaatatgtgacatggattctggtagctcaagacggtatgctgcgggtcccactcggctaatgacggggtagggaccgacgaaacgtggtgctagctttcctttcatttggaaccttttgacaccacgcatcggggagaccttgagataaacgaaatctccttcctcaaatctgagttctcttcgtctgttgtctgcgtaactcttttgtcgactctgagcttcaagtaacctcctgcggatcaaggcaactttctctttggcttctttaacaaagtcgggtccttctagtgtcctttcccctacactggaccacattaggggagtctgacattttcttccatacagtgcttcgaacggtgacattttgatgctggcttgatggctgttgttgtatgagaattcggcgtacggcaaactggactcccaatccctgtcgaaagttaacacacaggctcttagcaaatcttcgaggatcttgttgactctttctgtttggccatctaactgggggtggtaagcggtgctgaaatctagcttggtgcccattgcttgctggaggcccttccagaattttgaagtgaactgtg

SEQ ID NO: 857 - DNA, 867 bp, Zea Mays
ctttgtgagggtttatagtctgctcttgagtcctgcagacatgacaagacccgaatcgaggaagaaaacacataccttcggtcggtcttgagctaggtgtcgtgcattgatcccagcatggtggtcagtcaatttaagaggggaactagcggaccgagaatatgctttgcttctaggtctgggagtgacaaggttggtgagtggagtggattgaaaccattagagaaaccttcattcactcccaagcttgacaaaatcacctcacctgagcctatcacccgtgcgagagatggtgtgacttaggagcctgtgagagcccctcctcagaaacaagtgtggattccaaaacctaaccgccttgggaacacacttgttacccttcccgacatctctagcgatccccttcctggaagccctcagccacatccacctaaaaagcccaaaactcacaaacagataccacccaagagagaggtgagattccattgtgactattgtgagagggatgggcatctggctgttttttttctttaggaggaagagaaatgagcgtcgggtttctgagccgagcataaaagacatgaaccgtctttctcatggtgttcatgatcttcatgctcgaagacgtcctgcgaggcctagaagtgctttgcctcttgctggtaggcctcaggtagagagaccacagggtgatagtgactttggttcttacttcccgagcggagcacaatgaagtggtgcttactctttttctatcacttcgggagtcatggagataattgtggagatctttgtttatgggttgtaattgagggggattttcaagtttgccatcactgttagtgaactttgctaccttgctattgg

SEQ ID NO: 858 - DNA, 549 bp, Zea Mays
tggaatttcattatgtggagagagaccgcaacacggtagctgatgcattgtccaagctaggatccagtcggacataggtcccgcctagagtttttgtccaagaagtacatcacccgagcatttcactagatcgggtagaggaatgcaatactctaagccaaccagtgtcagattctgatgactggagagagctgatcatcaggtacataaaaaaatgaggaggaaccagatgacaaaaatgcagcagaacgcattgcaaggcagttagctcattatactatcattggggaaacactatacagaaggggcacatcaggagtcctcatgaaatgcattctctcagctacagggaagcagttgctagaagaggtccatgctgggcaatgcgggatacacgcagcatccaggaccctggttgggaaggtctttaggtcgggtttctactggccaacagcaaagagtgatgcagctgagttagtccagaggtgcgaagcctgccagtacttgtcaaaacagcagcatctaccagcacagcaacgacaaaccata

SEQ ID NO: 859 - DNA, 773 bp, Zea Mays
gtggtggtccagttcaattgaaggggttgtagagcttgaggagggtctagggacactagaacaagcaacagagagactggaactaacctgagttgggctagccacggttgagctgttcttcgcggtggcggagaccagtttgggggaaacaagaaattctcgagctctggcgaacgatcgtggttaattagcggtggctggatacttcactgccttacggagctcgtggcggggtcaatttatacccttagtgagcggtgggcgtgaatttgggcgagacgcgcggcggtcagagaaaggggaagttcactggcgcagtgaattcgtgtctgatgccgtggcaattactccggcgatcaacggggagcgagaggaggtcacggcgatgcggtggaagtgcatggacacacggtgcaaggccgggaagcagcggtcatcggtgtacttatccaattccgccgcggtgaacgccttgtacggtggccggaatactttactggccggagttatccacggcgatgatctccaagtgctatctagtttatttggtcacgagtcacggcggtgatggcacgaatctttgcgcagggaggtcgccggcggtgaggttgccgcgctggcggcctgatctgttttggacactgtaccatggcactgcttcatcagtaagcctgacagccatagtttagggccagatttcttccaaatttctgtggcaacacatccagatctctgcagcaatattgtagtgctataaaccaactacaactttg

SEQ ID NO: 860 - DNA, 288 bp, Zea Mays
caccgatatgtccatgatccactgcttcgtttggccggcaggaaagcccctgcctcctcctccatgcctaccctacttgtccccttgtcctacaggcccactcccgccctgccattctcgacctcgctaccacacgctccctctcatgcctcctccctgcactttcacgcctggcgctcgctgcagccaccgtctcacactcctacccgctcttcttgttttgttgctccaactgcacctccaccttcgcgtcaaaccttccaccccaccgacgacgctggagcagac

SEQ ID NO: 861 - DNA, 493 bp, Zea Mays
cacccagggacactcaaacattaaatcaaaggcgttgaaccataccggtttcgcctggccacggggacgcgaaggtgagcatgcactacggggtccgacgggagcgatggacgtcctggtgaactccagcgtaaataggcagtcacgctggagctatacagccgtaagggaccacaagttcactgtgcactaccaatttggggcgaggaagtgaggacaccgcaaaatttggcttctactgaccacaccagaagacagtgaatgccccaaggtggttcacggctcaatttaaagggatggtgacatggctggctacccgtggtcactaaggtacgacgctagtgcatggagacgatgtaacaaggaagcacggtgtggtagaatttgggcacgggcgacaccacgacacgagcacacaagccacggtgcaggttggtgagatgttcttgccccttccccggcctaatcctcaagatagtgaatcggctcaaag

SEQ ID NO: 862 - DNA, 740 bp, Zea Mays
tcatgccagggtcgggatgatcgggcggcaagcttctccgtgcgaagatcttttgctccgggtaagaccgccgcggtggagggcattaactccggttgccacgcggccgtccctcctcccggccatgtccgatcatcagcgtcggtgacctcaggtgtgccacgaccgaagcttgttactgcgggttagcaagcgtggcacccttaggagtattctccccgcaccgtttcaccggcgactgccacggttacagccaccgtgttcctctctgtctccggccgccaccgcgcttaacccaaattcccggccaccgctatcgccccctataaattgaagccaccatgagctctgcaaggtcatcacgcacccagccaccagatattgtcctcagtcgttcgcctgagtgctcgaattttggattcccccccaattcggtttccgccgccgcgatgaacacctccccgtggccagcccaactcaggttagtcccagtgtcccagttgcttgttctagcgtccttagaccctcttcaagctctatgacccacctaattgagctagaccaccctgggttgccgtgaacgcttgtgttcttccccgatacccgcggtcaccgtggccagcacaaccctgttgatcattagtgaaattaagttgggggtaaggtttgggatgagtccaattccgtgtccgtcgctcgggaaccctagtcgttgccctatcccaccggtctaggagctc

SEQ ID NO: 863 - DNA, 617 bp, Zea Mays
aaggtgaagactgaattcaggatactcttttctaaacaactttgaagagtatgtttcaacacattgcctttggccggaacaactttgaattcagaaaaaaggaatcctgtgccggagtgagaccattcgaggatataaactttgaatatcagtttgactggtgcatcgagagattggtaatatgctggattcggagtgagaccattcgaagacaagccggcctggccaggaggagaatgcccttgtcatctgggaatgcataatagtagtccctccgattaaaatttagtaagttggatataaacattacgtgtattggcatgaactatctggaacgtgcaagctagaagattgctgctgctggagactggtggtagaaacgagcatccccagccacctagacacgctcctcctactcctagtcaggagaatgagaagacgaagcccaacagacacggacgaccccagaaaaaaccaagacatgatccaactagaaattcaaaaggggcacctgctcctaaagcctggccatcaccatctgcttctggatctcatcatccatcggcagcgcctccccgaccgcatagacactcctccagagagtacagcttggtcgc

SEQ ID NO: 864 - DNA, 510 bp, Zea Mays
atttttcttcaatctcaaatcaggtacagggccggggtgaagccattgaccgatcaagcagaccaacacactcagcaactaatgggaacaagcttttatatccacggcggcgatgtcgatggcgatcgatcttaagatgaaaaacttaatgggcggttgagagtgaaagtgacaagagtaagcaacgttgatatccacggcgacgatggtgatggcaatgctgcaggagcagtagcgtgctggagactccacctcgtcacctcctcctcctcaactttacatcctcaacaccacccttgtgcatccatctattctggtttctggctgagccagtgagcctgtcgcccatgagctcatcttcctctattgcctcaacctagacgccgacatccccaccatcctcgagatctccctatcccaggtcatctgcgtcttctacccgttcgcggctgcctcctgctcaccttgagcacgtccaaccgatacaagctctactaccactctatggac

SEQ ID NO: 865 - DNA, 276 bp, Zea Mays
gcataaaggtcgtttaggattgcatctttctcggttgtgaccatttgatcaatggatcaaatggaatagaatggaggtgccccccagcctgaatagacaaatggagtatgcacataccatgagttcataatcataccattccatatttgaacaggacaatatatcaacgatgagtaggcgggtggaaagcatccagacatcacaggatgaataggcgatgcttgcatcgcttttcgggccattttgttcggccgttttgttttagcaggtgaccgg

SEQ ID NO: 866 - DNA, 1007 bp, Zea Mays
cggtagggagctggagtactggtagttgccaccagtacctgtcggtccttgagcttttgctgccttctcttctcctatgatccatgtcctctgaagatgacgttgacctctccgtcgatgcgcatgaatgctccaccccctcctccttcctattgctgaggctgcctgggctcgccaggccctcctcatggtgggtgaggtggtagaggttggaagggtcggccattcccgacggaatgcttgaagtctctgcagttccacagggtgtggcgcatgtccttgtggtacgggcactgggcgtcgaggatgtcgtccagtgttcgctcgcctccacgaggtgtccctcgggcacgagagacgggtggtccagcggcgtggacctcttcacggggcctcttctcctaatgcttgtcaggttgttggttcgcgtcacgtcgtggtgcaggtttcattccctcgatgaggtcctaggcccgctcttcagtggtgatgtagaggtctgcttctcgaaatagttgctcggaggtggtcagcgctttctgtagtatggctcagacgaaggccgagtcattagacccccggtagaagtcctcaatcattgctgcctcagtgacttcgggaatccggttcctcatggtttgaaacctcttgaggtacgaccgaagtgtttcgtccccccggcgcctgatggatttgaggtcccacggctacgccggtttgtcggagagggactaaaagttggcgataaagcatcgactgaaatcattccaatcgtcgatgcagtgtcgcggcaggtgtcgtagccactgcaatgcatcctgcccgagaacaatgggcaaatatgcagtcatcacatcttcagttgcctcggcagcccgggcggcggtcgtatagatggccaaccaacctcccgggtcctgcttaggctcgtacttgtcgacgttggagaccttgaagtttgggggccactggatggccttgagacgcggagtaagcgcggatactcc

SEQ ID NO: 867 - DNA, 591 bp, Zea Mays
tgccacatggcctgtggcgcatcacggaagttgcaaggcgtcgtttgacatgggcctctagcatgggagccacccgcattaaagaggggcaagacggccgcctaggcgtcgtttgacatgggcctctagcatgggagccacccgcattaaagaggggcaagacggccgcctgttcacaccagtggcaggcagtgtgcgcccgtattaaatgcaggtggtgtgtgcagtccacaaggcctagggcgccagtaacccgtgcgttaccgaggcaaagactattgacccattgtgtcgtgcgtgggcaacccccatcatgacttctactattcccgctacggaggcaggcgaaggggactagacgacactgtccacctactcccctacgcaagtcgacaagctagcctacatctcaacctacatcggagccttcacccacacgctgacaagacgaggcgaagacgactctagctagaggatcccgcacaatgaccaagacaagatcttggtccaccagctctttctgtcactctgcgtttatatttttagtattcccgagcccacctattcgggcctagcacacttgtacatgcc

SEQ ID NO: 868 - DNA, 449 bp, Zea Mays
gttcgccaggtatccaatgcggcagatctacacgagcgacatgaacgatgagccaatgcacatgaatccggtgccgaaacaaaaatcaatcgaaacaaaagaaatagggatcccaagaagaggaacggacgacggcgacggagtcgacgagaagaaaggagcgcttgccaattagggggaaaaggaagacaacacagcagaggggcttcatataagagattgggagaaagcagcggcatgggcgctgcggtggaaggacagggcacagtgagccgacgctgttacggagacggaggacgcttagaggcacgacaagtcgcggatttatcggattttgaaattcggtgaacagcatcacatggcggtatgggcacgcgcaccggaccgcaacggagagaactgaggagagaggagatgggcactgaccggacaagcagcgacgcgccggc

SEQ ID NO: 869 - DNA, 541 bp, Zea Mays
gcgctctctggtggggggtttgggatgcaggtgggtgcagtaactgctggaatacatggcgaagccgaggggggctcaatttatagatcccatcgatggtggtgtccaatttcgcaaggtcatgctggcggccggagggaacagggatactggagcaggggatgggtggctttcaccgtggcgcttcctccggtgatcatcggttgaggagctacggcggttaccgatgagctagtgtggctagggacgacgtggtggaaggcttggagcgtggcacagtcacagtaaagcacgacaactccggtgacggccatgaggccacgtcgccggtgaaaaggggcatgggacagcgaggccacaatagctcatgcacatccgcgatgagatctttacctggtgaacgaaattcatacgcctgtggcacgaatcccggcgaagaggtggccgacgataagcattttgcgctggcgttctgatccttattaggtcactgtaccatggcgaaatcggattcagtgtacctgacagtcgaagttcaggg

SEQ ID NO: 870 - DNA, 647 bp, Zea Mays
gctaaggtgatgaaccaccattttattcatgcacaccataggcttcttggttcagatgtccagaggcttgaatccatcttgatcccatgctggttcatacattccatcattcctaagtacattgaaacaagaactcaaaagcataggctcattcaacataggctgattattaaacataaggttagcgttcacctgagaatgaatttccttctgcaattgtttagctctactccttgtaattggaccagctatatcaagtggagtttcatttgaagatgattgaatgctaggtatgtcctcattagcctcccccacttgagaaggagtcgttctcgactcaggctcaccaacaaatggaagcaaagtctttgacattgaatgttgtactcacattggaatattcaggtggcagctcaattttgtatgcattatcatttatcttttggagaactttgaacaaaccatcaccccgaggagataacttactcttacgctgttggggaagagatcctttcgtagatgcaaccatacaaggtctcctggttgaaatgtaaccttcttacatttgtttgtgtgctttgcatattgtgctaatttcttctcaatattctttcttgtctccgcatgtaaccgcttgataaaatttg

SEQ ID NO: 871 - DNA, 509 bp, Zea Mays
cagttgatagctcgatgaaggatcaccaaccggagcaatccgcaatgcatcagtggggaccaattcagcgtcatcagcagaaatcaaaactctgtcatcaggagcgccggcctctaaggcgacttcctgacccgaagcccgtgctgctgccatacaaccagaatgcggaggagaagaccctacatgaacatccatggaggtatgagagggagaacccactcggacaccctcaggggctgggtcatagctcgcgctacccatccgagccggatcatctccggcaacaccctcgggggctgggcaaacgctagaaccatccttgaggactgagctctttgtggcagccacctctaaggctaaaggaccttcaacaacttccatgggaatggagcaatccagatcagcctctcgactcttaagaccgcgctccaaggtcgacgaggcacgagatgctgctcgagataactctaacccggcatcaggcacatcagcgcaaacttccatcattc

SEQ ID NO: 872 - DNA, 499 bp, Zea Mays
gtgccataagagtatagtcctaccatcaccaacctagatgtagaatgacccttgtaatagtcaaccaatcttataacgactttccaccagaaggaacctttcacatgagaagcatgagggacccgacctgaggcataatatgagttctagacaagatcaaccaggggatgtcatgcccgccgtagaatttatgcagaatttaagaagcagagttatgttctagatcttcaagttgagaacaccaagaccacctttgttcttcgaacgagttaccttctcccatgcaataagagagtttcgatgagtagattcattgttgcctctccaaagacaatcccttctaatgcagtcattggtattgatcacgacaatcgatagcttaagggcacacagcgaaaataggcatcgccgaaaaggtggagttgacaaggatgagtctctcaaccatatatagccaagtactagtgtcgttcagccttctttcaattttagaaatgag

SEQ ID NO: 873 - DNA, 483 bp, Zea Mays
gccgggcccaagggggtccgccaccgtctccgactagctgccgaccggcaagggagctctaggagcaggcgcttattaatgcgcacgccagatccgtaatctccgcgaccgccgcgccgtaacagcactccccaattccccatccgtaaagccgagcgagagagcgcatatgcatgcagtgcagtgcaggtacgggtacggacggcagcagcctcagccatactctgtaagctagctagcaagatccacctgggatttctccttgtttcaccagtaatcatcaatggcgcagtaacctctcacctgatacgcgtccaacggcaaagtttaggcgcgccgtgacaataacagaacaccattaattcaacgtcctcttcttcttcctccccatccgtccatctcaccccccgcagttccaaattaacacgcgtgcgtacgtgcacactgcagtactgcacagcggcattgacaacacgccccccg

SEQ ID NO: 874 - DNA, 828 bp, Zea Mays
gaagatcagggagttgccctgttgtgctaatgctaaccaacctaatgtccccgatatccattgtatctctgatgaaatgatacttgatttgaatatgttttctttgatcatgatgcactgggtttttcatgagtgccacaacaaatttgttgtccaccatgagttcaacgacatgaggtggtgtccccaaaagatttcccagcagtcgtcctagccatatgccctaacatgcaccagaagcatctgcaatgtatttagcttcacatgttgagagagccaccaccttctacttcaaagattgccaactggtagtattgttgccgagagtatacaacacttcactttatcttgtcaacatctccagtccactcgttgtcattgtaacccttcaacctccaatcgtcacccatcacataccgacacccatagtcaattgtgtctggtatgtaccatacaatgcgcctcacaatagcaccctcatagtagcatgacaatccttagttagtctctccatgaatcagtggctcatataacccactacataagccaagtcttgcatgatgttcacaaagtatctaagatttcccaccaagctcttgtattcagtgccattgactgaaggggctatgatgtcctctcttagcttggtcctagtcatcatttgtgttgtacaacgattacatcctaccaaaccagctttctctactatcctttcagcataggctccttggctcaaggtgatcacacctcttgccaattagatttcaatccccaagtaaaaactcaaaggcttgaggtcactcatcttgaattccctcttcatctgcc

SEQ ID NO: 875 - DNA, 624 bp, Zea Mays
attatgtcacttcggctaagaagacccaattgaaagtcatggagattgtggtgtgacgagttgtagtagaccgccccctaaagactgatcgtgctatggatgatgtgccaaatgtgcctgacgctcaatctggccccaatttgatcccattaagtcaggcaggagatgattgtgggactcataacctgcagacagattctcatgcgggtatccctttggcatagactacttgcagtaagtttcatgggcatcacatgttcattttggaacatgggcactttgctcatttcattgtcgtgaatttattcttgtatatcggtgcatgttgcaggagagacccctgctcttgtggttgattctatgaccgtggcacgtgtctgcttcggagatggatttattgcctccaatagtcctaaatttaggaatgaagaggagccttatgtctttgctatggccctgactcagatgatgaccgtccggttggtgaactcacagagagtgatattgagatgttgcaccatgttattccagaccaccgggatccaagagtgcatgagttcagcgatcttagtctttctcatgaggcaaatgcagaaggaagggatgatgagctggtagattctc

SEQ ID NO: 876 - DNA, 728 bp, Zea Mays
gaagaggtcaaagatcatggcatgctcacctatggctcaaatcgacggtgagggcttgtcctctggtttgaagagtaaggcacgcgttgttcggatgtgagggtgacaatgagatggtggctggactgtgaggttctgcggcaagggcatcgatatttataggcagaggaacgacagtttataatggagggagtctcgaccggcgtactgtgattggcgacgttgccacagtgcagtcgcaacatcccgaggttggtagggtaacttggctcatggtggggcattcatttagttgtgattatgacaagtgactggcgtgtgctcagacgggtgcacgaggtcttgtcgtagtgactttctgcactgaggtatcacttcaaggtctgcaacccggccctttaatatagcagtttggcgtgcatgacaaggctgtctcagggcagagggtgtaggtggggcttgccaggacgcacaaatgccaaggcagctagaggcaggcttatgatttatttacgcatgtgttttgccataggtggttgtgggctccctctgtctattgtgggcgagcattatacattttcaagaatttacctcggtgaaagacaagcttagcctataatttagaaggatatcgaggaataacccatagaggcattggtttgcatagctatcaataattctgaacaagttttattccatagttgaaaattgggatgttacatgatgtc

SEQ ID NO: 877 - DNA, 414 bp, Zea Mays
tccagccgggatgcgcaacgactgacgccataatttggttgacacctgctcctacccctggcgaccccaagccctccattaattgcacaaatccggcccggagcttgtctgcccacgacgacggcgaacgctaaggacaaaccgaggtgttcccggtgattgggtgcggtctagctcaattgatcaggtcgacaagcatgccaagcgtgcctaagtgctaaaacaagggtgaggagggcgagaacggacctggagactgcggtccacgacgcggtggctcatggcagcgtagagaaccgaattgggggaagaaaggaattgaggcgctacggtggttaatcggaggcgagggctggtgctctggcttcgtaacaacctagcgaagctcactgtggcatcaatttatagagtgcg

SEQ ID NO: 878 - DNA, 441 bp, Zea Mays
gattcactcctttccgcctgctatatggatcagaggccatgaccccgcaggaaataaaacatgggtcaccatggacaaagcttcagccgtccccgacgtagatgaaccaacctccaaggacctcatcgacggagaccatgtcttcgccttgtaggccctcaacaaataccaagctcaaacaaaggcatggcgcgatcacacagtcgtcccaagagaattcaacgaaggggacctcttactcgtccggacaacttggacaaagtcacggggcaagctggagccaaagtgggagggtcctttcatcgtcaagacgaaggcgtcccccagtgcgtacaggctaacaacgccatccggcgaggacctggagcattcctggaatatcaataatcttcgtaaattttttgtttgaatccctagggctaacacgcccttgtaattcac

SEQ ID NO: 879 - DNA, 460 bp, Zea Mays
ctgcggtggaggcttctccacgtgttacggatgctgaagttttgcctggtccgagtgctgggcgtaggcggcgaagggcggtggcgaagcgtagagtgagtgaagtggatggcggtcgacttcgtgtgggcagggctggcaagcgggaattgttatcctcgccggttggggcgagtgtaggtgagggggagttgcgaagtctttttgagggtgaggagcttagaataatgctatttaactatagggagatgggaatcattccgaaggttgaaccaatgtaaggtgtgatgccctcactatacgtgtgtaactatagtttgtatgatgaggctgtgcgccttcgcgcatccggctatgtccataggggcgttgcacacttggtctagcacatttattatgtcggtccggctgcgcctgtagtcggtctttgcgcggacagtttcttggtgtagacttttgc

SEQ ID NO: 880 - DNA, 426 bp, Zea Mays
gaggagtttagggagggtagcagcaagagaagtagaatggagaagcacaatagctgttgtgttctagaagggagagaatccgggtacatgagagaatggaggaagaagatgagcagtagttggaagatagagtctaggttctcaaaaatcattcttccctcctgctttcctgtacagttccctcttttgtagctggaggtgacccattgccaacctgtcgactgcatctgaatgaatgacggtgactcctcttttatagtactaccgcgtgtctgccagcttcagaatgtcgaaatcatcccttgattatgcagtgaatgtgcctcgataagaaaaataaaccagatggacaacacaagcgcatctgtgtctctttttaatgcatgaattagcggataaaactagtcgactagttctaggttatgg

SEQ ID NO: 881 - DNA, 368 bp, Zea Mays
tgagacacgagtgggtgtgctaggtgcttgaatacctagcggagctgagggcacactcaatttataggattcatgtgcggtggcgacaaatttggggaaagacgcacggcggccgaagaggggaagagtttctggttgctcaagcatggcgattgccggtgcaatagctcttgaggtggtaaatccagatgcgccacgattactacatcatggtaaaggactacggcgtggcacatttggggtcatcggcgtaccacggcgacaccggggatccggccacgttgcgcggctgcaggcgcagttgataagcttcaacccgcgatcaaatccactcccttgctgatcttttcaccctcccggtactatcc

SEQ ID NO: 882 - DNA, 402 bp, Zea Mays
aggaaaaattcaattgctactttgactgatgacaatgggatcacgttccttgagcatgaacataagtatgatcttctctgggaggctttcaaatgcagattgggttcgtctgacttttcaggcattggttttgatctctcagaacttttaaccagtaatgagcaacttcatggattagattcaccgttttctaaattggaaatcgatagcattataaaactcttaccttcagataaatccccgggcccagatggtttcaatacaaattttatcaagaagtgatggcatgtcattgctccagatttctatgatctgtgtgataaattctatcatggtcaggtctgccttagaagtatcaacgggtccttcattgttttgataccgaagatggagagccctcag

SEQ ID NO: 883 - DNA, 451 bp, Zea Mays
agttgctccagctacagctcacgtcgcggctttgttctgaccgcccttctcagatgggtcacgacgttcttcggcagatttcactacagcgggcaagttcttatatcagctcatgagacggacgcttctgcgacggatgggttatagggaggctgctactcatatccagctctggctcctcggtgccctgatctctcattcagagtttgatgttgttgacttcctcatttgtgagacagaggacaccatattggattgtcttcgtgctcggtgacagctgccatatactcactatctctgccacatcttcgcacagctgatccggccaccacagttccagggcacccttgaggcctctcacctcctctttggctcctaccgtctagcccctgaggacccagtgccggcacctgatccagtgattgacactgaggtagaggatacaactttc

SEQ ID NO: 884 - DNA, 543 bp, Zea Mays
gtgcaaaaaaataatcaaggcatttgactaagagaaactcattgtggatatattcaaatttcattgaacttgtagagaaaaaggcttgtgactgtacaataaaataggcatcaattcgcatttaatataaaatcgtatactgaaaaatgcaaccaaacagctgcagcactgtctattaggaaatacagtgcgaatgttatgacaaagaccagcaacaaacaaataatcaacaattaggtaaatgtatttgttgacagaggctctacatgatggtagatagaagtatgcattagcacgaaaggagtggaggatatctgtacaacatattaagagagcaagagtagtctgcctccctggttctgccgttctgccgtccatggatccggaccgtccatatcgcatcgtgtgtctgcgtctcccacactccatccttctccaccacgcgaccacccaatccctaacctccccccgcacgttcctctctgccgcgttgctcgccccctgcctccaccgccgacgcgacctctctccgcctcacctcct

SEQ ID NO: 885 - DNA, 459 bp, Zea Mays
gagggggaggatctctggtttgggggcgatgaccatgggcacgaggtggagcacgggcgcagttcacctcgctgatggaaggtgcactggggcagatacattagcgcaatccctacagcttcaccttccaatggtcggagagtggggcgggcgccgatggaaggcttcctgggattgcgcccgtgattcacctcgctgatggaaggtgcgctggggcggatccattagcacagcgcagcgtgatcccctcgacagaggctttcctgggattacgcgagggttttagggcgtcaaggtgaagctgcgcgaggggaggatctctggtttgggggcgatgaccacgggcacggggtggagcacaggcgcggggcagaaccggtgcacggatgtggacgcctacaatagaggcttatagagtagtagagatatatgttgtgtgtatgtatatttggagctcta

SEQ ID NO: 886 - DNA, 1024 bp, Zea Mays
acaagtattatggcgagacggtatgatggccatattactcatcaatcattactggagttaagatgggtggcaactggcaggcttactccatcgattagtgtgcatctaagtaaggttagacaaggaagaataagacaaaaggatgcattggaatcgttatggatttattatatttggtgcactgaagcaggctagatttgcatttgggatcagaggtattacaagcaagaaaaataggcagtatcacaagttgcatataaccactattttgcattgaaggcaggggaaacacagcttatattttggtaaaagggggagcacatttgtataaataaataaaaaataactagtagtatttgaaacacctacgagagacgaaatctggttctgccaggaactgctatcagacttaagtttgatggcataattgtttgcaccataaacaagatccttgatggatgctaagtcttcaacagccttttcatattctagtttcaccagcctttgacacgaagttaacaatcgatctgcaatgcctattggtgtttcaagtttcagccggaccctttcttttccattttccgttgaactatctaagaaactcagtaagtaatcctcaagttcaaaaaatttgctgcttctccatctaggatcattatacatagcttcggttgaatgctttccatcactgtttttggaatatgaaagtttggcttccagagcagagcgtgaagatacaggaaacagtgtgacatcctctgcggtaagcaatttcattgcattttccttgacaaatgcagtagcttcttcaagctatacacatcagattgagaaacaaggcaatgaattagaaacaagcaattaggaacaaaataaatcttgctttgatttcaatggtgcagaaatgatgttacaacaccaaacctcattgctgttccgatagaggtccaatttatttagaataaatacaactttcttcttccactgctggacatactgaagaaatccaacctagaggttacaa

SEQ ID NO: 887 - DNA, 856 bp, Zea Mays
agccgtggcggacgagaaggttgcggccgggtgggtacgagtacgagaaaactccaccaatgacaaaggggtgcgccagttttctattttcaccgtagcatggaccgatggagacccataccgcagcaaggtccggggtcccctcccggaaacaaccactagtgcagtgtgaaaatgcgagatcgatctggacggacgcgtcgtcggccagccaaagtcgcactctgcgacttccactcgcctatcgcggggacaagggcactagcggtttgtgggagtgcccgcgcgccgaaccaaccaggcatgcaatcatgtaaaatagtactactactagtattagcgtgtgccgttcggccgatgaccactgcctgccgccgtccgtttggctcgccaccatttcttccctgcccttccctgtttcctggcctggctttataatctctcggtcgctactgattgcccgggtcactacttccttcggttttactatcccttcgtttccgctagccttctccttccagagcaaccgcgccattcgtctcctccgtctcgttcgtagtgcaacacatacagcctcgtctggtgaagtgaaagaacgacaagatctgtggtacggcggtgccggccgacatccacccactgtgctaccccttgcggttccagccagcgcagcgatcgattcccgctggccgctgccgtcggtgcctgcccggtcctccactcctcccgctactagtactagtaccagcacactccactgtccactccactgccagtgccatcccattcccatccgaggtaaacgcgtcaacgcgaccagctcacctcgtcatctcccattctctttcatatttgc

SEQ ID NO: 888 - DNA, 400 bp, Zea Mays
cccatgtgtaattacttttaccctactgtggatcgcttgtcaattgagtagaagttcggggtctcttaagtaaaattccccggctgaaagggtatcaacagatcctattcatccgatcctctacggacggtccagattaaaacccatccacgctgaaccggtatggagccccaaccgttggatcccttctagacgacccagatcaaatcatacaacttaatgtattggcacgcactcgaggccctcggatacgagatcgatggccgagggagttccacgccttcggccagacctagcccttagatcaacaacctacggcacaaattttatttcgcgaagcggtatgcggccctctaatctcagcaccagactcatctaccttttccccccttttcctcac

SEQ ID NO: 889 - DNA, 447 bp, Zea Mays
gtcgtccgatcctcgttgaacggttctgattagaacgtgacttaccccttcgccgcgttgatctatgccgtcgatcccgaagcgaacggctggatagcacaatcgtgtaccgaatcagtgggattgatcccgaccgtaggataggaatccagcgatctatggctatccgcgtcgtgttggtaccggaaccgtagatccgggcagctgcggctcagatcggataccggtttaaaatgatatggatctaatctaggacataggtttctgatcggacggctctggcctgccgatgccccttcggcttgcacgttttgcaaaagagcccttccagtattgataaatcaacccgccgtccacaccagggactttctgagtcttaggaatatttgcaccgtagcccctgctctttctggtatttgaggcctagtccagaaagttggaaaatca

SEQ ID NO: 890 - DNA, 829 bp, Zea Mays
gactggaactggtgtgggtcttgctagggctcctcacattcgttctgctcaacctgtgtctcgttgctttcgcgccgccacatacgcagacattctgcttggctccatggaggggggaggacaacgtgcaggaggtgcttctggccgtgatggagctcagggcggtcgtgggggccgttcaaacagccagggagacctggtaggtcgcgggggttatcgccggccgtacctcgggcaaggtgggcacaggggtcgatctgtacgtggccgtcatgggagctatggcctgggtgctggcgtcgctggtgggcaccgaggcaactttgggtatgcaggttctaatcctggaagtcgagatcagttcagaggaggcttccaggggaacagaggctctcgtactccggttaacctgtcagcggcggctgtgtcggacccatctgcatcttctactggtatgattgcacaagctgttgcattgctaagccatgcgatcgggcagaagtcagctccggtgactaactgtgctgctcttcagttgggtgctggtcattcaaatattgcatcggacaagggcaaaggtgtggcggtagatatggatgattatccagtggtgaaagaaacatctagtaaacagccgtactgctatcgttgtttgaccaaaggacatgccatgaaaggttgtactgctaagctgttttgtgacatctgtcgtgctgatgcccacaacacggaaaggtgtccgaagttcaggggggacaaacctagtgccttaacctgcggttacgccgtggatggtttaggtttctactacatcccctttgtgccacaa

SEQ ID NO: 891 - DNA, 587 bp, Zea Mays
ccctagtaaaccttaaacagtaattggttcagcccatgttgacagtaaactgcgcaacaaattgagtatgagaataccttggttgcactggaaattggaaccgaagacgaagaccccgagttgataaggaaatctgcaggcaacaatggagaaacaattagttactacttcgatccataccctttttgatgtactgaattaactgcagatcaggcggcattgtactgaatgaacatggcaggacgaaccctagcaacacgataggagggggcgccgagggtcgggatagtcgagcaacaccgtacctgcgcagatgacgacgcgacgtgggggactagaggaaccttcacgacggagcagcggcgctggtgtgggtgcagcaaccctagcgacagtaaagggtcaaggaacgaccgcggcagcggtggtgaatgagagggtccggatggaggagagagcccgtacctgcgacgacgaagacggggggagaggttcgttcgcgacagggatgaggcggcgtcctcggtgcgcgaaccctaggcaagacgagaatgagacgcggcatacgaggagaacacacaccggcg

SEQ ID NO: 892 - DNA, 680 bp, Zea Mays
ccgccctgactcccgcaaactaggaccggcacatccgtagccagtgcacccgtcgccgatcgttccgccgccgccacagacgatcaacgccggcagcgaccacgtgcctacaaggaccgacgctggtgattcgactacatgctaggagtctgtttgttgcgatcgatgtgggcgtggtgtctagggtcacgacgaattgctcgtcgtgcttctctgttcgtcgcaaagccgctcctcgtcgtgggcaactcaatgggcatcaaatccatcgctggtgagtctctagtcgcatctgccatgtacgtagcactgcggtagacctattaatttggggtttagggggcttagacacaatccggtgatggtcgccggtgaatctgcgtcggggcgtcgtcggctcgtcgccttgctcggccagggaggaagacatgcccacgtttgttagattggtactgaacggctaagattagatctccctagaaccgaatcagggcggttggatcgcgatcgtgcggtccggatcgaataccgtgtaacgtttcactgagaataacgataagcgttgatcttagatcggatgatcgtgggagcgactccgaaacattcaatcttgactatcgatactatatcctacggctactatggctgaccggttcgtgggaagcacgttttaaactgag

SEQ ID NO: 893 - DNA, 447 bp, Zea Mays
gaagctcggccagaagctgtgtgcagcagggaggcacagggggtataggggcccggagctattgcacctgacgatcacgttccgagatagtagatccttcacagagcaaccagagggatcaaattcaatggaacagtgattatcggtagtaaactggcgaacggaaatgaggttcttaataagtttaggtgacacaagaacattgttgagatgtaaagaattatgtaaagtagtggagccagtggaaatgacaggaagaagggagccgtcaccgacaataatggaagaaggtgcagtaagggagggagttgaagtgttggatagagtaccggcgttggaggtcatgtgggaggtagcacctgtgtcgaagtaccagtcagtctgctggggcggagtcagggacacagtgctgaaagcggatgcaagggactgagcgtcccaagatgg

SEQ ID NO: 894 - DNA, 334 bp, Zea Mays
agagcaccacacaggtgcactggtgagacaacggagcgcaggagaaccgcgctgcgcacaagcagggccacctccaccttcttccaccagcaggattaacaccagaacaccaagaatcgaaggaatcgatccaaaccgtgactggaaccgagaggaggaataggaatagagagctagcgattttaggcgaggtgctgagcagggagcaaatctccatagttatggagccgaactagaggaggttgcgcagctgacggccaggaattcgcgagcgccgaaagaccaggctgcagcccgccgccgccaggaaagccaacttccttttccctacctc

SEQ ID NO: 895 - DNA, 374 bp, Zea Mays
cgagttattaaatcaagcagataagacacttatcttgaaccttctaggataacttgattttgttgtatctgtgttgatgtcttcgatcgagtcctttaatcccttgtgcaggacccgagtttatagactcagcccactgttcatgacgcgtacgcttttactgaactgtcacgtcgttttagcttctttagccactttacaatgtaaaataactcgcttctcagttctggaaaggcggtacggacagcgcatatagggggttaaatggaaaatgggggatggaaaaaggattcattttttggaagatatatggtttggaaattcaagcttagcaactccattctgccccctatacgttgttaacaatgaacaag

SEQ ID NO: 896 - DNA, 366 bp, Zea Mays
gcagtcattgttcacaattttgtgtcacactgttcacagacacagactgaagattcacagacatggtgggaagttggcgcccggtgatgatacaggtggaggtggggagcagtccggccataggccactagacatggaggttgtggttctctctaaaccctaaaaaccctaaacacggcaagacaagcttcgacgaaatggaggcagagtcggctgcttcgccataacagcaggcgaccactttgctagaacagaatcatctttgtgcggtctcgtgatgaacgacgattaagcccccaaccccacgacgtcgtgaagcatcctcttccttgtcccctctctcttctcttccttgtcccctcctcg

SEQ ID NO: 897 - DNA, 691 bp, Zea Mays
gtagaagctgctcgaatgaatagtacacctaggttttacggtgctgtataatctctaacgaagagaatggaggcctgggtgacggctggcccaattagaaatggtcgaagcctgctcgcccaacgccagcggcggtagatggcccacagaaacacccgacacaggctccacccgatgagaaataggcttaggatgtccaaccgtattcccaggcgaaataagcggcataggaaaatttctttccttggaaagagaaaaggaatttgattttgaaccacaccgaacgtgcgaaaaagtcggcatgtcatccttcctccacgccggcgagcaaccaaggcgggcatcaaccttatttgccgacagcgtcacatggccgagagtaacggcaggtggcgagcaagacgtcggtaatggggcttcgcaaggattcaacacaccaacgggtttacgagaacgtacctgaggcctgggcaccgaatccaggagaaccttccgctcagccgccgcgggatcgaccactcgtgctgcataacgtccagcaatccgatgatagaaatcttcacaccttcttgaccactgctgccttgtcgcttgaatctcctcctggcgtataaccgaacgtctacaccgcgcaagccgataagcctccgtccaccggaaacggggacgagacccccctagcttcgcaccg

SEQ ID NO: 898 - DNA, 290 bp, Zea Mays
ggccagcccaacccagcccatttgaaaccctaaccctaggactcctctataaatagaagtgcctccccttgcaatttggaaaatttgcatctaccccctagccgccactctctcttctccttcattctctcacgcacagctcctttctctgttcagcgcgcaggaactctcttcctcccatggctgccgagcccttcttccacctctggctggcgcccagcagcagcgcccttcctcccctcggccagcaatggcgcggtgccccctgcccctcttcttcttcctccagc

SEQ ID NO: 899 - DNA, 415 bp, Zea Mays
gtccaccatagcatcgcgtgcgggactatcctctacaactccggggattcgtcgccggagatccccttcgttgcttcgtcgtgggagcgggtctctgcaccaccatcgggggtaataacccatccattctcttcgtttcgcgttgtgcttcgtgtagcgtgtctccaatccgagattagctcactaggcgatgatcggggcgtcagaggaaggtctccgccatggggttatgcgctgctgcccggggtctggtcagaggttgaagacacgcctttgaccgttcgattcggtgggcggtcgggatttgacgaagggttggtctgtgtgcgccgttgattttggagtgagcggtagagattagaaattagcataccctttcggcgctttatcatccgaccgtcgaagttgaatcgga

SEQ ID NO: 900 - DNA, 898 bp, Zea Mays
ggcagattccggtctacctagtggtagttgaggaagttccggtggatctccctcccatccgagtggagaatgtagtcaacctggaagacagcttggaggaacagctgtcgacccccaccccgttggcagagtccctggccttcacggctaggtcatcgacgtcagcaccgcctgcaccaaccttccaagcacctgcaccttgaggcgacgaccccgacgactccggagatgacgatgatgaggatgacaacgacaaagaaggtggagatgaacacgtccacaaggaagctgactacgcccagcaggactacttcatggggtttggttctgttgtcgaacattacacatcaatgttcgagacggggcacttccctaacctgctgcaagaagtgctacacgcgccaggaacctacgtccgccccctgtacgaaacaaggcgagtgagcgagcctccccgggcttgctactacatcacccgcatccacgtcagggtgatggatgcaggggacaggggattcaggactctgtctgctcacgagtccctaacaccactgtccacctatgctgcctcggtcagcgatgctgcccgtcggaccctgtggtcgctcagccacacctaccagcagcagctgcagaacacgaggttcaagcatcttcctcagcgtttgcgtgaaggaagtcagaccagcatcgtcccaggtgaagttggtgaggatcgcctcaacaccctagctggtgtagtggcaggtctcaacaccgacctggacagtgccaccccggatctctcaagggtgcacttggagctggagaatgcccatgccaggattgcagccctggaagcccaactgcaaggactggatccgcctgaagctcaggttcccgccatggcattgtctcc

SEQ ID NO: 901 - DNA, 486 bp, Zea Mays
agcggagacgcgtcttaatgttggcactatggccaactatgctgggcgtggtggatctccaaatcgcggccgcggtcgtggttcttcgcgtggccgaaatacttttcatggacgcggacgtactggttctgctagccgtgatccatgtcaaatctgtggcaagttgggtcacacggccatcaaatgctggtatcaccatgataaatcttatcaacaggactctccaccagccacgattgctgcaacatcttcctatcaggtcgatcctaactggtatagtgacaccggggcaactgatcatataaccagtgagttggatcgtctcgccttgagagaacaataccgtggcactgacaccgtgcaagttggcaacgacgcaggtttgcaaattatgcatcttggttcttgttccattaatactaatactctccctcttgcactaaaaaatgttcttcatgtcccccaaatatctaaacatcttttatc

SEQ ID NO: 902 - DNA, 810 bp, Zea Mays
tcggaccaactgaccgtgggtgttgcggaatcgacctaccgaacgtcgtcgggagataaaggacatcgtatcctcattacccctctttacccagctagacacctcgcgaccaaaaagtgacaaagaaggagagaggaaccgtcgtggggggtggggcttcgagttgtcggtgcccaggccttcggtatcgcgcccaacgccttctgcaaccccggagaagggaggtggtggtagtgccacctggaattcgttaccggcaccgcctaaattgctcgtcggagtcacgccctagccgccaacccgctctgcgctgtgtccagaccctccaccgcgccgtatcaaggtaatatgtaactctaattgactcgcgtcagctggggatcgggcagagcgtttcggctagaagcttgagtgtggaatccagggggcgagggagtccggtcatggcgtaccgtcgtgcggtactatttcgtcgtcggcgatggcttggggaatcgggggaaatcgtgattgaccattggattcagcggacggtctggattgagcaaacgaggctggatgggaaacaacccggaaccgttgatttcacttgcgacggctatgattagaacccgcgtaacctttcgagcttccgatcacgaccctccatcggtgatccgtcgattgcgagcccacctccgtagattacatcgggcggccatggacgcataccagttcgcgggggcgccgatgtgatctgagctgttgattgataattggacggctctcatgccgtgatacccttcacgagtacgatttactaaagagacc

SEQ ID NO: 903 - DNA, 397 bp, Zea Mays
gtaacggttcctcaccggcagggacgatgtacagaggcctgaccatggagaatcgtggtctacggtagattcaatctccaacgagaaatataccgagctctgaccgtccacggcccctgaactccacatggaggtgcccgcagacccttgacgaaatgacgagacacctcgagcacagattcgccctgacgacagcggctttatctctccttctcggcagtgctctctctcacgacaaaattgggattttctgggtctggcgatgcgaggcgagtgaggtgctgggttttgatgggaaacggggtgcggtccaacgcctcatgccacgcggatcggacggtagttcaccagctggtgccaggaagtttggcttctgttgcaacgcctagctcgggtt

SEQ ID NO: 904 - DNA, 899 bp, Zea Mays
cgatgctatcaaggttgaagccacgctcgggtgagatggaagtcctcccgaggccatggtcgagcctgctctagggcatgtagtcgtgtagggaacagttgaaggagtggcctcattcgggattcgcagggagttgttgctggggcagttggctgaggccgatctcgggcgatccagagttttctacgaggctgacactgactttaggcgaggcggagttccctcccgagggagagaccgtgttctgtcgtatgcacatcccgtctggagttgcttgagtacaacagacgacgtgttcttgcatcgatgcatggcatcacgctccactcgttcccgctcatgctcatgggtgtggcgacgatcgcggcattgggaattgtggcgctcgcggagcgccctatcgtaaggagtcgctcccgtcttggatacctggtcccaagatacggggtgcgctggtcccattctccatcctcatgatgacatcaaacgttacggtgtctgtttcggcgttggcgtgccttgcgctgtggtgctcctcccccggtacagtggacccatcattggatatgggcgtgtcatccactcttccttgcataaagaggatatccgggaagaaagagctcgggggcgcgtcccgtgctccggcaatctcccttgcgggtggagcggctggtatagccgtcagtcttgttcctgcggccacgctggtaccagggctgcccactccttttcgctgagtgatctgagttcacacccaggtgggagaggtggatagaggaatccaccgtgacaagagcacatccacggtcggttgggtcataggtgttgccatggtcctgggcctggccgacacgggcgcaatccagcgcagggtgaaggttgcttgaggtcttcgcacc

SEQ ID NO: 905 - DNA, 553 bp, Zea Mays
actgtcagttgatctgaatggaactcgccatggtacagtgcctgaacagatcagaccgccagcgcggcaatctcaccgccgacgaccaatctccgccgcgattcgcgccgccgccgttgtgatttacgccaccggtgaccagataagcctgccagatagtagcttttcgcctaaggataactccggtgactcaccgccgtgcctccccccttgctcaccgaacccgtggataaggttctcaccgtcgttaagccatcaccggcatccgccgcgtgtctctacctttccaccgcatcgccgtagcctactctcactcttcgttgatcaccggagtaatcgccacggcgtaggacaccaagacactgcgctagtaactttctattttctccggccgccgcgtgtcgtcatccaaattcccagccaccgctgtcgcatcctataaattgaagctaccgtaagctctgttggatcatcacgaacccagtcgccaagaatcatccccattcgatcaccaatgtgcccgaattttgggttttccccaattcggtttccg

SEQ ID NO: 906 - DNA, 806 bp, Zea Mays
acacgtgataggagaagtagaggaaggaagtgggacaagatcccaagtgtcggttcgctcaagagtagcaatctcctcggccatatctaattgctactcaggatgggaaagagcatcacagtaggaagtaggcttagagagaatagaagcagaagcgacaaaaccaagacgagccggacgacaaatcgtacgacgaccgtgaaggttatattttggaggaggcgcaccaagcacacaaggggatgagctagatgatgccaagggggacagtggaggacatggacgttgagtgtagtggaaaagaataggaggacatgatggaggggatggtggagatggaggtggaggcaatgctggagggggagaaggcgatagtggtggaggtgagggatgtggaggtgatggtgatgaaataggaataggggaggatagcggagacaaggtggtaggaagaggtggaaccgagcggagaaaatcaatagactcaaaggaagaggaagaagaggacaaatcagtaggaaagaaaggacatgactcatcaaaggtctcatcccgagatactcgaatgcgacgagcgatagggtcccaacaatgatatcccttacactcggtgtcatatccaaggaaaacacactaaatagattaggccatgagctttgtcctctcatgaggctaaagaaggacaaatgcaacacaaccaaaagcacgaagatgagtatactacagtggccgaccaaaaagacgctcaagaggagtgacaccatgaagagcaatggaaggtttaatgttcacaaggtacacatcta

SEQ ID NO: 907 - DNA, 370 bp, Zea Mays
aattaagcaaaaacaattcctacttatatcgaccgaacattcgtgtcgagcacaccttatgttaccttgtctcgcatacaaccatgttgtgacatgcacttgagacactaccgattaacttaacgcaattaccaccacaatgcacttcgatatacacgttcgacatcacagtgcttcgacagaccccacacttccaatctacttgtcacatccaaacacaccacgtgaccattgcattcttataaccaattttagcgcaattatttatgacaacacttagcgactagacgagtgaaacaccaactgattattcgtacattcgcctttgaaacactaatcatatgtgacataatttatatttgcaacccac

SEQ ID NO: 908 - DNA, 964 bp, Zea Mays
tgttgtgcgtgatttattgttagtgagtagttgaattatgagttatgcgagaatcatgttagaaactagtgtgcggcgtgtaactgtgctcgggtggtaaacaataggtcagtaggtattgttggtgtcattggcaaatggggatgattcttattatgcgataaaatttggaaaggcaaagaacatgggtagtgtatcgatcaagttaatcgataggttccgtaaacacgcttgtgatgcttttatgtgcatgataagatcgatgccttgtcgtcgtagtcttaggaaattttctgaaatgtgttagtgctctactgttgggttgaatgaacttcagatgtattataatagttgtgtgtcgtgccggttatccaaaaatggtgaaaggtggtgtgtgatggtaattgggaaatagtcacgtcattagccaactcatgttaggtaggagttgattgtgttaagtgattgttatatatattatgtctcgaattgcaataataataggcaagccgacgtgtatgctgtctagcgggttgtgtcgttgctctagctagccgactcgttagatgactttagttaagcttgtagtcacggtgaattgcttgttgtggtctaaatgtgtatggttatggtcacgggtaaaaagtagtagtgctcatgtgatgtctaatttaaaacgcaaattgttgggtgattatcgtgaagaatgcgttgttaattggttgtagtaattttagtgcactaaatgacttgagtaaaaatttgtaagtctacttgttagtcctcatttgattattttaactctaacaaatggtaaagtgttagaataattcaagtttctatatcatggcaattcttgaattgtataggagctgaaatttattaattgttgttttggactgcacgcagtgatttccccgtgctgtatgtttgatgaactaaattgtgttttctgtagatatgt

SEQ ID NO: 909 - DNA, 1243 bp, Zea Mays
acccccatcccgcctcggccaattaagtgcgcgcccctggcccaactgaccacctcgcgccagccatccacatcatgcactggcaggtgggtcccacccgcaagtctcacgtatgatgccactggcactgcttgtggacccgtgctgtcattctcacctgcgctcggacactgatcaccggggccgccttgacagtttgtccttcctccccaaaacgcgaatccgcgggcaacgcgcaacaaactcaaccaggaatcacggggttcgttcactggaagatcttcccatgggctataaaacctttcctccgtgctcccctctgctcatcacaacagaaccaagaagctagaagctctcgtcgccatagctgtgtgtgggagaggggcgaaaagaaagaaaaggtgggcgccgtatgccaaaatccaatcgctccatcgctcctgctggggcgcatagcctgggacatcgccgtgaagcatggatgctggggaccttcgggttggtggggaattggcgaccgagggacaacattggtgggctgccaaccatgaacgccattgggggaccgccgtgcaccagggcgaaggctctgcatttcacgaatcatggtaaggaatctccgaatcaactcgccatgacctgtgcattgtgtagcgcgtttcgtccatgacggtggggcatcggaaccgcgcgtcgcagttctctggcgtggaccgccgccgcaagggaggctccgcgccgccgcgtccgaccgtggggaagaaaggttgttggccatctgtttgttgatgaagggttagattaaaacaacgtgtaccagttgaatctcctgatccatgccgtggatctgcccacggacggcggggatcgtactgggcatccggttcggccagatcagatcggaaccgttgatccgctgatggacgtgggacgttagatcgtggcactttaaaatcctcaccatagatctaggatccaacagtccattgagtgtaccggttcatttaatggccagtctaatctgcgccctcgactttggatctgacgatcagaaaacccccataccctttcgcatagctcatcttgcaaaagagtccttgtagtattgatgaataaacccgccgtcctctcctagtataaagtaattacggttggaccctggtttcttataaaacagcccctggacttccctgttattctacccatagtccaaagatgacgccagaattagtaaaataaacca

SEQ ID NO: 910 - DNA, 561 bp, Zea Mays
caaaccaaaagctgactattgtctgaaacctaagcaacggaaagaagtgatgaagtggatgaaggatattaaattccccgatggttatgttgctagttttagaagatctgtgaacttgaagacaatgaagatgaatgaactgaagaacaatgacttccacataattatggaaaggctcatgcctataatgtttcgtgggtacatttccgaaactgtgtggaaaacgttagctgaagttagctatttctacagacagttgtgtgctaaagaaatcagaagtgatgtgatggaatagctggagaaagaggcaccagtgcttttgtgcaaattgggaaaaatatttccaccgggtttcttcaatcctatgcagcatctctttatacatcttccatatgaggctaaggtcggtggtcctgttcagtacaggtggatgtttcatatagaaagagcattaaagaagcttagagccaggggtggatctaggattttaggacgatggtgtcaccatctataattgcaattcttttttgacaaattaatagcaatgggaactcggaacat

SEQ ID NO: 911 - DNA, 603 bp, Zea Mays
aggctagccgcagcacgcggcggaagtctgcgggtctatgacgacggtgagcaattcgttgctcggtgatcccaatcaacgcaccaactgtggcgggaaacgcgtgtcgagtcaaccacggcgaccggtcaccattgccctcaatgcccgcgacgaagggccagagggtggggtggttggcggcgcacgcgaaattgaggaggagagagaagagaggagattcttatagtgcctagggacgaggccgaggtgaggatttcggtcaatggctccgaggttcgcggcaagctccgccacggccgggattccgttgagggcgaatacaccgagcggatgggcagctgacctacgcggctgacaggtgggtccctgatgtcggtgctcctctcttagtggctgctagtggggccagcggatcagtaacaggcagccacgcgcgggcggagtgggtgaagggccgcgcggcgtggtttgctgatgggccaaattcgtagctgccggcccaaacagggtttcttcttctttttatattatttccttttctctctcttttcaaattcaagttgtatccaatttaattcaaactcttgtgaccaaatattc

SEQ ID NO: 912 - DNA, 407 bp, Zea Mays
ctcctccggagtcggaagtacatgaggacgtagaccaaatggaggacatgctagatgacattggacatgagtatccagcactggagactgaccaacccccatcggaggaagtgcaacagttttacaagctgctagaagcctcggatgcaaaagtacacaagggcaccaacgtgattgtacttcaggtggtaacatgacttatggtgatgaagtcaaagtacaacttctcaaataactgctacaacgacatcgtgaagttgattattgatctcctcccgccgaaccataagttgccagagaacttgtatcagtctaaaaagatttcctcggtcttggaatgaactatgagaagatttatgcatcgaaaaataatttcatgttgttctttaggtaccacaagaatgaca

SEQ ID NO: 913 - DNA, 506 bp, Zea Mays
cagaaagctccaaacggggtgatgaatgttgttttttcctcgtcttcttttgccaagctgatctgatgatacccggagtagcaatctaagaaggacaacatataacacccagcaatcgagtctaccacctggtctattctaggaagtccgaagggatccttcagacagtgtttgttgagatccgtatagtcgacgcacatgcgccaatccactttattctttttgagtacaagaacaggatttgctaaccactcgggatgtagtacttctctaatgaatcctgccgcgaccaagcgagccagctcagcacggatggcttctctcttgtcgggcgagaaacgacgtaacttttgtcggatcggcctcgcctggggatagaccttcaatttttgctcggccagctctctggggactcccggcatatccgcaggttgccatgcgaatacgtctcggttatcttgcagaaactggacgagcgcgctttcctatttgtcatccaggctaga

SEQ ID NO: 914 - DNA, 283 bp, Zea Mays
gcggactaggctgacccgacggctacggccagacccttcgaaaggatcccggcccgagcagtcgcctcagctagccactccgtgacctcagccagctgtcccttaagggtctcagcctggcttgcagcctcggcagcttggccccggagttagtcccgctcgctggtgacctggccaagctttagctgctactgctgcatctccttggcctaggaagccacctgctcccgagccgacgaagcctccatccgcaccgacgccgcctctgtccgcgcggttgctg

SEQ ID NO: 915 - DNA, 506 bp, Zea Mays
atgagttgaaattgacttttagaaggattgtttcagagcaaaatatgagggtttggtgggatctatgtgcgataatggaaaatgttactctaaatgaggatgaccagattatctgggcctttggtccagtggcaagtactcagttcaatcgttgtatggagtgatctattttaggggggttcgccctgtgtttgttcatgctgtgtggaaacttattgttccgcctagagttcgtatttttctatggctaatgtctaagggcaaacttcttacaagagacaatttggtgaaaagaaaacatctaaatgataagtcctgccttttctgttcggaagaggaatcaatttatcacctttttcgactgttgtattgctaagaggatgtggagtgtggttaataacttgttgaattggaatgtgggggaggatctggaatctgtagcaagatggtggattagcaataagagatacaaggtgcaaaatacaatttgtgctgctgttttgtgg

SEQ ID NO: 916 - DNA, 402 bp, Zea Mays
ggattttctaactctctggacagggtgcataaatatcagaaactacaggggctatctcgcaaaagatcataagactcaggattcccaccgcactggacggcaggttgaataagtaaaaccccagggtctcttttgaaaaatgtgctaaccaaaggggtacgtcaaactgtgtatcgtgagatcgtgaatcaagagctcagattagaagttcacccatctgaaccggtatgccatactgaccgcacgatccaagatcgacggtcatgatttgattaaaccccgcgtccaatccaggccactagaatccggatctacgaccgagataaaaacgcagagggtatgagcccgatctaatcccacccattgaatcccagatccatggttcacggcgatcaccatgcc

SEQ ID NO: 917 - DNA, 688 bp, Zea Mays
gaatcgacaagatagtatttacctgcacaaacatgaaatacaaaagttaaatacttaagacataaattaatgccgtatgataaaaaagtacaacatatttatgtaccttcgggtggatgggggacctgtccgcataagttatcaaagtatcttgtaatactctagtgtcatgtacggatcctggccatcctgtgacaacaaatgtgaacctcatatcgaagtcataaacggccattacattctacgatgcgtaaccggccaatatatttggcttgctccgaggccgggactgacgctggaaagtgactaccatcaattgctcctatgcaatccttgaagtggggccaaaatctcgcctctcgcaaacgaggatgaatctcgatgaaatttgggtctttgggcttgattatgtcagatgacatcttatacagtgcattaaggacttcactatacttgcgactaatagtttccaaggagtgaccaaacttattccttatctgcctaaatgattgtggacccccacatgcccacaagaaaatgcctagagcttccatagtactgacaccccagcttggaagcagaccataattttccaccaacgtatcatgcaatcgtctaaaaacagtacgtcgcatgcgaaacatgttgaagcagtcgttactattctccaaagttctctcaacccatt

SEQ ID NO: 918 - DNA, 454 bp, Zea Mays
aaaacacaaggcttgactaatatatatgtatacgagatgcatctgcatggggaacgtatcgtgtgagcacaggtcttacgtgcacacgtgagcactttaattgtgaagccttcatctctaatccaacgttcagtgcctcttttacatctaacccctcccacctcggccacttagcccataatcactttactaatcaccccctgacgtggtacagagaccaggatcgtgacggaacgaccaggtgcgcctgtacagcatctgtacaccatttcagccgccctctgtacaacattgtacctcataatcccacacacacaaggtgctgtccagaattaacacaaatattgaatttggaatttcaactaaaagcttataattgttatgaagatgctccatacatgtactaacaagaaaagttacgaaataaccatgttcatgcatctgaacagaaatt

SEQ ID NO: 919 - DNA, 486 bp, Zea Mays
cgaggatgtaggggaggtcttgaggatcacgacgatgtgcgggtcgccgtcggggatggtcggagtcggctggtccacgtgcgcaggcggagatgctcgccggcggtgaggagtccgacctaaccatgacacaataggtcaattgaacgggttagagagcttcactagatgctagggaagatgtgggtgcaaggaattggaaaatgacttactggttagctcggttcacgcgcggtggcgggtgaccgaagtccggcgagtgtgaatccgcctctccggtgaggcaatgcctcggctcaagcttggagaagcttcacggcttcacggggaagcggtccaggggctggggcgaggctggggttcaacagaaagggttggacatgacggccgtgctcgggcagagatggggggcgatggtgcttgcttttcacagcgagctccgatgatctctggctcgagcagggctctgggtgcacgagtgccaac

SEQ ID NO: 920 - DNA, 738 bp, Zea Mays
tggatccacaaattcttgattctagtacacctactccatccagacggtcaagcgaacaaccgaggcaactcatcgaggtccaagacgtcgtggtccgaagatctcccaatatctccccgagggctgcacacggccggagcagcacgcggcagtccagggcgacacagaaccaccgccgcccaagcggaacagatggaagggtgggcggccgcaggggcaaatcgatgcgggcgagatcgacagcagcggcgtcaaatctcgctttcttcacctcctagctcacacgatgcactcggctttggcacaaacagatgagaagaggggtcgcggcttcaatatacatcccagcgcaagcaacgactggcaaggattacggcggcatcacggactccaggggatgaggaattagttgagggagcactggattccccagccaatttctacgcgctgctgcaatgactcggcaagaatcatgggaggaagacaactggttctgctccctcactgatgagaggaactcgaccactccttatacccgagtggaaccccggccaggtcatggcgtcttggattcacgcggtctgcaacagattctccatggtcacaactgaatttgcgtgaaggttgttgagaattgggacacaactgtcgtggcacacaagagaaagaagaagaatctggcgaactgggcccacgcgatagagagattaagggtttggtggtgtccaggtgaccagg

SEQ ID NO: 921 - DNA, 636 bp, Zea Mays
ctaggatattttggagaaaatgatgatgaactggttcgatttgctggagaggagacaattctagagccgaaagaagatgaagttgtagtcttcaagagcttcttcagggtgggactttggttccccctttatgagatgataggtgaagtcttgaaaaagtttgaaatctacctacatcagctgacgccgaacaccattatcaggctcaacgtgtatatctgagctcttcgaagctaaggaaagagtgccaacgccaaagggttctgccgggtacacaagcttcattatcagacaaaggcaagagctgacggcatgcacaagaacttcggatgctacaactttgcatactggaaggacacaaaggcccccgtgataggctaccacactaaatggttgactgggtggacgaacgagtggttctacgtgaaagatgacgagaagaaaagggagaaacttatgagcatggtgatgagtccgttgagattgaacttcgggatgactcagcccttgtgcaatatgcagttggggtctccttgccagttggccaaagtggagttcagggtcgtggctgagcatatcagcactagagacttagtgcaagaatacctggtgaacaggacatttccgacctctggc

SEQ ID NO: 922 - DNA, 365 bp, Zea Mays
ttatgagagcatgggtatgtatatccactttattgtggatggtaaaagatgtctttaaagcatagagaggtttgggtaagaaagagtgcggtaaggaaagactccatccaagatttgtggatcttgattacttttgatgatctagcttgaatcttatccttccttgatttgatgagctcgatcatcttcgatcttcgttcttgaagtctttatccgaattagggacatgtagttaggataacttgtaggtaaggacagatggttaacaggctggtggcataagataagtgtattatggcaacatgtaggatgggagggatggtcactgttggaacttgcactcaatcgcaaggaggccaacaaag

SEQ ID NO: 923 - DNA, 318 bp, Zea Mays
ccggcgcggagctagctagggctgttggggtgttgaccgtataaatacgtgcacccgttgccgagaccactcttcgccccacctagccgtatctgcgtcgccgttaggctcctagtgcaccgccacgcggtgacttctcaccgctgtcgctaactcgtcccttcgccgccgtttcagtgtcggtcggttgtcggggtgattcgcctgggcccatggaacgtgtcagtggcggattggcgcaaggacagcctcgggcgtcgactgaattcctcaccggaattagttctccgccacatatcgctgtcgcccgtggtcgac

SEQ ID NO: 924 - DNA, 456 bp, Zea Mays
tctgtttcttcgtttcacgactggttttgtgtgttgtgaacttgtggtggatacacgtagaatttatgtatttttcctgcagactgtacgagatttttattggtacaagagctgaccaaaaattgcctacacgtgagatgtgtccctttggatgtggttaaaattgttctgtgggcatggtaacatgacagattgcttctgtgtgatcgtccttgttgaagtggtgatgtggcttgggtgcccttactgtgacaaagcttgttgtcttcatatgttcttgtgcagttgtacatcacatttcgatcaaacattttgtgtgtgtgctccacatgattccaaagcttgtattgcaattgtggtctgttgatggggtggaacgagtcttggttctggaaggatggttaattcggtggtccactgggtatgcatgtggttcctattgcaactttgcaaggc

SEQ ID NO: 925 - DNA, 504 bp, Zea Mays
tccaaccctaattgatgcttattcatggccacaacgacgctagagctccggtgagcgtgttccgaacaaccaaacatgatagtgtttaaattggagctagggtgagtttcactgattcaccagagggtgggtacacacgtgaatttgaacggagcgggtatgggaaagtgggtcgatgggagcgtgctctcagacgtgttctacagcgacgaggtaaggttcttgatgccctatcgcgataatattcaatcggttgggccgacaagctatgctaacattcatgtatgctagcacatggcatagaggggaaggaacgaacctgagaatggttggtcacggctgggtgcctgacggcagcgtaaatgaccacgatgggggaaaactggaatttgtgagctctagtgggtaactggaagtgaggaagggtgcgctaggcgcataaccagaaggcggatcagggagagcctttaatttatagtagctacgtgagtgcttcgtgaattt

SEQ ID NO: 926 - DNA, 474 bp, Zea Mays
cagcaaagagggtcaacatgagtaggacgttgcagttagattgaaaggcaagaaaccatctgttgccaaaccgaagcggacattccgcacttcatcagcaaagctggaatcaaaagcatctagtgccttccatgcatctgtattagctaggtgcgccatgacatttggattctcacgtaccccttctttgtgccacctcatgtgtctggctgtattcttggagatgaacaaacgtttcaaccgaggtataagaggcatgtaacgaagctgcttacgtgcaatcttcgtcgtcacggtcaaaccatcgtcgttttcaacctcaacgaatctacgctcaccacatatagtacacttcttctcacccgcggtctccttccaaaaaagcatacaattattgtcacaggcatcgattttttcgtagtccataccgagcccagagagcaactttttggactcatacatgtcctttggcat

SEQ ID NO: 927 - DNA, 775 bp, Zea Mays
acccagaccagtggcaacaatggtggtttccagctgaagaagagtggcagcagtggcacaggtggcgacaacgacatgaagaggtggccgccgaagaaaaacgacagcgatttccaggcttttggctggcaccagggaggcggcccacctcgtccatccggcccttgattctgcttcagtccggggatcagaccttataggcggcgtaggtccacagcatgccggcgaccaatatagctctggaggtggaggggatggcgtgcctttgctacagggctccttgggttggctgctaaggcgcacacggtcttcggtccactccaagtctcccaacaaccccagatgtgggattaggctggcctagacgccgccctgaaccatctgacactacaaaacgacgattgggtgctggattcatgcgtctccagccacatggcatctacggatggtatactcctttcccgtctccatcccactccccatcaccattggcaacggtcacacccttcccgtctccgcccgtggcaactcgaccctttccacccacagtccacattttcacctcaacaatgttcttatcatccctccttaatttgcaacatgatttttgttcgtcaattcactaaagacaataattgcactatagaatttgacgcctttggtttctctattaaggatattcagacccagcacgtgatcatgcgttgcagtagtgccggcgacctctacaccatccccacaaccaccagcaatgccacccccatgtcggacttgc

SEQ ID NO: 928 - DNA, 649 bp, Zea Mays
ctactccactgtgtggtgtattgagcttgtatgaacttgtgagcctgagctgggtctaagtcagtctgagtccgagtgagcttgtcttgtaacgttgcgtgcctccacttttatagctcaaggggggcacgtacaagagtgctgagccccgacatgcgggcccaggaacataacagatgtaatacttggggtaactaatgttcgttgctggatcaatcttcttgtgccctaacatccaagatctgcgtagtatcggtgtgcaggggaagtttttctggtaacatataagcgatgatggacacagtgcaactcacagcacgggcatactgtttgacaatggactggacaggcatgccgtctgtaggatggcctgggcgccgcctaccagcggagtggacaggacacatttaatgctgagggagcacatcgtctgtcagtgggatagacaggcggcgcatcttttccgcaataaatgcagaggcagcatggcccagaggccttacgtcaggctccgtccgctggcttacgtcacgggcgatagtccacgtggcagcatcgggcctccgcctgagcggggagtggaagcgctctgggtaaagcctgggcacgtgtcagtaccggaccttcgcctactcttgatctaggccag

SEQ ID NO: 929 - DNA, 409 bp, Zea Mays
attgtatagtgtgttgttcccattcgggctagcacatatgatgggattggggatgacgactctggcattggtaggaggggaagtggcacgtctggcgtggtggtgatggaaggtcgtaaagtggcggaggtggagggggcggtggtggaagggttgtggtcgttggtggctgtgggaatctggttgctgtcaagaaggtctgcatggttgccatagatcgggccaggtcctggactgcggcggctacggtatcaagtgtgaggggtgtgtgtagaaggggatggtggtgggtggcaccagaacggtggaggccggtggatgtggcgggtgggtggaagatggaggatcgctggacatctccggtaacaggttgttatggattaggttttggtgggttgataggatttaa

SEQ ID NO: 930 - DNA, 896 bp, Zea Mays
gtttacctgaaccttggtgcccgcacaaaatagctccggaaaacggggttcgttcggtcgatgatggggtagttcttgacggcgctccgcaacgttgcgaacgcgttaagcctgcaaacttctgaggtggcccgaccatggcgatgtggagagacggtggcatggtcaccagacaagaagaagataacacgcgatggacttaggcaaaacgaatggcgaaaccaggaccattactgattgtgagggcatgagtgagagaaacccacagcgagcctagcctagtgagcataaggtgacgaaaggcttcatcaagccgagtaatatggcactggagaaaacaaaggccgccagctgcatgcccatatcgcgacggggaacgctctcgagggtgccagctccaagcaaaacaaggcacgtggccgcaatgcaacgacgcacggataactgaatttcagcaaagcggcaaattttggacacgcaatgctcaaacaagagacaagctggcaagggaggtctccaactctggataaccatcgcattcaccaattaggactagaagcacagaactcactcggccttacgtatcatccattcaaacctcaacttgccttatgcacgtggagcacagcaggcgtggaaatccttctgctcccaaggactaacccaagcttcgctcaccagaaactgagctcaattttcagccatcgatgccacgtccacccctgcgtgtccctccaaccttatggccatgcacagctcggcactcaactataggaagtaaacaagcagcagtaggcgacatgcaaatggagcacgccggccccttcctctctgtccaaactgaagcaacgtttggttagacagcatgcctgaccatgacttggatcaaagctttc

SEQ ID NO: 931 - DNA, 469 bp, Zea Mays
caaccaaagagttgtcgcccacacctaccatccacaacaatacaaccagcaccaattccataatgagcattaccatccccaccagcaaaaccacaacatataccagcaataccaagaaatcctagctctaccgccccaccacctccacatcaccaaaatcaatagcctccgccaccagcactgaaacaagaggacttcgccgatcaaccctttcgaggggtcattcatatgatcaccagaggatccagctccgagttcgacacaaaacagtagaagaaagaacactatcagagggtcaatcacgtagccctcacttgaccagtcgttcaaacaaagtggtcccatataccacttacattctatgcaagatacgtcgatctccgtagcgcaccccatgccgatcccatggtgatcaactaccgagtagcaggatgggatctgcacaaagtactcgtcgacaatggcagtc

SEQ ID NO: 932 - DNA, 1311 bp, Zea Mays
ggtagggcctcaaaagggatagcattgactagttgggaggtgtcattgatgtggagggtgggatatctacagtggaagggggttagggcatgtctgatcggcaaggggcacccagtgcttcggtgaccggaggcatggtagcggtggtagcgaaccgggtcgcgacagtcatgaacatggtgatcggaagcgagggaacggtagcacttggaagccacagaaataggacggggacacaagggttttgagggttctgaggagatttttggtggggttaggagcgtgcttcggtaaggggagctaaggcgtgcgccgccattggacgacagtagaagatgaggcgtaggggaggccggcgccgagttaaggcggtgtaacgggggccggtggtgaggcgacgtgcatttagtgggggtacatgatgtgatcagggggtgaattgaatcggctgtgatccgaggtgagatcttctaacgaaccgcgtcgtgatggagaactgcatctgtcaacaaatcgggtggggagatcgagagcatgtcgaggattgaacggtcatgaagcgccggcgcggccaccaggtctggtggcggctggaacctgacgatgacgacaatggcgcttcccgatagagaagagggagaagagaggaacgaccaaggcggagggaacaaggactacaagggtgttagccacattctggcacaaaccagcacctggaagatccaatcctagtccgaccgagccatcaaaatgtggggtgggacggtcaagagaaagcataatatgtctttgacgaagccaatggggaaatggggggaggtgtttcctaaagagaaccatagggggacgaccatgcctgtgctagaggagaaggggtgaaccagcactccatgattttccgtgaaggaacattggatccaagcactcggggatagcagcatggatatggaggatgagaggaaagggaatggcaaatggctggccggcgcagagctaatgctaccaaagaagtggtttaggggggtgttacgtacctcgagcttacctagggagctttggtgaccggcggcggtgcgcttccttgccctagaggaaggggacaagagactgtggaggcagtggcaggggctctggtggtggtggaggcgacttctccttcgacgaagagggcgccgtagatggcgtcgcgccaaggggtcagtcggttcactggaaaaccgcatggggaggcagagagtctgcttccatcgtcctcactcgattcttgttttttctgaagcatcagttctaccctagtatctttgatggctt

SEQ ID NO: 933 - DNA, 386 bp, Zea Mays
ccgtctgtttgtaactcgggtagcatctttgaccctggtgtacaagtaagcatgatagactctatccttcagaggttggatgtttttaaagacaaagttagcaaccatgacttcagcagtcaggcccttgtccttcagtaagcaaatctcagcaagcagcaccttggcttcggctacctctgaataagtgggggactctacccagctgggcgtgcgacgttgggttgcctccctgatcgaggggcagagacttgttgtgattctccatggtgaaccactcgaggcgccatcccttgatgctatccttgagggggatatcaaggtattccactttcctcccccggtgaagctccaaactggcgccgccgacaagctgatgctgtcct

SEQ ID NO: 934 - DNA, 489 bp, Zea Mays
gcccgtactagatggaggtttacaaataggattgtgttgtaaccaaaccacctatccttttgtttcgttgttggtagagtggaaggtttgttcctcctcttcggagcagacggatgtgctacggatcttataataatttagctctattctcttggcgaggtgaaagccggatatattatacactatctaaaaaagaggaaccaaatgcccccgtgtgtaagtacatgcatgctgcaaaacgggttggtgaccggtgagtatggccattgtgtgaatgaagcagtatttttttcgctgaccccaaggtgtctcggagctcgtgtcgagatgcgcgcgtacgtcttgcatttttccccacgcaaacatgcctcagcagtccccaccaccccggcaccccctccgtgaaagtcgatcccatcagtctgtgggcctgcaatcctgcacacactcgctgcaacattccaaaaaccctcatcttgttccattttg

SEQ ID NO: 935 - DNA, 553 bp, Zea Mays
cccaatcctcatcatcaaccttaggggcacttataatctcgcttgcaccattagtttcatgggttaattctggaaccaaatcttgagaaaggataccaccagcactagtagcatcagcattttcaacattctgctccttctcagggccttcctcaagcacactaataacactagcaggaagaagcccctccatgcttccaccattcataaccatagcaactgtctcacttggttggtcagacttgctggtctcatctacaacatcacccttcttcttagccaattcttctaaggcttctccaccttgagcaagttgctgcagtaatccctcatgtgtgtgtgtttcaaattgcatctccccgtcccatgccactttaagacccatttcactagacactgggtatgtacttgcttgctgtggcattccaacaaacatccatgggacattaggcacaacatcttggtcacaattattgtgccactcatcacccaccccatgagctagctgttgcactaggccatgtgaatctgaaccaaataccctaccccatac

SEQ ID NO: 936 - DNA, 383 bp, Zea Mays
gtctcagtttggagctccgcgcctgcctcatccagtggctcagtggggttcttctgttaatttcactctgggggcttcctcttctgcgggtatttctggagcttatgtgctacccgctacggatggcagggagcaaggagatgtggtgacatgtacgattttagttgagtcgtttgcagcccatgctctttttgacgctggcgctagctattcgtttgtttcggaggattttgtgtcgcgggctggtctttcggtgcagaggttgggtcacccaattttggttagttctgctaatggctccattagtagctgttcagtttgtcaggggtgttccgtcattcttgctgatgaggtctttttggccaatctggtggtgatttccc

SEQ ID NO: 937 - DNA, 627 bp, Zea Mays
gtcaaggtatgtttgagggaagccttccaaccgaaagccgatagaggaagtgatttgctggatgtggtcagagctcaagtgcatggggacggctacgctcttgctgaagttgatttttagctgcgtcagggggctgaataggtcgagagttgtttttaagtgagaggcatccttggggtggcctttgaggaggatgagggtgtcgtcagcgtattgcaggaccgtgcaaggttcaccggcggtgagcgggcgcttgatgttaggctcccatttcatgatcgcctatagcacatcagtgacaaggatgaaaaggtagggggacagagggtccccttggcgcaaccctcgtttacaggagaaccatgggcctagggccgcattcacaaggatagaggtttttgaggaggcgagaatttttttccacccacatcatccaatgatcgctgaagccgcgggcagcaaggattttaaataagatgacccagttgacagtatcaaaggccttggcgaagtcaagtttgagaacaagggttggggttttttgtttgtgatagcattggatcagttctaaggcgtagatgaagtattctgaaatggatctccccttaaggaagccagtttgatcaa

SEQ ID NO: 938 - DNA, 565 bp, Zea Mays
tgagaaccggagaagtgaacgccaaggtgaccggccggagcggagaggtaacagcagggggtgcagacaagatcgaaggcaccactggagcgtgaagcgaagaaggcggggcagactgaaccggaggtgctgagataccagaatgctgaagcatgagggccatgaatgccctattctctgccctatcctgaataagctgctgctgaagtgcatcctgcctgtcctgcatgctctgaaacatcgagagcatcgtctcggataaccgggcctgctcggcggccaggttggccagaatcgccgcaagagcagggtccatagccggaggaggagcaggggcagcacgagaactcccagcctcatgatcatgggagcgtggaggcataggaggcggaggcggaggaggtatcccaaaatcatcatcatcatcatcagctgctgtaccctgggtgtcaaactgtcgaagtgctgcatcctcggcctgagtgtcaaacacaggagcataagctggcactggaatctcaggagcaggacggtaagatccaaacacaaggcgtgaggcctcaag

SEQ ID NO: 939 - DNA, 757 bp, Zea Mays
ctccatcaatagtagagttctaactctaaatcgcgctgtccatggttatggcgcaaactgaggataacccgaggcgttcccggcgatctaacgtggtctaattcaattggccgggtcgagaagcatcaagagcacataagagagctgaaacaagagcgaggagggcatgatcggacatgtggagagctggccacggcgagctcacacattgctgtgttcttgaccgatttgggggaaattcaaaattggagtgctctagtggataatctgaggcacgggctggtgcgttgggtgtgtgattacctagcggagctgatgacacacttaatttatagggcccgagggcggtggctcctgaatttggagtagcgcgcccggagagagggaagagcactggcgcaaaggattcatggctttcaccgtggcaaggtcaccggcgatgatcggacacgctaaggtgagtcactacgatgaagtactgcgtttaggcacgtggcacccgagcggcaggcggctaactccggcgaggttatctggaccagccgtgagacaagcggacacggcggccggggcggatagtgtcctgagcacatccccaatgcgatatttcttaccccgagcagctatctgcacttcactgagcatgaatcacaacaacggcgataatcacggcgcgggatcaccggcggcgatacactgaatctggcgatcttcatcaggtcactgtaccattagaacaccattcagaacacctgcc

SEQ ID NO: 940 - DNA, 316 bp, Zea Mays
gcgggattcgccgggagttgttgtcgggtgattggcaaagccgagctcggacgaggcaaagttttctccgaggctgaggctgacttcaagcaaggcggagttccctcctaagggtgagaccatgctctgtcgtacgcacgtcccatccagagttgtttgaactcagcagacgacgtgggggagcagtggtcgttattcccgcgtgtgcgtcatcgtagttggtgaaagtgatggtattgtggtcatgtcgctccctgtttgactgtagcgtcacatggttaggtattcgcattaaatgtccatgtctccgcgattc

SEQ ID NO: 941 - DNA, 542 bp, Zea Mays
tttagagatcagcatgttgtctttaattcctgctttagaaaccagcagcatgatctgcccatgtcctgttaggtttgaaatttatttgattgtcgatagattggacgtctggtagatggctcttggctggtcttcatttcgctttgtgcttcaatgcttctgttgattagacttgtacttcagtagctatatttggattttctctgaactccatcgatatctttcttctgtcttgatacattcattgcgtatactgtatggatgtgactgcttcggaaaatctattgaaaattcttggacgttccctccccaatgggtataaccgagggacggcttggtacgtcgagcgtttagcaaactgtccttgagtagtaactggacgtgaccgcggggtgtaatcatatcatccaagcagttgaccttagtccaaatggtgtcgtgttaacggtgtctgctgcctgacttacttccaaacgatttgaattgcttattgaatacttgtgattgttcggtgaccgtggtaggagatgagcggttgcttc

SEQ ID NO: 942 - DNA, 493 bp, Zea Mays
tcacttgcttactgctctcaaaacagtccaacttagatattttcccagaagcaaattaagcccctagaccttcagtcacacactacaaccttatccccacttagatacataagtgacatcaacagggtcgaggtgatcttcttcagaaccctagtgcaacactgatccctctccatcagcactgttgttccatctgcacacctccctgttgacccctgcaatctcttagcttctcatagcaatagggagagcaggtttaataaaacttatccaccaaacaaccctataccacttgtccacatggaccttaggcttaaaccccttggattaatcacaaacaagctccaaaatccatagaaagacactgaaccagaactagaatcactgcatcagacctacactcttcttgcttgacagaggtggtttgagcaccctttatctctcagttctgtgcaacatcaagcccccttacttcaaggaatttgttcatcca

SEQ ID NO: 943 - DNA, 627 bp, Zea Mays
gtcgaaccctctcgccctctctctcgctctgcgcgcgtgaccagagagctccgccaccgcccaccgtcgactgtcgtccgttctgcgaccgtcgtcgagcccgcgccccgtctgttacctcggtgagttctgccttgccgtcagctactcgggacaccctctggtttgcccttcccctctctggtttgcccggtccacactaaccggagcgtttcttacgtagccggaaccctgccatcgtcgacccgaggctccatcgcacccccgccgttctccaagcgtcccggagttcgcactcgaggtgagcatcctgcgcactcgaggttagttgtgccgccacgggacttttcccaccgtggtctgcgttcactggcgcccccgtgccggttctgcgcccacggttgtgttcgccgtgtcgccttgaacgtgcctgaccatttccctaagcccttagagccttgccgtggctgcccccctcgtctccggcgagccctcgccgtgggaccaagcggtgccaccgcgctcatgtccagccccggccgttggatcccgcgcgcccgtctgagatctagcggtttaggtttaatcaatgcggatctaatctcagccctccgatccagatccgac

SEQ ID NO: 944 - DNA, 842 bp, Zea Mays
ggagtaccgcgcgggtgcaccgggtcttggtgaggtcgagcgtggggtgttccacgtttatgcatacggattttgacggaaacagctgcgtaaatgggcatagtgggggtgtcgcgcgagtgcgtcgggatcgtggtgtggtcgggcgtgggtcgcgcgtttatgcatgcgtattttgacgatagtggctgcgtaaattggcatagttgtgcggtcgggacgtggtcggggtgtggttcggcgtttatgcttgtataaattgccgacaacaactgcatatccatctgacgcgacgtgtgtggtgagggcgggtagtgggggtgccgcgcgggtcaaccgggatcgtggtgggtcgcgcttgggggtgagccatgtttatggtgttgtaacacaattggcaggtaattgtaaccgtgtcgactcacagaaatctcgcgacatgcaaatcgcgcgggatatttggaacatgccatgaatatcggccaggacaattttggcgaatatagtaggataactccaaaaacaactgggctacacaccgccaacgcttttgttcgatgacctgggagaggtagggtatacacgatggcgacggccaggggattggtgcagtgtggagaggctacaacgacgatgttaccctgtgggtcagatgtcggtatgctgtaactccactggctgcgttactggcgccaggattccttgaagacagcaacgcagttcatccaagtttggtgggagcaactcaccggatacccatgaggacaattggtgatcatgagcaggacacaccacacattctccaaagccatgtaagttcagtaagataatgtcagattttg

SEQ ID NO: 945 - DNA, 818 bp, Zea Mays
cgtggagacaaggtaggtgttgccgcccacgccagcaatgacaggacgtcgccacacatgtatcgtcttggatgacaccacaacacaacagtggatgacggagatgtccttgacaatgggacagggcgtcgtagcgtacgacccctgtgccttctaactatgacacatgggtcccgccatacgtcactacaatgaaaactcaacaccagagtcgctatagtgacccacataccaggtagatggagtgctccgccataccggtcgcatgaccatcagaagacaacgacagaagagccacatcggttggattaccgtaaacgataggtcgtgcccccggaggacaagttcccgtgtaaggacttcccttgaactataaaagggaggaggctaaatagtcaaagacaagagcattcagttagagttctccatcccctcattcccacacttgcacctattgtaacacgttcctcagctaatactacgatcaacactatattggactagggcactagcctgaaccaatataaaccctttgtttgagtctcccgtgatccaccatttggagtgagtccgcgctaccctccgctatcgaacacatattctactgtgtcccccgctttccgtaaccacgatagttcacgcgtgaggtagaggggtcgttagcgtgataagcgactttattcactccgatggcatagtcatacgccctcaccgttggcgagccctttgtgtcggggagccgcatcagcttcggctcccttgactttcttgccaccgccaccggtgagctttgccatgctgactccgatgcacctatc

SEQ ID NO: 946 - DNA, 401 bp, Zea Mays
agttgatattatcaaggcatttgactcttatctcctggcttttcctactggaagttctccagaaacttggttttgggcagatttggagagacatcctcagtggtcttttggcaacctcctccacacaaatccttttaaatggggttccagggcaaattatccagcacagaagggggctgagacagggtgatcctctttcaccaatgttattcattataatcatggatgtgcttggttttttagtaatcaaaagctgaggaggaaggactgctgcaacctctatcctccagagtccagaccactacaacacagattacccctatatgcagatgatgtggtcttgtttttacagccaatagagcatgacattcaggtgtgtactaaatattttgaagctattt

SEQ ID NO: 947 - DNA, 687 bp, Zea Mays
gtgaggtataggctagcttgtgacaggtctctgtaaccgcccggcgcgttaccgaggcgcaatgtagcatggcagcgccgcacacattaaatgatcgtgcagagctccgcacgttaccgaggccgttgtgccacgcacgtggaagacgccatcatgtagcgtcgttcggtcgagtattgtgtttgttacagtgaccatccacacgtgacagcacgagcaactgcgcatgatcctacgcacgtcagcgtgccggtgtacgctgcaacctgtaccagagccttcgcccatacgctgacaagacatggcgaagaagaggcttgtcaagaaatctgcacggcgaccaagcgatgatctatgtctgtcgacgacaataaatgctccatgtagtgtgtttttatcactatattcctgggcctgcctgtcggggctcaggtttcttgtatgtgtccccttggttataaaagggagggcacataacgttgcaagcgatagactacctcggagaccatcggacacacgtagactcccattcctcatgcaatacaactcacaatggatgtagagtattacgctccagcggcccaaaccacactaacccttgtgctctcgagttcatccaactggtcaggcaaatccctaggcttcccccccagttcacaagattaagctagtgcattccgccacccg

SEQ ID NO: 948 - DNA, 747 bp, Zea Mays
gtttgagcggcgcctgacctctgacatgggggccatcagcactagctgcaggggtgccactagcccacgccaggggaagatagtgtatcccttgcatgaaatgtgcgcgacacgcccagtctacaacatgcaggatacattgttgcccacacattattgaggtaggactattgactccttgcatcgcttgggcgcccttcattatgacctttaccggccctcatgcgttactgaggcatgaggggacaagcaggaggagacaacacgacaacgtccatacaaccctacgcacaacaacatattaggctacaccacaacctacaccaaggactacgtctgcatttcgattagatggggcaggaggataggatgccaggagctagctcgatgaccaagaggagatatgtgcctagaagatatagtgttgccagcccttacctgacacttcacacttcgggtagaagtgactcctaggcccagctcccttataatgtgccccttgaactataaagggagggcactagcgatgcagagggaggtcgactcacatccagacccacgacaagctctcaagcaatacaactcacaatagatgtagggtattatgctctgggggcctgaaccactctaaacccttgtgttctttagttaatctactcggtcaggcaaacctctaagtccactcctcatcggaggatcaagggcaggtgcactccaccactcgaccagaggaaatatgcctccgac

SEQ ID NO: 949 - DNA, 980 bp, Zea Mays
cccgcctgcccgtgtgcctgtctcctgtcctacctggattctatctctctcttgaggtttccaggtacttatcacttcggtaatgatcttatcagcagttgtctacttgtgcttagtctttcactcatttatgcaacacttacgtcaggatgagcgcacgaagaatatgtcagcgccagggggaggatacgacgaggaccctcctcgccccttcaggcaggtcaagggcaagacaatatatctagagcaacaggaaggccggaagaagcaccgtatggatagagccgcccgtgcagcacttgcagcggcagcatcggtagagcaagcagagcagggtggctagttgcagatctcctcacaccagattgcctatagggttcgtcgcctcacatctggacctcgctcctccgctccctctacacccgccacagcaactactccacctcccacttcgctagcccctgtcgctacagagccatccaccacttccccatacacaccacctccaccacacccgcttccactgttccccctcccgctctcatttccactccacccattccaccagcccactttagggagcgagacgagacagaggtgtgaccgttagctactaatcctcgactgcttgatcttcagcgtgccactgcagcctgggtatgtaggttcagacacgtacccgtggagtcctggctgcctgcttagagggaccctgcagtggcagatctttttagtaacaggactcaggagtccttccgagcacagttgtcagcgcagatcggcctacgagcgcaccagctattggatctacctgcctttctgctagcagccggtgccaattcagaggtgcatctctcctatctgccaggtcttctttctctactgactatgagtggtagatacattgaggagtgggtctgagtattttatgctatcgtatggattggcccggaccatcagtggatgaggttccgtttcga

SEQ ID NO: 950 - DNA, 588 bp, Zea Mays
attaaattctcctcaacacgtgattgattgcgggttgattcaccgggaatagagggactcttttgcttaattgttcggctgaaacagtatggggggttttcggttgtcagatctagaactaagggacaagattataagctcatttacccgaaccggtacacaatgccacacgtaggatacataatatatggctctggtttaatgattgcacgatctgctttcgaccgttcatccaatgatttacggtcgagatgaagcccgggcgaagcagtgcattgatctaatccaaaccgttcaacaccggacaacggccaggtgcaaccggcagcacagagacccctgatttgttcgtgaccgttcacacgcggatcaacagccgagggctattcacccaaaccggccggaccccgatggcggaacagaaatcccacggcggcgccatgggtggcgaaccccgtgcgagtgctggcgagccctaatcctaacgcgatcatgcgcaaaacggagtggggaaagtggcgtgcattaaggttgtagccataccgcggattatgcacccaggagacccgaccacggcgcacggccgaa

SEQ ID NO: 951 - DNA, 670 bp, Zea Mays
taagctaccgccgttgcgcaccacgtgtctcagcgcgggacttcctcgcggtgactcactggttgcatgtccggcgatgaccggagtcactgccacggtgaaagctacctttttcccccgcactgagctcgcctcccctctccgaccgccagcacccctcggccgaattcgtcaccgaccctccatgcgcctataaattgcgtgtgccaccagctccgtagagtagtaagctgcccagccaccacgaatcagcctcggtcattcactagaatccacgaatttggaattcttcccaaaactgtttccgccaccgtagaaccaagctcgccgcggccagcccaaatcaggtccaatctcgccctctgcgttcttgtttcggcactcttgtttgctcttgataatcactgacccgtccaattaagctagaactccattggtcaccgggaacgcggtcgagtgtccgcgttaaccactgtcaccgtggacagagcagggtagatcaccgtttatgaaattagtttgggagaaacagtccttaggtcttgaatttgacatcggccaaacctggacgccagtcgttgcgtggatcggccagtatgcgagctcgctggagctctgcgcaacgccgttcgacgtcaggggtgtttttggagaagaaatagaaatcgag

SEQ ID NO: 952 - DNA, 617 bp, Zea Mays
agaaaggggagacttttaaaggataagttcaaagtacacatttaggtagaaggcctcaatatcgcaagggtcaaaggcgataatagacaagggcataagggaaaagacgaaggcacagaagagccagtggtataagtacaacaaagaatggaggtatgtcaaggcttacacgcggtaaagaagagaatattgccaaggataagataagtaaaacaccattctcaaattgggataggagattggagattttagataacagaaataatgtcatcaccaaggtatggtcgagagatgggaaaggtcaaggcaacgctaaatagaggcacaccaaaggatagagtaaaagattcacaagcgatgaggaagaggatacgaccaagggaaaagtaggtaaagtaaaatgctcagattgagatggaaaagaggagattttaaagggccagtataagataaacatcaaggtaagatatagaggtgataagggtaaaagtgataatgatgaaaaacataatccatggacagagttaaggcaagactcgcaaagtgacgaagtggaaaaaacaatcaaggataagataagtaaggttccatcaggatgatcgaagtaaagaagttca

SEQ ID NO: 953 - DNA, 853 bp, Zea Mays
agacttgtattattttgcacctaagttctcgtagtagggggatacaagcaagtcgagagagggagtgagtccgaagtctctgagtatgatcgggacaagtgccattttcaggagtggggtgaggtgtgaacgttgaagtgttgtctttgacctgcctatagaaggccccgggctcctccttttattgtcgcaaggaggaggcccaggtgtacaggtattgctatgcaattgttgtgttcggaggaggtgtgtccgagccctgtagcagtatggccggcaggatggccctcggctttcttgtcttctttggtcaggagaaggacactcaatccctgtagcctgttcctttgactaggtagagagccaaggccgagttcaagagcatgggcatgtgtctgagcctgacctgtataggggtgtggatgagacgtttccaagtgtgtcgagtcggagtggttgaaacagtgctcagcatggcagaaatttgtgtggtaatctgttccggacatcatcctgaacggtggaatagccttcctgtcttcaacggggttcgcggaagagtaggtggcatttaatgcgcatgcttccctgttgaggcagttgaccaaggtcaagcttgggcatggcgaaaatttcttccaaggtcgaggccgagattagacgttgcatgtagtcacactctcagtggttgaaacagtggtcgaagtgggggaatagtaccctgtattcacgctctgaccattgtttttgtggtaaaagtagattagatcgttgtcatgtcgtcctttgttgactttggcacctttagtggggtaggttgtcgtacgtactacattatatgtgcacgttccgg

SEQ ID NO: 954 - DNA, 452 bp, Zea Mays
gggtgatgtagcgcaccacttgggtgtattaggggcagagttcggtcgtggggaggtggtcccattagcttcgccggtgtcggagtcgggtggcgctctacctctccggtgtgatgcggcggcaattgggggagtggtgcgtgaccggtggatgagaaaggggcggtcctgattaaaacaccgagtaccggttcagcctgagcttttccccgccgtccgatgcaaatcgtgcgtgtggaaatcgtcctgggtagttttaaatcctggcgcttgatcatcgatcccacattgtgggcgcgtaaccattcataattcacaccaagttaatctgggtcgctcacagctgatccaacggcccatcgcgaccaataccccttcgtcgggtctgttttccatctcagcccctcacttgccagaattagaacccgccatccacaagggttgtgttctgt

SEQ ID NO: 955 - DNA, 308 bp, Zea Mays
cggatgctgacctgtctgcccccactgcagacatctttatcctttgtcaatgaagtgagcggcgagcgctgacctttagctaaaaagcactgcccgcctgcttccgtgctcttctcccctccccctccaacaccattcaaaagacctcgtcctcacttctccaaccacatctcctacaaataaaaaactaggtgataagacaaacaaaatctttcaaccaccgattagctgagggtgttttctaacttatcttcttcctcaatttttcttggtttagaggagcttctgtaaattttggttggttatag

SEQ ID NO: 956 - DNA, 591 bp, Zea Mays
caaatgttgttgtcttgtatcggtccatgcatctgacataattgagcagccatattccttccaagcttgttcatgcttcgacctcaatgttgttgtcctctcgacaaccctatcaagccaaggcaccctaacatcatggtacgatggaccacgatatccaggaccaaattgcccaattgactccaacataacctcccagctccttgaattgacgacgtgcaatggtattttgttctcatatagaaaatctgcgacatggtcgttaacaatttgcttggcttcctttcctttctttgtgcaagcttcaagagttgactgagtgtttttatttttatgcctatcagcaacaaattcttctggcgtcttgcaaaacatggcagccactgacttgccgcacttttggttttgggtgggatgaactgaaacaacaaaagagctgatggcagcttgagttgctttcttcttcgcttgcttgtgctttgtccctgaacttggttcatgtaccttttgttcaggttcagtagcatcaccatctttttgtcctccttcctcactttcaacagaaagcacaagccttgtgttccttttcaa

SEQ ID NO: 957 - DNA, 588 bp, Zea Mays
tattgctatccctcgcgaaagcagggaaagaaaaggaaaactgccgcttcggccatctttattgtgccgaagggcaaaaagattaaggtcttaacacaccggccgagatacattgagacagccacagtgccgaagcttggtgaagggacatctttcactgccgaagcagagcaacctgctcccaccatccctggggaagacctgactaaattgctgaaggttcctatagccggtctagccgaaacaccaaaacacgatgccgaaaccaaagagaaggcggccaaagagccagagccagagctgccaaaattcttgagcccgccagcagaggcagaattgccgaaggttgcaaaggctcccgcaacaactcccaagaggagaagaatggctagcgtgctagacgctgtcatggagacgacaagggcattgactcctgctcctgcgaaaaaggttgtcgaaactgttacggctcgtgctgaaaccgaagttgggccctcagtgccgccgaggcagagcctggtgcaactgagcagagagctgagcaagaatctctagatactggcatggctctggagaagaaggatgcgc

SEQ ID NO: 958 - DNA, 579 bp, Zea Mays
cgatctgctccccacggaatttctccttttctttattggtcgtgggcctctctcatgtgcatgacgtgtgggtctcaatagccacagctcttctcttcccatctcagttctatcgttttcctttttccgtgagcagacgcaccgccgcctgcaacgtccgttcgtggccgccagctcgttcgcctccccgcacctctagcctcgcgttatggcagcgcccgttcacagtttcctcacgccacaaccgtttctttgatgctgtcatcaatagcgttcaacacagtgcttcaatcggcattcaaccatggccatgaatctctccccactcgcgcgtgcagccgccaccggctcttcacctcctcgcccagcattatggccagctcgccccaccctctccatttctccccactaactattggcagtttctcctacccagttctcccaagtgtcgttattggcggtgctggtaaccgcccttctccttccaccccgacgcccgacttccctcgccttggcctataaattggacgcccagccgcgtttcttctcctactcccttacccaactctcgctttcgtc

SEQ ID NO: 959 - DNA, 640 bp, Zea Mays
gagactggatcattgctacttagcgccttttctggatggtaatttggatgatcgacgtagtactgatgggtacgccgtctttcttgggggcaaccttatttcctggagttctcataagcaagctacagtgtcccggtcaagcactaaagctgaatataaagacgtcgacgatgccacaacagagatcatctggcttcaagttcttcttcacgatattggcatttctcttccacgaccaccgagcctatggtgtgataacataggcgctacatatctcacggcgaaaccagtttttcatcgtcgtatgaagcatgtggagattgattatcattttgtccgagagcgtgttgccatgaaacaacttgaggtccttgccatatcgtcgaaggatcaagtggccgacattatgacaaaggcgcttcctactccggcattcaagcatttcagaaacaatctgaacttatttccacgacatccagatcgaggggggtattagatgaaaacacagtttgtcacgtctattcctagattagagagagttgcatctctctaccgtgattcacggtgggttagttgtggattatgatcccatccatgtatatccctattttctctcttctctgtaacctcatatatcagc

SEQ ID NO: 960 - DNA, 527 bp, Zea Mays
atgggtgtgaccatgatgatgctgatcctaatgggtgtgatctggccagagctgaccccaatgggtgtgttgttcgtattgttgatgatgaggaggaggaagaggaggaaatccccttaattcggaagaacagtcggtgtcacctagtcagtggggagagtagtgatattccttctctagctttgtctgctctcgttggtctacaagagttgtccatagcaaattttgatcaggctctcgaggatatggttcctgaagatctgctgtccgagccaacagatggtggtatgatggacgtttgctctgacattctggatgtggggttagagttatcccgagcagcgtctcgtgcctcgtcgaccttggagtgtggtcttcggagtcaagaagctggtctaggttgctccattcccatggagatgactgagaatccttcagccttagaggtggctgctacggagaacctggtccccaaggatggcgccagcggttacccagcccccgagggtgttgccggtaatgatccg

SEQ ID NO: 961 - DNA, 633 bp, Zea Mays
attttgacaaagtctagggtgctctgcacaagatttccgggccaaactgtaatagttttcaacaagcgagggatggcgggttattttcaagcttcctcgaggactctttagcaaaaagacccggccgaaggggtatccaacgatcctggccgttggatcagagatccatgacccagatcaaaagttatcgtggctgattcttaatggtctagatctagatcgagggtctggattcaatctcgaaggggtatgcccacagtccaatcccagccgtacactctacatcctatggctcgcgcgaatttcccccaaccctctcttcttccccaatcagcagggcagcgacgaagcagagctccaccctgggagctcgctggatttcctccgcccaacgcactggcgtcaaaatccaaacacgaacgatgctaaacattgggggaagaaaggcgaagtgatggatagtatccttaccggcgaacacgacgcagagggcactatccttggatttcagcgaacccaggcataggctgttccacggcaagaaattccccgccaccaggttggccatcgactctggcgccgcatcgaacacatcccacgataaccgacgaagcccccagacccactgtcgag

SEQ ID NO: 962 - DNA, 629 bp, Zea Mays
ggttcagtccccctcgccgccggtgatccacgcgcccggattcgcaccaatcgtcgtgattcgtgcctagcacgccgtggatattcgcagggaggtaactttggatgtgtcgcgacctcgcggacctagcccgagcctagtcggtgaaaattcatcggtggccatcgtggctcggtcatttccatctccgtgtcatccatgcctcgctcctccctcactgtgtccctgctttacgtggtaaccatgcacgaacggtgtaatccacggctgtggatcgttagctggaccaccgtgcctttaaatagccccaccacccacggcgaggtattcacatcttcaccagtgaactcggttgaagcacaaatccgtgaaatcctctccacctctcccaaaattggttgtgtacggtgaaaccatagtcctttgcgaccatgtagccccaacctcacctcctaattccacctggaaccgtcgcgacgtcgttttccccttttctatcaccagcgaacaaatatcctccgcgctccgtggccagctactcccaggtctgttcatgctctctgctctcccgtttcagtgtccttaggttctcctgatgctccttgacccattcaattgagctaagctgc

SEQ ID NO: 963 - DNA, 349 bp, Zea Mays
aactttgaccaggctggttgagacgtgacggagcagatcctgttggtttgctaaagttcgaccccttgaaagggaacctaaaagatcgaaccctcttgtgcctgtcctgctattgagctcggagaacttgaaattttctcttgaggtgacctttttcctcttctcgtgctctttccacctggatggccttgttcgagaggtgcaagaaactgaggaactcttggctggcaaggatggtcttgagtttcggtcttaaccccttcaagaaacgagccatcttcttggcttccgtgctgatgtcatcaggtgcatagcgagcaagttctgtgaatttatggatgtattcact

SEQ ID NO: 964 - DNA, 507 bp, Zea Mays
cggcgaggtaatgttctcgatgccctatcatggtattattcaatcagttgggccgatgagctatgttaacattcaaggatgctaaaacatggcacagaggggaatgaacggacctgggaatggtcggtcacggccgggtgcctcatgacggcgtaaatgaccaagatgggggaaaactagaatttgtgagctctggtgtataattggaagtgataaagggtgcactaggtgcataaacagaaggtggagcagggagggcctttaatttatagtagctacgtgagtgattcacgaatttgggataagatgatctcacggccggaaggcggtgagtcactggagtgcaactgtcgtggcgctcggtgaggtaaggcccctagcgataaatgggctgtccacaacgacatattgcaatgtggtaatgtctccaagcacgtggcatcctcgtggtgagcggcgaacgccgacgaggacatcccggccggtcgtgaagcaagtgggtacggt

SEQ ID NO: 965 - DNA, 612 bp, Zea Mays
atgatgaatatgttatttactgtcgtaatgttagctgaattttggtggtaacaaatggagctaccatgctaccttatctgcctttggagtgggtctatgcttattgctcgggcacacttgtgacttgtggaagaacataatcacagaaccctgtcggaatacatttcagaatgaataggtcaatggagtaagctttctagctgctacctgtatgaaattagatcaaacagaggacctgtcatgaagagtgatggtcccctgttatctcatgtactatattgcttgatgctgacgataggatgtaaattacttcaaccccatatttggatgatggttcaactggataagaataaccatttcatagaatagatacatcattgtcttcatctaactatctatctatctagccttttgaactgaaacctgctcatttgttgcatgacgaaattggaacaaaggaaggtggtcccactgaggaaaaacacgagagaaaaatcaacaaaccattttcacttttagggtggggggattagtgtggaagatttgagtcattgttaagtggtgaatgaggttttgattgcacaattaaactcgtctttcatttatatgtgc

SEQ ID NO: 966 - DNA, 1087 bp, Zea Mays
cccggggttagacaggcatgcatcctagggcgcgaggggttgtggtgcttacttatgtacgccacgccatgtggcctcacaggctaagctagtgatacccttgtataagtcgtagtcagtgtcgaagtcttccatttaggggtcgtggtgcttacttatgtacgccacgccatgtggcctcacaggctaagctagtgatacccttgtataagtcgtagtcagtgtcgaagtcttccatttcttgagatcaggagaggtcccgagagcggtgacttccatcatggaccttgaagcagtcttctggacagggattattgagcgcgtcatggtagcagtcgagggtatgttctttctgtggggaaagatacgctgttcttgtgtgttacatgcaaggggagtgggtgatggtgagttaaaaatagtgagcacacggtgatgctaataagttatttccctgctatttttcctgcaatgttttttggtggtagattatcgttacaatctccttatttccctgctatttttcctgtgattttcagcacgatgacacatcttggtggtaatgcatccaccgccagcatagacaatgatgtgctggacagaagcagaaacttttacgagagaagaagggaaggcaagaagatggtagcggtagctattgtaacccagtaagtaagcaaaaagaaaagcctggctggcctgcattccctccctgacgcttctgaaaaccagagatgaaaggctgcagttatgttctgtcgtctgtttgagttcgtcattagcctgttgttctggaattcataattagtgtgtggttcatgtttgcatgattgtaaccctagaacagcacagcatctgcaggcgtgaaccacaaacttattacgagctccaggatagcacagcttaaattcagttattctaatcatgtctgcagatgctgtacatttcctttcctgcatagcgtagtcatgttaacatgttaaaccgaacaaatttgctccttcaacaaaaaaagagagcagaacaaatttcatgacaccataacatagctttcagcagaaccaagatgtaccgtaccatgccttcg

SEQ ID NO: 967 - DNA, 770 bp, Zea Mays
aattatgcatcctgattgaatagggaaaacaactcctggaagacatccacagcggaacctgcgggcaccacgctgccccgaggagcctcgtggagaatgctttccgacagggcttctactagcctaccatggtatcgtatgcataccaggtggtgagaacatgcgaaaaggatgccactgttatgcgcgacaaacccatctacccacgcaggcgctccaaaccatcactatcacctgtccattcaccgtctagggactcgatctggtcacacctctcagaaaggcacctaggggctacacgcacgtcctagtcgcggttggtaagttcactaagtggatcgaggtgtggcatatcatcaggatcacctctgagcaagtcgtaaagtttgtcaccaacattatccaacgcttcgaggtaccaaactcggtcataacggacaatggtacatagttcaccgggaataggttcctagagttctgcgacgaatagcgcatctgtgtagattgggtagttgtggcccaccccaggatgatcatgcaaggcctcaagtatcgagttttcactcgtctcaagcaacttggacagcgatggccacaggcgctaaccgcaatcctctggagcttaagaacgaccccaaaccgctcaaccagatacacattgtactttatggcgtatggagccgaagtggtcctccccaccgacctcgagtatggcgcaccgagggtaaagttgtatacgaatgagcagaatgagtcaatcttagaagatg

SEQ ID NO: 968 - DNA, 619 bp, Zea Mays
tagcggatggaaggacactatggagtcgatatgaggtcccagattgtaaccggttatgtgaaggcttgactttttctagcaattttaaaatactacctctggggggttatgatatgatcctaggtatggattagctggaatgtcatagccctatggctgttcattgggcacagaaatggttggagtttgagtatgaccaaataaaggttcggttgccgggagtgctgcccaacacacaagcatgcaacaacatcacatgtttgtagctagtttgtttgatcaggcacgaaagagtagagcagttactcgaattgcaacagatggaacagacaacgacaattgaaatccctgagccaatcaagcaattattgagtcattatccacatctgttcagtaaaccccacgacctaccacccaaaagaacagttgatcatgccatcgatctggtacccggtgcaccgcccttcaggctcagaccttaccgctatacacctcaacagaaagacgaaattgagaaacagatccaagagatgttagacagtggaattgttcaacaaagttctagcccttttgcttcgccggtattgctagtgaaaaagaaagatggagaatgacgcct

SEQ ID NO: 969 - DNA, 502 bp, Zea Mays
ctcgtttccttttcgcgagaccgaccattgcctctcctcgcgaacgacataccactcacgtctgttaacccagtctaccctttgtctactcctcagcatctacccctccgtctaaccttgtctacccccgacatctaacttcatctacccgtataaaccccagcttgccttgtttcgtcatgcaaatgtctcatgcgtcgtgcacgcatccatctgtttctctcactcgttcctctcactgtcatcctgggcgcacgcccgcgtgtcagtttattcttttctcaaattgttgcccgtttgcacgcgcgtctgacttagacgtgatccgcagtgaatttggtaacctccatctgcgctcctttatatatatatctacccctaccatcacataacccttggtacggatatgcacctcctcccagatccaaatcacatagcagcgcccccacacggagcgtccgcgcctggcctctgcctagccgcgggtcccacgcgcccccac

SEQ ID NO: 970 - DNA, 572 bp, Zea Mays
ggcggacctggaagcagctagccgcgatgaggcggttcacggcggcacagtcgaccgaattgggggaagagggaaattctccggctatggtggctaattaaaggcgggaatgggtgctttggcttcgggataacatggcgcaacagatccggccaacaatttataggagcgctaagcggtggtgtccaattttgaaaggggagaccggcgtccgagaggagaggtgagtcaccggcgtaaactattgtggcgcttcccggggtaatgcctccggtgacgaactgacctcctacggatatctactgcgatgtggtacatcttctaagcacgtggcgcagttacaagccagcaaactccgactaggacaccactgtccactgcacggcaagtgtcacggtgaacagtccggcgataagcctctctcccttccccgagttgcgatctttccttgcccacggttatccgcaagtcacgacgcatgaatcacgatgattgacgttaatcgcggcggagggtcaccggtggtgagatgcgttgtatctgagatatttcagctactgtaccatgggaaa

SEQ ID NO: 971 - DNA, 385 bp, Zea Mays
ggggtctcgtcttgacccagcagaagtgagtaccccatatttagggtaccgatagaggcccccgggcccaactagcgtgagatggtgaatccataggtgggggccaaaatctgcatcttgttcaagaaatggaagtcatgtgcaatgacattgcgcctgcagtctccaagttgattggtttgcttggcgatatattgttgttacctggaaaagacaaaaatggctaggccctcatgtatgccctatccgtttcggaggcaagaaactttttctattgttccctggcataaatggttccctgaaggtagtcccaaaagtttagggctaccttttagacaagagaagctattcctgggtgtagttcaggaatagagtttagtagtgt

SEQ ID NO: 972 - DNA, 407 bp, Zea Mays
aaaaggagtctgctcaactaaatacttgtttgggggagaagggcaatatataagttaaacccttgctagaagactgcattcgtaaagctcaacgcttggatgcggagacaatgagacttgaagaaagggctatcaaagaaccaccctcgaatctcagaacagacgaaaggggaaccctttcgttcaaggaccgattgtgtgtgccaaagcgggaggcacaagaaatcctgctagatgaagcccaccatttagcctattctctccatctagggtctaccaagatgaacttagacctcaaaaccacatactgatggaaagggatgaaaaaggagatagctcaacatgtagctcggtgtgattcttgtcaacagactaaggcagagcatcaaaagccttcagggttactg

SEQ ID NO: 973 - DNA, 429 bp, Zea Mays
ccggaggagactactcgagtttaaggagggtgatcacatgtatcttaaggtgtcaccaattcggggtatgcaaagatttaaagttaaaggaaagttgtcccctcgctttattggacctttcttaatcttaaagcgagtgggagaggttgcatatcaattagaactacctgatcatcttgcggatgtacatgatgtcttccatgtatcacaattgaagaagtgtctcagggtacctgaagagcagctacctatggaggatcttactgtccaagatgatttgacttatactgaatatcctatcaagattcttgataccttgactcgtgtcacaaggagcaaaatgattaaaatgtgcaaagtgcaatggagccaccatggagaagatgaggctacatgggagcgagaagaagaagtacaaatagattttcc

SEQ ID NO: 974 - DNA, 302 bp, Zea Mays
gggatggctattaggatagccgaggtagcttctccttcagccgcgaaatgaacttaaatgtctcctctgcttttacttgttgataaatatcattccttgataccctgtcgggatggaatttcagaagagcttgcttgaaggctttaacctgaaaaagataagtaatgtcatcaaattaactactccctctatctcaaattagtatttgttttaactcttggttttatgtctatattcatatggatgaagatgaatctagacacatacaaaactcctaaaacgaattttaatttgggacagag

SEQ ID NO: 975 - DNA, 342 bp, Zea Mays
cgcaattcagcgcacaacacacgtcacaaccatagtgtacactatacacaggatatttacccatcacaaatatgaccatcgcagttcttttatgaaggggggagggcagcattttcgctcatcgtcgctaaagaacggtgatggcaacactcaatattacatcggctcctcctttgggataagaccagcctcccggaaattaaacaacatcaacctcaactattccccctcaaaaaggtcacataggtccccttccacgatactcgacccatacgtcgaatctagtagctcacggcgggcaacctaatccagtcgcggcccgcttcgaagacaaaacctctc

SEQ ID NO: 976 - DNA, 319 bp, Zea Mays
aaacatttgagtaggacaaaaagttcctctgttctagagcacctttgtccctcgtagacaaggacactgaaacagtgtatttgcccatccctaaaaggtgccccacaatcgttgatcccacgggtagaaggctagggccccacaaagaagaagaaatatctgatagttgacactgatgtgaggcgaagcaccaggcttcatgagaaatcaagtggcttcatgcagtctagacacttgcataatgcctcctatcttgcactgccccctatcaacccaagaatcataaaaaggcttggagcggagttctgcaaggttgaca

SEQ ID NO: 977 - DNA, 557 bp, Zea Mays
cgtcaaatcgtcgccggtgagctcaccacgactgaggacacgaaccgactgcgccatgatccttccctgtttccggccgccagctctgcccggccaaattgagcaccaccgtcgaagccctctataaattgatggccgggggagctgcgctatgtcatcttgaagccgtagcacccgctcccacccttaatcattcacccgagcccgtgaatttcgaacttcccccaaattcgatccctgccaccgtgaagatcagctcgtcgcggccagcttgattcaggttagctcgagtccctctgctgcttgttctagcatccttaggtaccccgcaaacccctcgacccctttaattaatttggaccgccagggatcaccgggaacacactcatctgtccgccacaccctcggttcacgtggacagagcttgatagctcaccaaccgtgcaattagcctagggaaaatgctcggagtaggtcggatttggtgtccgccactcgggaacgccagtcattgccccgttaggccggtctgctagctcgccgaagctccaccgcgc

SEQ ID NO: 978 - DNA, 1035 bp, Zea Mays
tggacagcgggttaaatcatgtttcctccagggtttcttttgcaaaaagcgctggccgaaagggtatcgtatgagtatggccgagcagattacaatcaacggtccagattaaaagacaaatcggtacgcacagacatccctccgatcacgatctaacggccacgagttcaatactactcgatcccatctccagtgcccatccaaaatcggacggtacacggcggcttcaccctagattgaatcctggctgttcatattggatctaacggcacccgcgctgtcttctttcttactacagctaggacggcggcgcgtgcacacccgatggtgagcccgccgaagtggccaagacaacgtttcggtacaagaatcccaaatcgactagatgcaacacaatgctggtgccacgatggattgatctggtgaacccttaccgtgtgccttatagccgagagccacggcgacgatacggggcagactcaagtagaagtgccagcaacggtgagaaatcgccgacggtcccattgatcatgcgctccaagcttccgccgcacatcctcctcacaagctccgtttcccccccccccccccgaccagtcgacgaggccagaccggcaggcccagcagggatcttccatgacaacacgcacttttctcgcctcccactccgatctggctgactccttctccctcaggcctcgacgccacgacggaagaggccctctcggctgccacggttgtgcaagatggatgaagggcatgactggattatatagagctggtgcgagcccgtacctatgctcatgggaggtcggttgatgcatatccatcggctgggttcgttacgcagaacacggaataatcccaacaactgagctatggtagttatgcctgagtacaacagctggttcgacgctgggttcgttgaagcatcgcgcagagttggttacgagctaactccgatgtctaaggcagatccacggaagcagatgctcctgacctttgagctccacagcacagtgcccccaggaaaac

SEQ ID NO: 979 - DNA, 949 bp, Zea Mays
aaaaatgatgaagatataatttatctaagttctatgaatttgtttcacaatataaatcattttctttcttcattttgttaatttatgagctgagtggattgagaatctgaagaccgtaggtaggacttattagtaaaggttttaaataaatgttcagggtctcagttgtaaataaatggacttatcagtaaaggttttagccgtaggtaagacggcgggttgatttatagaaacccgtgggtctcttttgtaaaactagtccgccgaagctgtaatggccgactttagccgttcgatcctccatctatggaccagattagatccaggcttttatgaattagtacgcgatgaccgccgtcggatcccgaattcgcggccctgatttaatatgatccctgggaatgcctacatccaatcctagccctccatctcttatctgacggctggagtgcctctttcctctgctttccgccgagccacggcggcgccatggctagagcccacccaaccctgtggcctgagcactattccttgatccagacaatgctacacgaactatggagcaaggtgattcgaataaggtgattcttactggtgataaggcgatgagggtgtttgcccatggcgttgggcagatccggggtggtggagagctccaacgacgaattccggcctatgtgggccaagttcttggctaatgatgcaactcctgaaccctccgatcgatggcgaagctctaggtccaacccacaagcctaggatgtcaacatggtcgagttgcttcggtggcagccatggcggtccctagttttatagtggctagggtggagtctttatgggagcgttcggtcgggacgaacccgaaatcaccgcgcagtcgttgcgattcttctgtgctagcaacgatggggctcatggcggaggcgaggaaatcccatccagattccac

SEQ ID NO: 980 - DNA, 875 bp, Zea Mays
gcgaggcacagaggcagggacgcgggtgtggcacggtggctaggccatcagatttcatgcggatggtttggattaggctcgggttaaaccgttggattcggggtgaccggcggggatagggtgaccggcttcggtccttctcctccgaccaccagaggcggtgccgctcgcatccgccatgaggagcttaccggagacgagcggtgcgggtgcttcgggggtcttaaggtagctgggatggcctaggaagattcaggggtgcgaggaaccaaatggtgggggctgaaccaaggtaggggcaccggagggtggaggtccatggtgaggtgactctatggcggagctacaaactccgacgagcaattacatggagcagagagcgagggagggaactagaggggcaggggaggttcctttcctcaaggtgaaccttagggacctctcggtggcggcgatgacacaacagtggtctagaatgacgaccgcggctccagaactacacgaggaacgatggttgaatgcgagcagagcaaaccagagggagaaaggggaactggggcgagtttctagtggctagcaccaaggcgaagctcaccgtggtagagagcacgacagggccttgatgtcgatgaaagaatgggcgtggaacagcggcgaacggcgatggttcctccctggcgtgcgcgcaacgcgggggatggggccttggctctgtaggcgtgcgaatgagggagggggaagagtgagtggggctctggagggttcaagtggtcgagggtggaacagttgcggccttgatgcggaacgtgggcatggggtcctcgacgtgctggtgcgaggctgacgggtggggttggggtgtcagcaggctggtg

SEQ ID NO: 981 - DNA, 699 bp, Zea Mays
cggtaatatcaacagttaatcagttgtgttgtgaaattcgagcaatggttggcaataaggctaccgacaacctaatatatgagttttcaaatggccaggtgcttcatacctccttttgagccgttacgctgcatgtcacaagaacatacctcctggtgtaactgatcgacgacacagctaggtcgatctggcatgcgaggtggccggatcttcttgaaagaacgtgcatacatacatacctcaccgattatcatcgtaccgccctccttaactctctgttaagtaagagccttgttcatgccacatggaaactgttcatcctagtcctagaggcggaagcagtggtcgatcgtcggtgcaaggctccctgccttcttcctccaatggtagatgtggatgcaagcaaaacccattccgatggccgattggatcggagggagagatcatccgcctgctccttattcagccaaaacagtttgacctcattcagaagacaaaaccaagttccaagacttgtacaaaaccttttgagccaaaatagtttgtccccctgatcctggttgagttctcattaaagaacgagaaagatgagtacagaatggattttgattgtactgaaagttgtgaaaggggagaagaacagcctaaacttaaaggtatttgtaaacctcaatacttaagttgacaatcatgcacgat

SEQ ID NO: 982 - DNA, 360 bp, Zea Mays
ccaaattacttcctgttctaatttgactttgatctcctattgctctcgataccgaccaattgaagcctgaccgaagcccttcaccagaacgtgcacctgctctgtaaagcgccgccgtgacaccctctccggagcctcgcgtttctattcacgtctagttcaaatttgtgtatgtgcatcaccactggttggcctgtgaagctttcccaagcttcaattgggtcgttcgcgccatcggttggccggaacacttccatccatatgaccatccgccctgtcaccgtggaccggtagattcgtagtcataacgatgaaattgaattgggggaagtgttcggtagaggttcaattgtgttcctg

SEQ ID NO: 983 - DNA, 650 bp, Zea Mays
tttctgaaatctgtacagaatttggacagattcagttactgaatttgtaaaaagcacaactcctaaacggtcagacctatggctgtcaaattttaacaccagcaatataataaagttatctaccacttttctatagcacatatctacagaaaacacaatttagttcatcaaacatacagcacaccgaaaacagtacgtgcagcccaaaacagcaatcaatacatttcagcttctatacaattcaagaattgccgctttctagagacttgaattattataacactttgacatttgttagagttaaaatgactaagtgagaactaacaagtggacttactaatttttatccgtgtcattatgagcactagaagtaccatatttaattaacaacacattctccccgatagtcgatctcgaagtgttgttcacacaataatttgcattttaacttagacctcacacgagcactaatacttttcatccgcgaccacaatcatacgcatttagaccacaacaagcaattcatcgtgattacgcgcttaaccaagtcatctaacaagtcggttaactagagcaacggcatagcccgctatacatcctacacgtcggcttgcctcttatcatcgcaatccgaaacaacacatatatat

SEQ ID NO: 984 - DNA, 425 bp, Zea Mays
ggatgggcgcatcgcatctgtatcttttcgtcgagcgagaagatagagaacggaacctaattagttatcatcatcatcaccacttcacatatcgtggtggtcatgggtgatcctgatgagtttgttagttggcgatgatgcacaggtcacacagctccagtagtagtgcacgagcacttgctgagtccctcctttctatctgtccccctttgcatcattgcagaggaatcagcactcgatcggagcggccaccacccgctccgctgggaatctcgaccgctagctactagctggggtggtgggcccgcgcgtacgtgggttgcggaaaaaatatcattgtggcagctagggaaaatcattctggtggtcttttttttttcttgacgaaaaatctggaggtctttgataccctcatgagattcgat

SEQ ID NO: 985 - DNA, 358 bp, Zea Mays
tctcattcagccattcctatcgtgcaagccatcacacactcaggacgttgggcccacattgcagactacggacgaccacgtgacagccacccttagttttgcacacaccggacccacgtctgctcgcgcaaaaagttgcctcaatttgacactggcaggagcatttgaccacgattgctttctctgaagaaggaagacttataagccggtagaagttatgttggctggccgatatggtcataaaaatgtgcaagccgtgacgacgacatagatcgcgtgggctgtgtttctttggtgcggcctaagtagctgccaggaggccgcacgcttcttaccctgacccagcttggctttaggg

SEQ ID NO: 986 - DNA, 459 bp, Zea Mays
tgatcaagtagtatcaatcggggcgtgtgctggtgcggggtgacgctggggcggattgccgaagtttcaccgccctggcctacgctccgccgttgtcaggttcgtgtgaggaggaagcgtgtgcgccgtcagatcttgattgatggcatggattaggaatagaataccggttcggcttcgacttgtcccggtcgttggattgttgacgtatgggcgagatcggatcatgcgcataatagatcgtagcccttgatcgcggatcccgatgaaccagatcgcataccgattcattaaagaccagatctaatctggagcgctgaattctaatcgtacggctatcacgcgcgcgtaccccttcaccatacacattttacagaaaagccctcacagaatcacgaaaccaacccgctgtccatagaggggttcgtctgagtcttaggattagttgcaccagggccc

SEQ ID NO: 987 - DNA, 684 bp, Zea Mays
tttacaacagtgtatcgttgaaataaaaaataaaaaatggaaaatgttggaatggtggttgagttagttgtaggaaaatgtatattttattggtatgatgtggtttagaaacatgatataggtgaaatctatgtagacgatgaagatatagggggagatagtatgttggcgtgctagtgggatataggagttaaaatttagagggaaccgctgaagctaatcgagaagaaagcgacaagtcgtattagaatttgggtatgatataaaaagggcaaggattgggttggcatctcctagtgatacgccgttgggtacagtatcaaataggcaaggattaggttaccttctagcgatgcacggtgttgtgatctaggcatggtgccaaataaggattggattgatgctgttctttaatggtgtgctattatttagatgtggtgaaaaatattattaggattttttagaaaatgtcaacatattataagaaaatttaatggtcaaaatagatttggcatgggcgcatggctcttacctaatcaaaacaaatttatcattttaggacaaagttagtatatgacatgaagccaaaaactcgcttaaatcttcgtccatgagttgatcgatacaaattagtgttggtccttggcacttacttattgcctgtagttgtatcaattatttgtt

SEQ ID NO: 988 - DNA, 429 bp, Zea Mays
tcttttctctgaacacaatgaatccttgaccaaaggaagaaacaaatagagcctaaatcaagatgccaacgcagatgctctccaacgcctcctcatcgaagctgttgtggctctccttcagcgacgacgactttgaccgtagcgcagccacacttacaactccccgcagatctaccgaaccctacaaaaatcaagaacccttatatcgcaaccacacttacaactccccgcagatctatcgaaccctacaaaaatcaagaaccctacacgagagaggagatgcgaaggatgggggacacgacaaacttacgggcaagaaagttttggctactggagaggacagatgccgccagggagattgcagcgccgccgcttacgtcgcctggcgctcgtgtctcgccgttgcttacgtcgcttggtgctcatgtg

SEQ ID NO: 989 - DNA, 539 bp, Zea Mays
cacggagttagcccgctacgcgccagatgacgtcagtaccgagggcaagaagatggcccgtttcctgaagggactcaggtcggaactcaagacaattctggctaaccaagacttcctcagtttctctcacctctccaacaaggccatgcaagttgaaagggcaaaggaggaagaaaaggggcatcttaaaaggaaattccaagtcctccgggctcagcagcaagatcggcaccagaagactcgatcctttggatttccacccaagggaccaagcttcagtagaccagctggacccaccccgtcatggttcagtcagcagagtcagagctctttccatgccccctcagttgcaagcaaccaacccccggcgaatgcatgttggcactgcagagatcctagtcatttcaagaataactgtccccagctgaagccgccaggacccgcctactccaactcggtgaatggccccaagaatgcctcggcatccgcccccaaggcgccctcctccatcagccagcagaacaagacccagtatcaag

SEQ ID NO: 990 - DNA, 488 bp, Zea Mays
acatctagcaatatcccacctttaggtagaagtagcactaggacaagcaataccaccccaccattagctgcaggctctcgtaggcagagtaggatggatatgtactatcggagtccaagtgtgactcaggatatatgtgatatagatttgcaatgcagtaagatgtcaacacagcctaggatagacattatgttgcatgggagtgctaaagagagacttggtaaaacttgggcgaaatggttccatggcaatgatattcctggaaggaaagcagactgcccatattttgtagcagtagtaaactatctcagcaacttggggaaggagtggttgttccaaggagaagagatatagatgggccaatactaaatatgaactatgaggacctacagactcgcatggaccaatacaaggaagattggggtcgctttggggtcactattatgtgtgattcatggacagagccaaccatgatgtgcattattaat

SEQ ID NO: 991 - DNA, 626 bp, Zea Mays
cgagattagccgaaaagatctcatcagcaaggacgacggagcaacccgggcagactgaacaactacttatggagcccttagcagaactaaccacaattgggtgacccatcctttgcaccgaaagaccagcccatgacacacaattctccgaaacaaacgaaaaactagcgccagagtcaaaaagaacatgtgcatcaaatgaatcaattgagaccatacatgtcaccacatcccatgatctctgccatccgcagagggtagcacatatgctccaggaacaccggcagaagaggaagcacccagagtgaaattaacagaagaagatcccaaggagtcgcaggctgaggcagacgagaaactccaaactgaggtggtaaaggatcggtcggtccaggagtaggcgctgccaagtactgaggaaaacctgacataggcaagtactgaggagtcccgggcatataaactgttgctgaggggcggtacaaacaattttgctcagtggttgccatcatgttgacagtgccctgcgaagaggaagaagtcactggctcccatttaagtttaccatttggattcctcctacacaccacatccttgtgatcctagttgcatatagagcacctgcc

SEQ ID NO: 992 - DNA, 323 bp, Zea Mays
gcgtggatagacgtgtgcgtgccatagacgacttcgcacccggtaggtgttgttacgcatgtattgtgctgatccggcggcacccttgtgcggcttttgctccgacaatgtgcgtcttgtagacgacttcacaccatttgggtggtgttacacacttgttgtgcctatccggctgcacccttaggcgacttttgcttggataaaaatgtgtcttgtagaagacttagcaccgtattggtggtgttacgcacttgttgtgcctatctggctgcacgcttagacgacttttgcctggatttgtcgcacgcgatggctgtcgaggc

SEQ ID NO: 993 - DNA, 565 bp, Zea Mays
cgggtattaccgccgcttcatcaaaggattctccagcatggcgaaacctatgaccgaactcctcaaaaaggacaataagtttgtgtggaccccaaagtgtgaggaaagtttccagatcatcaaggagaagcttacaaccgcgcccgttttgacactaccagatatacaccaagatttcgtcatcttctgtgatgcttcaaggcaaggcttagggtgtgtcttgatgcaaaatgagaaagttattgcctatgcatcccgcttactcaagccacacgagcagaactaccccatccacgacttggaattggcagccatagtacacgctctgaaaatatggaggcactatctgattgggaacaaataccacatcttcaccgaccacaagagtctgaagtacatcttcactcagccggacctcaacctccgtcaaagaaggtggcttgaattgatcaaggattatgacctcgaaatccactaccaccccgggaaggccaacgtggtagcagacgccctcagccgaaaacctttcgggattaaagggaccaactttttagaagattggaag

SEQ ID NO: 994 - DNA, 635 bp, Zea Mays
ttttgcaatagaaggttgatccagttggaccagctgtgattgttcctaaagtaggaatgtattttgactctgagaaagaagcttatgagatgtacaatgcttatgcatgtatggttgggtttagtattagaaagagtgatacaagacgtcgaccagataaaactatatttcagaaacatatagtttgcagcaaccaaggtaatagaaaaaatgagccatcacaatcaactacaaggacaggttgcaaagctcgtgtccagtttagcattagcagggaaggggtttggacagtgcaaaaagttgaacttgaacacaatcataccctcgctagtccgaacaaggcacacaagttaaggtcccaacgacatgttattgaagcggacagacaactcattagccaaatacgggaagctggaatgagaccaacgcaagtgtatgaatttatgaagcaattttatggaggtgctgataaagttccattctcgaggatggattgtaataatgagatcggtcgcgaacgaaagaaatatttagaatccaatgatgcacaaacactattggaatacttgaagaataagcaaatagaggatcatgcatttttttatgccattgaaatagatttggaagaaggtgag

SEQ ID NO: 995 - DNA, 545 bp, Zea Mays
ccgtaccctaataccagtgtaaccacagtttagtgagggggaaagccatgggggaaccgaattggctatcgccggccaccctccgccgcgctcaggggtagtagcgccgccgcgctaaagactcaggtgaagacgatggatccggaccgtccgatccgtctcgggcggccgggatttgggtcggggatgcctttcggccagggtgaatctggggcgttggatcacaaacgagtggttccgatcgcattgcgcctaatgcctggtcaggtgtagggactacttaatcttagcggccgaatcttgatccgacggccagttatgcataccgctccagggaaggcctaaatctaatctggcgcgcaggatacgtatcgggcggctgtaaacactacgtaccccttcaccatggcagaataacataagagcccctggaacctttataaatcaacccgccacccttgcgtcagtggcctgagtcatgggaaaactttggtttagccccctgcacttctctatatttgaggtccagtccagagaacaggaaa

SEQ ID NO: 996 - DNA, 349 bp, Zea Mays
atttggtagatattagagaagacattttatacccctaaattcaaggtgttacagtggcggctcggtttcttggtggcggtggtacacgacggtagatgcctaggtgggtaccacggcactaggctttatgggggtagggtgagtccgggtacgaggatttagggtcggtcgacgaacctcctcaacatccatggtgagtttgttgcgcgcatgtatagtctgttccgtggaaagggatgagtccgactgacgggccccacatggcggtcagtggctttgcgtgctaagagaatagaggggaccgactgacactggggacccgtgtgtcaattcacttgctgggctacgc

SEQ ID NO: 997 - DNA, 621 bp, Zea Mays
gtgagtggtctagtgtgggtgcatcgactgacttctgcgaagacctggttgtgacatgcatgaagctaggggaggtcgtggtcgagcaagtccttaaggaggcattatcatgaatgttgaaggtcactcagggtgagtggcttagaggtgtgcctattccatggaccgttggcgaagactttcttacgtctaggctagtacaatcatttaaagtgttcctttatgggcgtaacattgatggtgttgtgtcagcttcgatggaaagttcccagaaggagtcaaagaagatggggcctgcatggttggggaccctcaaagagttgtgcgagacttgctagggtctagaatatcccccgcgaaggctatgatgcctttgagtgttgcggctatgacctcgttcacgaagggtgtctcgacagggccactgacaggcagcaccgcgggtgccttcgttcgtagtggatgttgaaatacccgttgacgattacctcattgacaccatcatcagtgtggcgaagaaagggactacgacaaccggtagacctggcgagcttgtccttacgtgcttttgtttatgtcacggccgtgcctagggggtcgatgagggcgcccgatctaggc

SEQ ID NO: 998 - DNA, 979 bp, Zea Mays
aatcaattttggagaacacctgggcacccctcaactattcaaagagaacctcaatacgggggagtggatatttattcttgatagtcacttgattcaaagcgcgataatccacacatagccgcttgcttttatccttcttctcaacaaacaatactggggaagcccatggagacctgctaggcctaatgaaacccttagccagcaaatcatccaattgccacttcaattcaacctgctcctttggggccattcgatacagagccttatgaatgggctgcgtacccggaatcagcttaatctcaaaagctgcatcgcactccggaggaatgcctcgaagctctgccggaaacacgtcagcaaagtcacacaccacccggatgtcctgcacccgcaaggcagcctcaccctccaccaccatggagaaaaagattcccgacttgctggaccggtgattcggaagcaattgcgccaacaaggataacgtgaacttaggggaacttcccaagaataccacctccctacctgacggcgcctgcaataacagtcttccaaaaacaggacataactgcgcaatactgggataaccaatccatacccaagataacatcgaatgcccccaaggaaatcacaaccagattggccgaaaagacctcatcagcaagaatgatggaacactcctgacaaactgaacaactactaatggagccattagcagaactaaccaaaattaggtgacccaacctctgcaccgaaagaccagcccgcgacacaaaatcctccgaaacaaacgaatagctagcgccagagtcaaaaagagcatgggccacaaacgaatcaactaaaattgtacctgtcaccacgtctcctttctctctgccatccgcagcgggtagcacataagccccggaaatacccgcagaagaggaagctcccggagtgaaattaatagaagaaccccactgagtcgtcgggtgaggca

SEQ ID NO: 999 - DNA, 353 bp, Zea Mays
ggagattgtgcatggactatcgacgtttgaatgcatatactgtgaagaatcactttcccatgcctatcttcgatgaaatcaccgatgaactaaatgatacccatgtgttttctaagctggaccatagaccgggggtatcaccagattcggatgaaagagggtgatgattatgaaacaacatttctgacgcaccacagacattacgaatataaggtcatgtccttcggcctgacgggagcacctgccacatttcaggaattcatgaacaaaatcttagctccgttgttgcgaaaatgtgtcgtggtttttctggatgatgtcttggtttacagtaggaacctgaccgagcatgt

SEQ ID NO: 1000 - DNA, 417 bp, Zea Mays
cttccatgctgctaggtgaaggcaaggtgtttgtcttgtgaggagggtcttccatgctgctgcttgcaccttgtgagaacataagcgaagactggtgtgtccctgtggttgatgttgaaatgtcaatattttgattgcctagttcctttacagtagcattgacctggaagcagacgtttccagagttaattgtgtgcccagagaagctaacgttccaaatgaacgccctttcaagcagctttgtgattgcatctagaatgaagcctgatggagtgttcgctatgagcatatcacaaggccttttgacaattctttgttccatgcgcccaaagagaatgaagtctgtatcagctgtctcgtctcctgcagtgacaagtattttataccttaaataagaggtgtcaatgacttagtgtg

SEQ ID NO: 1001 - DNA, 878 bp, Zea Mays
tttgagttttattctaagtctgaaaatcagtgaatgggctcaactttggggttttgtaacttacaaagtatagggtttttgccctaggtcaccacatcaaaattgtagcccaactatagaagaacaactttgctcaagagtgtaagcacagttgttaagaaaatattggagataatcaggtctgaagttaagctgacaggctgttatggtctgaattttcagactgacagtgacattggatcatctttggaaacagtttatgactaatctagcaagattttgcccatggctgctgtaacaaagatgaagatggtataatggacaacaactttgctgcagagcttggtatgggttatcatcaaaaatcaagagaaattgtgacctgaacttgctctgtcagtcaagttctttttgaattcagagcactgtttgccatcatctgaaaatatcgcgcgaggataagatcttggacctcgccggcgataaggacgccacggcggtcgggatgggctggcggccgcggtaaatacccctggcaacgtggcagcgaatcaccgaggtgtcatgctccggtaaaacggcgaccaccgcgctgtcaccggaatccgccgcacggcatgctcgccagcgcaaccggggaaatccacgatcctcatccatcgccggtcagccgtctataaatagagcgcgggcacggcttcgtcaccacattccgcacgccagcagctaagcacttgactcgagctcgccaaaaatacccgcgcagccccaattccctctcttcttcgttcttgctccgccgtgaagagcttcttcgtagccagcgctcctctgttcagtaatgatcaaattgctctttgttttagttagtatgtgat

SEQ ID NO: 1002 - DNA, 864 bp, Zea Mays
ggtttgagtctcagaaaatcccccattctgtcttgcggtctcccaccatttggccgttgattttccagacttcgagtgaggacctcgatgagtcgggtttgattggctagaccttgggctaggtctaagggtagtggtggaggtgcggggaggtgggtttcactttcctctctaacggcttccccttcagctctcaggggaaaccctgctccaatcccggaggcggtaggcgtggttttatccgaagccatctgccagggaagagagtcactattatgcacatgcaaattgttttcaaccaagttattttattcattacaccagcacattacaagcataagactactacatgtggagctacacgagagcgttcccgaggtgctaccgaactctttctctaaggtatccccaaattccttgagaagatcatcaaggcttgctagggatatatcctcgacgtcggaccaatcatctattctggggggaggtggggctggagtggtcttcttcttcttcttctctgtttggcatccttggttggtggtcttcttctggattttcttcttgggagcgagcttccttagcttcttgtcatagtccatctttaaggttcgataggcctcacgggtgttgccttcctcaccttctgctatgtcgagactctcctggagagatgccttctcttgcttaagcgctttgacctactgctctaggctttccactcgggagtttaggtgggtgcagtgggaggagaactcatcatagtggttgtctagggtgtggaggtatccggccatgtagacaatggtggggtcatcttctgtggggtttcctcctgacagagcctggagtcttttcctccag

SEQ ID NO: 1003 - DNA, 370 bp, Zea Mays
acccccctctaggcgactttcagatagcaaggaggcagatccactcgagactatcaaggttgtgtcagaatttccggacgtgttcccgaaagatttaccaggtatgccacctaagcggaaagttgagtttgccatagagcttattcttggcaccacccccatttctaaaagagcctacagggtatctggaccagagttggttgagctcaagaagcaaatagatgagctatcagagaaaggttacatcagaccaagtacctcaccttgggccgcccctgtcctattcgtggagaagaaggatagcactaggaggatgtgcatcgattaccgagctctgaatgaagtcacaatcaagaacaagtaccccttg

SEQ ID NO: 1004 - DNA, 609 bp, Zea Mays
tgcaattccagaatttgtttccgaggtcaccgctgtgaaaggtaggacggcgggtttattccccaaaactccaggggctcttttgcacttttgctcggcgaaggggtacggataaatctcggccatccgatttaatactgacggcacagattagaagcgtgcgaatgcgaatcgggatgcgatcacgtccatccgatgcgagatcaaccgtctagatttaattaaggtgagacccagtcgtggcccccggatcccgatctaacgccctaggcgagataccccgaaacagtatacctcgatctaatcacacacgttcgtggtcagatcgacgacctggatctaaaacacccctgactcgatctcgttcgtctgtatttgatcagtgacctagatccaacgatccaggggctgtcttcatcccccagaggaccccaatgaaaccgaggtcacacggcggcggacagaatccatggccgcggagctcgccggtgatccctgccccgacgatttcccccaaaatttcgcgggctaaacgacgcaaagatcgccgcgcatcaggtggaggtacctcaccggttcatgcagggccgatcgatccggtcagcaatg

SEQ ID NO: 1005 - DNA, 496 bp, Zea Mays
atgtcaggctcatctcccacgcgagctccacaacagaacgccacggattcgtcgctcgcatgtgcgcggatcccgccgctgctccttcttccctctcccgtatcacgcgcgcgccgctcccagcgtctggccagtggagccgcgcgtggcagtccggccagcctagcagtgcgcccagaacccctccgtggatctcggtaacaaaccgagccgccattgccgctcgcccggttgactcggcagtcattcctcgcaatgggataagtatgcacccccctggctactattccgcttctcccctcgcctctaccagtcgaattgtcgtgagccaccattgacgaatcaagaggaagagtgagaaatcgccgctgccactgatttctgtgttcgtcgccgttcgggcatgggagaatgtaaccgggtgtttgccatgatgcatcagatgtgcctgtggcatcaatttgcatggagtcgtcgcggtccgtagggaaatcgt

SEQ ID NO: 1006 - DNA, 390 bp, Zea Mays
gcagaaagctccaaacggggtgatgaatgctgttttttccttgtcttcttttgccaagctgatccgatgatacccagagtagcaatctaagaaggacaacacagaacatccggcggtcgagtctaccatctggtctatcctaggaagtccgaagggatcctttggaaagtgtttgttgagatccgtatagtcgacgcacatgcaccaatccactttattctttttgagtacaagaacaggatttgctaaccacttgagatgtagtacttctctaatgaatcctactctgcacggatggcttctctctttcgggcgtgaaacgacataatttttgtcggatcggcctcgcctggggatagacattcagtttgtgctcggccagctctctgg

SEQ ID NO: 1007 - DNA, 540 bp, Zea Mays
ctccagtctccggatccggtggttctagctcctcggttatgtaaggttcgtttatctcacctaatcccatctagatctggtgtctagctggtggttggtgctctgtgcttgtttgtggtgtctggatgtcgttgccggtgtgctgtcgcctgtctgcttgctcttcgccattcgctgcctcggctcctcgctggtggacacttgacatgaggagtggtgggtgtgaccgtgtgactcactaatggtgatggctcaccgtcgtcgaccttctcggtgctagctggtcgccattgtgggtcgtctgtttggacatctatactcataactcatcgtcctcctcacttgccctcatgttcccgtctcccattcccagtcccagactcctctcatcatgttctagtgttttctaacactcagctaaaaatcatcagcatctcttagcctctttgactctttgtcgtcgtctctagtgctccacctttcaaaggttcgtgtaatcgtctctactcacctcttcgttctacattcttgaatttagtt

SEQ ID NO: 1008 - DNA, 775 bp, Zea Mays
caccgtcatcatcacttgcaggctcccacgcctgcggattcgtagcaggtcgagaccgaccggagggagtccgggaagtccgaccgcgagcactttgagacccggaggcctcagtacccggcatgacatttccacatccgcgccctcgcttggatcgagagcgaggaggggtatcaccatggatctcctgttcatccgaagagtcggattctaccactgacgggttccttcgacgcaccattctaagaaataagaaataagagatagaacttatgatgagcaaggatcaaccacgtttgagaagaaacgcataagagattgaatcatgcacttcaaccgttcatatgagcggttcaactacaacgaacaatatcaaatcgctaatctcaaacagtgtttgtgacacaatgaagatagtctaagtgatgcaatctcttaaactaaaatgtacccaacgaatgatacataagataatcaagaacgcgaaggatcgagtacaaggaaataacatagaacaatacctcgatccgaagatgggggggtcaagatctcccaacgagaaggaggaagatgatggaaacacgccgggaagaacggatctccaaccacacttccaaacgggtgagagctcgagagagtttggagaggagagaggaaaaacagaagtggcggcggcggctggaaacaaggctgagaagggaagaggagagagggagaggtataaaaaggagaggagtcggccgccagaaaaccgaaaaccggttcaaccggtttc

SEQ ID NO: 1009 - DNA, 696 bp, Zea Mays
cgatctcctatttcagtcctttgttcaataaatccccccctagatccacgtccacccccgtggatcaatgcatcagatgtctcctcgcagacctgagttctgtttcacccccaaggacaagccacgccatatggaagactcatgcttgcagtttggtcacgctcacgccatggaagactcaatgcgtgctgattggatcgtttgctagcaataccatgggcagtttccggcccacggaccactaggcgttccgcgagtcccctctcccctgggttgtctccagttctcctctcctcccacagacttgccacttgcacaattgcatcgcctaccgctatttgcaggaaccaggaagaagggaaccacgaggtgcatcatccccacatcacttgtgtaataagaccatgtcattacccccattttgttcgcttgttttttccaaaaaaaaaaaacatcttgcagagagtgttgggagccctttggtttggtgcgtacacacatggcgaggcattactacttatagtatcccggaccacgcacatttcctcatttgctaggtcttgtcagttctcagatgaaaccctgtgcaagctgatgatacctcctcggatctgaagaactgcctgcgtcggctgtattggcttcggcaggaagaggtgaattcagcaaggccccccgagcccttctgcatgtaag

SEQ ID NO: 1010 - DNA, 321 bp, Zea Mays
tctattcaggatttttttttggaaatgtagttctgaggcaatcccttggtgttggttgatttgtaaacctacaagttagacttaacacgcatctcacagctctaggcgttccttattgcattgggcatgaactgattgctggtatgagttgatctttggagtgttttcatgaaggtttaagcacagtactgcttcgtggtggaacgacgcctctgtccggctgtatgcagtactgcttcgggttcgtcgtctgaaaactgaaggcgaaacagtcattcgtagcattggtcagatgtactgagcaggatatctgcttggtag

SEQ ID NO: 1011 - DNA, 678 bp, Zea Mays
tttctcagcgtactctctgactggcgggtcccagagaccggagatcatttccccgacggtagcccctgagaggggtcgttctcgagaaatcgagatggcatccccttggaatctggtgtcatctttgtggcgatcaatcatctctctgggcaaagtcggacgcatctttgcctctttttataaacctcgggcggtcgttcacatgctggtcattcttgacatgtccctcaagctcgcctttgatcaggttggcggtcgaaccttgagctatcgggatgtcgcgctccgttggtcatgagtcgaggtaagcttcttccctcgggcttgccaacttccttttttggtctaactttgctacatcctttcttcccgttgtagtgcggtcaccgccgacctaagggttgtgccacgaccgagctcctcgtctcttacctttccccttcaggtgttcgtagggaactacgacccctctcgcgcggcgtgggaggctgctgaggccgaggttgagccgctgcgggagaagcttgccgaggctgacgatcgagtcgttggtaagtcacttgatttttgtcctctctatggttttctcgtccttttttcataccctgctcgtctctcgtggcagctttggtagctaaactcgagatgttgcaccagcgctcgggctagctccttgac

SEQ ID NO: 1012 - DNA, 410 bp, Zea Mays
cgtggaagcttggttttgtgcagggcaggcacgtacccaccattaatgcacaccgaggcagaggatgtcttctgctagtgctaggtttgtcaacggatagtcccctcgtcgccttacggctcacagcatgtaccgcctctgctttcctctcatacacacactgcacgccgtacttgcttgctccgatagatgcatggactaagataagacgtttacatagttttctttcactcacgttaaactcaaatcaaacaactatataataccgactgcatttgtgtgtcgtggaaaacaaacaatggcggtgtacagcaggagcgggtctcctctacttacgtgccaaacagtccacgctctgcatcgaatccgcaaacgctcacccgagacgtccctatacgacatgaagtcaa

SEQ ID NO: 1013 - DNA, 515 bp, Zea Mays
gacataaacatcacaagggccagaggcgataacagacaagggtatgagagaaaagatgaaggcattgaagagccagtggtatgagtacaacaaagaatggagtcacatcaaagcttacacgcggtaaagaagaggatgttgtcaagggtgagataagtaaaacactgctcctgaactaggatggaaaggagaaggctccaaaggctaggttcaaagtaagcgccgtggtaaaaatataggtattacaagggttgaaggcgataacagaaaagggtgtaagagaagaggtaaaggtatagaagaaccaagggtatgagtacaacaaagaatggcgttaaggcaaaatttgcacgtgtcagagatgaggttattaccaagcgtagggtaagtaaaacaccactctcgaattgagaggggagaagggaggttttaagtggcacacatacgacaacatcaaagtaggatcacaagggtaaaggcgatagcaaacaaaacacattaaacgatggggttga

SEQ ID NO: 1014 - DNA, 594 bp, Zea Mays
atgacagcgtatttgcccatcgtcctagggcaagacacactacagtggctacgacatctgccacgacactgcattgacgattggagcaactttagtcgacggttcatcgccaacttctagtctctctctgacaagtcggcgcagccatgggacctcaaatcaatcaggcgccagggaaatgaaacactccggtcatacctcaagaggttttataccatgagggactgcattgctgaagtcaccgaggcagcggtgatcgaagatttctaccggggatccaatgactcggccttcgttcgagccatactacagaaagtgtccgccacctccaaacaactgttttgagaggcagacctctacatcaccgcagatgggcgggccctgggcctcatcagaggtacgaaacctgcaccacccgcgccgcgacatgacacgaaccagcaacctgacaggcgctgggagaagaggcctcatgaggacgtgcacgccaccggaccacctgtcgctcgagcctgtggtgcgccccacggaggtgtacggacgctggacgaaatcctcgacgcccagtgcccgtaccacaaggacatgcgccac

SEQ ID NO: 1015 - DNA, 664 bp, Zea Mays
tgtatctgaaggtatatttcaaacgaattaatccaccttaactggacccgacagcagtctccttcggcatctcccagttatccacaagtggccataccctgtaggctatgtgctcttggatcaggtctcttgtaccaatgaaagcacagacattgctgaaagccttttgacatgcttcggcatcattttcaatcgccacgatcggccttcgaaggccgaagcgagaccagatggggcgttggataatcccctttatgtcttcccttttaaccagatcatttttgacataaaaccattcctccatccaggccctgggccacctttttcgaaatgttggaaccagatagcttgcattagaacgagcaatgaatccataacaaccaaagttgttgtgatgctgctctttgccagtggcttcgtctcgtacaacagttcgtgcatattgcaaaaacactttgcgctcggttccagcccttggcttctcacagcccaaacaaacaaacccattttgattgtagcttcgggagtaatttgatgaagaaagatctgaaatatcttcaacacttcaaccaaaaatttgctcaatgggaaccgaaggcccgccttcataaagcttctgtagacaataacctcattttcttcaggagcaggggcagtgctgtcc

SEQ ID NO: 1016 - DNA, 606 bp, Zea Mays
cgcggtatggtgtggataacgccgggaaggaataacctgcacgtggcgccatctcccaagcccagccggggacttcaccggcggccaccgtggctcggtaacttttgccgcggtgtcgctcatgccgcgatctgcctcactgtgcctcctaccgacgtggtatgcatgtgcttgtgatgctatccgtggccgaagaccatctgtcgggtcgccgtggctataaatagcacggtggtccacggcgacgtgagatcatcccacaccgtgagttgcattggagccaaattcgcgccacctctgtccccttctctcaaattaagtgtgcgcagtagaactagagttctttgtgaagccatagcacccgctcccacccttaatcatccacccgagctcttgaatttcaaatttcccccaaatttgtctctgccaccgcgaagaacagctccaccgtggccaatccgttctggtaaggcaccgtccaaatcaagcgttgttttcatgtctcctcatgtttgtgaagctcactgtggcgctcatttacctagttcgaccatgatttggcgggaacatgtgttcgtaagctcggtttctgccacaatcgtggtc

SEQ ID NO: 1017 - DNA, 400 bp, Zea Mays
ctaatcttaaggatgttcgtgctgctttggtatgtgatggaatctttttccatatcagatgtgcttgtcatgtgctgaatttggtagctagagatggtatgaacgtgattgctagcaccattgaaaaagttaaatctcttgtgttgactgtaaaagggtctccactgcagtgggaagagcttatgaattcagctactgagtgtggtttggaaacaacaagaggtatccatcaagatgtttcaactcgatggaactcaacttatatgatgctaagtgatgtactgtactacagtgatgcatttgtgaggctcaagtctaaagatcgccgaaggtatgaaaagatttttccttctgatgatgaatggaccatggctgcaacaattagtcagtgcttagagat

SEQ ID NO: 1018 - DNA, 504 bp, Zea Mays
gactgcgggttctaatctctaattccagaggggcactttacgcaaaagtgcatcgcgaaggagtacggtgcgctcacagtcgtccgctcttaaacggagtgcccagattaaatcaagtcatacgcgaaacggtacgctacgacaagcgttggatgcttgatctatggctgagattgtatgcgcaaaaggggtgtgaatgcaagcgatctgggatcgcccataggagaatcaacggcgagaaatctcacaattcccagatctaatcgtggccgtcaactagaaatcccacggtcgccagccttcttctccaacatgcgccgacacacagcatgttgtggcgcgcccggagctacaccggcgatgagatatgtcgtcggtcgtgcacatctgccctagtatgcctcctgccagaaaccccgcacgcccacactgcccaacgctataccctgactggcctttaggtcctacttccatttcacatgcaggcaaccggggttgaccgat

SEQ ID NO: 1019 - DNA, 577 bp, Zea Mays
tcatcggcgtgggcgccctcggtaccgaatctgttcccgccgcgcgcgtcaactctggacagtcgctcgagtgctggcacgacctccgcgacagcgagcacgcccatgagacgctccgtgcttcatgtcggatcaggggttgaggggctcaccttgacctgggctggatctgttaccgtcgtgtgcgtcgcctactcgcctccagacaaccgctcgagtgctggctcaacctccacgacagcaagcacgctatgagacgatcggtgctttcggctctcggttccactgcgagggagaagggaggagtgaaaacatcgagtgtccgacgcctcatggcgtgctcgcgggagcgcgtggagtggcggcgtgatggagtagatcgcgaagctttcttttgcagagcgcggcgacgtgatggagcagagcgtgaggcgcacggatgggaggttgttcgcggcttcaagatgaggatttcgggcgccatgggcatgcgcggctagcggcggatggggtcggtttgttcatggacggatgaggctgctggcggcggatggggtgggggtttgttcacggatcc

SEQ ID NO: 1020 - DNA, 843 bp, Zea Mays
cgtatggagttcctcagaggtggtgcccgctggagcgtggcttgaatgtgcgccagtgcatcagtatgatgtagccctcaagcccccagtaatccgtgaggattgcataggggtttacttagttcctagcaaagccatgggtcaaccctttgttgacctatcctgtctcagtcccccaagtcggttgttgacgcctattggttctttgttatgcatgcatctccattcggaagggcctttgggcccctttgggagagggtcgtcttttccgacctagtcggcgtgagggaaggggtcattgagcagcaaggggttatccaagtgagatttgtccagtccttcatagggtgtggtctcggcgagtactccactagggggactcgacccgttgggggcatctcatttagtccttccttattctatcccgtattggccctctggtcagtctgatcaatcgaatggggccccgtagccacccgtcaaccgggtttccatacgagaatgtgaggtacgaccttggacgtgggacctagcaaatgacctatgggccagtcatctggcttgcaactcgctgggagcttgctcggcccacctatcactctacgtggggaggttatagtggatttcagtatttacctagtgcgaggcggttgtgatggtagtgcggtaaaaacagaatcatcattcagcgtgggcggctttgatgggacgtgaaatagcatacttactttatcgtgtgcgggtggcgtgacagtgtggtcaaccgctctgatcaccggtgacaccttttctcccctcgcgctccccttgcgcgtcgtctgaagcggcgcgagcctagcaaac

SEQ ID NO: 1021 - DNA, 391 bp, Zea Mays
gaagagggaaattgctaagtatatatcggaatgcgacacttgccaaagagtcaaggccagtcatttgaaggtggcaggcaccttgcagccccttcccataccatcttggaaatgggaggatatttgcatggatttcattataggattgctcaatacctcccgacaccacgattctatttgggtcattgtggataggttgactaagacagctcatttcttgccagtacataccacccacagggcagagaagtatgcagaaatttatattgaccagatagttcgtctacatggaataccaaggactattgtgtctgaccgaggagcaccatttgtagcatgtttctgggagcaattgcaagaatcacttgggacccatgtaataaggagctta

SEQ ID NO: 1022 - DNA, 469 bp, Zea Mays
gcactagggggcttcaccttctccgaccctgccaggggcagcgccatacgcggactcagcggcgaggcagaccggggctcctagggcaatagggtttggtatgggtagccagagaggttggggaggattcggcgaatcctttggcagggtcgaagttgcaggaatggggctgaggcgaccagacgacggaggggaagtcctcggtggatcgggggttactccggcgagcaattgcgcgcaacaaagggcaagccaggggaaattagaggcggggttagatcagttaccttgagagaatgctcagggactcacgaacggcgtccagggcacggcatgggcacgggtcgacggcggcggagctgcggcagggcagagaggacaggtaagcatggaccgagagaaacagagggggagggaacgaaccgaggggtgtcccgggtcgcgggtgatgaggcaaagctcaccgagg

SEQ ID NO: 1023 - DNA, 1724 bp, Zea Mays
caagatatgtatgtagattcgtattggaaagcatttgcaaaatctcataaattcggaagatttaagaacaaatgctagaagatattactggtccaaggtatgcatcgaagatactgcaaagttatatttgtcagatatttttttactggagatagtaattgacagtggcctgtttatgtaacctaaatatccagaaactgtaaaattcattaataaaacaggaatagataactactaaattagtaatgtcccttaagaattctgaaatctggacataagatgctacaatttgaatttgagtattaccatactaattactaaagatttaataccacacggtggaagacgaagtccatctttggggaatttgactatagtaatatccaaagtttgcattgtataccctgtaggttctaaggtgtcaaaggaaaatgaataaatggatgatgctcaatgaacaaggttttaacttcaacccattttacttcaattattctattgtgctgtactatacagtattactctcttatttcttttctgttcttttgtgagattactagacactgtttccaaaggcataagcatggtacagttgtagcctatacatgattctgcagctactattactataaatgttgcttgtgccctagagccaaatacatgcttaagctttacgaaatattcagttagtggaaattaagggcatgaatgctggttcttttttttctcaaatacgcaggtgagctgtgcagtgtgcactaatatattaaaaagagagaaaaaaaaccaaagggaaaaagatccccggtacagcagagctcacacaccccacctaggattacataaaataaaacaacgacctagagctctgttacacaaacagttctccaacctggtgggaggacagagcttttgctcctgccaaggaccaatacaaagcctcctcccttgccacccgtagggcgacagctaaactaggactgcacccataaaaaacacacttattcctatgcttctatacaacccaggcacctaagatcaccaatgagttaaaacatttttccatctgatcaggcattctagagctgctgctcctccaccaagattcaaaagagagatcatccttcagcggacagaactcctgcaaaccaccatctttgagaaactcaaaccagaattgcttggtgaaaacacaagcaaccaatagatgattaatattttcaggtttctgatcacacagcgggcagcgttccggatgtgatagcccacgctttgcaagcctatcagctgtccaacatctgtcatgctccacaagccaaataaaaaacttgcattttcctggtgcccaggttttccagaccctttttgttggctcaaagcctactgatccttggaagagggctttataagccgagctagccgtatattcacccgaagtgctgaatttcgaaatatgctgatcctgaataccatgctgcaaaaactgctcctcaagaacctaataaaaatcaaggatttcagcaattaaatgccttggactaggaagccatcaattatctaccatcttcctttcaatccttccctacttttgcttcctatctttaacttccaaccaagtccataatgtaactgatccagcaaacatacaattttattttcttgggactgcttgtgctctttctgccttttcttactagaaaactagataagcataaaattatatc

SEQ ID NO: 1024 - DNA, 811 bp, Zea Mays
gtcttaacttcatcattagaataaccactgttcaaacatctggggtgtagcagagttcgcagcggcaatgtactcgtgatttaactattgatagatgattgcaatgtaactttgaaataaatgctactccgatgtcaaacagaactagcaatctgtttagtgagtgaagaaaccaagactagaaaccatggatgaaaaaagcacaaaaaagtgcttgcttatgcagctaagccactcaggagaggcacagtgatgcaaggacacctaaaatgtgtactaggcacagatgcacagtaactttggcaaggtgcccatctttcatgcttaggcacatgggaacaagcactcactttgtgctgctcttcttttgatctgctgtgtgcttgtgttatgtcatatgtgcagtgatggagtgataggaaatgtgtggctgcacaaactgtggttaagatgaggatgtttaagtgaagctttccttcaatttttgctcacttttgtcattgcaaggcggcgttcatttatgagcagagagcaggtgctgtttcatggtcggactctcttacatctagcatgtgtttctcccttcttattttcccatgcagcgcaacacatatcaagcaaagcaatgcaaattaactacaaagctgcagaaattataaaaaaaaaacagagggttgaggtgaccgccatggcaggggttgtcatgttacaatattcctggtaccaaggggttgaggaacggatacagggatgcacggatcgacacttcacaagtttcgggaacgatggggcgggacgatggtttgaaaca

SEQ ID NO: 1025 - DNA, 523 bp, Zea Mays
tgaggatcgccaccgggcgccaccgcgccatccaagcagcttgtgagagagagttgagccgccgcgtctacttctcgcacccatcaccgaccagcgcttgtgaggagccacagaactacgcctagacgcaaggggaatccgtctgtatctgttactcgtgcggttgtggccctaggttcgcggaattcctcgccggaaacatcaagcccccgcgggtccgcctaacgccgtgggcagaacttcttcgcgggcgatttttggtgagaactcctcctatagcttcgcacttacctccgcttcgtgtagatgcttcgggggggaatcttttggcttggaatcgtagtttggcagggtccggcgatgtcgccagtgtggctctgggcgccgtcgtgctccgccgttggggaaggggggaaaacgccctgaccgtagatctagtaaggtgcagtcgtgatcaggtcatttcataccccttcgcgcgattaattctaggtcgtagatctgtgatcgggcgagcaggagt

SEQ ID NO: 1026 - DNA, 432 bp, Zea Mays
ccgaacttcaggacatcgtccatgtgtcggacgatacgactcactagatctggggtgcccttgaggctcagtttctcggcaaccaccaaactcggattctatatctcgagaccgctttccgccagcttgcttagggctttttctctatggacgagtactgccgctagatgaatacaatggcggacactctccgcaccctcggggcccccgtcaccgatgagagcctcgtactcaaccttctacgtggcctgagcccttgtttcgattgtttgacacccatcctcacctgcatgaagccatttcccacctttgcggaggtgaagaatgacctacttcttgaggagcttcgcctctccgccactacgacatctgttttcgccatggtgctctacagcacgcctcgagctgccccctctgactccagggggttcc

SEQ ID NO: 1027 - DNA, 891 bp, Zea Mays
gccttcatcccaattaggatgtcttccgggagttggatcatctgaacatcacataagctatatatcacaataaacaaattaacagaactaaaaactacagcagagtgcacctagaggatattcatactcctgaagaacatgagaacaaattccaagtgcgaagcttgtaacttcttccctgccaagtggaaggggcaccgacttgctctcgtcgctgaactcgttcacacacctatgcacagaataactgtttaaaagtttggaatgcttaatatgctttaatctctatttcaatagcaataagcatagttatttgctgtcatatagtttggcatagatgtacacaaaaattaaaaaaaaacatggagcaacattccatcgaccgtagcaactttatatatctcaagtcaattatcagcaactatggtcttcttagtttgactttgatatcaagtgacgattgtggctttcaatacataaccatggaccaaaactaactgcctgatacctcaccatgtcgcctaaatttccctccatacctcacctcgtcgctcgccggaggagaaaacacaaacaaataagcgcagacaagagggcgaccaatctggcgaagctgctggagcctgctgctgtgactgcatggtgaggtagacggaactgccaaaacctgttgctgtgaccatacggacgggcgagagaccaagacgcgtcgagtggtgatgcggttctgagcccgtggttcagggcagctggaggagaggcagcgctccgctgcaggagacggcgcgtgcaggcggaggatggtcgacatgggcacaacggcggtgtttgtgggggagggggatgggattcctggctgcggcaacgacgagggggaagaggatggcactg

SEQ ID NO: 1028 - DNA, 341 bp, Zea Mays
gctcatttcatttaggatgtacagaagaagtttggtttagaagatcattcttaggccatgagggggttggttcatatgtcatagaaggctagtttggatgaatatattcaagagtttgaggatagcttttatgagacaactatgcataatccaaatttagatgagactttctttgtgtcctagtttattaaggggttgaggggagaaactaagggacatgtgatgtcttagttgcctcgaatagtagacagagcaataattttggcccagatacaccaagaggttttggagaagggtggaaacaaatttcagaaaggaatccaatcaagcaagggtctagg

SEQ ID NO: 1029 - DNA, 324 bp, Zea Mays
agagattggtatggattttattactggattgcctcgcacctcgaaaggatacgattctatatgggttattgtggatagactggccaaagtggctcatttcattccggtcaagactacttataaggtatctcaattggcagggttatatatggctcggattgtgtctctacacggtgtaccgaagaagatcattttggatagaggatcacagtttacccccagattttggaatagttttcatgcgaatacggatgcgaagttgaattttagttcggcctacctcagactgatggacagactgaaaggactaatcaagtattggaa

SEQ ID NO: 1030 - DNA, 441 bp, Zea Mays
caggttcattcaaggctaggcgagaagggcctaccgttctacaaattgctcaggaaggtggacaaatttcagtggaccacaaaagcacaggaagctcttgaagcattgaaaaagttcctgaccacgccaccagtactcaagtcgccacgccgagccacaccgaatcagccgacagaagatttgttgttatacatctcctgcacgactcacgtggtgagcaccgcgttagtagtcgagcgggtggaggaaggacacacatatccagtacagcatccggtctacttcatcagtgaagttctgagactctctaaaaagaagtatccccaagttcaaaaactactgtacgcggtacttctaaccgctcgcaagctccgtcactactttgacgaccacaaagtcatagtagtcaccgggtttccaataggggatatccttcacaac

SEQ ID NO: 1031 - DNA, 649 bp, Zea Mays
aaaaaaccccatagactagggctaatagtaacatttaccagaaaagttgatgggtgattcgatcccttgtggcgtcatgttgtcggcgaaacattagattattgctgtacgtactggaggatggaattgtccagctcaagaagaaaagaaagcgactgtgggaggagagggagaggtgagaaaagaatggtagcataggctagcatagcagagtgggtgtgggaggagggagagggaaaaaggagaccttgtagctactgtctgaccctagcatttgcgtgtggtgtgtggagaactgaagatgagatgacctgagatgaaaacaacccgatggcaggcctgagcatgcatgggctatgcatgctagtgcatgagcatgagagaatccaatcatcatcgtcatctgtcggtcggtcagtcagtcagtcactggccgtatgcatgcagctagccgctgttttgctgtcactcagctatctccacatcgatggggacgccatggatctgatgctacgacatacagtgctctctcttttctctctctctccctctctttaatttctttagcgggatggtcagtcatggaaaggaaaaggaggaggaagaggagtcagccgaaacgacgtcttcggtccatgcttaaatcgct

SEQ ID NO: 1032 - DNA, 537 bp, Zea Mays
gtgaccagctagcagatttattcacaaagccactcccacgcgcacgactccaggagctacgcatccatagtggtgtctttagtatagaaccaacacaacaagattaaggcggagattgacaaggataatcttgtttacatagccgttgtgcttagtcttggtgcctaagtttaggaggtagtggttagtcagacgtagcgctcctgtgcgtccatgccgcatcaaagatcggcttttccatacatgcacgtcgagtggtggagctggaattctaggcacagtgaccatgttctatgttgtgggatggcacggcaagttcagggcatgggagcatgcgtccgagatctaagaaacacctgagagtgagtcaataaataggagataaaacagaaaatggagcgtgggttttaccgcgccaaaaaatccttccagtgtgcttgtttgtgttcatccattcatcacgtgtgcaagtgagagtgggaggctaagtgtactagcgacggattgatccttagaagaaactaacataggaatccc

SEQ ID NO: 1033 - DNA, 358 bp, Zea Mays
atcgtgaagttctagtaatatttacttgggcaaaaatacaagagtggatcgggattccaaattcatgttctcttaatccataaattctaaacaaacaccaggctcgacatttcgcgaaataaatacgcgagatcgatccggcatcgaaattgtgatcccttcggaagcgaagtcacacatcgttcacgtgggcgagaggctgtgcgctgtctagacaccgcttaacaccagccacgcgccacgatgccaggccacagagagacacgggcaacataagcgtgaaaggatttcaaatgaagtttaagaaaccagatccgatttccagaattaaagtttgggcaagacgttgatggcttaa

SEQ ID NO: 1034 - DNA, 908 bp, Zea Mays
aataacataggagtcctaattattttacttttagcgtaagtcaaattgtctagaaagttatacaaatatctactgctcccgttttaaattataaatcgttctacttggtgctatgcttataatttaaaatagaaagtacacaacactagatgacagaactatgataatctatgccatggtggatttaataaaaactattttaattttataattatcgacgtaatttctatagacttagtcaatgccctatagacttagttaatgttaataagagaaagatagaagacttacatttataaaataaatggagtattactacaaatatattgagttattacaataaatacagaacaattatacttagacaacatcaacctctcaatttagagcaaactatattataatatgaagaatacagattattgttgcaatgggatgtattcttccattttgtttattacatacaattttttaaaaaaatacatgctatctcctcaaaatgctgcccatcagctttgtttggtcatcccatcaatttgctaggaatagttgtttgtcttcagtaatattcagtttaggatacacgacatattacttacattcagtaatttcatattttgttttagtaatggcatcatctggagaccaatcacattctgcgtcctctcctttgaaggagcagcagtaggagtttgtagatgtgtcaagctctgagagatttgatatacatgcatttgattctccacctgctcggcgctctttgaggaaaagagcagccccatctccaccacagccttacacagatgaaaatcgaaggccagccaagcgccggcaggtatctaagaagggcaaggagaaggtggaggatgatgaggtgtgtatctaagtattttttacctatctggttt

SEQ ID NO: 1035 - DNA, 888 bp, Zea Mays
cttgtgtagtatagtaattgtgatgccgaagcctgaaatgaatagatggatgggatgggattagcagtgctactcatctgaaaaccacatatatgactctcatcggaagtcttcactcggggtatacttcgtcttccagcgggtcgaccttggagaaactcgaccagctgcactgatgcgcttagatcaagaggattcgaacgtcccttcaatcactgccgcctcgacgatgatgcactgatcgaggtagtgagattcggttccatcgagctcgaggtcgatgcctgttcgtctctcccgttgatctcatttctacgattcagtccagcactattcatcgtttcgtcctagatctttcttttacgagttgatccttgaacgcaggagggctagctcgggagtggaatatctactgacccccgactccgcaaggcatgtccaagccagcagcctcaccaccctcttctttgcctttgcccttgtgtccatccaaccaaccagccacagccactagagaggtcgaatccttactttcttgcaaacaatgggcctccttccaatccacagaatcatcttgctgtgtttttgctcgtctagcttattactgcctcctccagtatcatcggacagccgcatccttcccaacaagccgctgactgttggaagcacgctcacctccgatgacggcacttttgccctgggcttcttctccccgtccaacccggacaagaaacactactactatgttggtatatggtacgccaacattcccaaggacaacgtcgtgtgggttgccaaccgtggaaccccaataatcacggacccttcctctgcaacacttgccctgacgaacacgtccgatcttgttttgtccagcgcggacggcca

SEQ ID NO: 1036 - DNA, 1067 bp, Zea Mays
ggcggcgtgtctcgtggatcgtccctttcggtcttctgtgtgggatcgcctgtctctgccacgcggggctgcgaaggaccaggcggccggcgtcatcaggcgtacttcggtttggcggcggatcaccccggcgagctcttcggacggcgttattggggcggctgtctctgctcctgtgcatggggctactcctaacaatgaggatggtgctcctgtcgtcgagggctcgcagtccaggatggggcgcaagcggcggaggggtccgcgtcgtaggcctgaggcttccagggggcctcctcctcccccttccccgccggccttcgtttctggcgtattggaaagccagagggctgggcggactgcagctgtaagagatgttcccgctctgagacctatatgcgtcatggagttctcggcggggtttgctcgggaggaagttgatctccgacgtgccctcttcgtctccatcactggtaaccgtcctatggtctctcctgacatggttttggacgaagttgcgcggtcatacgatgttgatcgtggcctgttgagaattcatcgatccaaccctgaggatttcattctttttctccctgacgaggagttagctgtgagggttttcaatggcggcagacatttccttgctcctggcttcagtctgaaattcaagcgttggtcacgcttcatccatgcgacgggtggctctctcccgttgttagcaaatgttgagctgagagggattccggcgcatgcttgggatcgctcaactgtggagcggttgttgtgtaatcttgggttgatcaagtcagtgcatcagtgctctttggacagaagtgatctcgatgtctttcgtgtcctggcatggtgggccgatgggtcggagctccgccgtgaagttgatctctttatcaaggaacccgtgcatggcttggatgagtcgtcggagaagctgtgtcttgtctaccccattttgatcgaggccactcctgttgctcttggtgagcgtgggccggtgggaccgccatccccgccgccccctcctgccaaggggggcgacgaccccaggg

SEQ ID NO: 1037 - DNA, 415 bp, Zea Mays
gatcagtatgtctcgtagtagaccacattattcaactttttcttctcgccatccttcttcttgtgggatttggagcttgacttggtgagatctccatcgttgtcttttggcttctccacttctttctccaactccttccccttgagattatgagattcgtccaccgacatcccttcgggttgttagacccttgaaatgaagaactaggctctaataccaattgatagtttcctacagggtggataggcaacaccagaaattttaacacttaacacaaacaaaatcacaacttagaggttagatcaataataatcaaaatgaagaggaggagaataagtgggaagttctcttggacttgttgctcttatgaatatgaagtttactttgagagcaactcaagtgatacaaatcaaag

SEQ ID NO: 1038 - DNA, 525 bp, Zea Mays
aggaagcaccctactagcgcgagcggcggttcgctctttctgcacccgggaaccagcacccaaggagtatgacctatggacccgggcccccgtgtcatagtctgggctgttgtttcggcggagatgaagaggcgcgctaccccgggcggcggttcgccttttccgcaccaggagttcagcgcacaatctgtatgacttgtggacctgggccttcgtgtcatagactgggtcgcctgggcatcaggtgtgcgtcggtcgggatttcctgtggcgtctcggggcgcgagcgggagagccttccttgaagagggattcgccctgtgtgcagcggttatgctttcgcattttctcccaatcgctgcgacctttcgccttcgagctctttgcgcccctttgcatttgcgctcttctactttccgccgccgtagttgccatggcttcgctagttcatcctgagcgtttctagtctgaggggtgctcaacctggtgcgtcatctgctcggatggaacgcgccggcgttcgcc

SEQ ID NO: 1039 - DNA, 524 bp, Zea Mays
aaagggtggcagggcttatcggcggcggtctagctccagtgcagtggtctcggagatcggggaggttctggcaaacacgtcgatgggcggatggtggtcggtggtggtcggagtcgtcctggccacacgcaggagcggacgagctcgtcggtggcgaggggcttggcctgtacacggcggtagggttcaattggtcggcttagagagcttcaccagatgacgtagaagctgtgcgcacaaggaatcgaaaaatgctgcactagtttacctcgatcatgtgctccggcgggcggagggattccgacgagggcgatctagcgtctccggtgagatagtgcttggtcggagggctcgggaagcttcaccggaccctggggaggtcggccgagcagtgggtttgggtgaggatgggccagagtgaccggtccacggtggtcgcactcaggtggattctagcgggcagcgaagctctcggtttccgggcaaacttcgatgatcgagtgcgggtaagcaagaggggctga

SEQ ID NO: 1040 - DNA, 531 bp, Zea Mays
ggggtacctagattatccctctgaaagacacactcaggagaagtaaagtcaaaacccctgaggggaagcagtcgagatacctcctaacccgaggcctctcccagtgagtctcccacctcagacagaactccgcctcgcccgaagtcaccatcactccatctgtctcgcccgagttgatcccaggcagataagacaaaggcgcccaaaaacaggtggggaacactcgcatttaatgcacatacctaccccacgccgtagcagcaggagcaaagtggctaacaagacagcaaccatatccgggcgcaacaacatgattacacccccgctacagtacgcgcaggccgcctgccatcccccgatgggacatctaatacaacaggtgaagcagaccagccctcgggcgcaaatctccgcctcgctcgatgctgagtccagacctcgagcacaaactttcgccttgcccaacactgagttcagcctcgggtgcaatctccgtctcgcccgatgctgggtttggcctcggctacctgc

SEQ ID NO: 1041 - DNA, 397 bp, Zea Mays
ctctgataccaaatctaatcatctacttgtcggcatgccttgttggagacaaagaagatgatccgtggataacccaaatgctcacaaaaaaactcaacatgaacactgagttttggagatgatccgtggataacccaaatgctcacaaaaaaactcaacatgaacactgagttttggaccttttggtgctgccaaaatatactctacctttttatattctattgatctgattaaatacaattacaaagtctcacagccacaaatcaggcatcaatatcttctactggaccatgctatcccacagccaatagcttgtcatatcgtgttacttgggtctaaaaacaggaacagaaaacaaggaaagacagccattgtatggtgcatgcatctagcgcac

SEQ ID NO: 1042 - DNA, 443 bp, Zea Mays
caaacatctcgcacaggtgagcgaagatggccgcctgaaggatggagtggggtgtgaggtgctggagatggagaccaagctcctccaacagtaacatgaagaagggggagatcggcaacgccaacccacacgagaggtaggagacaaagagcacaaactccccggcggtgatatcgccaaggggggaagcactggcccagatcctccaagcgtgcgacgacacactccatccgagcaggcggcgcaccgtgtcgagcctcctctcggtctggtaatgctcgggatgaaccagagaagccatgactgctgtagtggcgaaaaacagagaaatgcgagtgcaacagaggctggtcgcggaatgagtccccttttctcaaagaaggctctcacgctcgcgtcccaaccccatccaacgcgcacctagtgctcacagtgacccggtc

SEQ ID NO: 1043 - DNA, 516 bp, Zea Mays
cgcgtagaagttgacgtagtagcatactagcattcagccctcaggtttacgcccgggagctatggccatggcgcaccaccgtgggggcaacatcactaccgtagtccagcctggggtaggagaaagaatgtgcaccgtgcgtcgggtgatgaacggttagatttgaaggctatgcctcccctttcgcatattaaacggtgtccattggatctgatcggatgggtggagtttgcgctctggcatggatgtttcatgtgcgtcgattttgaatctgagcaccccggtcgtttaccgattcgatggcgggctggatctaatccaggccagctcgctggatcatgataatacgaccccgtgggctcatacccctcgcgtcggcaaactttattatcagaactataacggaggttctctgtttgatcatgctgtgatggttttttagatgagggatccctatatcgcctcttctcgcagaactgtagcggatttcttaagctagcggaaccttgtaactgc

SEQ ID NO: 1044 - DNA, 392 bp, Zea Mays
atgtggaatggtgtagagatccccgttgctattgcaccgaaggaggaccgttttggtttggagatccttaacagaaaaactagaagcgtcaaactcaatggaacagttattgtcgtgagtaagctgtcgaacagataacaaattacgagcaagctgaggagcgacaagaacattattaagatgaaaataacgatcagctataggtaagagagatgtgccatggccagatgaagggatggactgcccgttaccgactgtaatggagcacagtggggaatgacaacaggagaggagtataccgtcgttggaggacatgtgggatgtcgcttcgctgtccataacccatgaaggggagtccggcaccgccatttgattaagggcagcaatcaaat

SEQ ID NO: 1045 - DNA, 1709 bp, Zea Mays
catttttcttccatctgaaatgacaatattaccagcaagcttaggagcctccacatgcatcctcagttctgatatcttgcatgatgagaaagttatatagatcaggtgcgtttgtttctcttattttactaccctgtcccctctgatctagaccaatgatttgacaccatactttttaatgagatccgaatgcgtggctgctatagcatgtgcttatcaattgtgcttattctttattaaactatttttcatatcagctgttgttttgaagccctcctttcactgagagcatttagtgtcagtaagcaatccatgaatgcataatttctgctccagtatttgtgttttaactaagttagattctggtttagatgcctatatgacactacattcttgttaagttgatcatttaattagtttggtacctccagcaaatactgtaaatatgtttatggaatatgttaaatacttctgtatgtttgcttgccttatattttgtattttttctgtatagggctttgtaaacctgtcatcctttggataggagtgcatgaaaatctgcaatccatgtgtctgaatcatgacctgctattacttttactttatcttcctaagcattaaccttgcttctttgtatccccttaactggtggcttgataacactttgtattatgcattaaccttgcttctttgtatccccttaattagtggctcttggtaatgctttgtacacctgcattacattatagtcaagtattatgtttcataccttgcagtctgcactaacttgtaaaatagttcagataattggcacaagaacgaaactggcttatgcccttgcaaagcaatggtttggaatatacacaagtgcagaggagtccagtgacggtaattcatctctagctgttaatttatgtagctatttcttattattacataggtaaaacactgttgccaaacaatatcctgcatgaacagaatggcttttggatggtttggctggttttctaactgagttattatcaagcgttaccttgggaataacgaggcgcgttataggcgtttcaagattcgtcttttaccaaaaacatttgttattctgattcttgttaccactgaatgatcaatcatacgaatattttgaatagcacatctatagaataagtgaataaggtttgtttaccattttatttttttcacgtaggagagctgagtgtctttgtcttatagagagaatgggggaggagccctgtacaaagcaacctcccaacctcatcaagtggcatgagatgacatgcagttctgctgcatcgttcaagaaaaaaatacagcttgagagtaatcacctgttaaattataataaggacaacctaatgcagaaggcctcactctagaccctcctctaatggcgaatctagacaccatcttattataggtttattgaggattgcatatcaatttgtggttttcatctagcaacatttccttctgccattaatatacacaattcattaactaggtcttattttcataagaattgaagatcatgattaacatcttcttttgtatttgtaataggctaactgctcagtatgtgaatctgatgttagtggtgcaactgctttgagctctactgctgcttcaagtgatttatatggaactcaagcaatcggttcatatgggaaagttcgttcattgaaagctgtaag

SEQ ID NO: 1046 - DNA, 466 bp, Zea Mays
agaaggacaataagtttgtgtggactccaaagtgtgaggaaagtttctagatcataaaggagaagctcacgaccgcgcccgttttgacactaccagatatacaccaggattttgtcatcttctgtgatgcttcaaggcaatgcttagggtgtgtcttaatgcaaaatgagtaagttattgcttatgcatcccgcttactcaagcctcatgagtagaattaccccacccacgacttggagttggcagccatagtgcacgccctaaaaatatggaggcactatctgattgggaacaaatgccacatcttcactgatcacaagagtctgaagtatatcttcactcagccagacctcaacctccgtcaaagaagatggcttgaactgatcaaagattatgaccttgagatccattaccaccccgggaaggccaacgtggtagcagacgccctcagccgaaaacctttcgg

SEQ ID NO: 1047 - DNA, 626 bp, Zea Mays
gggagcttgagggtgcacatgaaataagttgggagagaggaaaataccgcattaaccatttgtaatctgccagcctgagataaaaagacagaagttgacacaagtcttctttcgatcttctgaatgagggggagaaacgctcccaagttggggttttaaggcccaagggaagcccgagatacgtgaaagacataactccaaccttgtagtgaaacatatttgctaagattgccaatttctggtttgagacattgatgggataaatattagccttgtgatagttcacatggaggcctgtagaatctgcaaatgaattaagcatcgctttgaggaagaatagttgtctagggcaagcctccaagatcaaaatagtgtcgtctgcatattgaataaccggaaagtcagccccacatgcattcgggagtggaagcatgagggtgccacaatctttagccttgttaacaattgactaaaggagatctgctgccaggacaaagagaagaggggacagggggtccccctgtctaacaccgcgcctgcagtgaaagcgtcttccagggacaccatttaaaagcacttgggatgtaccagatcctaaaatcaatgagatccagtggatccatttg

SEQ ID NO: 1048 - DNA, 783 bp, Zea Mays
cagggatcttgtcgcaagattcctaagacacagagcacagtgtaataggacgacgggtttaattcctgaaattcacaggggttctttaacaaaattgacccgcgaaggggtacgggtgattctcggccgttggatctagttttagcgtgtgggattagatcacgaggcggtacgtgttctcgaacgtccgatcaacagcgaacggtctggatttaattatgtgatatacaatcgtagcccttggatccgatcaacggtcatgatttaatcgcgcgaataggtatgctatcatctaatctccgccctccatcaatagatcgacgacggtcgacccttctaatcttggccctacatcgtggagctaacggtccgcgccgcttcctccccacaccctcgttcaccggcggcggtcgatagaaacccgagcgccgccgcggtgccattgacggcgccctcgatctacgcccctagctcacggtgcttgcgtgaaacactattttacgcagagaacaaggatgcaggagcgttggcggggtaattaccagaattcgaatggagttctgtcctgtccgcggcgcacggcggaagagcttcgacgacgagggattccgagagctctggccaccaatccatggcagggaggacaccgggtcaatccccgacgcacggcgagacttacagacccgaattcgtgggcgcgacggcggtgaacacgaaaccgggtcggcggcggcgaaggtctctctctccctctgtgatggtggctacgtcgaacttgcagag

SEQ ID NO: 1049 - DNA, 454 bp, Zea Mays
acagcaacgaggccaagcgcctccaccaccgaagccgggacttcgtattgatcgagggccaactgtacaagaagggggtcagtcagccgatgcttaaatgcgtcaccgagaccgagggcgttcaaatcctgcgcgaagtccatagggggacctgcggctcccacgcaggccccagggccctgcggcaaaggtgatacgacaaggcttctactggcccgccattatctgcgccgcaaatcgggtcgtcagatcctgcgaagcctgtcagaaattttccccacgctcggggcgcccctcacaattcatgaagctgatcgcccacacgtggccccttcagcgctggggcctagacatcgtcaggcccctgcccacggctcaggggaacctcagatacacctttgtagccgttgaatacttcaccaaatggattgaagcgagggcagtctccaccatc

SEQ ID NO: 1050 - DNA, 784 bp, Zea Mays
ccccaaggaaagtgaaaaccgaaatccttctcaagatcctcggccgtgatcaaaccctcaacgattttaaccaaaccaataaaactgcgcttaggtttgttggataatggcttggcgaaatgagaagagtaaaaccctagcccatctgccgccataccaacaataggcatactgggtttgttctgtttggggagaacacaccgagcgatgttgtgagtttccttgcgacagatctcgcaccacaaagatttaaaacactccctagcatgatggccatccataccacatttttggcaaaaaaaacctacgcaccagttcattctcagatttcagaatggtagggggaggggttttgaggatacctggctggccgccatcgccgggagtggagacagggatgtcatctttgccatcaggttttccggttccagtcttcaaccgccagctgagattccgattcttcccccacgactgggaaccctgcggagcatccttcggaccccaccgatcccagttagggttgcgattttttggatccatccgatctgaatcacccgagcgacccgggagaggccactcctcgtcaagcacaggcggtcgaaacggagaggaaatccaaccaccgcaaaaactatcgcgcgacgaacacgggagagaccagaggcgagaaagacgcgaagcgagatgggggaaagagtgcgaacccaagaaatccgccgcaaaccctaaccgcgtacctgtaggaaaccttccaacgcacgccgcgccgaccgcctgcttcttt

SEQ ID NO: 1051 - DNA, 536 bp, Zea Mays
cagagtgtggccacttgctcatggatgggaaatgctaaaggagactgccgctggctccaaccaaaatggttttgtgtatctgaagtatacctttcaatacaggagccagtttgatgaaccaaatgatgactggctagatgccatagaggcgactagtggcaagctggttggggcatattcaaaggccaaagatgaagccatgacaattgccttaggagctcagggcaaaaagagattaaatagggtgtttgatgttatcgggtttgtgtacccggactactgttatccttcacgaaagcaagggaagaagaggaaagctgctacctcggcgacttatagtgcatcgaggtcaaaaaaggttaaagttttaacgcgccgaccaaggcgtattgaaacagccatcgtgccaaaattaattgaggggaccgctcctatcatagagccaagtagctttgtgccagtcgaagctaggagaaatgtgactgaagagccagaactagagaaaacgacagaacagttgaaggcaccgagtccac

SEQ ID NO: 1052 - DNA, 431 bp, Zea Mays
gcagtggtggcgtgtgtgctgccgtgtttcagcgtcgtgggtggaagaagtccctccggccgttagatccacgttgtgcgctcctgattagatttgggggatgatgagctcggggccgtggatccggtgttggacggcccagattagctggtgcataccggttcggccccagttcatctcgactgtagattgttggtccgacggatagggtgcaactgtggtattttagaatcctgaccaaaggatttggatccaacggtctatgctccgtaccggttcgatgaaatatggatctaatctaagacgtagaattccgatcggacggccgtagtggctccataccccttcgtcgagccgattttgtaaaagagtctctgcccttagtagaaactaacccgccgtcctcgcgggatacctctatgtcttagtgc

SEQ ID NO: 1053 - DNA, 325 bp, Zea Mays
gcaggaggcacgcaggcgagcaggtgagtgcgaacgcaggtaggggcgggggcaggagaggacgctaggggtgtggacgcccttgttagcgcgtggatggtgtagatggcccttgcgctgacgacggagaagtgcgcgttctgaacctcgccgccgccctcctccacggcgcgcacagagcagtggaacgatgccccgtcgcttggcggtgcgtcggtaataacgaggatggcgtgcaggcccgacctgaggtgctgcacctccacctccacggccccaacagaggagcgggagcgggagccatgggacgacgacgaagccctcg

SEQ ID NO: 1054 - DNA, 520 bp, Zea Mays
ccggaaccttccaaatcggcgcaactagccctccagtcggccacagcgcggcttggcgctgacacatggggtcgccctgtcagcgggccgctcttcgtccgcgcaaacaaatcatcgaagcttgggcgcaccctcgctcccacaccccgtcgtggtcaggcgttgccacatcccgggtagctaaaggtgagtctgtactaagttcatctctctctccgcttcgtatagccctgccggatagaaggatagagcggactatcgcgtggtcggggaaatgcggtaatggcgccgtcgtgctcgtgttcacgggcgcggctaccggaatgcgctcgtagggatgaagtcgagccgttcgatctagatcagatgggtcggagcagatctcaggcgtttgacatctaggtcgttgaatatcgatttgatgcgctgcaacgtgtatcgactaagatcaaatctgagacgttgaatttagatcgagcgactcacaacaacagatacccctttgtcgatgccaactaac

SEQ ID NO: 1055 - DNA, 924 bp, Zea Mays
gtttgggaggtgaaggtctcgacaattatcgagtcgcccaactacgagaccctcaccatggatgagcttttcaggaagctcaatccactaagattgaccaccagacctatgccaagattgagaaccatgttgcacccaacatagccctggtctctggaggtgattcctcatctaacccctcacctactatgtttgctttgtcttctttgttgtctatcatagatgagtaggtagagagcctcaaggtgaggagctggcacttgtggccagtcggttcataaggttccacaacaaccaccagaaccagctgcgtggcgggtcaaaggatggatgcttcacctatggtgaccccaaccacatcatcgctagttgccccccaagaagggaaaatagaaggctggcccatgtgaccaccactctggtcggtgcaagggcaagtgagagtacttctccaacaagtacaagtctaaggtaggaggcgctcaagaagtaccactagaaggccaaaatcaaggagtgtaccttcctggcctcccttagcgacctcgaccatgacttcgacgatgcagtgtcttcctcgagcggtgaggagaccgacagacgagtcaaggacaagctaaacgggctgtgtttcatcaccaacaccactgatatcctttgcagcttggccccttggtgatgatgcgatgggcgacgacagctaggacatttacaacgactttacttctaaggtatcacattctgccaatgatcttgttgctgagttggatgtgatgaacgttgctttggtgagtcaggatatgttgcttaggcatgctgctcgtgagaggagagtttagatccaagtacgagagcatacttagggagcttgagtctgctagagcttcaattgtggtgtctgacgagacagaatgtgatgagtaa

SEQ ID NO: 1056 - DNA, 389 bp, Zea Mays
gcgggggtccggagccgacacgtgtccagacctgatctggtgggatccagaccttatcgcatacactcatgctcccgcctaggcggagacccaatgctgccatgtggcctactgcgtgcggtgtaagccaatgggcggagcctgacataaagcctctaggctacgcgcgtcttggcatttattgcggataagacgtgcgtctgtccattccagtgataggcggcgcgcccagtccacgttgagtgggccgtgcagttactcacacgttaccatagcgagggcaatgattcaccattactcccgcgttaccaggaaaagggttactacctatcaatgctgcatggactacagccatcatgactcccgctgattactcatgcgttactctg

SEQ ID NO: 1057 - DNA, 1005 bp, Zea Mays
ggactggaagtttgcaataaaccggtgactgaaatctccccaatcgttgatgtagtgtcgaggcagatgtcagagccattacagtgcgtcgtgccctagaacgatgggcaagtacgctgccatgacgtcctccattgccccagcagcccgggcagcgattttgtagacggccaaccaaccccctaggtcatgcttagacttatatttgtcgacgttggagaccttgaaattaggaggccattggatgggctggaggcgagaggtaagcgcggagaccctgcacgtatcctcttgtcgatgatcatgtcgtcgatatcggactgttggttgaggctattgttgactcgatctgggttgcgcggctgtgtgccggtacaccatgatctcgggcgtattcctctcggcgccttatctcattctcgtgccgacgattgcgtgaagcgctgatgttgctctgtgcgcctcgtcggctattcatggcatgacacaggtcgtttggtgggtgggcgagaggtacaagatgattggccgcctgagtaagcacccgctgatagccctccacgtcgggggtccgcgggaggccatcgactatctgcgccagtactcctccaacttcgctcggtgtgttcaatgcttgggcgaagtcggggtacaactttcgggcgaggagcggattctcccgttggagcctagcatcttgttcagctagttcccgctctcgttcctgagcatgacggcgatcacggcgatgggagttgcttcattctcgatgtgttctttcgtcgggggtttcccccatctctaaggattcgtcccgagagacgggttgtgttgggtcctgttctctggcttcgtgatgtcatcgcacatttcagcgcctgtttatctgtctcgcactggggaggttcctcccccagcatgatgggctcatcatcaaagatgggcgatgactccagtctcccctgaatgaagaggatgtcggggtagaaaggagcatgtgtagcg

SEQ ID NO: 1058 - DNA, 331 bp, Zea Mays
acttcacagcctatgctacgacacctctgaccctcctcgtcgccctcacggcggtgtggctccgggtacagctcacgtcgcggctctgttccgcccgcccttcttagatgggtcgcgacgttcacaggcagatttcactacagcagccaagtacttatttgagcttatcagacggactcttctgccgaggatgggatacagggaggctaccacacatatccaactctggctccttggtgccctagtctctcactctgagtttgacgtcatggatttccttatctgtgagatcgaggacaccattttggatggcattcgtgctcgtcgacaa

SEQ ID NO: 1059 - DNA, 768 bp, Zea Mays
gcatgaattcaagcttgattcaataggaatttggctattgcttctatggcaaaattgtagatggtttgtagccctccaacttttctgcagagctttgggtgagttgccatgaaaaatttggagaaaacctgccctaagtcttgactgtcaggtgcactgaatagaacttctgatggtacagtgtctgcactggatcagaccaccagcgcggctgtcctcaccgccgacgacctgtccgcgccgcgatttgcaccggggtcgtgatgatcggacggtgagcatctctgggcaaagatctttttgctccgggtaagatcgtcgtggtggaaggcactaactccggctgccacgcggccatccctcctcccggccgtgtccggtcatcggcgccgctcccctctgttcgtccatgtcgcactgatgtgactgcgttactgtcgcggcggggacgtggcaagcccgtaagaatggttatcgcttgacgccgccgttgatcgccagcaaagaccggcaatggttatcaccatggccatggcagtggcttattgcgcctataaattcatcgcctcctcaccctctccgttcaaatcaactgagcacaactcttcgtctctaaattgtgaagccgtagcactcgcctacaccctcgattgcccaccatagccggagaattcccctttcccccaaattggtctccgccaccgtaaagcaccactccaccgtggccagtccgttctggtaaggcaccatccaattcgcgtgttgttc

SEQ ID NO: 1060 - DNA, 498 bp, Zea Mays
tgctgctagtaactcttcaacaagtcccatgccattttgcactcgagcattgcctaaacccagaatgtgttcaagagtcttgtatctgcgtggagcatcatcatcatgatctgcatcaaggtcgggggtcactgttggtggtgttgcaaactccacaacaccggttgttgtaggggtctacagttactgattccacctggagtgattgctgaagattggactggcatgtgcaatgtcgtggatggtgccctggatggtccagcaaagtttttctccctgactggtgtattgtccagctgctgatcgccaccaatttgcatgaactcaacacagaaaggattctcatagtctaccttctcggcatcaccccagtcccatgcccgattttcttcaaacacggcatcacgggataccatcacacgctttgtggcagggttgtagaactgccaagctttgctcccatgctcatagtcgatgaacacaatcggcgtgcttctg

SEQ ID NO: 1061 - DNA, 424 bp, Zea Mays
ctaggaaattgctttgcgctcgatttactgtgctgtttatttagcactgttatgtcagtaacatccttgtatccagcatagtatagtctcactacatctccagtgacctcacctgcttcaattactaactgcagatgcttccttgggagaacctgcctgtactaaggaatcaagaaatttatcgcatgccgtcaatgggtagcatctttttagcattatctcgaaccaataatgattacaaagatcacagttctccttttcctgtcatcgatcctttcaatacatattatctgttgaatcctagcggtgatctgagtagcacacaagaagaatttgttcagttattcagaaactatgagtggaaggtaagcacatggtttgtcaaaacttaattggtaatcatattaggccccgtttggttcca

SEQ ID NO: 1062 - DNA, 462 bp, Zea Mays
gcgaggacctcttcgcaatggcgcacgcattgaggcggccatcactgctgtcacgccgtcctggaggattccgcaaggatagtggccgcgaacttccagcgccactctgctagcgtcgagtagtttatacctgcagagtagggatggaactaggattccgcttgaaggcggatgtaatactttttctttttgtaaggtacttttgagtactatttatcaagcagtgttagcacttatctgtgtaccgtctgttcctactgtgtgtgatgttgttgactattccctagtacctggccccccgcctaggatgcaggcttgatgtgccgaggctggatactagcgtatctgaaagggttgtcaacaactcccgggaggcagcctcggccgggatctggacctgtacacagcttcagctagggagcgttagtagtacacccatagggtcccctgtctgatattagc

SEQ ID NO: 1063 - DNA, 281 bp, Zea Mays
gataacgagtatactgatggatagggaatagcaattatgtcaaaaagatccgcatcacatgcaattagaatcccacctggcgctccaagagatggtaaatgaatcgtttgagcagctaacttgtaacccagtgtttcctttagaaggttattattccaactcattatctttgtctcttgaagacagacaatagttgccccagaagagagaatcgtatgtttcacacttgcccttttagctgggtcatttagccccctcacattccatgacagaatacaaca

SEQ ID NO: 1064 - DNA, 1731 bp, Zea Mays
gaaacccttagccagcatatcatccaattgccgcttcaattcaacctgctcctttggagccatccaatacggggccttatgaataggctacgtactcggaattagtttgatttcaaaagctacatcgcgctccagtggaatgcctggaagctctgctggaaacacgtcggcaaagtcacacaccacacggatgtcttgcacccgcaaagcagcctcactctccaccaccatggagaaaaaaaattcccgacttccttgaccgacgatccggaagcattgcgacaacatggataatgtgaactttggagaacttcccaagaataccacctccctacctgatggcgcctgcaataacactatcttccaaaaacaggatataactgcacgatattgagataaccaatgcatacccaagataacatcaaatgcccccaaggaaatcacaacaagattagctgaaaagacctcatcagcaagaatgatggaacaaccctgacaaactgaatagctactaatggagccattagcagaactaaccataattgggtgacccaacctctgcactgaaagaccagcctgcgacacaaaattctccgaaacaaacgaatagaaagtgctagagtcaaaaagagcatgggccacaaacaaatcaactgagatcgtacctgtcaccatgtctccctgctctctgccatccgcagaaggtagcacatatgctccaaaaatacccatagaagaggaagctctcggagtgaagttaacagaagaaccccactgagtcgccggatgaggcagacgcggagctccaaactgagatggtataggagtagccggtgcagtaggcacggacagatactgaggaaaaccctatatagcacgaactgaggagtcccgagcacatagaactgttgcggggggagtggtactgaaaattgctgctcaacgcttgacatcatgttgaaagtgccctgagaagaggaagaagtcactggctcccatctgagcttcccattgggattcctcctacacaccacatccttgtggtcttggttgcagatagcgcacctgccactccactgacactcagcacggcgatgcgcatcaccacaacagaaacacaccagccccagcttgggcttaggaacagcctgatacctctaagtactttctcctgaagtaccctattcagagggtttgccacggtaggggtggtggcgctagtgctgagactttcccctcttgtgggctggacccctagtgttgcccctcctcgcgtcctggccatgaggctgatcaacacccgaagacttctatgactccatggtgtactggtgttgcatctccacgcccaatgtctgctccactgtagtacggaaatccaccaacataaaggcgcccagagcatgcctgattgaaggtttcaggccctgacagaactggctcgccttctccatctcattgtaagccacatgaggaacaaagcggaccatctcgttaaagcccacttcatactcttgcttgaaagataggaaatcaatcttcgttttctccaggaaggtgaccgggtagaacctcctctcaaactgcctgatgaaaacatcccaggacaggactcctggtgaggaggagtgagctgcctgcacgcctctccaccaaatttgagcctctcttttcagcagctgtgtgccaaagcgaacacgatcacgatacacaatcttgaagacatccttc

SEQ ID NO: 1065 - DNA, 1131 bp, Zea Mays
ctttacttttaggcgcaattatatttgagaaattggtgagcaatacttgacacacttgtggatggttcccaatattggtgtcgagcattcagatcatggattaatgctgcaacaacttttgatccgatcctcctaggtacgaacatcatgtctaggacatgataattaaaaaatgaacgagatgtatacaatatatatgaagcactagttataaccattacttatgggtgtcactggttgcttctgtagggtctatattgtgggctagaggaggtgaatagtttttcctaatacttaatcgtgttggctgaccgaaataattgtggaattaaacttaacggtctagccacatccgagatacgaccacgagctggctagaacttgcggccacgacaccacatgcgcatggtgttactaaccaaagcgaggcagcctaggccaatagcgtgatggccattgtacaaaactataccgacacttcaccggggcacaaagttcatgcgggagtagtcatggcaacaagcatgcagtgtctttcgacaccctaggccggactaggtggtgcacacgtggcttagataagtgtttgcaattgttggtccccatatgcatataggtgacccaatgcacatacacactagtgatgtctgcagtctgctctagagacagtgcctttgatatgatttggcttccagttcgaatagcttttaatccatcaggacgcctaggagactgacagggagagaccggcaacgctgcctcgactacaaggcgtagtttgtcttctagcggttccataagttgtgcttttaattgtcatccttattttcttgggctcctaccaatttgcatgttgaccgatgagagtgcaaagtgcactgttgtcaaacaccaagtccacatgaagagacacctccgtgagcctgtggattcatagggtagagtgtacctaaagttgcccaaaatgagccccatgtcatattggaactactccgatggccttggcatgacaccctactgccagcgtcgtttgtcatcaaaacgaaccaagtcgagtgcccatgtcataaacgtgattttttgtctccctcttgatagagaactaaataaagaaagccgagcaaaataaat

SEQ ID NO: 1066 - DNA, 418 bp, Zea Mays
cacgcttgccccagtgatcggctaagcatgtctgaatagccctctgataagttgctccagcgtttttgaggccaaacggcatggaggtatagcagaaggctccaaacagggtgataaatgtcgttttttcctcgtcttcctttgccaaactaatctgatgatacccagagtagcaatccaagaaagagagcatagagcatccggcggttgagtccaccacctggtcgattctaggaagcccgaagggatccttcggacagtgtttgttgagatccgtatagtcaacgcacatgcaccaatccactttattctttttgagtacaagaacagggttggctaaccattcaggatgtaacacctctctaatgaatccggccgcgaccaagcgagccagctcagcacggatggcttctctctt

SEQ ID NO: 1067 - DNA, 723 bp, Zea Mays
gcaaattaatcttctataaattataatagaatactagagaaaggatcaaacaagaccttgcaagtattgatcccttaacagctgcaacaggcacatactcatctccagtaggaatgttagaccaatggaaatgaatccttccccctccacctccaccactaccagcatttccgaagccaccaacacttgagaggacagagctttcagctaaggacaaagtatgcacaaatagaagaattgtgcccccagaaccaccaccaggtcctccaacagagccattagtatagctaccaccatttgattctactgagccatagagggcaagacttggcaaagaatactcccatgagcccatcgctggagagcagttacaaaaacatttaaaaagacaatattaagacatgctatgagtcaaaaaaatgagaataggagcatatgcagtacctattatacccccaccagctgtggacaactcggtagagtcattcccactgccactgccaagttcacaaggtagatcagcattgccatagatagctccaccctcagcaaggtttcccttataaaaaccatccccgccttttccaccatgtccaccaccaccacatatacctctgcttaacattttcccttgccctactccagttcgacagcctaaatttgaaaggatcatctcaaaatgaagaaatagcaaccatacagacatatggacacacaggcatt

SEQ ID NO: 1068 - DNA, 354 bp, Zea Mays
caaccttgactcgagacaccatagcacgatagacggtatgacaccccacagtctagacctgctaagctaggggatgcgaagaggacaaggttcataagggatatacacccacaacaatcgctccgacaggcctcggtgtccttgagaccttgctcccccttcaaaccctaatccccaatcttcatccaccctcgcctctctcatggcgccgctctcacgtttctcattattgtctgccactgtttttgtttcgctcgttgtactcctcgtctccattgacctctccaccattgaatacctcctcgcaattgctcctgctcctatatgccccatgatcacgcgcccttcaaaccc

SEQ ID NO: 1069 - DNA, 734 bp, Zea Mays
gcccagccgagctccggcgagcacctacgccggccgattggggcaacggctagggttcccgagcggcggacatcaaattggaccaagcccgagcatttcccctccattaatttcaccaagggggcactggatcaatcggttcatggtgtccgagcggatgggcaaggggatgaacgtgttccgatcaaacagcgatgaggatggccaaattggggctgggtaaagcttcacgggttcaccagggtctatggacacattttggtttgggcagaacaaggcccgaggagtgggtcgacggtgagggggtcacggcggtgttcttcagagcaagcacgcgttctggtgaaaggcttcgaccgcaattcgattggttgatactgggggcaataggagactaacagcaagcaaaaacatggaacaattgaatagatactcacccgaggactgctggccacggggggggggggggggttcttcgtggcggagcaagaaccgaggaggagagaaactggggactacgtaggctttccggtggaattaactcagttgcctaagagcttgtgcgcgcgatgtaacgaagaagcagtgcccggacttatttataggcttccggctggaaccgaatgaggatcgcgaagctcgaaatcgtgctggcgagcatgccgcgcggcgggttccggtgatggcacggtggccgtcgtttacccggagcctgccacctcagtgaccttctg

SEQ ID NO: 1070 - DNA, 437 bp, Zea Mays
cttttcactcactcatgcagctctcaggtcaggatggtgtggacaaagaacgtctcagcgctagggggaggagacaacgaggaccctccttgccccttcaggcaggtcaaggggaagacggtttaccgtgagcagtaggagggccggaagaagtcatatggatagagtcgctcgtgcagcacttgcatcggcagcagcagccgagcaggcagagcgaggaggacagttgcagatttcctctgatcagatagcctacagaatttgtcgcctcgcatctcggccttgctccactgctccctccacaccttccgccacagtgtctactccacctccaacttcaccagctcctatcgctccagagccatccaccacttccgctacacccaccacctccaccactctggcttccattgttccccctcctgctcccattttcg

SEQ ID NO: 1071 - DNA, 875 bp, Zea Mays
aagacacatcatacaaaaagatgggtatcaaataatttgaattgacaagctttgacactcagtttccactgtaatcggtagctctaacaaacccaacttaaggtaatgttatttccttaaccaaagccttaatcacctcgagtcctatagaagatagatagagtgaagatcaaggaacatatcttagacagggattttgggaagataagtatgtttggttggcctagagaatgtttgaacacctacagaaacaaatggacacgtgttcgatgccggccctgcgcccttggcatgcactggccgcgcccacactcaacctgtgccatggatctccactccccaatgcccgctcctttttaagccacgcccaagtcgccatagcttctcctcgcctcacctgcttgctcttgcacctcaccgacttttctccacaccagagagcacgccatcgtccgtcgttgccgccagagctctgctcctgtggacacatgcctccggtcgtcctttgcctgaactgaggccaccaacagcttcaccgagctccacttaagctcgtgtgccatttcctcaaagcactaccacaccagaaatgcctaacactagtcgctcgtgagcccccctgcttgctcccatggacacatgcctccaggtcacctgcacccaaactgagtgtgccaccatcttcaccgagcctcaccgaagctcgcgcgccccttctcgaggccgaacaacgtcggcgagaccttcgtcactaacgtcgatgacgttccaccctcctgcgttcatggtcggccctcctccagccacctccacgcggtcgagcaccaccactgtgttcgctaggcctcgccacacctctccaaaccttccccacg

SEQ ID NO: 1072 - DNA, 1061 bp, Zea Mays
gagaaattggctggggatcccggtgctccctcaaggctatttaggcggagctccttgcctctactgccctggtcgaccattgcgaaaccaggtgtccacgaacgagaagccgagcccagcccctgaccaagctctagatcaaaacaaagagagaaacacgctgtcacccgtgagagagaaagaggagctcgtgctctagccgctgcagtaccgcccaggggagttccgtcgtagattgagaaccagggtattggtcgccgtcgtcgtgcacctgcggcgttccccggactcgtacggtccgtgtgcggtggccgccatggagcgctgagcatgctcgttgcgtcatagtgcagctggaactcgactcgccgccgagtcaatccgtcaatttgtcgtggggatcgagcttagaagccccgccgcgccccgaggacagtacctgggttctcgctgggaaggttcggcggtcggagccgactgaattgctcgtcgtcgtcatcgcgccggtgcacttctgcctgtcaccgcggccaacgctccgtaggctactatctccagtaagttgcccccatgatgttcgcccttctcctctcgtcgtattgcgcctcttggataaaaaaagtgctctggtgcgccatcgggggatggctccggcgagtcgccgccatattcgttggggcgttcatccgtgtttgggcgtcgttaggtaggaggcatcccttgtccatcgatcctgccaccaacggctgggattgggtcaaggtgtttacatgcgcggggtgaagaagatgcttgtggactgttgatcgggtatctaacgtctggggttcagatcggttgtgatccgttggatttagatctagcggtatatatcgcatacggattcagtgtaagccggatctaatctgggccctcggttttgatcgaacggcccaaatctctctataccccttcgccgagcgacttttgcataggagaccctgagaaaagaaaatactgctccgccatccactccctgtacaaagtactttcagttaggccctaaaattgatgaaaacgac

SEQ ID NO: 1073 - DNA, 358 bp, Zea Mays
cagcccacccaatcagatccgtcgaaccacccatgcgcactagcccccaatcagatccgtcgaaccacccatacgcactagcccccaatcagatctgtcgaaccacccatgcgcactagcccacccaaccgattccccacacgtcgccgctcacgtgtcccgcttggccacgccccgctcgccattagtcccttcgctttgcggccattggagccagccaccgatatccgtcagcgattaaccaactctgcttcgttcggtccaatctgccaccgcgacgaaccacgccaccccaacgtctgcaattcctcattgtcgcgtctccactcatctgtcgcagtcacccctcatgtcctcg

SEQ ID NO: 1074 - DNA, 606 bp, Zea Mays
ggttcatggaggtagactttggtgatggacagaagaggcaactcgacatccccgtgacaatcatatgccacctcccgttcataccgaggatccaacgtctatacatgaccgaggaatccgtgaaacagatgacatggcacaaaaaaggcaaacgatacaatcctgacaagatggcgcacacatccgatggtgaagcatggaaacactttgatgccattcaccgtgagaaagtcgaagaggcttgtaatgtacatgttgcgctagccatagatggttcaatcactatggaatgaccactcccacgtacacatgttggtccatgtttgttatccccatcaatctcctccggccccgagtgtatgctttcaaagatagaacatatttgtgtcgttgataattcctggacacctaaggaataaaatgggcatgtacatggagcctttgattgatgaattggtctgtgcttgggaggaaggtgtatggacgtatgaccgagctacaaagacaaacttcaaaatgcatgtttcgtaatagtactccatgcatgacttaccggtgtatgggctattttgcacctggtgtgttcacggtaagttcccatgccca

SEQ ID NO: 1075 - DNA, 688 bp, Zea Mays
aaacaatgactctctttctaaagaaaaaagaaatggggttaaggagaaaatagaagagaagtaacacttgaatttgtgtataggagcaaaaaaattatactctcaaattcagggtgttacagagcacaagttgttgctatcctcttcaaggttgcatcttaaatcaaatacaaagacaaaggtgaggagggatttatatgtctcaacatctcgaattggcatttcgtcgaacatattttgcgtgtatccaacacccaataatcataagacctttgtcggcgctatttaacgacacgacatctagccaaatacttgtagcctctccggatccctatctagtttcatctctcgtccaatatgtaggcactgcgtggggtggaccaggcgagatgtagttgtagcaccacaccacacgagctggaggaaattgtcaaaataggtcactctatagtacccgtcttaaaaataggttgttggttgtgacaccggtagaaatgggtcgctcaacttgcatccttggtcaaaatggatcggatgacgatttacggacctgacgagtgggcccctgcaacacatatgagtacctgtgctcacgccgtcccttctctcgccggggcgcggacgcgctgtcgtctgatgtggaggtcgggatccatggtgacgatcgcgacatttggcgttgttggga

SEQ ID NO: 1076 - DNA, 412 bp, Zea Mays
cgattcggagtcccatccgagctcacagtcgacaatggcaaacagtttgacagccaggacttcagggacttctgcttctccatcggcaccaagcttgccttcgcctcggtataccacccgcaatctaacggcgtcgtcgagcgcgccaacggcaagattttcactgccatcaagaaaaggcttctcgatgacaggaagggtaaatgggccgaccagctacctgaagtagtctgggcactaaacacgaccgaatgccgggcaactggattcactccttttcgtctactatatggatcggaggccatgaccccgcaggaaataaagcatgggtcaccccgaacaagcacatcagccgtccccgacgtagacgaaccaacatctaaagacctcatcgacggagaccgcgtcttcg

SEQ ID NO: 1077 - DNA, 721 bp, Zea Mays
aaaccctagccgcccggaggttctctggtcgcagataccggccgtagtggagagaagcggagagagagagagagggagaaaagtaccaccaccacaattcaccaacacagttggcgttcggggctcgatttcaggccctaggtgctcatcggtgctggtggggctgatgctcggaattatcctagtcggtgtgggggagcacgatggccagattgttcatgcccgattatcatccgccacgaaagtcgtgcctcgacgaaattggacaattcggtggaaaatctctggtatggcgacccctgtccagttcgcttttgctccctccgtgcgtagcggttatctgtagggtaggaaactcaccggggcggcgttggggcgtactccgacggcaccaccatcacgcagagagctcttctcgccgtggctcgccgtcgggaggatgatgacagcgggtggccgttggattaaaatgaacggctgtgatcaattgctacgtcacgattcagctggatcgtttgggaccatggatcataggatagagggacgagattagaccggggatgtaactcttcagtcattggatctgggccgtcgatcttgcatcggacggatcaagtttcttaccggttcgtagtggccggaattctaatctgggcccttgggtctggatcggtcggctcttgtgacccgataccccttcgtggcctcaactttactaaag

SEQ ID NO: 1078 - DNA, 483 bp, Zea Mays
gtcatataacacatgcacctcctcttgccggacattgttgtacgcttgtaggttttccaaggacaggctcaactcttccacctgggcttgggaagttgcctcacaatcccaggctatggatcatgaattcacagcccagtcaagcgctctacctctcctgatagcttagcgatacagcaactagcatgcatacattccctgcctccatggcgcatctccgcagtcaggcgctcgactctagcctctaagtctcctatgggatcattcctcccgctgttgctcccctcgtgacgaggagccaactggtgacggggcacaccttgaggtccattcgctttctgaagggtggtcttcatacgtgccatgtctctataagaggggaagaatacttagtattgtttaaacatgatgcatgcatgatcctacgatcatggaatcaactactctttaatcccaagcttcctacatatgtcacacctagtt

SEQ ID NO: 1079 - DNA, 633 bp, Zea Mays
gaaaagttggcagcttcgaagattttgtgtggtgcatcacttcttcgtggttggaacattcaggtatcattcagtttaaaagaaccatattgtagtaatgttctacagaagaatgtaacatgtttgcatgcaatttgtttttctgcttaggaacatgttgttcaaatggtgcttaagttgttatcgacattcctccctttggattctggatcagaagggcgatatgtacagcatatgcctatgctgcatgctcttgtatcaggaatttcttctattgacactgttcatattctctcactgtatggtctggtaagaaacatagctagtttaatagttcaggtctattcgttttgacttagtcatggataacatggagttctgacgaagtttcagatgaaatcaagaataacctagaattatgtgtgttccttgaagcagaatgaaaatattttttgaactaatcttgtgttaaacatatttctcaggcatggatttatatgaaataagtattgacaactttcagtccatgtgcatctttcatattgacaaaacttctagtccatgtgcatctttcacattttcatatgtgaatgacttgtgtttacttgtggttttcaattacggatagtatct

SEQ ID NO: 1080 - DNA, 710 bp, Zea Mays
ccagaaacagggagatgggattatggcaaacacgatagagggatggcttaccggcggcgagtactacaacgaagctggccacggtgcccggcatccgcgaaagaatcacacctccggtgacaaatcaccggccctccaattgatcttgtgcttgaagcttcccccgcacgacttccccatgcactctgcttccacaacgacaatcgccgaggtcggaccggcagccccggcgggaatcgtccacggcgactcttctctctcatcccaaccacgagctcacaattggcgctaaagtcctttgttcctggcagctaggatgggtaggggataaggcggtcaaggtggccgcaatttataccctcgcgcgtgatcgtgggatgcgtagtagcggttcggccaatgcggcagagggaagtctgcaacgtggcggcacggcttcgtcggcgtttgttacagagggaaggagcacctgccaggtatggcccacacggagtgacatgcacgagaggggggataagtctcaccagcggcccatcgcgaaggggagaaggtcagcagggacttctccacgtctagagaacgggccccacgcgtcattctcagcacaagagtgtggtacaaactaggccgcagaaatgggtgaaggagcgaaatgggtcgcggggagatgggttgggtgggctgaaacgaagagtttaggccctggtgaa

SEQ ID NO: 1081 - DNA, 465 bp, Zea Mays
gatgaatttcgggaattaactcaaggagggagatctgtcagtgaatatgtccacaagttcacagaattggctcgctatgcgcctgacgatgtcagcacagaagccaagaagatggcccgtttcttgaaagggctaagaccagaactcaacactatcctcgccagctaagattttctcagcttctcgcacctctcaaacaaggccatacaagtggaaagggctagagaagaagaaaagggtcacctcaagagaaagtttcaagtcctccgagctcagcagcaggacacgcaccagagagttcgaccttttgggtttcctcccaaaggaccaagcttcaacaaactagcagggtctgctccatcatgtttcagtcaatagggtcaaagttccctccaggccccctccgttgcaagcaaccaacctccagccaatgcctgttggcactgtggagaccccagtcactac

SEQ ID NO: 1082 - DNA, 721 bp, Zea Mays
aaaaatctattttataatttctttttcctgttttactgacctcaggactgcgcacactaatacagaataacccatgggcaagagcgcaaaagtgtttgtgacacagccacatccgcacaggacgacgggttgttttaacacaggtgcaagggctcttttgaaaaacgaccagggtcgaagggggtaagaacatgtcccagccaccagatctaatctggacgtcccagatcagtcctatcatttaaatgaaccgatatgcattcataaccgtccgatcgacgaccgacgacacggatttgaagtactccaacccgccccagattcgcccgatcgagatcaaacggcccagaactgcctatgtcgtgatctaatctcatccgcttaaccacaatccaacggtccacccattcttcttccccctgacgccagagcatgacggcgccgcccacacgcgcggcggagccatcgccggagcacgccagataggggccacgatgctcctcgcacacatcaaggccatgattcgcaatgcggatggtgattcaaatacgatggagctactcaccgcagctagagggcaatggagggagctggccacagaggacagtgtattcgtggtctctggtgaagaaatcccgagctcgggcgccccccggcgtgaaattccgccacgccgaccgccccaccagcccggtcgagtagtagccaaccaccagaggtc

SEQ ID NO: 1083 - DNA, 1040 bp, Zea Mays
ctttttcctgtattttctatttactggactgcgcctactattagccgaaaacacagggacttaagcgaaaagatactcagactcagcgaaacctggactggaccacgggttattttctatctatcacatggattcatatgcaaaatgtctggccacgaaggggtactgtccattctgagtcgtcagatcaccgatccacgacccacaacagaacgcgaaccgatattctatttccgcccttggatcagaatccaaccgtccacgatcgatacacggattgcaacgcggggccggatccacccgctaatttctaatcggacggtcacgacccgatgccacgaaacggtattctgtcgccgatcctagccgttggctacgcattcaacgacccccggccgtcttctccaatcgaccgaacaaacaacggcatacacacccatacggcggcgccatcgccggcaccccgcacggtcggccccccctgccccaaccagcgcatgacatcacggaaaatagagaggaaggtaaggaggatctgatgggggtagacttacgggtgatcgagcagcggtgaactctgcccacgcggcacggcggcaaggggaaggaatctcgccaccgacaagaaattggcgcccaaggaatcgatgctcccgcccaaagagacaaccgacgtgcacgtggaactctggcgaatcacacaggtaccctaggatggtcaaatcctcccagaaatcccgatattgccatgcgtctgaatcaaccatggcggctcccccattgtttccccctccctctcggtgatggtgatggatcgcttgatgcacatcgatgaggagccgagagacatggggtatgcctttatacccccgtgttggtgaggcggctgagccattggggtggttacgccagctggggatttctacggagatcttgcgctcattcggttaagatgacagttactgggcacctaatttgttgccgagaaagcagggggagaaggagggtaagggggcctggcgatgggcggttgtcctgcc

SEQ ID NO: 1084 - DNA, 472 bp, Zea Mays
cgagcagaagagcattcagatcaaatatgcctcggtggcgcaccaaagagccaacatgcaagtagaaagagccaacgtgatgatattagaagcactcagaaataaagtcttcgacaagaatgaaaagttcgcaggaaaatggatcagagagttgccatatgtagtttggagcctgagaactcaacccagccgagctctgcatggaaatacccccttctttatggtttatggttcggaggcagtgctacctgccgatctcaagttcggggcaccaaggttaatctttgataacatagcagaagctgaagctactaggctggaagatattgacgtactcgaagaagagcgactgaatacgatgattcaatcagcgcgataccagcaaactctgaggtgctatcatgataaggccatacgacatcgatccttcacagtgggagatctcgtcctccgccgaattctaacgggggag

SEQ ID NO: 1085 - DNA, 521 bp, Zea Mays
atactctggcctaaatcatggccagacgagggtctggtactgacacgtgtctgggctttgtcatgtgcgcttccgctccccgctcaggcggaggcccgttgctgccacgtggcctagctcccgtgacgtaagccagcgggcggagcctgacataaggcctctgggccgcgctgtctctgcatttattgcggagaagacgtgtcgcctgtctaccccgctggcagacgatgtgccccttcagcatttaatgtgccctgtccactccactagcaggcggcgaccaggccgtctcgcaggcggcgtgcctatctgttccgctggcaggcagtgcgcccatgctgtggcgcgcactgtgctcatcatcactcgtacgtggccagagaagcttcccctgcacgccaatactacgcgcgctgcggatatcagggcgcaaggagattgcactggcgactagcattagttgctccaagcattacatccgttatgtccctgggcctgtatgtcggggctcagcacccatg

SEQ ID NO: 1086 - DNA, 544 bp, Zea Mays
taagtcctccactaggattgaccttctcttagtcttgactacaatgtcatcgacgtagacttctactttgtccctaatcaggtccccgaaagtcttactcatcccccgtacaaatgtaggcagggcgtttttcagaccgtacgacataacaacatagcagtaaagcccatccactgttacaaaagtggtatgcttcctatcttccctagacatctggatttgatggaaaccagagtaagcgtctaagaatgacaataggtcacatccggaggtagaatccacgatctggtctatacgtggcagtgggtacgggtccttgggacaggccttattcaggctggtgtagtcaatgcacatccgaagcttcccattcgccttggggatgatgaccgggttggctagccatattgggtgatgaacctcttcgatgaagccagcgtctagcagcttccggacctcctttcggatgaagtcctgccgctcaacagattgtctgcgaggcttctgactcaccggcctggcgtcggggttgatcttcaggcgg

SEQ ID NO: 1087 - DNA, 575 bp, Zea Mays
ccagaggaggcaacagcaagcacatttttttgccgggacctcaaatgtgtgagtatagcgttccacaaaaaagttttacccatcccaccatgcccacatacgaaaaatatgcccggcgagctggagagcgcagattcagtcagcttttcgaaaatgagccgttggtcagcattcaactgcgagacagcagcggcagcatggtcacgcaatagcaatggttcagacctcagttcgtcgtttatcagtcggttgccaaacatttcgtcaccacaggccgataagattggcaggtcataatcagctatgttggcaccactgttagcaaacgtgtccgctagtttcctcgaaagcaatgtaaggagttgctcatgtggagctgtgtagcatggattgccaaaggcctctctaagtccacagtgtatgtcatcggtgaagtagatccaatatttgtcaagtaaagcacgaacattgcaaacaggacagtgaacgacaatggtaacgaacagttgctgaagctgaaacgccgaggcagagactattgcctcatcaaatagaaggttccactcgttgtcacc

SEQ ID NO: 1088 - DNA, 533 bp, Zea Mays
cctaccttcaccatgtccgtatcattgtgtagcgcggtctaattttggggtatggggtagtggttggccgaattgcgtgccaccggtgagctatccgccgcgtaacctatgcaccaccgccgtgctcgtcgtcggttggtgcgcgcgatctcgaccgtcgatccaccgttggatggccgggattagaagctaaataacgattcggccgaggcatatagcgaccgtaagattagaatccagtggcggggaacgggtccgcggttcattagatctaaaccgtagatctagcatcgggtggctgatactgagtaccggttcatttaaaggtcatgcagatccgtgccatccagatctaatccaacgaccagaaacctttcataccccttcgcgggtcagttttgcacatgagtccttctgttatttaagaatcaacccaccgtccactgtggcagtgccctgagtcctaggatatttttcgtagagccccttgtgcttctcaattattgatgtgcagtccagaaacttgtaaattg

SEQ ID NO: 1089 - DNA, 340 bp, Zea Mays
ctacggagcaggtgcttcatcttcaacgacagcgattttcacggcaacaaacagagagagaatttggggactgcgatttgatgcggatcgttgcgcgtggccaagatcttcgccgcgcagacctctggacggggtcggccatgaataccctcgcccccgaactataaattgggcctgcgacctcctcttctcacctcatccagtccgccgccatcgccgttgcccgagagagagggagcagtggggagctcgaatcgcgccgccggggaatcagggaaatccgcattcgctgctccgatcatcgtgagtctcctcttgagtctacccctgcttcttctcg

SEQ ID NO: 1090 - DNA, 384 bp, Zea Mays
cttccttgaccgacgatccggaagcaattgcgacaacaaggataacgtgaactttggagaacttcccaagaatatcacctccctacccgacgatgcctacaataacactgtcttccaaaaaaggatataactgcgcgatactgagataaccaatccatatccaagataacatcgaatgcccccaaggaaatcacaacaagattggccaaaaagacctcatcagcaagaatgacggaacacccctgacaaactgaacaactactaatggagccattagcagaactaaccaaaattgggtgacccaacctctgcaccgaaagaccagtctgcgacacaaaattctccgaaacaaatgaatagctagcgccagagtcaaaaagagca

SEQ ID NO: 1091 - DNA, 297 bp, Zea Mays
gaaagactcataatcatggatggcttgacactgttaacaatagcagtcatcacttttccatcattaattgtccaagtcttgatttcagaagcattactgttatttgcagtggggacaggtggatcatcgatcaaatgaaaagcaaggccatgacctcgcaaagcagtttctacacagaaggaccattcacggtaattttgaccatccaaagtgatattgataataattgcagtagtgtgcgacatggtatactagcactgaatgttgttccaatcaaaactgaccagaggaccagag

SEQ ID NO: 1092 - DNA, 403 bp, Zea Mays
tggtaaaggagacagaagagaaagttcaacgaataattcataatttgaaagaagctcaagctcgtcagaagagttatgcagacaagcgatgaaaacccttgtactttctagttggggattatgtctacctcaaagtctcaccaatgaagggtatatcacatttcggggtaaaagggaagcttgcaccccagtacattggtcctttccctgttcttgaacaatgtggaccagtggcataccgactcaagttacctgaaacaatgtctgttgtgcataatgtgttccacgtgtctcaattgaagaagtgtcttcaggttccagatcgaaccattgaagtaacagatgttgccttagaaccagacttgacatattcagagcaccctattcgagtcttggatcaaaa

SEQ ID NO: 1093 - DNA, 430 bp, Zea Mays
tttccttccacctaaatagattgggtcataatggtagtccttccatgtggtgccaccaagttctataccatacggatttgaatctaaaatgtgtatacaccgatggtgtaggttgattacatacagtgtccaatgtcccctactaagcataggtaccaatatctgttgatgagaaaagtaaatataggttacatgttgctgttacaatgtcatgatgattaaaaggtacagttaatatgctaatgaacctgggaacaaaatgttactgaggcttaccgacttgcatttatccagatttaccaaaggaggtaatgtgttgtgcaagcaattctgtaacacattttgatcaaacggctgaggattcttgctatgacgttcctgctcttcaaaatttaacagagcctaaaaaaccaaaaatagagtgtgtaag

SEQ ID NO: 1094 - DNA, 302 bp, Zea Mays
aaaatataagctgtgtttcccctgccttcaatgcaaaatagtggttatatgcaacttgtgatactgcctatttttcttgcttgtaatacctctgatcccaaatgcaaatctagcctgcttcagtgcaccaaatataataaatccataacgattccaatgcatccttttgtcttattcttccttgtctaaccttacttagatgcacactaatcgatggagtaagcctgccagttgccacccatcttaactccagtaatgattgatgagtaatatggccatcataccgtctcgccataatactt

SEQ ID NO: 1095 - DNA, 322 bp, Zea Mays
gtcatcctagggatgaatttgctagataagtatcaggtagttatcagttgtgataagaggacaatcaagttgatgtccccactaagagaagaagtggtagccgagttaatctcacctgagccaaggaaaggaagttttcatcagatgtctattgatagcaaggagtcggattcactcaagattatcagggttgtgtcagagttcctagacgtgttctcggaagacttaccaggtatgccactagagcgaaaagttgagtttgctatagagcttcttcctggcaccgcccccatttctaaaagagcttacagagtatctggac

SEQ ID NO: 1096 - DNA, 414 bp, Zea Mays
caaagtttccatttagttggacaagattgcacaaaacaacgaaggtaagtctccagacattgattaaccctctctgtttggccgtcggattagggatgataggctgtagtcatgcggagttccacgccgggtatatggaagagctctttccacagtgcacttgtgaatattttgtccctatcattgacgtttgccggagggaaaccatgcagtttgaacatgttatccataaactaccttgccactgtcatagctgtaaaagggtggtgaagcggaacaaaatgactatatttggaaaagatgtctaccactaccataatacagttgtcctgatgagattgtggtaacccttctatgaagtccatcaagatgattttccaagcaccatcaggcacttcaagaggttgtaataat

SEQ ID NO: 1097 - DNA, 989 bp, Zea Mays
cggtgaagccgtcacggcaagcaagaggcagaagagttccattcctgaggagctagcacgacgcgacagacgaggagaatctttctcgccgtgtcccgcgcccggcgagtggagtggagtggagtggaaaagaagccgacagacatgatgcccgaccagccgggttttaatagcacgaagcagccttcttctgaccaacaacgccacatgcgctgctgcaggcagtgcacagccgggctggtagttgtagaatcatgatgagaatctactgctgctactaggctagcgctccactgatctgctctgcgctgctataaaatagaccgacagggactgcatcacaatcgtcactacccttcccactgtacatactagaacaaccacacatcaatcgatagggacggctgagtcacgatcgccactaccctacccactagtacatactagaacagctgatggcctcctccttcgtttcgttgttcatcaccatctttctgttgctgctgccgccgtcacttgcttgctccttgctgagttgcaagcttgacttcaccagcgtggtgctgctctcgtgccaggagacggcaccacaaaatcctactgccttatgcggcgacgccctcctctattccatcgacatctagccaattcatgaactggaaaaaggtctttgttgtctatgtgtgtacatggtttcaaggaacactacctttgacctacctacgtcttacttctcatgcgagggtaaagactcaagtaatgtgctacagtggaatgccatcattcctcgccctatatactgcaatggtaagtcatggacattccttaattaataatgtgggggtaaagactcaagcatgcgggaatgcagcagcgacgtagccggcaggcaatgctgctgttgggctggtagtggtacgataatgatgagagtctgctgctgctgggctggttgtggtaagtcacggacattccttaattaatcacta

SEQ ID NO: 1098 - DNA, 374 bp, Zea Mays
gaaaaaggtcgttctattccgggaacatggaaataatctcatccccatagtgttaaaatcttttttaattaccataccgcgtaacacattcccattcctcaaccccatcagtcagagagtgcgctgagggaatgagccctggtcactaggacccgttagtcagttagaagaggtggatacgtcaacccttaaagaactcgctcccggtcgaatcccgcggcaccgagcttggagtcggacatggcggaacctgacgaggggaggggggagtgtcggaatggaaccactcgagtggatcccgcatccggtcccagaccgatcctccataaatacccggctgcaattaaccacgcttgcaccgagccacagcgcgg

SEQ ID NO: 1099 - DNA, 760 bp, Zea Mays
atcgatgccttgtcgtcgtagtctcaggaaatttttctgaaatgtgctagtgctctactgatggggttgaatgaacttgagatgtattacaatagctgtgtgtcgtgcaggttatccaaaaatggcgaaaggtggtgtatgttggtaattgggaaatagtcacgtcattagccaactcgcgttaagcaggagtcgactgcgttaagtgattgttatatacatgttgtgtctcggatttcgataataataaactagccgacgtgtgtgatgcatagcggcctatattgttgctctagttagccgaattgttagatgacttggttaagctcgtaatcacggtgaattgcttattgtggtctaaatgtgtatgattacggtcgcgggtaaaaagtagtagtacccatgtaatgtctaatttaaaacgcaaattgttgggtgattatcgtggagaatgcgttgttaattggttatagtaattttagtgcactaaatgacttgaataaaatttgcaagtcgacttgttggttctaatttgattgtcttaactcgaataaatagtaaagcgttagagtaatttaagtctctcgaacgcggcgattcctgaattatataggagctgaaatttattgattgctgttttgggctgcacgctctgtttttgtagttctgtatgtttgatgaactaaattatgttttctggggaaaagtcatatagaaaagttgtagataaccttacgatcttgcttctgttaaaatttta

SEQ ID NO: 1100 - DNA, 449 bp, Zea Mays
attcgaactgcactactcatttccggatgccacaaggcattgcaggaagataatcgactccccgaacgcacgacagaatgaacagaacagtaataatcgcgattacattggaagggaaaagcaaaacggactttcaaacaaaatcaaggtccaaacagacaacataatgataaacaatagttggatagagcaatctgggttgcgacgaaccgaatcgggaaggagacgaatctgctgtgcggaggactcctagcatccgacggggaggtcctcaccctgcgcgacggcgcgacggtgcacgtgaataatgcggacgtcacagggagggtgctggcaatggacgaccacggagtcgccgaaggcaaaggggaggacggggtgccgctcacctcgtcggcgacgagccgagaggaggcactagcgaggaccgcccgcgtcgcggggcgccg

SEQ ID NO: 1101 - DNA, 813 bp, Zea Mays
cgattgtaccattctttgcttgtatttcgtcagacacttgtaagaccttggtaagatacattagagcgtgttcctgtgttccacccgagaggagagtgtagtgagattattagggataacctttaccgtttgttccctaattttgtgtttcgatggcaggcgacgacgaagaagcaaggatccctacatacttcgatgaatgtgttagccaccaagatcttgaggcaaacaacaagctcctgaaggaacaaatggaggagacagtccacaagtcagtgcatgatgccttcattgacatgaaccttggcaagacttacgagaggctagatcgacgattgtcccagatcgtcgacagacttgctgtgttggagacgcaacaacaagcaccaccgccaccaccacctcttcgtccacgtcttcccgatgatgccgtgtttgatgaagaaggtaattatgatgaagcggccaccagagacttgcacctacatcgccgtcttcatcaaaacacagaagttatgccacaccaacaccgccagcaaggtaataacaatcgtgctcctgacgacacttatgctaagattaaattttctataccatctttttcgggtcattatgatgctgagggatatcttgattgggagatgacgatagaacagaaatttgctgcccaccttgtacctgaacgacatcaagttagacaagccactagtgaatttaaagattttgctattgtttggtggactggtctagttggggatggtagagcacctacgacttgggaagatcttaaggtagctatgcgtgatagatttg

SEQ ID NO: 1102 - DNA, 305 bp, Zea Mays
ctcagacatagatccatggagaaaggcgttcttgacgtcgagctaataatctgtccaatcacgtaagagggctagtgcgagaacggtccaggcagtcgtcgacttcacaaccggattgaaggtctcgtcgtagtcgatgccaggccactgggtgaacccgcggagaacccaacatgccttgtaccgctcgagggtaccatcggcatggagcttatgcttgaaggtccacttgccagtgacgacgttggcgctaggaggacgagacacaacgtagtcgaagcgtgcaccagcaccttcacgccaac

SEQ ID NO: 1103 - DNA, 671 bp, Zea Mays
tccattcgtatcccttttaaagattatcacttatcagggcatacatggggacacccatgtcctttacttgacccgcgccttcagttctgtgtgctttgatctgctttgctctgaatgtaggtgttaggcagtgcaaatgggatcaggatatgtgatgatgatatataaagtggtggtttaaaagctttgatgaaattacctagtggccattgcaagtgaaatttgcttagggtgaccgtgctgggcatggaaatgagcctgaacctatgaatggattgctgatggaaggcaaggatgttctaccttttcctgaattgcatgccattgagcaagcgaggcagctgcgagtacctaactagagctgaccctctatcctcctgaagcatatttaatcagcgctttttgtttgtggttctgcctaggaagatcatttggacgtgacaatcagcacagttacagttagagcatctccaacagtaccttaaaagaaatactacgccagccccaaaagaaaatcacttctagaattgcttgtttattccaatgttgagtaacaattgcacttaggaaatagagaatgtaaaaaaactactaaagctaggtggtcctatacctatatgtgcacttggtgtgggacgaaatttgaatgctagaagtgcacttattttcgg

SEQ ID NO: 1104 - DNA, 1059 bp, Zea Mays
cacaccagaggtggtaggtctcatcttcctctcatttccaggagagcgaccagtactctgacatggtccatggtccattggtcagcagtttatagaatcacaaatggagtgtctaggtatgcgacaagagcacaggtatcacattggaatcagtactgaataccaccagaggtaacagcaattagggaggtaaagacaagatggccaaaaaggagaagcatacaggataaatcaaagtttggatatatgaaacacgtgcaaacgtaacaagtaaaccataacaattaaccaaagcacaggaaataacatggagcacgcagaacctgtgacatacctaattcgtagtagcatatttggtggtgcgagcacgtgggcagaaggggaagcacgttgcaaattcctgatcgacaattgtaaataataagaacaagtaaagacataaacaataagaacacatacatgtaaaaaagaaaatacggatagaaccaacaaaaggagggcaaaaaagagacaaagcactattatgcagcagcaaaagcctccattcaggtgacgccgacatcagaagcaactattcccaaactgtaggtaagcaaaggaagttaaactaaggtagcaccaatatgtggtaagggtctatgagaggaagcaaaggacactaaatgatctcagaatatataaccaaaaaagaaccaaatatagacacaaccaggaaaagaagagcagtaaagaggtgaagggcatatgcaggaacacattttgacaaaagggtcccaccaacatcatccgggctgtagcaaggcagggtgttccatagcacaaagaaccacaactataaataagagagacaactaagttccgagcacacttcagttacaagcacgagatactcagcaacggcccgaacgaccgtaaacataaataaagagctctagggagctaagaagtccaagcacaattaagcctgaaatttctttttctcacccaactaaactgtatgtgaggaccagactgtagggaatctctgaatatgttttgttctaatgcttattgtgtaac

SEQ ID NO: 1105 - DNA, 376 bp, Zea Mays
cgccgttcgctctcgaccaaagactcgtcgctgttctctaactgaagcacccaatgctacggattgtttaggataaactcattagtgcatgcacgcacgcgccgccaggaaacatcctgtacggcgtgctctgccgcgcgctcctctactgctttccgtggttacggtgggtggtggctggattcgatcgatctcggtcgtcgtctctcccacctccggctagctgccaccaccattgatttgtttatttccatggttgggagtcgcctactgctgagctagtagtgctgattctttgagttgttaattgcgcgatggagaaggcactcgattcatctttgctgttgtgctgcaaacatgtcggactccattagcg

SEQ ID NO: 1106 - DNA, 534 bp, Zea Mays
acgacggcggcgagctccgacctgcgcaggggagaggtagagcgcagatcgggtagaggatttaaggaaaggggaaacaaccgtgttttcccggtgcgccaagctcaggcaaagctcaccatggccaaagcgctgtcagaagtccagcggcgacagcagaaaggtgaagcaacagcggggggcggcgctgcggctgggtgagtgcgagggtagggaaagagcgagtgtgaggcaggggtgagctgagggagtgttcggggtcttcacctagcactcgggtgacatgggcaggtcgtggggacgtgggcacgctttgaccgcatggggcacgccatgggcacaggcgcgacagttgtaggggaggggatgggtctgacaataggggtcgcgagtcagcgagggaacgcgcggtgctgacgaggcggtcccactgagaagagagggagagggcgagcgagcgtggcgccgataggtggggcccgcttgtcagcggatgcgggcggttaattgggctggatgggccgaaaggccaag

SEQ ID NO: 1107 - DNA, 461 bp, Zea Mays
gaggagtcgactctcaatgtgaagaagaaacaacctcctcctaaatctattgagagtaagtagccttctcctggacatgtagagtttgcgacaagtgagcagaaatgttcaaatctacaacaacttcttcagacccggccccaaacagagctgcctccgtagttgcaatgtccgcggccagatcaagagaggtgggtctagacatgggcaaagcagtcgctatcgctacaatgccccatttagcctcaactagttgaccatcttcaaagcaactccatggtcgctcgccatctactcaacgtttctagcccctactctttcctgggagaagaaatctcaaactaataaactagacgctgattcatgcgagagtaaaaccggagcggtaaatagtgagtcgccactgatcgagttcccctgccttggtgttgcgagctgcttgattgtatacatagttgggg

SEQ ID NO: 1108 - DNA, 679 bp, Zea Mays
ctctttcgtgctcggtcaggtctctaacttctgcggctatatccagctcatttattgttaactggagactctttttcttctgtttgtataccccgttggtgttgcttgcccacccccgaagagccctacgaagtgcccccaacttatgattccatcgttgaactgagttgttaccctttactggcctgctccatatttctactactttggcatagaaatcatctcgagcgaaccagttaagctcaaatctgaaccgtctagatatccccgaaaaagcaggagatcctgtatctagaagtaggggagtatgatccgacagtcctctgtccaaagcctgtacagagacaagcggaaatttgatctcccactcggttgtcatgagtaccctatctagcttctcgaaggttggggtaggtaaagagtttgcccaagtaaattgtcgcccagtgagatcaatctctcttaagtcaaagctgtctattacagcactaaacaagaaaggccatttatcactgaatctattattattcttttccttgctgttacgcataatgttaaaatctcccccaattagagttggtaaatggttgtgttgacaattccttacaagttcagccaagaaagccgatttgaagtcaccctgggctggaccatagactgccataagtatccatttgaa

SEQ ID NO: 1109 - DNA, 941 bp, Zea Mays
gattccggtgatcgccggacatgcagctaacgagtcaccatgaaggtgtctcgtgttaagacacgtggtgcacgacgacggtggcttatcagtgacgaggccatctactcgacgatgagcggaggcgaagtgtggcggtcttagccgtagctcaatcctgccttggatttttttacccggtcaagtttatccgttgtacccgatgcacgaatcgtagcacgagatcgaccaccggcggcgactcaccggcgacgagcaagccagctggcggtcttatccccaatggtctactgtaccatggcacatctgcttcagtcgcctgaaccggccatgttccaacccaattatctctagattcttgttaggaacagagcgatccttcttaataaaatttgttcactaatcatcagtctccaaccttactataggattcttggatcaaattcgaacgtatttaaagttatggcgtgctcaaatcggccccatctcactgtgaccacttctgtcttcaagttcagttttcagtttctttataccagcctgacagagcaacttcgggctcatttatttcagaatcctttatggtaccaaggcatgagttctataacaaagttactctccttccatagatctacaatattgatgtggtgacctagggcaaattctcaatactttggaagatccaatgctccaaagttgagccctcaacacttaatttcagacttagcctctatagtgctttaagaagtgatttttgcattttggtccaaaacttagggtttggcttgcaaattcacatatatgtgacccaaatgactaaatatacctatttaacttggtttttgcactttagtccaaaagtggactaattttgcacataggcccctagggtttagttttggggttttccagggttccaattagggtttttgatatcccag

SEQ ID NO: 1110 - DNA, 343 bp, Zea Mays
tggtggtttctctacgcaatgtaaggtggaagtggaagaagcaacttgtaatcggatggaaaggaaaataacatcgatgattgaggaggcgataaggttggagacctatatgcgattgggtttcacctatgcacgtcggatagacacgtgtgatgacacgcacatgaagcctgaaggagttaacgcctgttgtttccctttcttcttttctaaccatcataattttatgcaacccattaattatttgccactatcaatggcacgtgtggaccctatttgtcatcaatggcacatgagtgtcatgcataagagatttgaaattttgtctaccgatggtaaaaat

SEQ ID NO: 1111 - DNA, 1540 bp, Zea Mays
cgcattcaaagccatctatgtgtcacattcgaccgatttgagtttgagagagttagtggtttgcgcattcaagtgttgcgagttcttgtgatcttgatttttgttttcattctcgctcaaccccccattctcattttgtcaagtgaagcaaaagatctaattcttcgtgtggatgtccttgcgggacttggtgtccccaagaagtgaagaaaactaaaccggcctccgtgaccatctgacagaggggaagtgttggggctatgttccctggtccctagggcccatcgatcaacgagcacacttgggaaagggcactggcatctgggactgattggtcagcaggtggagacatgtaatgtctaccctggaagaacctgccctcggatgaacctcgcggcaccgagctcggggtcgggcatggcgagacctaacagggggttgggcgtgctgaaggaaaaccactcaagtggatcccacacctgggctaagaccgacatgatataaatgatcgattgcatgaactgcgctggcgccgagccacaatgtaggcacgagtcagcctcccactcatgaactacgaaccccttgggtcacaaagcactcatgacctgtgatcccctcaaactgtggtgcatttatggcccacgcatccctcggccagcggcacactcatgacctatcaggactaggcttgagtgcataggccgctagcagggtgcaacatgacgaactgcgtcgagccccaagctacgaaggccaagggttgacatagcctgaatgatcacgctcaggccccacactgcccatgtcatccacaataaaaatatgagatagccagatgaccgcggacacgcatggctttaccccatggtaggcacacccaattttaccctcactcggtggctccttctttgacctataaaaggaagaggttggccccggatgaggggatcctagagcggacaaacggatggaccccagacgagaaggaagtaggaacccagaaggaccgatgaacaggaggaggactaggaggtcagagctccgccaccaagccaagatttatctaggactccatcttgtaaccaccacgactgtgaataagagacttgggagcctctcctccctctctcgcccgtttataacctctactacaagctttgatcatcaatggttccggtagcgcaggtcacgcgatgactggaagtagggatgttatgcccgaatcagtataaatcttgtgcccaccgcacacattgtatggatcccggaatgtgcataataatttcacttgtcggagcgaggtgcgaaacatcgacagttggcgtgccaggtagggggcttgcgtgtttcacgacgaagttcttcaagctccgtatggctggcaacgacgttgatgcggttacgacccccggaacaaccatatgttttaggagtcttgacttcgccgtcggctgcaaggaaacaatggacaaggccctagaagcccttgtttacatggcgagcaattcactcaacatcatcgaaagccttggcttcc

SEQ ID NO: 1112 - DNA, 355 bp, Zea Mays
gtcatcgtagtggttatcgagggtgtggaggtatccggccatgtagacaatggtggggtcatcctcggttggatctctccctgacagagcctggagtcttttcctccaggtgggggtatttttgttgctgggtgggaaataacgaaggggggttttagagatctcttggatgtagttttggcatagctgttcaagggcttttcgggctacactttggcaagtgtctgggaagcggtgtccggtgaagttgacttggaagggagggtggtttgggtagtttcggctttctcccaggtagactgccatagagcacttttctataccattctcgtggtattccttccagacatattcg

SEQ ID NO: 1113 - DNA, 356 bp, Zea Mays
cgatcgaggtagggtgtgtgggagaaggtggttgtgagctagagagcgtgcctgtggtgggggtggtgtgataggatgcaccggagtcgatggcccagtcagaaggcggtggagtcaacgccatggtgttgtaggcggaggcgagggcggcagggtcccagccaacagcgagcgaggaccatggtgtcgtggtagatggtcccataggcgggagcggaggtggtccgctgtaaggtggcatgtcgtaggcaggtggcgtagtcaggagagccagcgccggtgtcggaggacgggaggcgctgggggcttgacacgaccacatggagatggtgtcggtccaggggttgtagatcgac

SEQ ID NO: 1114 - DNA, 691 bp, Zea Mays
tgccaggcagattgaagttcccaattgctgctgccatccatccctaattgcatatggccacatctcaaaacacacactaatgcaaacacttggaatccgtcgttcgtacactggtttggaaggaaaaaaaacacagacacgtaaacggaactctgaaagttttcttctttgtcctccttttacttgacgaccacactctctctgctatgtgtgtgtggcagcgatcgagagggatcgcatcaccgtatcgccgccgcaacgaacgaaccgcttgctgccatccgcctcgtcgggcggaacgggggcgatgattgacgacgacgattcacgtatcgtcacacgtctctcccatcagacatgctagctaccactacagatgcatgccagcattgttcgtggacgaaacctttgcccaccggtagtactactactaccaaccaaaacatgcatgcatgatgccgagcgggagaaaagctgctgtttggctcgggaaaacaacaagggctattctcattgctcgctcgccctcctgcgtcaaatcacacggaccggaccaccgtacgtaccggccccctttctctgtctgtctttctttctttctccctccctactggaggagtacacacacagacacactccctctctctcttccttcatgcatcattggcgaatatttacattgccatctctg

SEQ ID NO: 1115 - DNA, 507 bp, Zea Mays
aacaaatagcggcaaaatacacctgtggcgcgggggcacccacaaaaaaggtctactctaaggctagcacccgttccccatcgacaaaggggggagagggcaacatttcacttttatttttgtcgatcggagagaaccgccaacactgccagactacattattagtacaaaccgctctcagcgttgacaaagtcatcattacatattcatgaggtcccacaatcaaggactcgggggctcctccttctgtataagaccagcctccctatattcacggaacatgatctcaagctcccggacctcgctaaatatccgaaagaaaaaacatcaaaagcacagctattgctatcagcccccaccaaaactcaacggggacctaaatcaacatcgccaagttcgttgaccttaatacacacatcttttctcgataaggaatcaattgagatattcccagcatcgaccccaacctcgccttttctcagaaccatccactcgcggagggggccc

SEQ ID NO: 1116 - DNA, 819 bp, Zea Mays
ccactataccctacaaacggagcaatcggcttaagtcggcgacgacttaagacggtgcaacatgctcgcacttactcgacttagggtgaccactataccctactaacagagcaatcggcttaagtcggcgacgacttaagatggtgcgacatgctcacgcttactcgacttagggtgaccactataccctactaacggagcaatcggcttaagtcggcgatgacttaagacggtgcgacatgctcacgcttacttgacttagggtgaccactataccctactaatggagcaatctgcttaagtcggcgatgacttaagatggtgcgacatgctcacgcttactcgacttagggtgaccactataccctactaacggagcaattgacttaagtcagcgatgacttaagacggtgcgacatgctcacgcttactcgacttagggtgaccactataccctactaacagagcaaatggcttaattcgacgacaacttaagacggtgcaacatgctcgcacttactcgacttaggttgaccactataccctactgacagagcaatcagcttaaatcgacgacaatttaagacagtgcgacatgctcacgcctacccatcttagggcgaccactatgccttaccagccaagcgaatggcataagtcaggaaaaactccaaaaccagcacgccacatttacttccacaattgttcaggatgactgttatatcctgacgacagaaacaatcagtgctctaggaaaacaaaatgttatagttgtcagcaccaaggacacattctaatgccctatccaccaaatattcg

SEQ ID NO: 1117 - DNA, 385 bp, Zea Mays
gggtggtggaattgatttgcctcctaatcgacacactcggtggatatatagacaaccccagccacaaccagcagagatgaatcctcctaatcctccatcaggcggtgttgacccactgattgcagctcagatgaggatgatgcagcaaatggcggacactatggcagatatgcgggcacagatgcagcaggaacgccaggagatgcgccaggaaagagaagagatgtgctaggagttgcgctaggagcgagaagagatacgccaggagagaagggcgcaacagcagctgcaacaacaattacaacaacagcagcaacaagtaccattgcctcccccaccaccaccagttccacctcgggacaagcaccgggaattcatgagccac

SEQ ID NO: 1118 - DNA, 597 bp, Zea Mays
ctcgaccacacacaaataaaaatccagggacaccagcacatcgtactacccaagtgcagtggcctcctcttgatgaagtggacggggatgaagtagtatgtccaggcacaccaccacatcgtaccgcaggagtgggcggggatgaagaagcgggcgtgggcgcgcagaagaggatgagtacggggacaggctaccaaacgcagatctgacctgacccaagtgcgtacagcggtggagatcacaggcgaggatggttaagacgcggcggcgaagatccggggcgagcctgggcgagggcgtgcggatgaggatgaggacgggaatgggccaccaaatgtagatctaacctgacccaagtgcggacggcggcggagatcacgggcttgggtggtgaagacgtggcggcgtagatcgcgggaaagcgtgggcgggggcatgacgcgcgtggttgacgggggcgggggcacggtgtagttttggacgccctcgttaggctcatatagaatagtagagaataggtatatgcccgtgagctgctacaaaatcgatatgataaaatagagcaaaaaaatatgcatgtgtttcctcaatgtagat

SEQ ID NO: 1119 - DNA, 783 bp, Zea Mays
gccgactcggccttcaatttatagagggcttaagcggtggtgctcaatttggccaagcagtgctggcggccggaggggagaaagagtactggcgcaacgaattcgtgtcccacgccgtggcagttactctggtgatcaacagagagcgagagcaggtcacgacaatgcggtggaaaggtataaacacgcggcacgaggccgagaggcggcggtcaccggcgtgcttatcggatttcactacagtgagcctggtacagcggccggatttatttactggccgaagttatccacggcgatgatctttacacgacttcaagtgttatccagccgatctggtcacgaaacacggtggcgagggcacgcatctacgagcggaggggtcgtcggcggtgagattgccatgctggcagtctaatccacttcggtttactgtaccatcgaatcaccatcagacaacctgatagagcaagttcaggtccagatttctccacattttctatggtaccaagcccaaacatctatagcaaagttgttctactacaaaggatctacaatttttctatatcgacctggggcaaattccttgaagatcatgatctgtagagctccaaagatgacccagtaccactgttagtctgaatttcagactccaataacctgacagctcgactttgagtgtgtttttcttccatttcttcataacaactatgcttacactcttaagcaaagttgttcccctttcatagagctacaaagttgatgtggtgccctaaggtgaattct

SEQ ID NO: 1120 - DNA, 594 bp, Zea Mays
cttcgaccgtggttgctgaagataattctgatgattccgtgtctaagttttttgagtctggtgattctaggagttcggttgtgtggacggaagagtcctcggatgaggacttggattattttgcggcattggatgtggctacggcggaggcttctccacgtgtgatgggtgctgaagttcttcctggtgcgagtgctaggcgtaggcggcgaatggcggtggcgaaacggagaattagtgaggtgtcacgaagtgataggcgtcattgtggtgaggtggagggtggtcgtcttcgtgtggatgggtctggcaaacgggaattgttgtcctcgccggctggggcgagtgtaggtgagggagagttgcgaagtctgtttgagggcgatgaattgaggataatgttgttcaactatagggagatgggtatcatcctgaaggttgagccgatgtaatgtgtgatgccctcgctgcatttatgtaactataatttgtatgatgaggctgtgtgccttcgcagatccggtcgcgcccgtagaatacttgtgcacttgatcttgcgcgtttattgtgttggtctggttgcccctatagtcg

SEQ ID NO: 1121 - DNA, 359 bp, Zea Mays
attccatggctctaacaaacttgtgctcatgcccaagcagcagagctcatcagctgcagcttctatgcttctgcttggccctctcactgcatgtcccttatcatgccaattctctctccttcagctacagcttcttcaaccctgatgacttcaggccggaggacgacgcgcaggtcgtcgatggcaggatcgagctgctcggcgacgagttcagagggcgtgccagggggcgggtgtggcacaagcagccggtgcagctatgggacggcaccaccggcgaggctgccagcttcaccgcgaacttcagcttcagcatcgagtcagtggctggcaagggcgcggcaagcgctgggcacggc

SEQ ID NO: 1122 - DNA, 650 bp, Zea Mays
catgcttttccacaaaaccagtggctatgaatgaatgagatgctcctgaatcaaaaagtacagcagcgggagtaaattcaactaggaactcaccgagcactactcccggggcttgctgagcctcttgagcgtcgacgtggtttactcgtgccctgccatgatactgggtcttgcttagctggccgttggaggatggtgccttggaggtgggtgctagggcactcttggggccattcaccaagttggagtaggtaggcacgaaagtcttcaaccgaggacaattattcttgtagtgaccagggtctccacagtgccaataggcattggctggaggttggttgcttgcaacggagggggcctggagggaacaaagaccctgctgactgaaacgtgacggagtggacccgactggcttgttgaagcttggtcccttgggtggaaacccaaaagatcgaactctctggtgcctgtcctactgctgagctcggaggacctgaaacttcctcttgaggtgacccttttcttcttctctagccctttccacttgtatggccttgtttgagaggtgcgagaagctgataaaatcttggctgacgaggatagtcttgagttctggtcttagccctttcaagaaacaagccatctttttg

SEQ ID NO: 1123 - DNA, 318 bp, Zea Mays
gtaacttagatcaactcggccatacccaataacctgacctacataataggttacataacctatcccaatcattcagaagcgaaacaaccaaaccagattatgactaatatcatttaacttatagccacctactaaactagctgctccacctactactttatcttaactacatgtccctaattcggataacaacttcaagaacgaagaatcgaagatgatcaacttcatcaagaaaggatgagcaccaactcaagtcttcaaggatcaagtgagatcaccaagattagtcaagatccacaatcttggatggagtctttc

SEQ ID NO: 1124 - DNA, 966 bp, Zea Mays
ctcagattcctattcctccatgcaagagctttacgtccgtccgtttgccacatgagaatggccggctggtttagtcttgaatcatcatcatgattcagtacacatctacctttgctggcgaccaacattagcctggtgcagtgcatggtctgggcttgcatgcatgcaatgcccccgggatctccgttcctatctcttgggttgagatttacatatgaagcatagctgaaaaggttgtggtccgccgcagcagatgctgaaggccccaggtatgtgctggagcgtgtggctgttgcctcgtctcaagtcccggctatatgtccccatgcatgcctacttgtctgctgtcgaaacctctgcggacggacgttgcatcgtttcagaattacgtcacatggtcatctgactgaagagggttcacatgacgattcatcggtgcagcttggcgtggaagcaggcatgtgagctgtgtgcccctctacgcctgggcgtcgtcacatgaccaggtgaccgaccgtgacgcctgtttctccctacagcagtcaagtttgttctgtcgatcatatgatggtgttcaattccttggagcaaattacccctctcccgggccccggcagtaaatacacggttcgtgctctattgtttatttgcgtgtggaaggaggtggttcagatgacccccccccccccccccccggatttaccgagaatcccggccgaggtgtgtgtgtatgtgtggtggttatcttgattcgccaagtattactattactgtcactgtcagtctcgaaaggaaagaaagcgagacgaaattatggactgggcgacttgtgcgcctcaacaggtactctgtgcttcacgtcttgggaactgctggataggttcattttacgtgtctatctgcgggtgaaaatccttcctctgggaatcttgtcgtggctaatttgtcgcttacgattgcaattac

SEQ ID NO: 1125 - DNA, 616 bp, Zea Mays
gacagtttgactgatggcgcgggagagacggcgtctactcgtcccatgctgattcgagcacgaaattaacgtgtatagtttagcaccaccaatgcttgctatgcaagccggcgcctgaagtaatcggatcggatcggagggtctccatccgccgtcaccatccatccgccgtcaccatccatccgggaagaataacatgtggcgagagtactgttttcaaggatgggaaccccctgtccgtacgccggggagacacggtttgtacgaaacttcacacctgccgttccctgcgtagtatgtactgtgtagcacgaagtggtcttctttccaatgtgtagtgcaacgaccacatctgcgcaggcggtttgggttgagtgccagctgtgctgtcttggggactagttcttgcttctttacttcgtgtagggtgaccgaccgcgcatatatgcgtggattgattgatgcttctgatcttcaccactataatatctagtacaatgcatgcgctttgacacttgacattgcccgctacttcttgctagctctagtgcgctatggtcgtgtctttgagatttcccccccttttccgtgtttacacatagattttacttatcac

SEQ ID NO: 1126 - DNA, 453 bp, Zea Mays
gtggttaaatggtaagagaattaaagaccttgctctaagtttgtataattttatacccaagaggattgtcaatagcaggactatttatgaggcaattacagatagaaaatggatctctgatattaagggtccgctgacagtgggagtcttaacagattatctccagttgtggaatatgacttcagcttggcagctgcagcctgaggttaaggataaacatgtttttagtattgctcctactggcatctattcagcaaagactgcttacgaaggtttctttttgggatctgtggttttccctcatcagaagaaaatttggaaaacttgggccttgccaaaatgtcgcttcttcatctggctggttgcacaaaatagagtctggacaacagataggcttgctaaaagagggctgattcatcctgagaagtgccccctttgtgatcaagaggatga

SEQ ID NO: 1127 - DNA, 337 bp, Zea Mays
atggcagagccgtagagctactgttggctctctctcccaccttcgcgcagcttctctccaactgggcacaagcaaccaaagccacacgagcaccatggccaacacggtggcctctgcgtcggttgggacgagctctgcgatcacacattcaccgccgtcggcaacaagttggtcctcgccggcagtggtacggtacatgggtgcgggaatgaatggaggagacggcacgcgaacagtgtttagcgagtggtcgtacgtccggcagatttagcgtctcggaggcagccgctaaattttagcgtatggtttagagtctcttgctggaggcgtagagaac

SEQ ID NO: 1128 - DNA, 360 bp, Zea Mays
gcaacttctcccactcgctttaaaattaagaaaggtctaataaagcgagggacaactttcctttaactttaaatctcctcataccctggatcggtgacaccttcagatacatgtgatcaccctccttaaactccagtagtctccttctattatcagcgtagctcttctgccttgattgtgcaattctcaaattctctcttaccatttgcacttgctcttctgcctcttgaataagcccaggcccaaagaactgtctttctctagtctgatcccagtatagaggagtcctgcattttctgccatatagagcctcaaacggtgacatcttcaaactggcctggtagctattattataagaga

SEQ ID NO: 1129 - DNA, 372 bp, Zea Mays
gtgagttccttgttgaatttactcccgctactgtgcttttcgattcaggagcatcccattcatttatagccactaagtttgtggaaaagcatgacatcccctctatgcccctagctatccctttggtcacccgaaccccgggatcagacctcttatgccaactcaggtgctcccaagtcagaattctcttaagtggggtagtgttcttggcagacttaaccgtcttgctatcccaagggattgatgtgatcctaggaatggattggctcactaagcacacgggtatcatcagctgcgcaagtaagaccgtccttctcaccgatcgccaaggaaaagcagtttcctgtcaagcccagccgcccacaaacgatc

SEQ ID NO: 1130 - DNA, 1083 bp, Zea Mays
aagagggttacaccagctgtagcatcaggaatccacactcaagcagtgagctttagctagaacttgagggcagagaggaggtttcactgaaccaagtttgtagtcactgaacatatacgcacagcaaacgggaggaaaccatcgagcttagctacaactagatgaagaagggtcccaggggtgccagcgcagcaggaagtcacaaacgtggctcccaagcagcagccctacacaggttcacatgcaaggtcccaagacacataatttggtctacctctcatggccaaaatatcatctttgtctcatactacagacaggagaaggacaactgcgaacaccactggtggataaacactaaagggtccaaggtttgatattttgcagggggtagccaccagaacctttgtcgtgtagcttacttcaccaaggaaccagtagataagactttaatgctcccacaatagttcaaacttggatattttcagtagagttgagacctttagtacctgagctctatacttcatccatatctcagctcaagcacataagcgaagtacagcaggaagataaagatctccagttttcagactagcactgacttaactaaaccagccactgctacctcggttgcagacctccctatcgaggccccatcatttcacaaacccctatggcaataggccagacttacttaaccaaagctgccctccaaacacagctctactactttgttacaacaccccaggctacaaacttacagatcaaaagttatgatgccccaaacacagcaaaagatcactgaaacctccaagtttcagttactgaacagcaaaacctcaacttgacagggaacatttggacacaacttactccaagttttacatagcaatagtgagatcatgtttaacaaaacttgtcgaccaaatgaccctctaccattcctccatagggaccttaggcttaaaccccttggatcacacaaagaagctccaaaatccataggaagacactgaaccaaaactcaaattactgcatcagacctgcacttcacatgtctcacaaaggcagtttgaacaccttttt

SEQ ID NO: 1131 - DNA, 513 bp, Zea Mays
aagctacccataatatgttgccgtcgatagcagctgatatcagtctctaacttcggaaggccaacactcttcgataaagtgccgactatcttcgcctcggtgcggttgcgaatacatcctaagatctcctcatcaaccccaccgaagagcaaagaccccagttggtatccgcacgacatagcaaattcttttaactccgacttctcttcttcagaaagctcctgaccgctcaggtgccaaaggttgaaatattctccgcccgaaggattggtatcaatttccctttctttacctggcgctgtggccatgtcctcctctacagtcacatctttaattacatctgatataagactgtcaatatctgacattgtagctccggcttcaccagcttcctttgcttcgacagcagctttagctttagcttcggcacccacagcagtcacggtcttagccgccgaagctgaaggcggtgttcgttcaatggcttgcatcacatttactattcgttgtttc

SEQ ID NO: 1132 - DNA, 429 bp, Zea Mays
gaaggagtccagatcttcctaggtggccgcagagcttggcagggactcccactggttgaggatttgtcgaataccgtgagccaatctgatcttcagggctttcgctggttgtgggtgaactgcaccatgatgaattggtggtagtggcgatggggctgttggccgacatggaacacatcatgtagtcgtgcaccctctgaaagttcgaggtggtaggctacttcgtttactacaactgccaccttatatggcccatattagcggggtcggagattgccgcgtgctgttgtctgcagggatgctggggataggtggcggaccctgagccacgcccaatcgcttggagaaaaggataactccctgtgactacggttgtaagtgcgtttggcgactgtctgagcttgctctgataccacttctgtcacccgg

SEQ ID NO: 1133 - DNA, 314 bp, Zea Mays
caaatctgaagttcatcccttgaacgtgatcaaggtcacgatggaggaccttacagaggcagaccggatggagattgaagaagaaatcgcacgagagatggaggagaaacggaacgagagattggcttgctttcgaaaaaccaagaatggtgtgatcaaacagattggtggggcaagcacgtccagcaagaaggtaagttcatctgtcacttgtgaagaactagctcacatgattgataccgccgtagctagcaaatatgggactgatgtcacggaaataacacacatgatttctgagggagtgcgcaattctt

SEQ ID NO: 1134 - DNA, 641 bp, Zea Mays
gttaaatgcatctaggatacgcgtgtgtccttaccagtgacaggcggcgtgcgctccacattaaatgaaggaggcatgtgcagttcgcaaggcatgggccacaccagtaacatgtctattatcgaggcgagaccattgactctctgcgtcgcacatgggcaactctcatcatgacttctattgttccctctacaaagataggcggaggagacatgtggaggggacatgacaacattgtccatgtacctccctatgcatgtcggcatgccaatctacgccatagcctacactagagccttcgcccacatgccgacaagacaaggcaaaggtgaatctagtcagaaaatcagcacggtgaccaagagaagacatattcccaccgcaggggaagaccttggtccaccagctctatttgttgctccacattattaaatttctaggcccacctattagggcatagtgcccatgtacgtgcctcccttgggctgtaaaagggaacgcacacgtgctacatgggaacacacacgaactcccttggagacatctccatccagaccaaagctttctcaagatctcagcaatacaactcacagtggagtagggtatgtaaggaaaatggacctcagcccatttggctaagt

SEQ ID NO: 1135 - DNA, 364 bp, Zea Mays
ggtacacccattggtatcaactttggccggattacacccattgggatcaacatcatcaaggtcacacccattgggttcagcatcagtcgggtcacacccattgggttcaacttcagcaaaaactggcactggcacttccttagcagcaggagcagaagggtcggcatcctgattcaagcatgacactcgacgaagacgtctctttttctttttcttcccctcagcaggagaggttggatgattggttcggcgaggacgcttcggatgaatactatcagacctctgaatatccacagctttgccagactcgggtatgggtgctacagccagtgtttcagtaggggctgcatcagatgaatcttta

SEQ ID NO: 1136 - DNA, 430 bp, Zea Mays
gctcctgggccgtttcctccccttctggcccatttccccctttcaacccgcgcactggcccaacttccacatctgcgccagccactggcatttgagcctaccccgtcagcctcacgtgtgtgcgcctgcgttgctccaagtcgatggcaggcgggacccgcatggcagctccatcccctctgtgcgggcagcttcatctacttccctgcattctcggacatagaagaaatcacgcccccccggccaacagacaccgtaacaaacgccacatagaatctagggccgtttcgacgctcggacccccacctcgaccatatatatttcttgccgcgcccctctagtcccccatggctgaaccatcgcgaccagaaaactgagcgccgaatccgccattgccgagaactggtcacttgttggccgccaccatgga

SEQ ID NO: 1137 - DNA, 590 bp, Zea Mays
atctcctctcctctgatgactccattgggttccttactgggctcattaattcaccccaacctcaaatgcaaccagatgaaatgcaggagcatatgggagcagtgctagctttgcctactgcacctctagagaacatggtggagggaaaccaagaacaagatgctgtgaatatgcagattgatgataacattcaagtgcgcctgagagacagatcgatctacacaatgtcgatccagcctatgaaggatacctggctagaaagcgtcacaacatatcggccaaagcaatgcccatgactagggccgatgtcatggtaaaagtgccacgagtgtgagccaatttctttatgggcctgctcctgaactatgactccgttgattgggccaagaagtttctatcttcaaatgcagtcatggccctcatggaacaaaatatggaaacaataccaatatagctatctagcaaacgcctccccctgctgcctcagagggatcattggaaaatcaggctctcgaacccaccaatgcagagaaaaggcagaagagagacattctagtggacacagaggttagaaggagcatacaactcag

SEQ ID NO: 1138 - DNA, 830 bp, Zea Mays
tgctacatggctaagtcgtcgagtgttgttgctctatgtcgttctggagcctcctctctttctgccttcggtctcggtcgacccccccacctttatagactaaggagagggctggttacaagtgtctttctccggaaggggtcgctgtgttgtggtaaaacgaggtgttttaccctcggtagaagtctgtctgtcggtattcgtcctcgtcgtctgggctctctagttgtgcttctttatgtccgttggggcaacgtgtgcaggcgacgggaagtttgagcgtcatcattactctctttgttccatgccaacccctaatctttgtagcctagccactagcatccatcgtcgtgttttaggctccatagggcgtcagggaactcatgcatatgatacgagtgtgctgcgggccaagggcttatatataggtcataagtggggctctggccaagggcgcgtaggccatgagtgggaggagaccagctcctttgcatgctgcagctaggtgccaggcgttgttaatgcagtcagccattaatggcaggggtagttcatcgatcagacgtagaatccactcgagtggcttctagacggtccgtccggcccctcttctagtttcgcctcgctcggtccctacgcttggtgccccgaggtcatccggggaccggtccttctaaggcggacttgtcctttgccttccttctgactcatgggctcctagggtcccgggatccgatccctgataggttatcaaacttaaaaggtagtcatataagcccttagtctattgctaattctcacttagatcctaaaactaaaaagcgagacca

SEQ ID NO: 1139 - DNA, 578 bp, Zea Mays
gcgtgatgctgcaagcgagaggcttgtggatcgcagcgagcgaggggacggagaactacgccgacgaccggaacgcgttggaggtgatctcgaaggcggtgtcgcccgaactgatgggtgtcgtggcaggcaaagccacagcgaaggaggcctggagcatgctgtgactcaggaacgtcggtgtcgatcgtgtgaggaaggccaaggcgagctcccccaagcgcgacttcgacacactcaggtttgaagacagtgaatccgtggacgatttcagcgttcgaattggacggatcaccactgaactggccgggctcggcgaggaacacacggaggaggaaatcgtgagaaaatttctgcaggctcttccccccaggtttgatcagattgctgcctcaatcgaaacattacttgatttgagcgaggtgtcagtcgacgaattggtggggagactcaaggcggctgaggagcgcctcgtgaaggaacgtggcgttgtggcgccgcgactcaatcttacggaggacgagctgatctccaaaatcgcctcgtgcctcaaggttgctggcgagggtggatcgaac

SEQ ID NO: 1140 - DNA, 473 bp, Zea Mays
gaaaaatctggcgctggggatgagcttgggacactgttccgccatggccatcgtacccacttgcctcacggctgatcagataacctcaccggagttggccgcctgccgctcggtgtcacgtgcctaagcgcaataccacgtcgcagtgactcgccttagcatgtccggtcatcatcggtggtcttgccacggtgaagtgccatggtaaccctgcaccagtaactctccccctccccggtcgccagcgcaccattccaaaatcaagatctaccgccctcgaacactataaattaagcatgccatcaactccgttgggtcatcacgaagctagagcacccgctcctgcctccgattagccactagagagctccaatttcttactctccccaaatcagttttccgcacatcgtgaaccaccgcatcgtggccagccttctgtaggttagctcaagcctccttgattgatgttctag

SEQ ID NO: 1141 - DNA, 414 bp, Zea Mays
attaagggcatgctttgtaggttcagaggccagtgtacttcatcagtgaggtattgtctaagacgaagatacgctacctgcaagtctagaagttgttctacgtaatggtcctggctcggtggaggttgcgtcactgcttcgagtctcatctcacgatggtggtttcatccttccctctgggggaaatcgtccagacaagggagcctcgggtagggtagctaagtgggtggtcaaactcatgggagaaactctctcgttcgcccccagaaaggccatcaagtcccaaaccctggctgactttctagccaaatgggtcgatacctacttgccgacaactccgatccaagccgagttatggaccatgtacttcaacggatcattaaggaaatccgggccaagcgcatgactgctctt

SEQ ID NO: 1142 - DNA, 540 bp, Zea Mays
ttcaaatttaagatttaaaataaatggaaaagaaaaaccagaaaagaaaagagaatctaacctagctgggccgatttctctccctgcggcccattaactcgcgcaacccgcctgcgtccccacactttagctgaccagcggggcccaaccgtcaatccctttatctccgcttcacctccgcgcggtcgcgccgttgccgctgactgatggggcccttgctgcgggaccgtgttcccctgcgttgtgactgttgcgcggggccgcactgtcaggtgttcgtcttcttcaccggatcctccgcatctgccgctgtcaaccaagggcacttcatgattctcaaccgtggggtcctcgaatctggcagccttgaccgcagtataaaaccctagtattccgcaaaccatgttccttactcaactgccttgaccgcctgggtgaagaagggactctagggaagctcgctccgcacaggcgggtggagtgggaaggccatcttcgccgctccgatagtcgtaagtcttctctcagacatgcacctac

SEQ ID NO: 1143 - DNA, 441 bp, Zea Mays
accaattctggcccagacacttgataggctcttttagaaatgggggcagtgccagggataagctctatggagaattcaacttttctctcgggtggcatgcccgttagttccttgggaaacacatctggaaagtccaacacaaccctgatggccccgagcgggttggcctccttgctatcaaccgaaatctggtgacaatctcctttcgctgttttaggcatccttagctcagccactacctcttctcccgggcggggacatcaatgttacggtcctcttgtcacagctaacattcgcttcatatttcattaaccaattcatccctaggatgacatctaccccaggggtgtctattactattaggtcgctagggaaccctatcccccttatttcgacccttacatttgagcatatcttatctgcttgcactttaccaccgac

SEQ ID NO: 1144 - DNA, 407 bp, Zea Mays
caagccccaaaagaagaaggcttcaggggcccaccaagtctgcgtcgctgcttagggcggtgagctgagcctcgagaccaacgtgtagtcccagttgttgccatagagcgtcagaaagcattgccatatatcgaggataaatcttcacgatttaactatgtgtatggtagtcaaagacatggttgaacacttcaatagcgagcaagctagaggcaaccttaggatgaacttgaagcgcctccgataggcgatgatgcaatcagaatggcagcacccacgccctcaaggcaacccctaagggctgaacaacatgccttttaaggcaaagcaggtggacctgggttttaggaccccatgcacacaatgaccatgatctatggggccatcgaagagctaaactcatgatg

SEQ ID NO: 1145 - DNA, 858 bp, Zea Mays
acggtttgaatgtttcacacactttcttcctactcggttctttgccacagcccacaggcgcaaaacaatgtacaagagactgaagagagtgagcagcggaaatagtactagaaaaaaaaagaggggcggaccagctgccgctgctgactgtagtgtggactggcagtagtagtagtgctgctacagcattcagcggcggcaggtgcagtgcagagtgcagactgatctcgcgcaagaaaacaagaaccagctccctccccacccgtggcctgcctgctaccagtacaaatacccgtgcctgcgcgcatccccctggttcattctccagctagcccgggctcaggagccagtatcccaacaagctgcaggtgcagctatataaaaagcgagcagctcggacatacccgcaccaaaaggacccaacgaagtccagccagctgagctgagcctcgtgaaccagagcatttgctccttcctcgtcctcctcgatcgacctctctccttggtgccgctgccgccatatatgaactgctagcacgcgcagcagccagcagctgccgaccggcctataatcagaaggccagaaaggatcgatggagaccatcaagtgctgcatcgcgtgcatcctgccgtgcggggcgctggacgtggtgcggatcgtgcactccaacggacgcgtggaggagatcagcgggggccccgtgctggccggggagatcatgaaggcgtaccccaagcacgtcctccggaagccgccgtccacgtgcccggccgacggcggcatcgtcgtgcagaagcccgtcatcctgccgcacaatgccgagctgcagaagggcaagatctacttcctcatgccgg

SEQ ID NO: 1146 - DNA, 373 bp, Zea Mays
cgaagcttaaagccagcaggcacatgaccatcgtcatcagttccccctcttcttctcattggccttgacataaaatcattcactcttccagccggttggccatttggtgcggtagctaagaactggagccttcgtatccttgcgatacgcgaaattatagcagccaaaattttcatgcagaccgtctgccctggccttcgtttggtagtgcaactcatgcactcggcataattcttcagcatttgggtccatcccttagcttcagagggcctagatgaagatgatgagcctaacgatagcattaggggtcagcggatgaagataaatttcaaagtttttcaaaacttctcctatcatttcgttcaaaggaaac

SEQ ID NO: 1147 - DNA, 434 bp, Zea Mays
gacgagagaaggatagggaatagaagaagagagagggggtggtcgatgaggggggaggagcgtcgggccgtgggccgtgacgaccgcgacgcgacatgtggaggagcggtgcagatgcatggttgttgtgtgggcgagcggctgccgttggatcctcccgtcagtcggggcaggtttgaccgggacaccaagtcggcgagggaataccggattagcagctccctcgcgcaggcacatgcccccatcatccccgtgtacacagttgcagtcaaaccctcggagccgggtgctccaaactgcacacccaacccctacgctttcatcctcaccgtgaatcgacggcgccgtggatgccatgatcgcgcacatggaggggtgcaaataccgcttcttctcctaccatggttagtgacgccggatctggcagtttctag

SEQ ID NO: 1148 - DNA, 418 bp, Zea Mays
ctccggttatcaattcctgctgccatctacccccgattcacggcttatgcattaaagggaaagcggatgaaggttaggaccttgtcttaccggagagaaggtcgcggcaagggtggttcgcggagtcgtcgggtatccaaccggaggtgaccacagtgagcaattcaccggtggtagagagtcgctggccctaggtgaccactactccacttactacggcggtcaaacgttatttcagggtgcgggatggaggtaaattttcaccatgttcgaggatagctagcggcggcgaacttcctcctccacggcgcatggtgccgaggattaggtgtggtgcggggatggaaatgcgggcgacagttggagggctttgcaccgatacttatgcatcgcgctataggggtccggcatggtggag

SEQ ID NO: 1149 - DNA, 717 bp, Zea Mays
ctgaggtgttctatgttccatgagttcccaatttccgtgtcgtccatctgagtgagacgatatgatcccggccgagtgacttctgctactatgaatggtccttcccatagaggtgacaatttatgccgtccctcccccattagaattcggcggaggacgagatctcccactgtgaaggatcgacgctgtatggccttatcatgatagcgcctcagagtttgctgataccgtgctgattgaatcaccgtattcagtcgctcttcttcgagtacatcaacatcctccagcctagtagcttcagcttctgctatgttttcaaagattaacctcggtgccccgaacttgagatcagcaggtagcactgcctccgaaccgtagaccataaagaagggagtatttccatgcagagctcagctaggttgagttctcaggctccaaaccacatacggcagctctctgatccactttcctgcgaacttctcattcttgtcgaagactttctttatgagtgcttttaatatcatcccgttggctctttctacttgcctgttggctcttgggtgcgccaccgaggcatatttgatctgaatgctcttttgctcgcagaaatcgaagaactctgaactggtgaagttggatcccaggtcagttatgatgctattcggtatcccgaacctgaatattatgtcttgtatgaattccactgccttagctgaa

SEQ ID NO: 1150 - DNA, 492 bp, Zea Mays
gggatgagtacagtgcaccgcgtagcacgggcgcactgtttcggcaacggactagacaggtgcgccgtctgcagggtggccctagcgccgcctgccagtggaatggacaggacgcaataaatgtcgtgggggcacatcgcttgtcagcggggtagtcaggcggcacgtcttctccacaataaatgcaagggcagcgtggcccagtggtcttacgtcagacctatcccgcaagcttacgtcacgcacagtaggccacttggctgcaccagatctttgcctggccacgttgtgtggacaggttcgcacccagctgggtctggacacatgtcgcccccggaccccttcctgggcagggtccgggtattatttgcctcagaatcccgggatccggcggtgagtagtccagacctcacttagaagggtccgggacccatctcggaggtccgttcgccacgtacgggggcccgacacttttcttgcagtaggtccaga

SEQ ID NO: 1151 - DNA, 457 bp, Zea Mays
gagccgctgcgtcgcgtgggcaacaccaaagtcgctccgatccgcggtgaggaacatcccatatagtttgtcttgctcccctctttgtttcacacgtgttcgcgctaaggttgggttgctggtgcgctgtgccagtcttccctggcatggcctccgccgtgtggatcgggccgcaccaccgctctggtcgtctggggaagaacaagtcgtggccctagatctaggagtgaacggtggtgattagatcacaggagtgttgcgcctcgtccatagatttaggatcggtcggccggtgttgatcggaacccgcatgtgatccaaaccgtagatcagaaatccgatggctatttccgcgcgctggtttaggatatcgacgatctaatctaagccctaggattttgatcggacggcccagatttgagaataccccttcggcccggatgtttcgcaaatgaac

SEQ ID NO: 1152 - DNA, 574 bp, Zea Mays
gtggaggagaagacccgacgtggacatccatggaggtatgagaaggggagcctgctcggacaccctcaggggctgggtcgtagcctgcattgcccatcggagccgaatcaccaccggcagcaccctcgggggctgggttgtggctcgcactacccacccaggccggatcattgccggcaacacccttgggggctgggtaaccgctggcgccatccttgaagaccaggttctctgcaacaaccacctctaaggctgaaggattctcagttacctccatgggaatggagcaacctagaccaacttcttgactctgaagaccgcactccaaggtcgatgaggctcgagacgctgctcgggataactctaaccccacatctcgaatgtcagtgcaaacgtccatcataccaccatctgttggctcggacagcagatcttcaggaaccatatcctcgagagcctgatcaaaatttgctatggacaactcttgcggaccaacgagtgcagacaaggctggagaaggaatatcactactcccccactgaccaggtagcgccgactgtttttccgaattaag

SEQ ID NO: 1153 - DNA, 1891 bp, Zea Mays
gaggaaaacttgaggagtctactcaacccttgctttactttccacaattacattcgtgcaacttactttgagtatttacattcttagaattgccatgatagcatagggttggtattagggtgcaaaactctgtgtacaaattaggcactcgggttatgttgggcttgcaattaggatttaattatcgcaaaaaaatagagaagcccaattcacccaccccgttgagcactgtgaatttgtgatccttccaaacctcacgtcgggctactccatcgccctccattgtcatcagttttgatctggtttgccctatcactgatcggggttgagtcacccaccgtctgccaacctcacgcatgtctactccattggtatcgactataccaccatctaccttcgactatgcgacctggtcgagcatgcgctactaaggagacaccttcctgcgtcgcttctcgatcatcttgtctgcacgtctcggccaccacttatcgagacgcctccactgacttcttccatcgtggacccacctcacgcatactcggtttgaccaaccggtgtgtgcgatccacccggctcccccgtgacatccatcatcaagtactacaggcatcttctccaagcaatggttgttgtgagcctccttaagccatagcatcgttgcccgtggttgccatcgacaaagacaggcatgcctttgtccacgtggcactcaaagctacatctacctcgtcatcctatgtgcatcgacgaccgttgtgcctcttgtgcgacacttatcagcacctaatctttgtcaagctattcgagttttccattactaacattgagtgctaacgtcgtcgttgtaccttatgtctgaaccgctgcctttgggcaagcacgtccacctggattgctcgctttcagttagacgtgtctctgcctctacacaacttattcatctagcacaaccataccctcagtgtcgtcttttccccacctacttcgtctactccaacaaccacgggctgcgacggcaccttctaccccaccattttgcgcaccacaactttcgtcgcgacctcctgtgttggtcccttagacattgatgcatggttgagaccctctacctcgtatttctagtattagcaacaccggtacgtgcttcatccatagtgtgttcctaggcaacctcgatgcacacttcgtcctggcagcttgagtacatcaaccctctttcgattgtgtcgatgtcttcttctacttcctcgatggccctaactatgtcgacccggcactgaccccttccacaatgactgcctcaatgcatcttcgtcatcaccatggcatctcttcgcgcctacggcttcatgtgcagccaccgtgacatcggctacctcgactgttacattgatcatggctatctctatcatgatatccacaaccacggctcatgcgctctcacgctcaactactttgacgttggcacaaagggttactatcttgcatgatgactcatcagcttctccagccactccataagtgatgcatcaatcgttatgactacaagaggatgttagcttatcaacttctccagtttcaccgcctacgatgctcccactgtgactacaggggcatgttagagtaaataggtgtagtaaaacattgttcgtccacatagggtgttagtcctatgtactctataatcatcaacccatgaggcccaatgcgatacaatgattatcccaccaatctgattcttctacaataggacaataaatggggttaacattcataattcataaatgaagcagacatttgttttggcataaaaagcaggtatattaaataaagacgaacatagattgtaagagaactgaccttccaatggcaccaataacacacattg

SEQ ID NO: 1154 - DNA, 328 bp, Zea Mays
caacaaggacgtgccatgtcatgatccaaaagcagaaggaaatcgctgaagccaaagcacgataaaatcagccgaagcaggtcttgcatactgcttcatgctattcgccatatatccctgaatatgtgggcatccagcaacccacgacatcagttccttcggcaagtcattctgaagctgcatggtctcagttaccaccacaaccaccactagcacctaccttgggtcataatcagtagccagaagggcatcgccaggcgcaacaacagcgcgatactcgagaggagttcgaagctcgcacaatcaataacactatgcccaaatcaag

SEQ ID NO: 1155 - DNA, 536 bp, Zea Mays
gtggaaagggagaaaggatataaaaggaggccactgcttggttggatggcagagagtgtgtaggccctatgatcttgggggtcttggcatctacaatattgaaacattgggatgggcaattgggtgttaaacatgagatggttgtggttgcaaaagactcaaccaggtcgtccttgggtaggtcttggtatgcagttcattctagtgcaacagccttatttgcaatctccatccaatctgtggtgggcaatgaaaaaatactcttttttgagttgatttttggctgcaagggaaaactttatccgatttggccccggatttagtttcagcagtatcttttagatcacgcaagaagaggactgtacaagaagctttagttaacctccaatggtcagctgatataagggatgatctgacccaacaaggattctatgactatttcaggttgtgggatattctgcaaggggtgcatctctcccctgaagtagatgatcaacatatttggaccccctcggcttctggtgtttattctgcta

SEQ ID NO: 1156 - DNA, 818 bp, Zea Mays
agatctgggcactgcaaatttctctgtcaagcgtcctgataaggtttctgatggtactgtacacaaaaagatctcaggttcagcccccctcgctgccggtgaccactgcgcaaggattcgcgctgatcgcagcgattcgtgcaggactcgggcaggataataccgggcgggtgaaaggatcggagggggagcggatttggtcgcggggtgaagcttatcaaccgcgcctatagccgtgcgacgtggccggaccaccggtgtcgtcatggaaactccggcgaccttaattatgccacgctgtggctctttactgcgcagtagtaaccatggcacgcctaggcttaccatctcagaactgttgcaccggtgaacgccacaactgagccaccaatgaccttcctctccagccgccagcacgccatgccaaaattaggagccaccacccttggaaactataaattggtaccctgacctgctccgctaagtaattgtgcacccagtgaaccagccctcacctccaatcatccctcacaactccccaatttgggatttcccccaaatcagtcaagaaccctgccgtgtgtgagctcgtcgtggccagctctccacaggtccaatcatgtcctcctcgctcttgtttcagtactcttgtgtgctcttgatgcttctcgactcggccaattgaactagaacacgtaggatcaccaggaatgcctcggttcatccgtagttcgcgctgtcaccctggacagagagattaggagctagaactttgcaattgattgaggcgaaatggtcgttaggggtagaattaggtg

SEQ ID NO: 1157 - DNA, 549 bp, Zea Mays
attcaagatcatgggttgggtaatgctcttcatgacgcttgagttgctgagatgcataggcaatcacctggccttcttgcataagtacacaccctatgccaatgcccgaagcatcacaataaacatcaaaggatttctcaatatcaggctatgccaatactggtgcggtagtcaaaaacttctttagttcttcaaaagctttgttgcactcagatgaccacacaaatttgatatgattcttgagcaactcagtaataggcttagctatcttggagaaatctggaataaaacaatggtaataccctgccattccaaggaaactttgaacttgatgcactgtggtgggtggcttccattccagaatgtccttgactttacttgggtcgaccgcaacaccttcatcagacaaaatatgacccaagaacggaattgtatccaaccagaattcacacttgctaaatttggcataaagttggtgttctcgtaatcttgtcaaaacgatacgcaagtgctctgcatgatcttctttggtcttcgagtatatcaaga

SEQ ID NO: 1158 - DNA, 1077 bp, Zea Mays
ttttctacaaattaaacaagtttctgtatttatttatgcattaaaaactaatttctgatattaatttctgatttttaatgctctctggattgggcctcaaataccagaaagcgcagggactaaacaataaaaattcccgagacacagagggtaactcgagtgactgcgggttgattcttaaaactacggggtctctttagacaaatgcacggccgaaggggtatgattggttttcggccgtccagatcagatccagaggccaggaatggatcaagcgtgaaccaacctcacacccgcgtgaccgcccgatcaacatcccacggtcacgatttaaagaacctaaatctaatctgatgcatacaatggaggatcgacggctcggatctaaaaccgaagcggtattctctcttttaatcccaaccatccgttcgccatccagcggctgacggcctccggtcgactccgatcagcagtgacggcgccgcggcttcccccccccccacggtggtgccatgtctagacccggtgagcttctatcaccgacacccggtagcccgaccctagatcccaacacgcattatgcaatgagcagcataggggaagcggaaagagtagccaggctcaccagaacgacgacgtgaggtgagagagccgcggtccgcccttgacgcacactgttgtggcatgcggacgttccctggcgaggcccacggtgatcccgcagtcgagcttgcacggtgaacccgacggagtgtggctggtggggtctactgggttagggcgagttaaccaatgccagggcgggcgaaggccgtgagagcgtggtggtccaacaccgacggcgtgatgcgaccgcagggaggacgcgagcacagggaataagtgagggaggaataactgtgatggagatttatacggctgggaggtgcggtcatggtgaaacgtgcgtagtcgccatgcagtagccaccggcgaatttttagccgagcgtgccgtagaggtggttgagagagggaagggatagagctgacaaataggtcccaccccgcagtgacaccgagtcaagcacccgcgcgg

SEQ ID NO: 1159 - DNA, 499 bp, Zea Mays
caacaatgcaaatccaaccatcaaaagcaagtctatttccttcactctgccctccgagtgctcttttctttgcagccgctaccatagccttctgtacgggggatgaatcgactggagagattgggagaagtcattggacgaatcgaccggagagaatgagagaagtcaggggcttcttcatctccgtcgtgccaccatcttctccacggagttgacgacggccgccactctcgacgtccccctcctccaccgtccactccccttggcagtacactggtgtcgtccgccgcagcatcgtccctgcttcgtcgcatactcgtcgcgcagtcgccgatagggaccatccgggccgacgcctgctgacatctccaccgcttctctgactacttcgccatctcctccacgttcgacacatatacaaatgtcttttcccccatcggagctcagtacattcgagtgtcctcgctgttagcgtttgcaaatacatatgcattttctc

SEQ ID NO: 1160 - DNA, 333 bp, Zea Mays
tggttgctatagcaaggttgtaaacggatcattagacaacaactttgctactagccgatcagcaagttgccatgtaaatttaggagaaaattgaactcaaagttgatctgtcaggctgactgaataggggattccaatggtacagtgccctgaacaagatcgctgctgcagcgcacctgaccgccggcgatcgtgcgcctagatccacgccgccgttgcgattcgtgctcaccggtgaccggataatgctcctaggtaaaaagatcttcgcttggggataactccggtggctggccgccgtacccccttgtcttgcggccagcgcagataagc

SEQ ID NO: 1161 - DNA, 518 bp, Zea Mays
ggcgtacacccagtacggcgtatctgttgatcactatcccgtattcgggtcactatagaagctccggtgctgagatactttatgaatagggtcatccggcttcttgaggttgtgggtgtgcgtctagggccgtactttgggaggtgcggtcatgttaatagtggccacttggcatgctctcggcctatcgtttaggtgattgaccacaacttacggtgtcatgtttgtcttagtcggcatggacttcacgacgtttgacttgcgtttccaccttgcttctctttcttggttgggaccttggtggtcgtcccgcctcgcggacttgctcggctaggtcctagtcgcccactcgcctcacagacttgctcgataggaacctggttgttcgctccgtctcgcggactttcttgtacgggacgtgggtggttgccctgcctcacgctcttgctcagtagtgaccttgtcggtcgctccgcctcgcgaactcgctcggtatggacctgggtggtcattctgcc

SEQ ID NO: 1162 - DNA, 383 bp, Zea Mays
gacccaactgtaagatttatatctgaaaatcactaaggtttcaatattttaaaattgttttcttgacgtcaatagtaggaaggtcattcatttttctagagaagtgcaagatgttgcatatttttctacatcatctgttattttatagcacaattaatttgtcatgaggaactagcataggtattacttctctaatcaaatatctatgtgcttccaggaggctccaagggaactcttttcaaggtcccattcccacaagtctttctaatcttgtcaacttaaaaaaattgtgagtccctagtagtttttgtgattgtaggaatattatgttgcaaacataatagctatggcattaaccatttctatgtaacagaaggataggc

SEQ ID NO: 1163 - DNA, 465 bp, Zea Mays
gattattcatgtagttgaagttatcgagcagacaccgccgctggcatcggcgtcaaagattccagctattgagagcactgctgctgccgaagctgcacccaccgaagccgaaagtgtcgaagctgaaactgctgaagatgtgaatctatacgccacactctctgaaattgataccatgcttctggatgcggccgcggaagaagctgctacaaccgctgaagagatcccgggcacagtggctggaaaaggaaaggagaaagccgaggatatttcggaagaagaggacttcagttttcaagatatacttgggcaagaattgtcgaaagctgaaaaagaagaactgaaagagtatgctatatcttgcgggtacagaccaggtgcgttactcttcgggggagtcaacgaagaaagcttaggatgccttcgagaccacactggggcgaaggttgtcggcactctattgaa

SEQ ID NO: 1164 - DNA, 356 bp, Zea Mays
tcgggcgagtactggcaggtttctgagtatccaaagttgtatcagcctctggggggcgccactaccagtgccccagcaggagcagcatcagaagaatcctcagccagcaaatcaagcgtagcgcttatctctgcatcactagggttcaggggcacctcaaaatggacctgccgttcatcatcgggaatctccccaagcgaggcaaccaaggcactaacttcttcagcagagggtcgcactctaaggcccaaactaccatcagtgacaggtggatttgacacaaaaagggtgaaggctttgggaggaggcaggttccaggccgagtatgccactagagcaccaacatttgacacttt

SEQ ID NO: 1165 - DNA, 593 bp, Zea Mays
gtcggcacgccggccctcgcccaacccccccgcgcgctcacccaagtgcacggtcaagttcgccgcgcgccctcacccacgccgtgcctataaaccagccccagggcctcgaccgtactcccccacacgcttacagtcccgcccaagacagagttcgccggactttgccttgagcacgacgcgccaccgcccgccaagccacccgagcttcggctaccatggccagctcaccccagacacccccagtctacgccaatagttcaattagcttcgccagagacccgtgaagctccccaagccctcagacccagcagagcctcaccggagaccccgaatcaccctcgccggacttcttccgctcaccggcgaacgtggaccgagtaagtctctgcgccattctcaaattccttctgtgtaccacctctatgtcacctggtcaagcctcccaagctaaccaattggactatcacgctgtgagcaggccagaatactcgccaccgacaaactcccccacctgcgcacgtggaccggcctactccgaccatccccggagacgatccgcacatcaacgtgaccgtcacgacctcccctac

SEQ ID NO: 1166 - DNA, 969 bp, Zea Mays
acaaccaattttctagcatgagacgtctgaggtgggagagactcccgatgagcgggattttcgcctacaaaggaactcccaccgtcggagccaccacctcgcccaggagcatgaatgcgaagcagcctgacataacgttgggacctctcacggacatgaacttcttccttgtgacccgcaacctaagttcgcctagaccatgcaaattttgagtcatatcgggggtgtgctgaaaaagatggtgaacggtctacctcgcactcctggcaacgagtactaccggtggatcctcactcaagcggcgaaccacctcctaccatcggctcaccccgatggcaacatgcgccaccacatcaacaatcatcgcgacgcatgagccaacatcgatggatcacgtgcttgacgacatgaagaagagctaaggcgccaagaagaatatgagtggggccacgacgccccgcaatggcaagccgcagaccgagtcgactccaccattgccttgatgaacgacctgtaaccgcgccgatctgctcgggaccgactagaagatccacgttgcccgtcgccaccacgggaccaccaccacacccgcgcccgagacgattttcccaaagccgggggactattcgtggtcttgacctttactccttggatgtgggcggtccaatgcccacccaacttcaaggtctccaacatcgacaagtttgaggccaagctagaccctaggggttggctggacatctacacgacggtagcacaggccaccagggcatcggaggacgtcatgacagtgtacctcccgatcgtgataggttaggacatgctctaatgactacaacatcttctcgccactatgtcgaccgctgggccaacttctgctactacttcgttgctaattatcaatcgctctccaacaagcttgcccagtcatgtgacctcaagtcgatcatgtgcaacaatgacgagtcc

SEQ ID NO: 1167 - DNA, 380 bp, Zea Mays
aagaacaatctgattgaaagggaggacataaaagggattatccaacgtcctatatggtctcgcttcggcctccgaaggcctgctactgcacttaggaatgataccaaagcatgccagaaggccttcaataatatttgtgccttcattggtacaagagacctggttcaagagcacatagcctacagggtaggaccacttgaagataactgggagatgcaaaggagactgctgccgggtccagtcaaggtggtttgatttacttgaaatacacctttagatacagagaccagtttgacgaaccaaatgacgactggctgaaatgtgttgaggcgactagtgatgagttacttggagcgtacacaagagccgaagatgatgcc

SEQ ID NO: 1168 - DNA, 286 bp, Zea Mays
cctcgacctcgccaacaacaactacacccgctggcgtgatgagttccttctcgtcactagcaaatactccctggacagccacatcctcgacgacactcccgcgcctcacttccccgactgggcacgcatggactgcgttgtcaagtccttgatctccggctccatctccccggaccttgctgaaatggccatggaacgcggcgccactgcctgcaccacttggcggactccgggaatcgggaaacccacgccctccacctcgacgctcagttccggcacttcgtcc

SEQ ID NO: 1169 - DNA, 579 bp, Zea Mays
ttgcacggagagtcttttggaaaagacttcgattttgcgcacttattgtgctagtccgactgcacccttaggcgacttttgcgcggagtgtcgcacgcgagggtggtcagcgctgcccctcgcggtgacttcggtgtggtcgaatgccgaagaccgtcgatgcggtctttttcgacatgttgtgtcttagtttttgcggggggtttttgcgtgtatattacatggctccgcctcattaaaaacctcacccccgggaggaaaagagtgcgggccggaatgatactgtttggtgaattacaagggcgtgttagccctgaggattcaaacaaaaaatttacggagattatcgatattccaggaatgctccaggtcctcgccggatggcgttgttagcctatacgcgctgggggacgccttcgtcttgacgatgaaaggaccctcccactttggctccagcttgccccgtgcctctgtccgagttgtccggacgagtacgaggtccccttcgttgaattctcttgggacgactgtgtggtcgcgccatgcctttgtttgagcttggtatttgttgagggcctg

SEQ ID NO: 1170 - DNA, 670 bp, Zea Mays
tgtttttgtattaaaaacaaattgttataatcaattctctgtttttaattatctctggactgggcctcaatttctggaaaagtcaggggctctagcgtaagttttctaagactcagagcatagtgcaattggacggtgagtttattcttgaaaagtaaagggtttctttagcaaaaaggccaacgcaaaggggtatcagtggttttcggccgtgagatcaacagcggacggcttggattagatccatcccaccgcgaaccggtacgcaaccgcagccacgagatcagatatcgacggtttggatttaaaacgctaggatcacatcgcggctgtccatttacgatctaacggaccagatcgagacatggtgaaagggtacggacggactaatcacagccgctgaattaagatccaacgccagggagatctcccccaacctcccgacggcaaccgagcagaggcgctccggtcacggcggagctctcaccggcgccacaaaaccataccgcttcggcgacccgctatggctaagaatgtatgcaaaatgaaattaagggctaggcgaccacggtggggactcacttgtggtcgggcgaggtgaggtggcgcccgtcaacggagaagggcggaggcaggggcacgattgcgtcctgacggacgattcttgggt

SEQ ID NO: 1171 - DNA, 586 bp, Zea Mays
cttgtgttcatcttactctaatagcatcctttaggtcatgtgctcatcattatatatatatatagtttatatattgagagccttgtgctctcaataactgtagagagccccgaccaccaacactgaaccatataacgtaaaccgagccccacatccgaacccacgttccaggaataccgggtcaggcccactttccacgcggtcaaccgagcatatgtcctcatcgtccacatcacctatttctctaccctaaccccagtcgctgtcctcttccctcgccgactcgttgtcaacccaccataattcatcgtgcagcgcagcggtgactcctcgttcctccgcccctgcacgcttctcaaccctaaccggtgtcgttctcactctcctcgcggtcaaccggagtatatgcccctgtgctgccgccgccattcgtcgttgagccaccaccgcgcgactccataacaccaggtgcccgcatccctctcccaccaccgttgctgcattactctttcccaatctcaccgcctcattcttctgttccatttcttctccgccgctccgccgccgtatatgtgaggtgtccctc

SEQ ID NO: 1172 - DNA, 854 bp, Zea Mays
gaccagatccctgtcgagcaagtccgcgaggcagagtgactgactagatccctactgagaaagtccgtgaggcggagcgaccaaccagatccctgtcgagcaagttcatgaggcggagccaccgaccaagtctataccgagcaagtccacgaggcgaagcgatcgaccaggtccctatcgagcaagtccacgaggcggagcgatcgacgaggccctactgagcaagtccatgaggcggagcgaccgactagatccctgtcgagcaattccataaggaggagccaccgaccaggtccctgccgaccaagtctgtgaggcaaagccaccgaccaggtccctgtcgagcaagtccgcgaggtgaagcaaccgactaggcccatgtcaagaaagtcaataaggcacaaacccaagtcaaacatcatgaagtccatgccgactaagacaagacatgacaccccaagccatggccagccacatgaacgacagaccgagggcacaccgagtgatcgctatcgacatgacaacaccttcccaagtacggccctagacgcgccccactatcttaaggagtcggacgaccctaatcatgaaggacctcatgatcatagcttctacaccataccgggtgtacgcctacgcacgccaacgaatgacacaggctcgtgatggtgggcaggaccgcatgacgtatgactgctccatatgactgacctacggaccctccatgcactactatgagggtgtcagcaagagaccagcaataggaacccatatgacgagcggacaggatagtacgccatgatgggagtacatctacacacggccccacgaatgatgccagaagaactacgcca

SEQ ID NO: 1173 - DNA, 593 bp, Zea Mays
tgacggcgaaccgagcgaccaacgacaaggagcgaatagcgtaggaaggggcggtcatggggcaagagctcaaggttgcatgacgtagaggtacagtcgatggacggcaaatgcgtgataagtgctaggattgggaacgtgatgagcgctagtgtcgtcatgtcagaggtcaagcttaagctcttgagctattgagcatagtcatgtgctcgggtattgacgtagagaataggagagggggtggcatagccacgtaggaaataggggaggaagttgacggctgggctgtgagcactgggagtctcaagtctgagactgagactgacttaggaactagtgttttctctttatgtgtaatatggaccaggctaggccaaaaaatcaattattggtcaatttcggatatccgacatataacacgcaagtgggaaataatatataaatccatattcgtcccacttcagattggacatggatctgacccatgggtcaaaaatgtatctatgcccaactctgtcttgttggatattcgtcggatatccaaatccatgggtcaagttgccatccctaattctcacccaacctcttttccc

SEQ ID NO: 1174 - DNA, 488 bp, Zea Mays
agaacaggaaaagccaaattacctgaagattagagaagaatgacagaaatcccaagtcacgggaagctaggtggtggctcgatgaaggaatatcaaccggggcaatctgaagaacatcaccagggattaattcgacaccactaacaagcatcagaactccagcatcaggtgcgccgacctctaaggcgactccctcacttgaagcatgcgctgccagtacaccaccagaatgtggtggagaagacccgacgtggacatccatggaggtatgagaaggggagccagctcggacaccctcgggggctgggttgcagcccgtactgcccatcggagccggatcatcaccagcaacaccctcgagggctgggttgtagcttgcgctacccacccaagccgtatcattaccggcaacaccctcgggggttgggcaaccctggcaccatccttgaggactgggttctctgcaacagccacctctaaggctgaag

SEQ ID NO: 1175 - DNA, 395 bp, Zea Mays
gatttatcatttcagggcaaattatctgttggaaccatggtatcttttattggttacaccttcacattaacctttgctgtaagtagtaatttttgagaaccttttgtagtttcctgttatttcattgcatatttaattatgctgatcatatattttaggttcaaggagctgttaatacccttggtgatctgcgtggcacattggcttccgtagagagaataaattctattctttcagcgaaggacattgatgattcacttgcatatggtttagccaaagaacttgatggcaaagagtttgatgattccaatggagtgtatgaaaatggatctgttaacaaacatttcatgtcagagctgaaatcatccagtagctgtagtaatctagcctggtct

SEQ ID NO: 1176 - DNA, 909 bp, Zea Mays
ggggtccggtgaaaaatctctaagactcagcgcgccactgctatggacggcgggttaatttataacaagcccggggtttattttgtaattttggacggccgaaggggtatcgtgcactgtgggccacacgatcaggattcactggcctggattgaatctagtctttactgaaccggtacgcgccgaggatccttgatcacgaaatcgacggtcacgatctaatgcgcgaaggaggtatactaccgtttgatctgagccgcacaacaactatcccacgatccaaaccctatctaaccctaggtcgttcatcctgagatcaacggttctggtgctttctcctttcttccgctctctcccggtgagccgagcaccctctggcagggaatgcccacggccgcgccatatggccgacgaggtccgcggccccaaacccaaatcaaactagtctagccataaacggaactcaaggaaaacacaggggaatgatttcgccgaccgccacgcagccgaacacccccgaccatgatacgggcggcgcccgaacgacattccccgcacaaaggccaaatttgtgcccaattcgcccacgattaactacggcgagacattagctaggtaagggaatacggcgagggtaaagaattgagagctcaccgaacgcggaggtcgaattggcgctagacttcccacggtggatcaatgggtgcgatgacgaattccggccgccactggattgatttcccaccaatccatcaacgggtgatccaccggcaagcacccgaagcaccacgacacaccatggactcctagacgtcagccatgggcgaggtcaacaccggtgccccacccagcacttggccctcgctctctctcaggtactagtgtctaccgtacggattggggaagcgg

SEQ ID NO: 1177 - DNA, 556 bp, Zea Mays
aaccagtacatgagtgtatcctccttgagcttttttgaaaggtccaatcatatccaatccccagcatgcaaatggccaagttacggatatggtttgtagttgctgtgccggtagatgctgctgttttgacaagtactggcaagcttcgcacctctaaactaacttggctgcatcacttttcgctattggccagtagaaacctgatctgaagactttcccaaccagggtcctggatgctgcatgcactccacattgcgcagcatgtacctcatccagaagttgctttccagtagctgagagaatacatttcatgaggactcctgatgcgccccttctgtatagtgtttccccaatgagtgtatagtgagctgactgccttgcaatgcgctcggctgtatttttgtcatctggttcctcttcattccttatatatctgatgatcggctccctcttgtcatcaggatttgactctggttggctcagagtattgcattcttctgcccaatccactgaaatgctcgggcgcgacacttcttggacaaaaactccaggcggg

SEQ ID NO: 1178 - DNA, 489 bp, Zea Mays
gtgagttcttgttctgctatccttgctgttgtgattttcgcccgaggtatcatcagggtatagattgtagtgggtcgctcgagtatcacgcagaccaccgggatatcgggcggtgggtggcctactgcagggcgccaccgctagggtgttttgctcctcctggttcgcggctagaggtagaagatggcctgtgtgtcgtccgatcgtgtagcggcggccaggattgttggagggtgtcttgtcggctaggtgtaggagaaggaacgggcactgtcgatcaaggatcgtgcgaccagtgtgggatagaattgatagtgtgttgtggatcgtaggattcgaatccaacatgtgaggatgatctcaggttcataagtgtctcgggctaatcctggcggccgagttctgatcgaacgactctagcgcaaggataccccttcgccgagctgtttttcacatgggaccctaagtttattgagaatgaacctgccg

SEQ ID NO: 1179 - DNA, 539 bp, Zea Mays
gctcgtcgagcgcggtcgtttttgtagtacgtgtggatacaatcaaatggtctcaaaatgacttattttacatttggccatacaatccatttccccttttgctgatcaatatgcctccactcacacacctggcgctcttgatcagtcaccaggctgtggtagcgatgatgggaagtccaaatcccggctcgtgctggatccccattgctctttccttgcgggcatgtcacaggagagtgaggccgcgtggaccttgtcaggacatgcagccaaccgtttgttcctgaatgagactgcatctcgggctggaatggtcgccggtatggatggtgaggcggtctatgctcagccaaaggttggagtcggattggataatgatcattttaaagctgctggtaacttactaattcaccagaatattttacctgtttctccttctttgtttaatattcccgttcaggtatctgatcagtctgttactctgccctttgtatcagatactcaagcgagtggctgttatctgggacatgttaattcct

SEQ ID NO: 1180 - DNA, 399 bp, Zea Mays
ggaacacattgtgtagtgcagataatgtttctggcaactgaagtctgtatgcctctggtccacattgttcaagaatgggaaacgagccaatgtatcggggtgctagcttcccatttaccccgaaacggttcacacccttcattggtgatatttgcggtacacataatctttaacttgaaagaacaagggtaggcatcgtttgtctacataacttttctgtcgagcttgggcttctttgaagtggtgtcttatctgatgaacctttgcttctgtttccttgactaagtcaggcctgaaataccagcgttctctaggttctaaccaatttaagggtgtccgacaccgtcgtccatacagtgcttcaaatggtgccatcttgatactctcttgatagctgtt

SEQ ID NO: 1181 - DNA, 1043 bp, Zea Mays
gaatggctcaatttggagctagaatgaattttctatgcaataaacaagttttaggaattctttttatattaaaaatcaatttttgtatctatttacctattttatatgctctctggactggacctcgaattccagaaagtgcaggggggtctggcgtacgtttaccgagactcataactctatttgcagtactgcgggttgattctagaaaagcacaaggactcttatgcaagtttctagggccgaaggggtatcttcaaatcgaagccctacgatcgcagatggacgtggcagattagctccgagccacggtgaatcggtatccgaacacaaccatccgatctgcagcgaacgtcctagatttaaagcaaccagatccaatcgcgcacgcccgatcacaaacggacgcctcagatcgatcctacgaaccggtacacacgcgatctaatcggagccgcacctggaggatcccacggtcagccataactccccccaatacccactcccgactgtcggacctgagcggcgccgccacgattccacggtggcgcgcacaccggagtttcccccaatcacgcaccagagcccccggttcccaatccgcgagtcctacagcgcgtatatgtgacaaggaatcgaccgaggggatccttaccatgaatcacgcggtgctgggccatattcacggtgcagcgcagctccgcggtggcggtgtgtcaccggcgagcaattccggtcgccgccgaggtcgaaacacctccacctggtcacgagcgccctcccagcagcaccgcgaagtactccaaggcggcacggactttccggcaatggccacggacgggaacggagctggcgggtgctccctgccgctatccaagcccgagcagtgagttcccacagccacgattccgcccgacgaagccacgaccacatccggtgagcaccgcaaatccacccagccaccacacaggggaactagttcatcagcgtaggcgtgggtcgacggcggcttcatgttttctctctccccgcaacagtggctt

SEQ ID NO: 1182 - DNA, 380 bp, Zea Mays
gtcctgacgcgtcggactccactatccaccttgccgacctgggtctagacctagatcactcggaagaaggatggagccaaggttcccgctgcccctaaggccggaagggtgcggtcgactgaagtcacgatcgcccggcccagggagcgactgctacacccatagcaccaagatcctcgctctactaccccaacatactctccatcgacatggtggtggaggtcgacattatcttcgacccgggtctagacctagatcactcggaagaaggatggagccaaggttcccgctgcccctaaggccggaagggtgcggtcgactgaagtcacgatcgcccggcccagggagcgactgctacacccatagcaccaagatcctcg

SEQ ID NO: 1183 - DNA, 464 bp, Zea Mays
ctaataagtaggaatataaagaattcaaaacaataggtcaatttttaaactaaaaatgacgtttccctgatgtcaagggcattgtattcgcacgagaggatattagagtacaactagtggatgaagacgttatagggctagctaatgatcttttgtgataccaggtttcctataatcccctctattcaaggcatacctagatggtgtttatgtccacaaaagaaaaacacatcaatatgccacatcgtttctcaaaataaaataatgaccatggaaaatttatccaaattgagtgagagaactgtccaaacataggttaaggttgtaaggcacattttttccaccataccattgctaaaaagttggaatatagaggattcaaacaatagatcaccttttaaaccgcaaatgacgtttctatgattttgagggcactatattcgcatgagagggtattagagtgc

SEQ ID NO: 1184 - DNA, 604 bp, Zea Mays
gatggcaccataacagctctgccttcgtggccaactcgggagaggtaggaaagcgccagcgcgagggccgtgtgagggagaagaaagccgccgccgcgattcaccgccaacagagggattaggacgccaattgggccagctagaggttggtcgtgattcggtggtgctgtgagaaggttcaatcggtgggtgacttgctggtgctccaggaatttctcaccggcgcgctctccaccacggaacagccgttgcccgtggacttcacctctgccccctcggaaagccggtaaaaccccctcttgttgttcgcattgatatacacatggcggggccacattcaatttaggaattatgtggctagggcgtgtgttgggggagcttgtcggtgttccccgccgcaggggccgttttcctcgccggccgtgggctggaggtaggtaacacagtggccaccatcctatgtttgatggatggtgcagttcggtctgggagatcaccaatcgcaggggcgatctggtctgtaggggcggaatcggatgggtcagtggtcgtctcgtccctttaaatagccaccttcagatcttaatccatacgtccatgttgc

SEQ ID NO: 1185 - DNA, 353 bp, Zea Mays
gcagggtgaagcaaagggaaaccactcgagtggatccctcgcctggcccgagactgacacgtcgtaagtgaccgaccacgttaactacgcttggcaccgagctgcggtagagatgccaatccacctcccactcttgacctatgtgcttctccggatgtagcacactcatgacttatgaacccctcagattgcgtcgcatttatcagggctaggcctgagtgcgcaggctgcctgcagggcacaacgagacaagtcgcaccaagacccagactacaaagtctaggagtcggcgtagctcgaataatggtatgcgggccccacgctatttgtgtcctccgccataaagaatacaa

SEQ ID NO: 1186 - DNA, 276 bp, Zea Mays
cagaccctgctgtttgatccagagcgtcggtcaaaggatggagggcctagattagaagtagagtaaccgattggcctggggctgtgctagcggttggattgtgatcggacaggtgatattagattggcgctcatagaatctctaccgtagatctcggattggtcggtcggtagcgcttacctgttggggcaaccgtggatctaatcctaaccctcaatctcagatccgacggctcatatcaatagataccccttcggccaccattttgcaatagag

SEQ ID NO: 1187 - DNA, 378 bp, Zea Mays
cttaccggcgcggagggaggggcggcggagccggtgcggtggagctcaggggagcggggagaagagtggtcgaggccggtatgggtcatggaggagctcggtacagcctttttataggcgcccgaggggagggggagcagcggtgttaggtggacgccggtgaggtgcacagtgatggagtaatggcgcacaacggcggcgacgggacctcacgacggggtggtgtcgtgcgaggacgcgaccacaacgagcgaggacgacgtggcgttgaacttttctgtgcagagagtgtaggcgaggaggggagaggatggtggccggcggtgatcgcgctgaagccgagcgcggcgagggagaagaggtggctgacaggcgggg

SEQ ID NO: 1188 - DNA, 864 bp, Zea Mays
gagaattagttacttaatcatctgccttccctgtgatttctgttgatgcatgtcaaatttgacaaatggattatggttgtgactagaaaaccatgggcgtcagggacggagccagaaaaaagtttagaagggactgaactaaactgttgtagtgtagaagccttttctacgttatattatttacattttaaattttaggggaggctctagtggggctccatgagatcgaaagcagtagggaggctcgagccccacccgctggatccgtccctgatgggcgtggtgttgacgccccggcttgatgactcggtttgtgtattggtcagtactgttacagtataagattttggtccataactttgttgtcggaagaaaatgtaaggaaaaggttcaaattatttcaaaatttgtaacctatgttaagaattattcactggtgcgttaagggttatttttcgcccatgctacaatgtgatgagcttatggcatctcactgcaatttgagaatctttgtagatactgcatatgatcttgtcaagcgcctcgacgcccaacgtcgctggaccgcggctacgcagttcgtagtcgcgctccagaccttcaccgtgagggattcttcaccggtggcttgagagaggcagaggagaagagcagttttggataattgatctttcttgcttatttcccagtctattacacggcatatatagcctctggttcaaccaatctctcctatgattaaggcatatgaaaaggaaactaatcttaacaaatctctcctatgattaaggcatatgaaaaggaaactaatcttaaccaatccctcctatgattaaggcatgcaaaagggaaactaatccttat

SEQ ID NO: 1189 - DNA, 501 bp, Zea Mays
agaatgtacgcgaccaagccgctgtccctgttcaagagccacccggaggcggcgtcgcggccgccaccggagggccgcaactccggctacctcgtggtgaagggagccgacgacgagggtggcgacgacgagacgtgctgctggggcacctgcggcgggtcgcgcgtgcgggagctcccgttcccgcagaaccgcgtgctgacggtgaggtacacggagcaccacggggagagcagcagtacctacgccgacgccgtcgtgttcgtgcccgtacccgaccagccgctggcgtccaaccgctactaccccgtcatcgccacgggcaagcacaagggcctcgtcagggcgtgctctacagaggaggacatggtgcagtgctgtttctgccggtgcatcagcgacgtggacccgcggccgttcgacccggcggacatctaccagcaggtcgagatcgtgcagcgccggcgcgggcggttcacggccagagccgtggctcccgac

SEQ ID NO: 1190 - DNA, 301 bp, Zea Mays
cgcccgccaggggccggtggcgagcaaggctgtgcgtgcctggctacccacgctgcggcgggatcggacgggtcggaggccgtgctgcagtgcaccgcccgatcgaggcctccattgattcgtccccgtgtctctccctatcatggaatcacggttcatcgatgctgtgcgcctgcctgcctgcctgaatgtactgtgtgccgaaccgtgcggactcctctcctcgatcgatcgatcatcctccaccctctacagtgcaaacgcagcagccgcaaccgtacaggtacagctagcccctccc

SEQ ID NO: 1191 - DNA, 1037 bp, Zea Mays
ttggaagataatcttgcccaaagttggactgtcaggctggtatagactgaacttcagttggacagtgactttgatccaacattaagagccatttagactaaaatccaatgggaatttaccttggattgctataacaaagttgtagagctaccatacaagaacaactttgctgcagaaacttaggtgtgttgccattggaatttaggagcaatttggccctaaaccgtggctgtcaggtgtatttaactgaactatcccatggtacagtatatggatcaggacgccagtgcagccaccttaccgccggcgaccgattgccgccgtgattcgtgcgaccgccggtccactttgtgctctggatagttggatagcgtcgcggggttaaaaatcttcaccgccggtgagttggacaccactccggctagccgtagttcatctcccctagctcaccgcccgcgggtaaaattggtcaccgtcgtcgttccatccccgtcgtccaacgcgtgtcctaaccgcgccatcgtgtcgccgtgactccctaccactgtcctgtcaacgccggtgagcttgccacggcgttagccacgaattcaccgcgccgccttcttcttcatctccggccgccagcacggctcgtccaaattgatcaccaccgctcgcgggctctataaattgaccgtgcccccagctccgccatgtatccaagcacctactgcacccacctgcatctcaaatccctcactagcaagcacgaatttcggattctccccaatccggttctaaaacaccgtgaactcaaccctgccgtggtcagcccaactccggttagctcttcccctctgctcccttgtttaagcattcttatgcgtctgtgatacttgtcgacccactcaatcgagctaggagccctttggtcgccgggaacgcgactgtcttgccgcgatgttcacggccaccgtggctagagctccgtagttggtcttagctgcaattaggttgggggaaatgatcaaggtagccccgatttcatgtctgct

SEQ ID NO: 1192 - DNA, 557 bp, Zea Mays
ttcgtgcaaagcgtggggtctctttaacaaaaatgcacggcgaaggggtatgcttcaattctggccgttcagatcagatccagaggccagaaacggatcactaaccgcggcaacagacaaacgagcgcgaccgcttgatcgacgattgacggacccgatctaatctaccccgtttgaatccaatgcgcccgctccaaatcggacggctcagatcaatcactgaaacggtaccgggcggatctaatcctggccgctgcgcaggagatcgacggcaggtgctcaccctctctcattactttcctttcccccaccggacacagggcggcggcgcaaatgcagcagcgacagagcttcgtcgccgagccgcccccagggcgcgcacacacccccataatcaaattgacccactgctacgcaaagggaaggtggtagtgaacatacgaaagggagctttaccggaattcgtgcacgcggaggtggtcgaccacagcacttggcggacagacggcggcgctagctccacggcgagaaattgcagcgtcgctggtccgcaatca

SEQ ID NO: 1193 - DNA, 401 bp, Zea Mays
agaccagggttaagtcttccactagggtcgaccctctcttagtcttgaccatgatgtcatcgacgtagacttccactttgtccctaattaggtccccgaaagtcttactcatcgcccgcacgaatgttggcaaggcgtttttcagaccgtaaggcataacaacatagcagtaaagcccgtccactgttacaaaagcggtatgcttcctatcttccctagacatatggatttgatggaaaccagagtaagcatctaggaacgacaataggtcgcacccagaagtagaatccacgatttgatctatacgtggaagtggatacgggtccttgggacaggccttgttcaggctggtgtagtcgatgcacatccgaaacttctcattcgctttggggacgatgact

SEQ ID NO: 1194 - DNA, 383 bp, Zea Mays
tgaattcatgggaaatgtactgctctggacgcagaatcgtatccgcgcatcattcacagttccaaatcgctcttcattcagataccgcttggctttggacgcagatcgtatatttgtaggcgcgtacattcttcgcagttcaatatatctcttcattcagatagtcgcgaaaacgacagaaaggaaaacaacagaaagtcatggcattaccgagaacatttcggaaccgaccacgttggactggggcaagcccttgtttgggtactgattggatgtctttgggtgagatatcattgtgtcataacatcatgtgcccaaccagatcatccttcactcacaatgcacgccataaaacagcaaaatatgttggtaatacatactcc

SEQ ID NO: 1195 - DNA, 415 bp, Zea Mays
cattccgtgaacactatgttccagagggagtgcttcacatgaaacaagaggagtttattcgactaaagcaagggggagatactgtaatgcagtatctcaacaagttcaaccatttatcccaatatgctattgatcaagtgaacactgacctgaagaaatagaattgcttcatgaggggactcaacgactggctccaacggaaaatggcacctgcctagatcttacttacagcagagctgttagcacggtgctggcagtagaagccaagaacacaggccaaggaaaatcaaagggttttggaggtgataggtctaatcagggacctgagaagcgaaccaggttggtaatccgaccttttaaccagaactgttcttcgcctcgtccaccctcctatccgttcaaacagcctgttttc

SEQ ID NO: 1196 - DNA, 575 bp, Zea Mays
atatgagataaccagcaaggtgtatgtgtgtggtttcatccacgggatcacccagaggaagtgtgatttctcgccgaacttcatggaatactgttgtgccgctcttcggcatgggcagcctcactgtcgctccgattcacggtaagaattccccatattgttcgcatcaccttactctccgtgtagagcctcttggtgtggcgattcaagcgctgcgggccgagatggagtgcgcggcggtgatgcctccgccgcgggctaggtatcgccgccgtggggcgtttggtgggtgaagaggtcatgtgggaagcgctcaatcgttgatcccatccgaacggccaagattgaatctaacttacctcttcgacattttaaatctagagcctcgatctgggaaccgagggagctgggttcagtggagtgtggcgggttgtggtcagcgatctgacggctcaggggttatgtgcgtggtgcaatctattctgggctgtgtatctcaaatccgacggacaaagtgtacccattcagccgtgaatttttgctaaagaaacctcagaaaaccattgaataaaccc

SEQ ID NO: 1197 - DNA, 587 bp, Zea Mays
ggatagaacatgcactgggccccacgcaacagttctttcttcaagctgcaaccgcagaacacgtacgacacctctccttctccacttcgcatgcacacgcggttactacatgagcattttcttcgtccaaaaagaatcagccatggcgccgggggagaaggcaaacaaccaacgtgcctaggcgggtggcatggcagctcgtcgaaggaagtggaagcggcatagagacgcgactacgtgcctaggagacgggagtttggtcggctgggtctgctgctcgctggcagcaggcaggtcgagggctcgaccacgtcactgagcgcacagggaaaggaactagttgcggcaccaggacacgggtaggggcttcgtcggctgccaagctgcaacgcgcgcatggagagagaaggggagaggagatccaagggagaagacgactgcgacttaatagtgaacacgaaagaaacatacaagagagaatcaccggagaaaaaaagggactccagagactcgtcggcggcatggggaggctccggtgcagtgcggtcgtcgacacgagcggggcggcgaaggcgatgtgctgcgtg

SEQ ID NO: 1198 - DNA, 476 bp, Zea Mays
agattgacaataaacaattcgagtgcctttgagaatgaagtcattttattgatggtgtatctcccaattacagaatacaatgtcgtcccaatagcttttgaaatctagctaggggtaaaacttcctgagatgctctatattccatgagttccctatttccgtgccatccatttgagtaaaatgatatgatccaggctgagtgacttctgctactatgaatggtccttcccatagtggcgacaatttgtgtcgtccctcccccgttagaattcggcggaggacaagatctcccactgcgaaggatcgatgccgtatggacttatcatgatagcgcctcagagtctgttggtacctagctgactgaatcacagtatttaactgttcttcttctagtatatcaacatcctcgagtctagtaacttcagcttcagctatgttttcgaagatcattcttggcgccccaaacttgagatcag

SEQ ID NO: 1199 - DNA, 674 bp, Zea Mays
ggagaactgaattgggggaaatgagaaattgaggggctctagtggatgatgtgaggcaaggactagtgcgttggatgcgtaaatacctagcggaacacacgggggcagcaatttatagagttctatggcggtggcgtccaatttgaaggaagagtggtggcggccggaaagatgagaagtcactggtgcaagtgcaatcgtggcttttaccggggcagtggcttaggcgatgaacaagctacctagagcggtctattgcgacgtggtaaggcgtcgaggcacatagcctggccggataacggcgaacttcggtgatgctagcgcgattaaccatggcgggacacgacggccggtccggttagagaccggattcaccccacagtggatattttcatcacgccccgacgttatctactcttcccgtggcacgaatctcccaggcgagcgcgaattgtggcggcggatcactggcgtcgagcacacggcaccggagatctttatggtcattgtaccatggcgatcatgttcagtcgttctgacagcgcgatttgaggagctttgttctccattttccatgtgacaacttactaatcttcctgtatcaaagttattgtcctataaaccagctttaactttgttatagtaaccatacccaaacaaccactggatcctac

SEQ ID NO: 1200 - DNA, 438 bp, Zea Mays
tgaaaagatctcccccacggatgagcttaaggcactgttccgtccggccgccgtgtcctctcagtcccgatcactttgaatctaccctcgccggagttagacacatcgcagtcttgtgccacgtgcctccgcactttaaccacgccgccgtgactcatactaacctatctagtgatcgccggtgaggttgccacggttgtggccaccaatcgtgtgagccagtgcccctcttcctctccgaccgccagcgcgccgatccaaaattggagaccacagcttttgaacactataaattgcacacaccttcggctccgctaggtaatcaagcacctaatccagcaacttgtgcctccgattgcccaccagagcgcgccaatttcgaagttcccccaaatcggtttccgccaccgtgaaagtatcctcgccatggctagcttg

SEQ ID NO: 1201 - DNA, 430 bp, Zea Mays
ctctctctgtgccttgttcgacgcgacatccaataccacactgaacacgctaatgagtgtaaatatgcaactacacagtttgcaagctctctaagtgacctatccgatgtggcattcaatgcggcactaagcgcactagtaagtgcaaatgtgcaactgtacagtttgcaagctctctgagcacctgttcgatgccacatgtgatgcacaccaaacacatcagtgcatttcaaatctagcacatggcacatttcctatctatgcgaaaagtgttgttcatgttttttttattttggtttttcctctaaacttcttgtgggctctcttgagttacctaagagtagtttttcatacgtctacaccaccacacctaactggactcaaccaagtcaagttagcaatctcatgcctccctttatagtacaattaa

SEQ ID NO: 1202 - DNA, 512 bp, Zea Mays
gtggttacttcgtattgaaacttagtgcttggttacagcaagctccatggttataaagtatttacatcgacttatctgccctgtaacttgtaaaagcaagtgtgtctctatcgtgcttgctggtacaaaccttactgactcttgattataatagaagttcgttatggcgtgtaaacaggtcataacggtggaagcactgagttctggtcactagcattgtggagcaactttgcaagtggatggagccatgcatgctaaaagggcatcctctgtcacagttcgcctagcaaatgatttcctttcagttgtgttgacatcaaatcacaggggatgcacgcactcccatccaggttagtgccttgagcttatttggcgttgaaaacttgcatgcttccttatcgtggagagccatgctgctaaaataaatcgaggttgcttttgctgtgcggttggtaagttggtttgtgggtgctcttctagagcccctacctgttggcttggccatatatgtg

SEQ ID NO: 1203 - DNA, 329 bp, Zea Mays
caaagtagaccgggtattgttgtggcttgctatctttacatctctcttgtaccagagctgcgctgaccgcactgtgcgaggctgcaatgtttagtaggaggggtgacatggggtctgtgctggaaagacttgtgagcttagataagtactgcttcagtgattcaaaggatgcagcctgctcagggcgacagggccccaagcaaagtccttggctctacgcaatgttttgaggaaggggagactccactccgtggaccgtgagatgaatatgttcaatgctgtgagtcttcctgttagcctttggacatctcgggttgactgcagtgggg

SEQ ID NO: 1204 - DNA, 507 bp, Zea Mays
ctcttgatcggtggctcgtgaatttgaaggagacgcgtggcagccggagagggggaagagtactggcgcaagcgattggtggcatttaccgtggcgggctcaccggcgatgaccggacgtgctagagcgagtcactacgacgaagtatagcatctaggcacgtgtcatccgagcggcaaacggctaactccggttaacttatccacaacggttgtgacccaggtgggtacggcggccggagttcatccacgacgcgatatttccttacccctctgcattatctaactgcgccgatcacaaatcaccgcggcggacgtgaatccaggcgcatggtcgtcggcggtgagttctctgcgctggcgttctgatccggtcattgtaccattgaaacccgatttagagcgcctggcagaccgacttgcaatgcctagatctcgaatttttgtgcaacaacttgccaatacatctgtagcaaacttgtagcccttcataccagctacaattctg

SEQ ID NO: 1205 - DNA, 799 bp, Zea Mays
tgcttaagtaactaagctttgatttcatacaaagtttggagaaaaacaagctcaaagttgtgctgtcagtcagccttaggtctgaattttcagaaacaatgaagttggatgaatatagagctcgattttgagtaagatcctgtgactttttgtgggtgcacaatgtaacaaagttaaagctggtctgttaggctacaactttgatgcagagcattgatctagtcaccatacaaaatttagaggaaattcgccccaaacgatgaagcctctgatggtacagtggcaaaaaaatctacagattccatgaatctcgccgccggtgacccttcaccgtgattggtgctgatcgccacgattcatgcttctggtctgtggattgagctcgctggtgaaaagatcacgccgcggatgggtccgggacactgtggccgcgctgtccctcggtcatttgcgccggcgacgtggccttacggccgtcaccggagtctacgtcattcatcgcaattgcgccacgcctcaggcccttaaccatgtcacaatagctcggggtatctatatccggtgatcgccggagagccaccacggttgctgccaccaatcgcttgcaccagtgatctcctctttctccggccgccaccatgtaaaaccaaattcactggccaccgcttagcgcccttataaattgacggcacggtctgcttcgctaagttatcaccaagccaaggcatccatccctgccctcgattagccactgcaaccactgaattttggttttcccccaaattggtcgactgcgccg

SEQ ID NO: 1206 - DNA, 491 bp, Zea Mays
gacatattcgcatacggggccggggaagaacggcgatgagaaaccagtttccaggaattggattcctccgcagaataacgctgccactcaatgaaccaattagggccgccagaattccataggtgcaggtacgccttgaatacggagcaggagtaggagtgtagatgataaactgcgaaaccaacaactttgcaagagatcgaaaagcgaaacacccgatcagccagctgagaaactctgaataaaccagcctcgccaccaacaaacgattgaagcagaagacccacagaatctgggcacaaacgcatggagcatctgccaaaggagacgactaaaaagaactcatgacgatcaaatttatccgggatggggttgatcggacggttaaacttgctgaaaatccaatcctgaaagcggagaccatcggagaaatctaagaacgaagcagaggaacccgccagggccccccatggccacgagcaggggggcgc

SEQ ID NO: 1207 - DNA, 592 bp, Zea Mays
tcaggggtctatgaagcatcacctggatgtccacatctgccgtcacaacgatagctccaatggcggtacaggttctttccatggtgagggtgatagggacatatcgtacgacgaccacgagtggggatgggtgcggctgagtgggggcgctgtggatgagaggttgcagttgttgcgtcgcatggggaaggaaggtgaccatggcgcagagggcatcaccttcatgccgtaggacgatgggtggtggcagatccataggatctacgccgccgagatcttcagcttgcctagcgaagggaaacggaggaaacgggccgacccaggagtgcgatgggcccacacccggactaatcgcggtttgggcgtgatcgcgttgaggccgttccttttttcccgcgcccgacatcctcaaacgccggagatagctcagagcagaggcgtcgggttttccttgggatagtgaaggttgtttgctattaactaggagataagcaggaaaagtatgatcagcatgtatgcgggaagcaccctacggtcgtgtatataaggcctagggggatcccctccatttccatctgattagcatcttaca

SEQ ID NO: 1208 - DNA, 391 bp, Zea Mays
gcgccatcctctggtaagagctgtataatgtgatatggcgattagattgtgtatatggcgattagatatgattgtgtggcgattagattgtgatatggcgattagattgtgtatatggcgattgatatggcgccatcctccccgtcgtcctcacgccgccttcctacgatatgattgtgtatatggcgattagatatgattgtgtggcgatagtaaaatagtttctatataatgtgataatggatatggatgtcgattaaatgtgattgtcggccatcgtgccgttgatatatgtgtggatatcagccattgtgttgtcagttttatttgcaggttttggaaacctccccgtgcaggggaggtgctgccgaaattttttattgacaggctt

SEQ ID NO: 1209 - DNA, 402 bp, Zea Mays
ttttccatggtaaaccactcaaagtgccatcccttgatgttgtccttcagagggatatcaaggtactcagcctttctaccccaacaaagttcaaggctggctccaccaaccacttgatgctgccccctccccgccattcctagtttgcaatagtacaagtacttccacaatccaaaatgtgggttaatcctgaggtaggcctcatagagatgcacgaagatggcaatttcaagaacagagttgggattcaaatgagtcaaattgagagagtaaaaatcaagaaggtcgtagaaaaagggagagacaggtaaacctaggccccgaataaagaaaggaacgaagactacagagttatgagtatccttcgtgggtacgatgatcccttgccaaacccgccaagag

SEQ ID NO: 1210 - DNA, 370 bp, Zea Mays
taagtgtcgttcaatcggtcctgtattggaggtgccaacctgttgaatacagatgcttggggtgcccccatgcgaggtactgtggcatcccaaatggatatggtggcataccccatatttgatttggggcatatggcggcggtacgtatgtatattgatatggcataggtagatatgggggtggaggtgtccatgcaggtatgttaggcctcaactaggcagtatgaccttccgtcttttccgattagtgaggtcgtccaatcggtcttacctgctgttgctcttgaatgtgtgtgcgaggtcgcttcgctggccggtcacttgggccggccttatttttcacatatttggataataattgatcgaaggt

SEQ ID NO: 1211 - DNA, 314 bp, Zea Mays
ttcgtgcttactggtggattttgggggcatggatgcttgggtccatggcggattgctcaccgaggtccgcttcgtccaccgccgggtgtacccacaccatagtcaacaggcgccagccatttttcaccggtaagcaaacctcctccgagttcgcctctacccgctccacgtgtagaacccatccatgttcgattccgccccctcgttcgtccagttctcctgctcaccgtcgcggtgccgcgaggcgctgtggacggactgtcaccgcattcgtcaccaatgtggaaccctcccgtaaggttcacctggacctc

SEQ ID NO: 1212 - DNA, 369 bp, Zea Mays
accggccatagtgcatgaatttggcggtgagacttcttcagctattgaagccaaaggacctgctcttacacaaaggattgaggagccggctgcaataccgaagactgacaaaattgaagaatcgagaatcgaagggacgaaaacattagaagttctaagcccttcggcaggagtggaggtgtcgaagacacaaaaaggtctagcagcgaccccaagagaaaaaggatggctagtgtactagatgtgctggagacaataaaagcttcaagctctactccagggaaaattgctaaggcttcgaaagcgcagattgaaaccgagacaaagctgaccgaagccaaagctacaatgagccaggctgacgccgaa

SEQ ID NO: 1213 - DNA, 760 bp, Zea Mays
ctcggacgcaccaaggtaggaagtttgctcccttagttattgtgtgcatgacagcctgcatgcaatctcattcctgcctgattaaatgctattaggtgtagctaaaaagaaaaaagagcagcaaccaataaacggttagcatctcatgcaaatggcagtttgagtatttttttctactttaattaattatttccagtcgcaaataattattagaaaaaatatgtgtttaaatatgggaaaatacattttacacctaatatgttatgttgatgcattaatttttgtgtttatatttctgcatttatttcccgtagtaaataattagcagaaaattattaaaatgcatgtgaaggctatgttgcgtattttcatatcgctctaaatatttatgttgcgttgagcttttagcctcacgtcgagcgattaaatgatattgtgggtacccagacacgttgatcagactacattattaattggctgagcattggctgcgcccctggcaactcgacacattatttgtgtcgtacgaacttggctgtgtcatgtgactgctatgtcgcactctcgtttagtcggaccgctcccgttgagtcagaccgccatcgctgagtcgcgtatttttgcatgccctgtaggcactgtgtgtctgtcgcgagccacatttgcgcctgttgcgcatgttgcgtggatttatcgtgtaccccaattaccgagtcataattatgtctgttgcgcttattacgaaggcttgttatactgt

SEQ ID NO: 1214 - DNA, 589 bp, Zea Mays
gctcttggctggtcttcatttcgctttgtgcttcaatgcttctgttgattagacttgtacttcagcagctatatttgactttcctctgatctccatcgatatgttttttctgtcttgatacattcattgtgtatactgtatggatgtgactgcttgggaaaatctattgaaaattcctggacgtcctccccaatgggtgtgacagagggacggcttggtacgccgagcgtttagcaaactgtccttgagtagtaacttgacgtgaccgcggggtgtaatcatatcgtccaagcagttgaccttagtccaaatggtgtcgtgttacataaaatggcatctgctgcctgacttgcttccagatgatttgaattgcttattgaatacttgcgactgttcggtgaccgtggtaggagatgagtggctgcttccggcctctataaatagactgcctacctcgctggtgtcttcacacatcttctgatcgtctgttgcttattttttcacttttctcttctttccaaccgaccatgggcaagaacaagaagggtggaggttcgtcgcaccactccggcaataagcggaagcgcga

SEQ ID NO: 1215 - DNA, 1014 bp, Zea Mays
tctccttccacgtgctcgccttcgcctgcttcctcttctccagcctcgtcgcgctctgcctcaagcagctcgtccgcacctaccccgcgccccaccgccgccgcgccgcctccgcctccgcctccgcctccgccgccggcggccgcaccgcgcggatcaaccgcgcggcgctccgcgtcgggatcctcgcgtccgccgtggggtccgtcgccggatgcggcttcctgatgatggccctcgtcaacgtggtgcaggtgaagctcgggcgactcgggtgcggcgccggcggggccgccgcctgggccgccgtcgtgccgctcgtcaccctcgtcccttccgccatgctcatctacatcggcaccgtcttctacgccttcacacgctagtcggtggcggatcaaggaacactctgaccaaagcacccgtttttcgatcagatctttatctgtgtgatccctcctcagtctttcttgtgtgtgattggtggtgatggcgtgagagaacttccaggggggaacaatgcagctgacttttgtagatttaagatatgtaaaatccatgcgatattatgattgtgttttggagttttggagcaaagtgaatctgctgtggttttatctgcaattggcctttgtatttgcacttgagaagttggtcagatgtgcctagaatctttaggtccgaagcaatggtgagatggagctcagctgctggttggtctctcaacttgatatgaaacaattgtcccagatctcaactactgactctgtagcaccctcaggtaggtttttcaggtctgagtttgtcatgtactatctgtattgtgagcgtggaaggtcgcagcatccgcatttgtcaagcgaaacttcgtcatttttttttcggtttctccaaatgcacttcccccattctactaggccaatgggccaacaagtcattgaagaccagttcgtgacacaggcatcgcagtcttcaaagtcgatggaacgacgaactgctgtattcagatttttt

SEQ ID NO: 1216 - DNA, 353 bp, Zea Mays
gcggactcaagtttttttctgttcgaagtttctccatgtgtaaaatataaagtcatgtaagctagtagtaataggatcagtgaaattagtgcttatattaaatatcaacgtcacttctcgttcagtcttacctatagcaataacccataatgaattatttagtttggtctttttgtaggttatttttagtatttagactctctatcagagaaagccacgtatatcacccaggataatgtatatcacctaggatagattgttttaattgtttcttactgaaaagtcacccataatgtattatttagtggactgagatattttcagatgttttggactgctctgaacttcttcag

SEQ ID NO: 1217 - DNA, 400 bp, Zea Mays
cagtcgtcccattacaccatcatagggggcctactgtatagaagaggtgtggcaggagtcctcatgaaatgcattcattcggttgctgggaagcaattgttggatgaaatccatgctgggcagtgtggaatacatgcagcgtcaaggactctggtcgagaaggctttcagatctggtttctattggccaacggcgaaaagcgatgctgccgagttagtccagaagtgtgaagcatgccaattcctatcaaagcaacaacacttgcccgcgcagcagctgcggaccattcctgtaacatggacgtttgcatgctgggggctagacatgatcggacctttcaagaaagctcagggaggctatactcatgtactagttgccattaacaaatttacaaaatcga

SEQ ID NO: 1218 - DNA, 662 bp, Zea Mays
aggttcagggtcgtgttcctcatctttcgtcataccccttgcatcaccttccagcacacgtaggcatgcacccggtatgggatattgtcctgttctttctggtgtatggggtcactgtagagacttcggtgctgaggtccccgtgactggatttgaccggccccgtgagttagtaagggcgagggcatatctaagggtgcacgtggggtgtaccatcagtttgtcagaaaccttttggtatcgtacgtacggtctagtcgtggtttggtgatgatgtgtcttgtggcagccgccgtgggctagcaacgtcggcctaggttccttccttatgggtccgttggcggaaacttggtcattcttcccatctcaaaacttgctcggcggagacatggtcgctcgccctgcctcacagacttgctcggctgggacttggtcgttcagcctgcctcgagactcgcttggcggggactttggtcgttcgcccctcctcgcagacttgctcggcaaatgggctggagagaggttatgggcctcactttggtcactccgttcctaggtacccgacagtgcatatgccacaaatgcaaaaatatcttatgccataacaagaatcaggtcacacaagacctatacacccacaattttgtgccagtctatgaggt

SEQ ID NO: 1219 - DNA, 303 bp, Zea Mays
cgaagtcttcctgttttggtgcttaggggtgattttggtggtggatgtttggctgatgcgggtgcggaggcggaagtgggggtggtacgacttgtatctcctggtggtgttggtatgcgtggttgggtagatgctgggcggggccgtggttgtatggttgtgggggtgatgttgatatgtgtgcgcgacaactcttgggttgtcggcgggttgtgcccgagacatcctgtccctggtggacttcgtttctgggcaatccctcgttgggtgcgcgcagtcttcgccgtgaaacatgcagtaaaa

SEQ ID NO: 1220 - DNA, 628 bp, Zea Mays
gctgaattttattttgtgttgctgcatctgaatttgaatttgaaatttgaacttagttgaataggaatttggaaactaaattggaataaagaaaatgaaataggaaaaaaaagaagagcaagccccttccactcgagcctaattcatgttggcccatgtaacctgtgcgtcgcgctagcccaacctggggagttggtgccgacaggtaggactcgcctatcagtcaccctccgcgtgcactcgtctacgccgctgaatcgggcccactagtcagacccccgtgcgccgacgagtggaccacgtagggctgatccataccatatccatgtttgcccaatttccctatgcccactacgtgcggggcccatacgtcagatgtatcccttcttccttgccacggttactagatggttcaacaatccccgctggatccgcacccactcgccgtaacaagccctgagatcccagaaccaacttttggccatccacaaacataaagccagccctcatgaccttctccctcatcgatgccaacttagagcaccactatcatcacaaacaaatagaaggtgaggagagcgtaaaagtcgttgtcaccctgttcgctcggtcatcactacagtgctct

SEQ ID NO: 1221 - DNA, 1247 bp, Zea Mays
gaggtacaacattagcaaatcagatctggatgatttctttggtgggccagcctttcttgcatggtctcgaatggctaatatgcatgggtaagttacacatctgatttgtcattggtctctcacatctgaacttttaaatttatatgaatctgtattgattccagtattcttttgcagtaataatttgacatgttgtgtcttctaaaattattttaatttattcctcagctctgcagcacaagataattaccttgctataaattattccttccaacccaaactataaattgttatggctttgacatagtatatattttggtgcatagataaagccaaaacaatttataatttggaacggagagagagtatataactgcaaattgggatgctcacatctagaactgtcggactaagacagccaaggagaactgtttatatgtggaatgtcaggaaaataagatgtgactaagaaagctcaagaaattttgttttgagctttgattcccttttcctgagtcctatgtgctgatttttttccaagcatgttatgtctgattgttttagctgcctacaatatttcggtatcatttttggtacttacaaggaatagatagttactagttacccatattatttagttttatcttggatacggttttttttggaactttttatttcaatcgtatgccatatattacttattttcagctcttttatctaaaaacgaagatactggcttcacatgttagatgttttttggtcattgtcttttaagtaattaccctttaatggcacttcctgatttatcagatggggtggacctctccctcagacttggcttgatgaccaactagttcttcaaaagaaaatcctttctaggatgtactcttttggcatgttcccaggtggcacttctaccattgtagcatttttggattttgtgcagttacttgagcaacttttctacgttaaggttacagtatgggatataaatatatctttattggtttgcacatatgtgcgttttcagaactccagttctgcctaatataaccaatataaatgtttaatttctcagtctgtgtttttttagtacatcaggaccccttcacttcttgttacgtgtctaatagactaaaatctacatttgttgcagttcttccagccttctctggcaacatcccagctgcgttaaagtcaaagttcccttcagctaaagtcactcaccttggaaactggtaacagcg

SEQ ID NO: 1222 - DNA, 606 bp, Zea Mays
ccctgcccgagcccgaggccggagtctttcttctctctgtttctatctgctctccacctctctggtgattccacctcaccggcgacattcctcctcgccggcggccgtgctccagtggtggtgctcctgctcggcctcctttcccctctagtgagcagctcaagatctttctcccccttttttctctctgtttcacagtttagtgaagcctctccacctcttgaatccctatatccaattcttgatattcctgtgaatccaagtggtgggatgtgttcttttgtgtctcttgaacatctctgcaggttcctagctccctttgggagggtttcaccacctaaaatgggcatttcactctaaacctagatcaccacacgccacatgctcggtgaaatgcccaaaccagccaaatatgctccaatctatcccaaattttttaggcaccttcacaatacctccagtaacatattcgccaaatttcacgccaatccgatataccaagcttcaatttcactcaattccctatttcgagcgatcaattccgagtcgagtgccctaattccattttcttcgcctaaaatcaaaccaagtgcacacttcactcat

SEQ ID NO: 1223 - DNA, 794 bp, Zea Mays
atcgcctgccatataaggcctcaaatggtgccatcttgatgctagcctgatagctgttgttataagcaaacttagccaaggcgagatgatcctcccagctacccttccaagatagaacacaagcacgcaacatgtcttccaaggtttggatagttcgctccgactgaccatcagtcttagggtgaaaagcaacactaagagaaagcttggtacccaaagcactgtgaagactcccagaatttggatacaaatttggagtctcaatctgaatcaatggactttagcaccccgtgaagcctgattacttctttcatatacaagggaaccaactctgaagctgaatttgtggtcttcatggggataaagtgcgtcgacttagttaagcgatccactacaacccatatagcatccctgcctcgaggagaccgaggtaagccaaccacgaaatccatagtgatatgctcccacttccactctggaatttccaatggcttcaataaacctgcaggcctcttatgttcggccttcacgcgctggcacacctcacaagctaccacatacttagaaatatcaaccttcattctcttccactagaagttttgcttcaaatccctgtacattttggtttcaccagggtggacagtgtaaggcattttatgagcttctctcaagatatccatcttcacctctgattcctgtggcacacaaagacggcccctaaaatgaaccaaatcattctcatcaatggtgaactcacgggttttaccatcgccgacccgctttcgagcttcctg

SEQ ID NO: 1224 - DNA, 521 bp, Zea Mays
ccggcattttagaggtaacagcctagtccttttgagccacgtcgtcgttttagaaataacggccgagtgattacttgtgacgtcggcattttagaaataacagccgagtgataacgggtcacgtcggtgttttagaaataacgactgagtgaagactggtaacgtcagcgttttagaaataacagctgagttatattgggccacgtcggccgttttggaaataatagccgagtgatgacttggcacgtcagcgttttagaaataacagctgagttgtattgggccacgtcggcgtttatggaaacaatggccgagtgatgacttggcacgtcagcgttttagaaataacatctgagttgtattaggccacgtcggcgtttatggaaacaacggtcgagtgatgactgcgcacttttagaaatggcatctggcccgggaaaaccccatttgtactgcgtcgtcgcatgcttctgcattctgagccctagccctacttttctgcatccaggccttctctgctt

SEQ ID NO: 1225 - DNA, 326 bp, Zea Mays
ttgccaccgccaccccaatgacagttgagcagatgttcatgatgcaaactcaggcagttcaggcaattggtcagaccttagcagcgatgcagcaggtgcagcagcagccacccccaccatagcctccagtgcaagtccagatgccacaagtgccaagagacaagcgggcagagttcatgaggggccatccccctatttttgcccactctgctgatcccactgacgcggaagattggctacataccgtggagcgtgagttgcacactactcagtgcaacgatcgtgagaaggtgttgtatggtcccccacagctgaggggagcagca

SEQ ID NO: 1226 - DNA, 294 bp, Zea Mays
ctaatatgttttgttgctcttaacagaaattaccatcactaccagaatcgaagagattaacgactgaccaaaaaaccctgcaagcacaactaagtgtttcttacagggcacctgcccaaacatcgtaggctgcaaccagctataagcagacgatttggttcgttgacatctcaaaatctggtaatactaggtttttaaagtagtgcttctatcttcaatcaatgtagtattttggcatatggacacttattttctattttaagtcgcaggtgctaatgtctccgatcctttttt

SEQ ID NO: 1227 - DNA, 423 bp, Zea Mays
cttttctagtactatatccacagcagttgtcccaacttggatgtagaaattgaaaattgggcgaactgtacaaggatgcagatgcaaaaataaggtacccattcagtagaacatgaatgcggatggctgaacagattatgaggaggagagagtacccagatttggggtacacaagggggtagcgtcctttttcacatctgtatccgtgttctgttgacagctaaacaataactaggaccccccattttagtacggatgatgcaataggaaagctgctagaaacagcctaaccatgtggcttaccgaccttacctatttttcttggtgatggataagatcacaagggatatacaagggaatgtcccttggtgtatgcgttttgcggactatgtagtagtgctagttgatgaaagtcgagcagaa

SEQ ID NO: 1228 - DNA, 857 bp, Zea Mays
cctgtctaacgagtgtgggcaaccgcgggtcgccatgtcggccacagcgcgacacgactcatcgtgaatggatctggcagagcacgacatgggccctgagctttgtccattgttgctcttgttggacccagagctgatatgatgctcctgacattggtgtgtgtgcactcaccgtcgtaagaaacccctcggtgaagccctttgatggagccgcacacggcttacacgcatgcagcgccggcgagagggcccgtgagggcaccgacgagagggcccatgagaacggcggccaactcggctgatcatgagcgaggcggggaggacgtaggctctccctgggcatcatgcgagtggggttaggggtgggggtgggaggtgattatcagggcaccataccaagggaaggcggcgtaccatcgcttgggcatcgcgcgagctagggggtggggcgattttccccttgtccctatgggagtaggctttggtgagctccgcatgatccacgacctcgaccttcctctgcacggcgacccatgccttctccttgtgtagcgctgtcgccttcggattttggaaaccaccgtcgtgtgggacccgaacagggaggaaggcatgcagagagcggttcctgcggatggagtgcatgctagtgcgaatggaagtgccgagtgcacatgcgaggatggaagggggtcgcggaggagggggcgaggaggctgcttggtgcggcattctcgggagggggtccatcagcggcgggcatctcgcgcaagggaggcggggaagacgggagcgggggcacggtgcacctgtgaacgcccacgggagcggaggatgatccgtgaaatgtggagggc

SEQ ID NO: 1229 - DNA, 416 bp, Zea Mays
gtcatcagctacccagccaccaagaattgctagcaatcgatcaccagtgtgcccggattccttgtttcccccaaatcctttctccgccaccgtgaagatccgttcaccgcgaccagccctttaccggtcagttcatccctcactctcacttgttcgagcactcttgacgctctgtgatgcttgacgaacccccaattcgtacggagtagctttagatcaccgggaacacgtaccaattgtcttcatcgtccgcggtttacgtgaacagagctcgagagcttaccaaatatgaaattgattggggggaaatggtccttagaactcgaatttggtttaatccaaagctgggcactagtacttgtcccaatcggccggtccaggacctcgccggagcctctccgcgcgcgtcgccgtcg

SEQ ID NO: 1230 - DNA, 918 bp, Zea Mays
gttttcctggacggaggagtcctcggatgaaggcttgtattattttgctgcgttagatgtggctacaacggagtcttcgccatgtgtggagggtgccggggatcttcctagtgcgagtactgtgtataggcggcgaagggtggtgtcgaaacacagtgtgggtgagttttcgcgaagtggtaggcgccgtcgtatgggtatggagtgtggccgtcttcgggtagaccgggttggtaaacgagaattgttgtcctcgccgattggggcgagcataggtgagggagatctgcaaaatctttttgagggtgaggaattaaggataatgctgttcaattatagggagatgggtatcatcccgaaggttgagccgatgtaatatgtcatgcccttgccgtgtgtatgtaactgtaatttgtatggtaatgtggcctgttggccgtattcgcacgcctgtactgatccagttgcacccgtgggcgacttttgcacggagtgtcttttagtgagagacttcgattaacgcacttgtgctatcccggctgcacccttagttgacttgcgcggagtgtcttttagataaaagacttcgattaacacacttgttgtgctattccggctgcacccttaggcgacttttgtgcggagtgtcttttaaataaaagacttcgattaacgcacttgttgtgctattccggctgcacccttaggcaacttttgcgtggagtgtcttttaaataaaagacttcgattaactcacttgttgtgctattccggctgcacccttaggcgacttttgcacggagtgtcgcacgtgaggatagtctatgctgcctctcgcggtgactacggagtggtcgaatgccgaagaccgtcgatgcggtctttttcgacatgttgcatctgagtttttgtttttgc

SEQ ID NO: 1231 - DNA, 401 bp, Zea Mays
gccctgaagtcctaaggcggtttgtccgaaccctgctgagggccgagcctttgaacctctgaacagtatctttccatgccttttttcctcccgaagcggcaggccgaggtagaagacgactttttctgattcgttgttccttttccgaggggggttgacagaagacgcttctttccagtctgattgccgggaggataaagggcagtgaagtcgaggggagagggcgtaccatttgagacgggatgcggagcggcgctcgatgcatttttccttggaggggacacgatcatttaatgtgacaggacatcttgcctgtcagccgaccgttcgcggcacgcgtgcacgcgggattcgaaacggtcgtcgcccagtcgtttttaaatcacaccttggtggctccg

SEQ ID NO: 1232 - DNA, 668 bp, Zea Mays
tgaccgaagattggcgggccccaataactttgtatctgcaaggacattaccacccaagcgacgtcaatgaggccaaacgcctcaagcaccgaagccgggacttcgtactagtcgggagccagctatacaaaaaggggatcagtcagcccatgctaaagtgcgtgaccgaaaccgaaggcattcaaatccttcgcgaagtccatagcagaacttgcgggtcccactcagggcccagggccctcgctgccaaggtgatccgtcaaggatttttctggtccgcgataatctgtactgtgaatcgagtcacgaggtcttgcgaagcatgccagagttttctccctgctcgagcaacccttcgcagttcaccaagatgatcgcccacacatggccacttcaacgctgggggctagatattgtcggaccactgcctacggctcaagggaacctcaaattcaccttcgtcgtcgtcgagtacttcactaagtggattgaggccagagcagtatccacaataacgtcgaagaccgcccaaaagttcttctggcaaaacattgtctgccaattcggagtcctgtccgagctcacagtcgacaacggcaaacagtttgacagctaggacttcagggatttctgtttctccatcgacaccaagcctgtcttcgcctcgt

SEQ ID NO: 1233 - DNA, 1728 bp, Zea Mays
aaactgagagcaccagcagagaaacagaaggaagcaagtttcacagattgaaatgcacagatgagggagaaccgtgccttgacaggatccctaatttccactgcaaaagtttgccttcaagatatcgagacacaaacccagaagatggcatcatgcacaagcgcggttctatgtaccagagttccagagaggttagcagactcaggaatctccaagggaggagcaaactaaattattcgagcaataaagacacatttatgtcctttgaggttgccaatttgtcctctcggcctagcacaagtggtgcttgctcctttccactgcggagcaattcatgcaacacaaggtcttctatggggacaaaccatagaattcatcaagcttccagggaggttatgaggttttcactccatgagattcctgaggatgatttgacactcgagagaccacgcagggactgcaatttgttgaaaattgatgcagtagacagtttcctggagaaagcgcttgaagaagataccaccaatggttcatgcacaaatgcaacccctcattggccagaagacagttgtagcaaagttggaggatcatattgccaacagccagttggtttttgtcctgatgaaagagatgtagttaatttgcccaagtccttgtcaacgaaggtgggtgtttttgatgctacctgcccatcagagtgtgttggcaacaaaaagattcgttctagtccattcaagaaaattcttgatcctatcatgaagtcgaagtctcaacggaacccttctctgctggaaacagaagattcaaaatctagtagtattccatttggaggaaaaggcagggtattacgcaaatctttattaagtgatatctcaagggctgagcaaagacttgcacctgattgccagacagatggggaagcccagaaattgaccgttacttcatcgccaactcatcttcatgctgttattaaattggacccaaataatggtgctttcggtttcgcgtttagtacaaaaggtccagaagagttaatatatgttaatacatggaaagctggggatgaactgaattggatttacacttttcatagcagtggcaagcaaacaagcactgtgggaagaacctcaaaggacaggcatgggtgtctacctccaattgtaggccagatgcatgtgtcttcctttttgtactctagcgttggagaagatggtattttaaagacctcagccaccactgaatttgttttgtatgacattgctcatgcaagacggagttctgctgttgagagaattcaatgtacagatgccattcgaccatcattctgcaatgctgtcaataattcaatgtctggacataccagaaatgatctggtgcaaagacaaaatactacaaggattgactcagatctatcaacatcttgtctctggtctcgagaagatcttcatcctcatttggaggttgctgccattgtaatccaggcaccacttcataaaacgaagtccaaagaattgaaagctggatcgtcacctggtactatcaaagcggttacagcaggtggtgcacatgggttaccaagggatgatgaggcaagcccatcaccattacttgaccgtctaaagtctggtggagcctgtgattgtggtggatgggacatgtcatgcccaattgttgttcttgacaatgcatatgatggttactgggctgattccgtaatgaatgaaagca

SEQ ID NO: 1234 - DNA, 422 bp, Zea Mays
ctgggaatggcaggatattaccgttgttttatcaaagggttctccagcatagcaagacctatgaccgagctcctcaagaaagacaataagtttgtgtggaccccaaagtgtgaggaaagcttccaaatcataaagaagaagctcacaaccgcacccgttttgacactgccagacatccatcaggatttcgtcgtcttatgtgatgcttcaaggcaaggcttagggtgtgtgcttatgcaaaatgaaaaagtcattgcctatgcatcacgcttactcaagccgcacgagcagaattatcccacacatgatttggaattggcagccatagtgcatgccctaaaaatatggagacactacctgattgggaacaaatgtcacatcttcaccgatcacaagagcctgaagtacattttcactcagct

SEQ ID NO: 1235 - DNA, 291 bp, Zea Mays
cgtgcttcgaggcctccgatttggagcaggttcgtgtccaaacgagtcggggcggggcaccgccacttggctttgcttgcagctgcagcaacttctcaccgcacccttgctttctacacacacactcgcgtagcctgtgaccttgatgtgccctttttgcatttctgggcgcagggagggaagagcgccagggtggtgaactgcgtcctcgcgctgaagtcatactgtgactggaagcaatgcggtggcaccgggccgtggaagtacggggggaatcttaagccatcagtg

SEQ ID NO: 1236 - DNA, 353 bp, Zea Mays
ccgagtggactgcgggttgtttcctctaaaatccgagggttgttaagcaaaatgtccctacgaaggggtacaaggccatccgagccgttgaatcttgttccaaccgcccagatcagacgctaacattataagccgatatgggatattgactattggatataagatctagggttctcattcctcgggtctaaggcgggtgtacgctaccgatgaatcacacccgtctgtcatctatcccacggttctaaacctctcacagctctatctgcccctagccattcatcttaagatcaacgacattggcaccttcttcctccctgagctcgcgctacggttgtacgccaattaggtct

SEQ ID NO: 1237 - DNA, 688 bp, Zea Mays
gcctaataaagattcttccaacatttcagtttgtacattaaacgtgctggtaagttcgtcgtcttggaaaatctcagcagcccccacttcctgcttgatttgactttcaacataaccagcttcaccaggggcatatagtcattcacgaggattaactttgtacactacccaccaatcaaccaaactctttttcttagatggatatgtcatataatacacctgctcgcattggtggtcaaggatcatagtgtcgtggccttgtagtcgatcgttgtgtttgacttccaccatgtcatatcggttttctcgcattgtatttggagaaaaccaatcacaatcgaagaacaccactttgagttgtttatctccaaaaaaaacttgtactcgagtatatcattaatgactccataataattagtcaccttcccttcatcatcgacagctctagttacaactccggaatttgtcgtggctgctagaggatgatcgtcttcgaaccttgtagaacggaaacagaaaccattgacatcataccgaccataacgtctggcagttactgctcctagggacaattgtcgaaggtccgggtgtatattgtcatttatatctacataatctcgaaaccaacacaagaaattaggtcccccatcttttccctctcgacgaatttggtcacgttcacagccag

SEQ ID NO: 1238 - DNA, 694 bp, Zea Mays
ggggtacagagagctcgaaggcgaaaaggcaccgcgagagggagagaagctagacatggctgctacttgaggggtgaacccctttttaaaggcagatttccccgctcgcgccccgaagcgtcacgggcaaggtatcccctaatgcgcaccagggttcccatcctatgacatgggggccaggcctcacatgtcatacaagctggcccaaagcgcgaagaaggcaaatcgtcgcacaaggagcgtgcaaccgccctgcggttatacgcccttccatcttcgccacaactagtggttaagaaggcgaaccgccgcgcaaggagcgtgcaaccgccccgcagtcgtgcgccccctcagtttctctgcaaccggtggtccaacctctagcatgggggcctaggcccacatgtcatgcacccgacgcgccggtttctgggtgcagaaaagtcgcactgccgctcgcgccaatatcgctccttctcgaggccgtcgcagaagactgagaagataaattttcaaaaccaatgcagcgactcgaggcaccccgcacatggcccaacaaagacattaagtgcggaggtcacgggccagtcagccgcggggacaagcgtggcagtcggcgtgaccatgggcgggccggcagtaattgcatcaacgggcgcgcaggagcagtgaaccaatcgctagtcaaactttg

SEQ ID NO: 1239 - DNA, 467 bp, Zea Mays
tttgactggaaccctccgtcccaaaaagtcaaacgtttgagtatggattagcatgatgattatgtttctgtccaacaagatgttgagcagtgtgattgattgatttatcacgggattcagtatctgtgttgtgcgttggggcgatccagctgcggacaggagagtgacaactggcggagttggtgtcttgtgacccataggcccttgtactggccgcagccgttgtgttaggattaggacataggactccttgtctagagggagcgaatgggtcgatgacacacatggcctggttgttgtggcgttgtactgccatgtaacgctagcaaccatgcatagtaccagcacccaccaccacggacgccagagaactaacttgcccctgtgtcttttccgctcgtctcggcatctttcccttcctttttgtgccggtcactaaagactgccggctcaatgttcccgcagag

SEQ ID NO: 1240 - DNA, 851 bp, Zea Mays
gctggtctggtaattgttgttatacgagaattctgcatacggcaaacaggactcccaatctctgtcgaaggtcagcacacaggctctcaacaaatcttcgaggactttattgactctttctgtctgtccatctgactgggggtggtaggcagtgctgaaatctagcttggtgcccatagcttgctgaagactcaaccaaaacttcgaggtgaattgtgttcctctgtccgatactattcttcgcgggatgccatgaagtctgactatttctttgagagatatcagggcgagggtggctcctccgaaggtagtctttactggtatgaagtgagctatcttggtaagacggtcaattacgacccagatagaatcgttccctttttgggtccggggcagtccgattacgaagtccatgcctatttcttcccacttccatttgggcactggaaggggttgcagtaggcctgcgggcctctgatgttctgccttagttcgttgacaagtatcacaccgggctacatgctgagctatctcctttttcattcctctccaccagtatctggtcttgaggtctaggtacatcttggtagaccctgggtggatagaataggctgagttgtgggcttcatctagcaggatttcgcgtgcctctcactttggtacacacagacggttcctgaactaaagggttccctttttatctgctttgagatccgggagttgtttcttgctagccttttctgcaagtcccgtcatctcagtgtccaaacgctgagctttgcaaatgagatcttctagcatcggtttaacttctatatttccattttcccccaaacaagcatttagttgag

SEQ ID NO: 1241 - DNA, 443 bp, Zea Mays
cctttggcaattcagttaggtcttccctggggatggcaggagcaggctgttctgcttcggcagtggaagatgtcccttcaccaagctttggcactgtggctgtctcaatgtatctcggccggttcgttaagaccttaatctttttgccctttgacacaacagagatggccgaagcggcatttttccttttctttccctgatttcacgagggatagctataatcagggtatatgaaaccaatgacgtcaaaaactatattcaatcttttcttgccttggccttcgaaggccaaggtcattgcatcgtctttggcccttgtgtaggccccaagcaattcgtcactggttgcctcaatactgctcaaccactcatcgtttggctcatcaaactcgcctctatatctaaaggtatattttaaatagactaggccgccctgactagac

SEQ ID NO: 1242 - DNA, 574 bp, Zea Mays
atcattttcaatcgccaccctcggccttcgaaggccgaagcgagaccagatggggcgctggataattttcttaatgtcctacctctcaatcagagtattcttaacataaaaccattcctccatccaggctctaggccacctcttccaaaatgttggaactgggtagcttgcattgggacgagcaataaatccataacaaccgaagttgttatgatactgttcttaagttgttatgatactgttctttgccagtagccttcgtcttgtacaaaagttcgtgcatattgcagaaacactttgcgctcggttccagctcttggcttcctacagcccaaataaacatccccatcctaattatagcttcgggagtgatttgatgaagaaatatctggaatatcttcaacacttcaaccacaaatttgctcaatgggaaccgaaggcctgccttaaaaaagcatcggtaaacaacaacttcattttctttaggagcaggggcagtgctgtctcctccaaccctcacaatagacatgtcacgaaagtatcttcctctcatggtgtcaatatgactttgctt

SEQ ID NO: 1243 - DNA, 640 bp, Zea Mays
ctcaattactggtaagttcaggggctaacccgcaagatctccaagacacagcgctccactggtctggactgcgggttgtttttaaataaacagaggggctcttatgcaaatcggatggccgaaggggtatcgtccattcacagccatccgatccaattcgaacgatccaaattagatcagcaccccatcgaaccggtatgtgacacaagccatcggatcgcagatctatggttgcgatttaattaacgtgaagtcgaactacatccctccgatacgcatctgatggcccgtataccccaagccgaatcggtacacggatacaatcgtgaccgtccaacagaacaccaacggcccacggtgattctccccctagatctaatcctagcctcaccaggtcagatcaacggccaacgacctatcttccccacccggatacaggcaatgaagtgtccgagcagatcacggcggcggtacatgccgacgaactcccaaccccgcaccccggtacccaaaccgacccctagcgcgtgcaatacgacgacaggagaatggcgaatagcatgggggctacttactggagatgatagccgagagagcgctggccgcggcgaggagcgaacccgcggtgaggcttgcccac

SEQ ID NO: 1244 - DNA, 708 bp, Zea Mays
gcacgagcggcaagcttcaaggattgccccagtgaagtctggaccgtagtctagcgcagctcgaccggcggcggcgtactttcctctcccctattctctgttggcggcgcgggtgggtgaacaagctacgaagcctggccaggtcgggaagaaagaggaactgccctggccacctttatacggaggagagaaggttggtagcgcctggattgcagatatggccgagaatcacggcagctcaggcagggtccgtgcggcttcctagcgctggtagtttacccgagcgcgaggatgcaggaggctaatccgacagatgggccccacgagccagtgaaggccaaagcgcgcgcgtgtgggcttgagagctggctggcgtgcagtagagagggtggggtgggccggtttgagggaataggcccaacaggacaaaaaaaagaactgcttttcctttttttattttcttttataattctcctttcccttttctgattttttttattcaggttttgaattcaaaattaaatgtgacttgcactcatattacatgtgtcaattagatcataccagtgtggaacatttgtatatatttattttatctcatttgtgtagtgttttctcccctttcctcaaaccctagaatttccttctctttctcaaattctcaaattcctgtttaagtctaaattctattttgaacataaatgtccc

SEQ ID NO: 1245 - DNA, 337 bp, Zea Mays
gaggaggttagtcataagacaagggggtgggacccaagggattcgactctcagaaccacgacgctcgacagaaggcgatgacacacacgagatccgaagacctgcaagtcagagccaaggcttagtataggacgacttttaggtccacccgcacataagagacttgggagctcttcttccccctctcgcccgcttataacctacttgtaacccctactacaagcatcaactaacaaaggtgctggtagggcgagccaccgaagattgaatgttgggacttttaccggaaccagtataaaccttgcacccaccgagcacatcatctggagtctaggac

SEQ ID NO: 1246 - DNA, 712 bp, Zea Mays
acctaaggacgctagaacaatcgacaagagcgcttgaacgaaccaggggcaagctggccacgacgagggcaaaccgtgcggtgttcttgagtggattgggggaaatgcgaaattgaagctctctggtggaggatttgaggtgcggacgggtgcgcttgctgcttgaatacataacgaagtcaatggtgcactcaatttatagactccaggggcggtggctctcaatttgatcacgacgtgctggcggctggagatagggaagaacacggtggctataaccgtggcgttcactggtgcaacggcgcaaggataatactcctaagggtgccacaattactaccgcacggtaccaagctagggcttggcgtaaccgaggtcaccgacgcttccacgacgacaccggtagtccggccacgttgccatggctaaaagcacggtgataatctccaatccgtgatcttatgcattcccctccgtgagatttttaccgtctcgtagaaatcttctgcgtgcaaagcacaaatcccggcgaccagcacaaatctggtcgcgcggatcgccgacggtgagctgaccaagctggcagtctgatccagtcactgtaccatggaattcatcttcagtgcgccagaccgagcgagtttgagcacgatttactctcaaattttgtatgacaacataatcacttacctgtatcaaagctgtggagcta

SEQ ID NO: 1247 - DNA, 400 bp, Zea Mays
gcgctctctcttttccaaaagggaagctaaaggcaaaatgccacacacctttttggccaatgttatcttcacattccctgggctcatacccctgaagcaaagcaaagcaaagcaaagccgggggagcaaacattctccacttccggcttgagacaagcatgtacactaaaccatcctggtccactgcagatgcctgcctgcctgcagaatgatagcaccatctagagagatcatcttcagtcctgctgcattgcctactgctatgtatatagtttaaatagccaataggtgaaatcatgctgtcagtgtagttgctacattgtcagtactcaatacaccctgtctatagtagtgcttgctagttgctgctactatctgtaggcatatagaaaagaaaggc

SEQ ID NO: 1248 - DNA, 1428 bp, Zea Mays
cgacacacactaccagccatgcacgtcaagtgccatgcataatgttattttttttattttcttctcttttcactatttctttattccttccatcggacgctgtgtaattgtgatatcaggtgtgctatcatccactctcatcccctgcacgctgacatgaggaccgcatggaataaaaaaacgagcctcaccatacgctgtggccgggtcgctgatccgtgggactgcagtgccagtgtcagctatcaccgcacgtaatgcattttactgagattgccgcatgggcccgcgtgtaagaatcctcaaccttgggacaaaacaaactcgaccgctttcctcgcatggccatcgggacggactccgaacccggccttcgtccccgcatgaaaagcgccacggcgggcggatcgcaaccacccgcgcggatttcccagctgagcgttagccgacccccccttgggcgcttgggttataagcttcaagttgccgtcatctccagccctagtctcaagaattcgcagcacgctggggttttccttcattcatagccaccggtaggagagagagagatagaatcgtcaccatgcggatcttcttcgagcgctgattgctcgggttcgggtgggggatctgtggtgttcatcggtgctcaccagggtggagctcgcgaggtgccgccattgccgctgatttcgccaatgctgcagcacgcaaccaccgccgtcagggcctcgcaagcgggcctaggactatccccagcacaaccaaggtttgggcatggcttcctgggcgggaaaatcgaccaatccactctaatttctcgacggcaccggatcgccgccgcaactacaaccatcaccgtgggccgacctcgtctcaacctcgtcgctggtgagtcgccccttcagcagtctcatcaggagcgtagcaacacatagcgccaacttaattggtgtttcggtcgccggggaatcgtgtgcgggtcgcgcgctggccatggcgccgccacactggcgcttaaacgcggctgggcgccaccacagctcgggttggagaaggttgggtcgatcttgaccgtgggatttcgatcgtggggccaaagatagatgcagtagatggcggctaggaaatctgatctgggccactaatctgttaacagacggatcctgttggatctcatttcataaaaatcgtgaccgtaggattaggatcttacggctgcaggactgtactggttcagaaggacttgatttaatctcatgagtccaactatgatccaacggtccaggatggcccgtacccccttcggcctggccgtcttccaaatgagcccctcaccttatgcaaaatcaacccgccatcctgtgcggagttctctgtgtctgggggattttacatgttagcccccgagttttcggaaaatagtgg

SEQ ID NO: 1249 - DNA, 389 bp, Zea Mays
caagggatgtgaggattgaattagtgcacgtatgtgtgtggtgccatggtgtattatggtaatggtggcgtaagatgtttatttgaggtgtgcgggtatatgccgtaatatggttatactcgcaacgaggaaagatgtatgtattgggtggcccgacgtttaggttgctattgtataatcgtgtgaaggatgctcctgatggtcatgtgactaaagggtggtgtagtggtaaagcgagaagtaagtttaatatttttaaaacgattagttgatagcatatgtcggtgtcgtcatgctttctgttatatggcgggtcgatgccttgccttgtcaaatattgcattccattcccattgggtaaaataaatatctagttggttgattagagg

SEQ ID NO: 1250 - DNA, 589 bp, Zea Mays
agctggcccacgtcggctacgaagggacgcaccatccttaggccacgcccgtgtaaacgtgcgacgcaccgaaggcgcgccgaatagtcgtcatcagggcacgtacggtgcgacccccgcgtacggactcagacacaccaccactgcgttttggggccagtcaagttcggtcgtcggatgacctcagtaccatactctcagcagtgacccaaatacctggaaggattggacagtatgccataccggatgtatgtctacaacacgttgaaggatgacgtagggcccatgacgacgggacgaaccatgtttcgtacgaccgcgccgtgagactgatccgcgagacccacacacactatcacgaagacatgtagcagactcgctacagggacctgtatggcggatgaacaggacggagcgccataccaaaggtacgacaacgcacgaccctacagacgacgtcaggaggaccatgccacccagaggcagcaagccaagctccctcccagtagaatacgagatcatactgtaaagtcctcccttgagttataaaagggcagggcaaccttctttctacacacaagcacacaag

SEQ ID NO: 1251 - DNA, 909 bp, Zea Mays
gaacatcaacgatatgtttagtcagctcacaaatttaacaacgttgtgagtgatttccctttctttctaactgcttatgcatgttactgttttcatcgctccacaaaccacagtggtaaacatgaactaactgttcaatttccagggatctatcatacaacacattctctggtgatatcccacatagctttaactccttgacaagtttgaaaacactgtgagtactccacatgttctgtttaacttcgtcaattggaaaacacatcacatggttacttacaaatccaatctcccctcttgccagttaccttcagaacaacaaatttaacggcacaatagatgttctcactgatcttcctcttactgacttgtaagttgacatgcttaccacctactccagctacaagtttaagttcttaatgcaacgtttaacaatccttgcagaaatgtcgaaaacaaccaactcaccggttggatacccgataaactaaagggaatcaataatctccagtaagtacctttactgcaaccattgcagtgattattatttaagtatatgggatggatacaacaatctactcatcattttacaggacaagtggaaactcgtttaacaatggccctgctccaccacctccaccatcaccattatcacctccatcgacaaatacccctcctccctctcggcagcatgctgttccaagtagcgctggtaaaaataccccatctgaaaatggtggaaaacactcgaaacttggtggtggtgcagtagcaggaatcataatatgtttgctggttgttagcgcaatagttgcattccttgtgatcaaaaggaaatcatggaggttatcacagggacaagaccctgaacaaaatgaacctctcagcccttttgcttcaggacttaaa

SEQ ID NO: 1252 - DNA, 418 bp, Zea Mays
catgtctacttcatcagtgaagtgctgattgagtccaagacgtgatacttgtagatccagatgtttttgtatgcggtactcatcgccaagcggaagctgatccactactttgaccaacactccgtgtcagtagtatccacgacaccgctcggagaaattgtctgaaatcatgatgtgtctaggcgcatcgtgaaatggtccctcgaagtcaatgggctgacatcatttacgtccccaggaccacgatcaagtctcagacactcgttgactttgtcatggagtggacagaggcctaggagccacccctagttaacgacccagagtactggactatctactttgacgggtcctacctctagaccagaaggggcacgacattgtcctcacatcacctcaagggcacaaactccgctacgag

SEQ ID NO: 1253 - DNA, 725 bp, Zea Mays
cggctggccacggagcgcggaggattttcgcttgccggagactgagaagggggaaaatggtgtcgcgacgagctctagtgaaattaggaggtgaggttggggctacacggtcgcaaagtgctactgattcatcgtgcactgctaatttgggaagagatggaaaggatttcgcgaatttgggcttcaaccgagttcactagtgaggtggtgagtacctcgtcgtgggtagcggagctatttaaaggcgcggtggtccggctaacgatccacggccgcggattacatcgttcgtgcatggttaccacgtaaagaagaggcacagtgagggaggagcgaggcatgagtgacaccacgacggaaatgaccgagccacggcgaccgccggtggaatatctctagccacgctcggctaggttcgtgggatggtgccacgtctgaagttatctccccgcgatcgatcccttcaccaattcatccgaacacatctgattctacagtgccccagatctttgtcttcatttcagatattttcagtgctctggatcttcaatgttcttctaaaccgacccccttccaccctctccttctcttgattcttgttaagaacagggtaagctccattaataaagattgttcactaaacaatagccttcaaacttactataggatccctggtccaacactgaatggaatcaaagatatggtgcctttaatttggtcccatt

SEQ ID NO: 1254 - DNA, 809 bp, Zea Mays
ccggatggtactggttcaggttaaacgtctctactctagtcttcggtgacacgcgctaccgacacctgattgtttgtagtagacggttacaaatgggcgagagagagagttcccaagtctctgtagggtgtgagtgcttttatcatattgcgtgtgttgttcccctcttttgttaggggggcttctctccatttgtagatcaaaggagcggggttacaatcttgtcgtgtagtgctatcgtggcaaaggagttgatatgcttataaggtggtcggggctccctcctccactatcgtggcctgccactgatgttgcagctttgttgacttgcttggtgaggttgcgtgaagattgtgggctgcagtggatgcgtaagcgcacctcgtgccttggcgagggggttggggttcttctgacctcaacaagaggcctaagacggagtagccgttgcaaggctatctaatgtggttaccatctctcagggatggttaaccttacccatgaggtctatcgatagatgacaccgtgtagttcgttcgtacccccatccttccctgatggacttctatggtagaaggtgacgtggagggttggctttgcccacatggtgactggccttgacacgggcacggttcgtccgacccccctgagccggacgtgtctagctcgactggaggattcaacttctggtgcgtacgacccttttggttcgcgtgacccctgttttatattgaagagggggagtgttcggatgctggccgaccccgccacatcagctagacgttgtgtcctgctgacactatggacgg

SEQ ID NO: 1255 - DNA, 423 bp, Zea Mays
ctcttgtccttcttagatgcttactctggtttttatcagatccagatgtctagggaagataggaagcataccgcttttgtaacagtggatgggctttactgttatgtcgtaatgccttacggtctgaaaaacgccttgccaacatttgtacgggcgatgagtaagactttcggggacctcgttagggacagagtggaggtgtatgttgatgacatcatggtcaagactaagagagggtcgaccctagtggaagacttaaccctggtcttcgacaagctgcgggcaacccacagaaagctgaacccggacaagtgcgtatttggtgtctctgcggggaagttgctgggtttcctggtttcacactggggcattgaagaaaacccggagaagatcaaggcaattgaggcaatgaggcctccagcc

SEQ ID NO: 1256 - DNA, 532 bp, Zea Mays
aggaaagagagaattgattttattggtcttcaagaaaccaacaaaaaaactttgatgactcttggttgaatttcattggtggcaatagaaattttgcttgggtttggtcccccctaatgggagatctggtggcttactcgtagtgtttgatgctgacatttttgatgtgagagaaaaagatttgggggaatttatgattcgtattctggtgattcataaggaatcaggctttatttggaacttcataaacgtgtatggagctgctcaaaatgaccagaaacataaatttctgagtgagttgtctcctttctgttccaagtgctctcaccccatgttaattggtggtgacttaacatctttggaatgagtcagacaaaaataaacctagaggcactaataggtggagttctttatttaattctattattgatgtgcatgatctgattgaactagagcttagtggtagactttatacctggtccaataatagaaatccccctacgtatgagaagttggatagatttcttgttag

SEQ ID NO: 1257 - DNA, 480 bp, Zea Mays
gcgtactatgtgaaccggtattcaatccggaccataggattcacgatctatgacccatattttaaaccagcgcgatcaatcacaggcgtctgatagagatccaatggacccaacaacaacccgaccgtatcggccagagggtcgattgcggccacccgcttgggatccaatggctggtgtaccgttttccacccacagcaagcaacggtgctggaaacagggcgcagcctaaagagcccaacggcggatgcaatttcatttatccagcgctctatactccaatctaagagtgctaagcgtagcacaaatgaaatcgaatttagggaggtaatcattaccgagcatcgataaaaaaaatcatcctggggaggatgtcccacggcaccgcgcggatgctgcgcaatcaatgaaaatgtggttcgcgccatggcctttcgtgctctcaatcgacctcgattacaatccctgcgtgctggcgat

SEQ ID NO: 1258 - DNA, 456 bp, Zea Mays
cggtcacgttgaggtacgggtcggcgtcggaggtggtcggagtcggctggtccacgtgcgcaggcgggggagttcgtcggcggcaagtgctctggcctgctcatggtgagatagttcaattggtcggctcgggaggcttgaccaagtgacgcagaggcggtacacgcgaggaattggaaaatggcgcagagacttacccggtccacgttcgccggtgagcggaagaagtccagcaagggtgattcggggtctccggtgaggttctgctggttttgagggcttgcgaagcttcatgggtctctggcgaagctaaccgagctgctatggtggactgggaatggctaggctgggctggccacggtggccgaatctcaggtggtttggcggacggtggcgcttgctctctgcggcgatctccggtgatctctggcttgggcgagagtgagagtgtgcgaa

SEQ ID NO: 1259 - DNA, 539 bp, Zea Mays
tgcgttccctgcaggctgctctctactctaccaactaggaagttggggagggcatgcatgcaaagtgcagtactctcaactttaggaggatgaggatcggagggctagctgcactgcacatgtggctaatatgtagcttcgcgtggatcatgtgtgttcgtgttcccatctaaattttctttcgctcaagaaaaaaaggtcgcatcttttggtgtagacggtattaattaggacacaccttattaacttgcattgtcgtactagctatatactgctgctactactactctggaagctaattaagagcaagaagagaaaaacaggtaaggctgttgtcatgccttgtgcaactagctagctagaggctacacttcctgctgatcttgtatgtgtacgtgtagtgctgcgattattcggctacacctctcctctgtcgagtgcggttccaatcacgcatagaatgcatcaatccatcaatccatccattgggattattaataccgactgagggccccgcccatccatccatccgtttattc

SEQ ID NO: 1260 - DNA, 330 bp, Zea Mays
accaattcaacaaagtatagtttgactcatgcaaaagaggggagccaccacgcaaaagtaagctgtatcattcaattttatgaacagatgttcgaatctgttagtatcattaattgtgctacaactaatacatttctagaattggtccagaaaattaagctaaaaactgaaataaacgtcatggcttggagaccgggtgtgaagatatctaacttacaatttacaaagtggtcaaatatgaaacagtacccaatggaagaatctgcagatcaggtccctgtagttcaaggaccactgacttgtgcagacagtttattcagcaccttttgc

SEQ ID NO: 1261 - DNA, 466 bp, Zea Mays
ggggatttggctaaacacaattacttatctcacctttctagagaacatagactcgactttattgctctcatggagacaggtcgtagtgcattctcagagtctactttgagacatttttgtagtggcgtcgatttcctctggcaccttatgccacctagaggaagatcaggagggatgttgttaggggttaacccgggggtgtatgacattggagctattgatgaaggtaatttctattgtaagttccggctccgaaacaaagaggacggattcatttgggccctttttgctgtttatggccctgctcaagatgatttaaagaatgattttttagcggaaattgcaggtgcgtgtagttctgagacacatccgtttatcatagggggagacttcaatatcatgcgaagtgcggaagacaaaagtaatgataacttcagccttcgatggcctaatttgtttaatagtg

SEQ ID NO: 1262 - DNA, 391 bp, Zea Mays
aacacggtgctaccaatcaataaaaaaatttcggtgaataattcgtagcagtggacgttgatatgtagaggctgtgcaccgggcccgtacgtgatcacaaccgctgcgtgtagtccgtgtcggacggcgagagcgtggaccaccacaccaccccccgtatgcatggccacgtgaactgaatgcggtgctagtagctagctctagcacccccgacccgacgacgcttcttgccataatggtatggaaatgttaggtaggcgtaggtgctagaaactgatcccccgattgccgaacgccgcagctagggctggaaatagatgtctggatattcgaattatccgtatttgtattcgctaaaactgctaatatggatattcgattattcgtatcc

SEQ ID NO: 1263 - DNA, 550 bp, Zea Mays
ccgggtcctatatctgttaaacatatctttaggcgctggttggcggggtggatttaaatacttaaaatcttattgttacaggtgtctcagcactgtgctgagctatttggataagtagaaatgacttagtgtttaataaagcacaaatattgacttatttgcaagttctattcagaggaactcattggctcagactctggacgcagctgcaaagaagtgaagatgcaacagatcttttaagaaaatcttgtcgacatctggagacagtggccatgcagttttgtttttcttaccagggttggaggttttcaaacaggattgtgttgtaatgaaacatttcttttttaagtgtgtgttcagtcggtgaggagtaggggagcgtttaagtcttttaggctagcggttttggccttcttttgcaattagttggagctgtttcaagttatgtgaacttatccctaccctcgaaagaggcgaaagccggattttggtccattatctaaaaaaagctacaacatgttccatgatgtacgtacttttgatatatgtg

SEQ ID NO: 1264 - DNA, 325 bp, Zea Mays
tttggactgaggtcaactgcttggacgatatgattacaccccacggtcacgtcaagttactactcaagggcagtttgctaaacgctcggcgtaccaagccgtcccttgattacacccattggggaggggacgtccaggaattttcaatagattttcccaagcagtcacatccatatagtatacataatgaatgtatcaaggcagaagaaagatatcgatggagatcagaggaaagccaaatatagctactgaagtacaagtctaatcaacagaagcattgaagcacaaagcgaaatgaagaccaaccaagagccatctaccagac

SEQ ID NO: 1265 - DNA, 799 bp, Zea Mays
cgggggtggggggtatttataatacaaatttcacaggcggcttgcttaagaaaccgttagtaaaaaacatagcactgacggtagttttatgaaccgccagtgaaaatcttctttccactggcggcaccttaactcagccgcctgtggagaccgtttcatgttgaacagttgtgtcttttcaactgtccctatagccttaactcagccgcgtgtggagaccgtttcatgttgaacagttgtgtcttttaaactgtccctgtccttgtccctgtagaattgaaacggcaatcgccgaacacgaagcggcgacttttgactcctctttgctcctcgaagttcgagtaaacgtcaattcagttctcgatttgaatgtatttaaatggtcatcggccacatttccattcatcacaactcagaaaaaacaggcacatttccacatttccattcatcgccacaatgcctagctttacccatgtcgacatcaccgagtgattcctctgtttcttttgtctcccattcttctagccgtgaaccaaccccagagtgggattctatagtggcatatgaaaaacaggcacctttgcactgggatgcagatggatgggactttgcagttgcatcggattccgacggcgacctcaccgacggggacgacctccagttcctcgttgacggggagctggactccgacaccagcactgagtggtcttgggcgtacgacggagaatcattagatgtggagtccttggacaacgatgacgacccaatgtctggacattggatgtgcatggtctcctcg

SEQ ID NO: 1266 - DNA, 674 bp, Zea Mays
actccactggcgaacagggcggaagccaaattgcgaaagggcagagaaggtctgtaggcaggaaagcaagaactagggcacggaaagcagaggcggtcgaaggcgcagtacatatggggttttttcccgggtcagataccgtttccaaaaagtgcctagtcatcacccggcggttatttgtaaaacgttggcgtgccatgtcatcacccggcggttatttctaaaacgccggtgtgccacatcatcactcggctattatcttcagagtggccgacgcaacccgttctaactcggctgttatttctaaaacgccgaagttaccatcagtcactcggcagttatttctaaaacgccgacgtcgtcttcagtcactcggcagttatctctaaaacgccgacgtcgtcatcagtcactcggctgttacctctaaaaacgtcgacgtggtcatcagtcactcaaacgttaattctaaaacgctgatgtggcttcgtcatcattcggacgctacttcagaagcataaatgttgacaataataactcggccatcacccctaaaagcgacgatatgatgcccaagtgactcagctactactccagaggaattaacttcacagataaggcaaacggaggaatgattcgagaactacaagttacgacacaagcataacagacag

SEQ ID NO: 1267 - DNA, 443 bp, Zea Mays
tcgataagtgctcttatctgtgcttctagcaagacaaataaaaaaggaaagccattacaatgatgtattgtgtgctacaggccaggtgcttcgtcaggcatacttcttggcgccactactctgcccagcgtcatgctttctcggttaattcaactgtcaaggctcctaccagctgatcctaatggacctaaaggtgtgtttctattttgttgtcttgatcgtgttggctattaaatgaagatctgcctcaatcccacattcaaatttaacaattcaaagggtttcgaagtgatatttgttatctatttcattgtccatcagtttctttaatgtcatggacacaatttgctaattataatctgtcttacatttccagaatttgcatacctggaaatgcagtactgggcagcatcaatcagctgtctcagtgtgctagctttatt

SEQ ID NO: 1268 - DNA, 770 bp, Zea Mays
gcctcataaaatggtgacgaatacatctcctcgacgtggaccgggcttctggaccgggtctgcaacctcgccagcctcggtcctggatccgcccctgtttgccaactttctccacatgtgaacggttcgcgctcttggcccggacagtctgcccttgcacatcaacgattgaaatcgtaacaaccaacaataacagttataagtgcattaaatgcgccatcagatgtcatataaagcaatcgcccggattgtccgtaattgctttacacacctgaaaaagcaacacacctaaaagactgtagaagcatatggaaaaataacatccctatcatatcgtgcaccaactctttgtttgaactcatgctcctctcaagactgatgtagtgcaccctgaagttcaacatcataatcatcaccttattcttcatcatattgagttcttgcgacttcatctatgcgttgcctctaccaaattctatgcctcttcttttcctttgtctggtctagttcactagcaaataatttttttaatttcaagtggagaggatgaacaattcttgacatccttccctcgatgtgctaaatgttcgttgaaacgagtagcaccgccaccactctttcctgcataacaatacctgcacctgaaaggctgaaaccttgaccaatcttctctccatgctcccacactaggtctgacattttacatacaacaatgcaaatgttaaactatcaactttcttgtggatgcctcactaacataacaaatcttc

SEQ ID NO: 1269 - DNA, 863 bp, Zea Mays
aagggtaaaacttcctgaggtgctctatattccatgaattccctacttctgtgccatccattttagtaagccgatatgatcctggccgagtgacctccgataccatgaacggcccttcccatagcggcgataatttgtgtcgtccttctcccgttagaattcgacgaaggaccaagtctcccactacaaaggatcgatgtcgtatagtcttatcatgatagcgcctcagggtgtgctggtatctagctgactgaattactgcgttcaaccgctcttcttccagtatgtcaatatcttctagcttgatagcttctacttcaactatgttttcgaatatcagccttggtgccccaaacctgaggtcggcgggtagcactgtctccgaaccatagaccatgaagaagggggtgtttccatgcagagctcgactaggttgagttcttaggctccaaaccacataagggaattctctgatccacttccttgcgaacttttcattcttgtcgaagactttcttcctgagtgcttccagtatcattccattagccctttccacctgaccgttggctcttggatgtgctactgacgcatatttgatctggatgctccgttgttcgcagaaatcaaagaattcagagctagtaaaattggatcctaggttggttatgatgctattcggtatcccaaacctgaatattatatcttgtatgaattccactgtcttggctgaagttagagaagcaatgggtttgtattctatccacttagtgaatttgtcaatggcgaccaacacatgagtgtagcctccctgagctttcttgaatggtccaatgatgtccagtccctagcacgcaaatggccat

SEQ ID NO: 1270 - DNA, 681 bp, Zea Mays
gggggaaccatcgccgtcgtaccgctgtaccggtggcactgccgttcgggcctcggtttggcggggggaaagcactaacgacaagcatgttatctagccatagcttcgcgtagtgtgtggactgaagacactgccgcaatttcttgccggtggtgaagctgcaccgccgtccgcctggtgtcgtggccgggaggaaccactccgagaattccggtgagaaccatctgcacagctaaaccatgtcctcaatttcgtgtcgtgtcgtttaatttgagtatgggggtgtggagcgccggattgagatccctccggcgaggtagccactgtggccaacgcggtgccgtcgcgacgttggggggaaggagttattaggtccttggccgtaggatttgagatggacggctgggattagaagtagcatttaccccttcgcgtattgaatccaagcctttggcgcctaatcgagtggatgtggtgaaatcgtgttgagaccgtctggaactgtggatgccgcatccaagggttgtgggttatacctgttcaccgtagggagaatctaatcccgacggttgatggatgatcggacggatttggttcatcgataccctttcggctgtgtagtattgctaaagagcccctggatgtttgggaaaccaacccgcagtccattgtattgtgctc

SEQ ID NO: 1271 - DNA, 671 bp, Zea Mays
ttttgcttccaagcttcccttctcaacgatgccaccaaacaaggaacccactcttcgcgcaaccaagatcttcaagtcgttagacaagacaatcttttctagagaggatgccatcagcagctgcgtttctggagaacctgatcaatttgcagaagatatattgtaaactatcactcctgccatcatattcatatataaacaaacttactaagatagtatcatattgatcactataatactgatagggaaggagatggcaccttcaataagcaggttaagtagaggttccagcctgccattttcagccatctgcacggcatttttctcacacctgtccaaattctcaagtgtcttctcagccttctcagctattgttgggttgtcagctttgcttccacacaccttgcacagtataagcacggctccattcagttcactcacctttccacatactagctcagacttggaaaggtcgcacaacgcagagactgccagttccctctcttgacagtcctcacaatctatgaacttgatgatcgtgcgaatggtgtccccttgcgacacagcttcctgcaaaggatgaagagaaatgctgtcaatacaccattgttatcgtacaccacgcgtgaatgcgtgattataaacacactcagtttcgctgtgtgcttgtg

SEQ ID NO: 1272 - DNA, 297 bp, Zea Mays
cccgcatgtcagagacgtgaaggtcacgtgacggaggatgggatagcgtagcgcccaagggccacgtagagttgcgtggagcccacgtgccattgacgtgtacggtagaggggacggggatgccgttgccaccgggccgagcacctgggctcttgcgtgaagccgtccaggggaggtgcaccggccgcaaacgtgtctatgagaaacgctctcggtttcgatctcggtggtgtctatctatctgtttcagccttttcagtttcagcacatgctacctgggacatactaaaaaatgca

SEQ ID NO: 1273 - DNA, 1010 bp, Zea Mays
acaattccccgtttttagcgatcgattccgagccgagtgcccaaattccattttcttcgcctaaaatcaaaccaagcgcacacttcactcatatttagccatataaacctattcgtgaagtatcggctcaattccacatcatttcatgcctcaattcaaatttcaaacctcctatgccactatttctcgttcaaacgtcgttttcgcgtcgtttgacctctcgatcgccacacctctcgatttctatgccataacactctgtgtatgtatttattcacatttcatatacttatgactatgtgactaatacatgctcacctcttctgtcatttcagtgacctcgcctgcccgtgagccgtctcctgtcctgcctggtttctctccctctcgtgtgagatttccaggtagctatccgctcttttgtcatcctatcggctgttatcgacttgtgcttagcttctctctctctcatgtgcagtcgtcaggtcaggatgccgcgcacgaagaatgtgccggcaccagggggaggagatgatgaggaccctcctcgccccttcaggcaggtcaaggggaagactgtttacttggagcagtaggaaggccacaagaagcggcgtttggatagaacagccccagcagctctagcagcagcagcagccgctgagcaggctaagagaggtgattagctgcggatttcttcagatcagattgcttaccgagttcgtcgtcatgcctctcggcctcgctcctccgctcctaccactcccgccactgctaccactccaccacccacttcgcttgctccagtcactcctgcgccatccaccacctcagccataactaccacctccactactccagcttccactgctccttctgctcccctttctgctcctccacctatcccacctgcccgcttccgggagcgagatgagactgaggtgcgaccactagctgcggatcccaggttgtttgatcttcagcgtgctacagcggcacgggtacgtcgg

SEQ ID NO: 1274 - DNA, 729 bp, Zea Mays
gtggcacgctgaaggtcgacgagacggggatcagcagctagtggttgcacctcagtctcgtcacgctccccgaagcgaggtggaggaatgggcggagcggaaatgggagtgggagggggaacagtggacgctagagtggttgaggtggtgggtatagcggaagtggtggatggctctggagcgacaggagctggtgaagtgggaggtggagtagacactatggcggaaggtgtggagggagcagtggagcgaggccgagatgcaagacgacaaactgtataggctatctgatcagaagagatctgcaactgtccaccccgctcagcctgctctgctgctactaccgctgcaagtgctgcacgagcggccttgtccatatggtgcttcttcctgccctccttctgctcaaggtaaatagtcttccccttgacctgcctgaaggggcgaggagggtcctcgtcgtctcctccccctgacgctgagacattcttcatctgcaccatcctgacctaagtgctgcataagtgagtgaaaagctaatcaggagtagatagtagataataagatcataaatgaagtgatcactgcctggaaatctcactagagagacagagagaagattcaagcagggcaggtgatgggcacacgggcaggcgagatcactgaaatgatagaagaggtgagcacgtattagtcatatagtcataagtatatgaaatgtgaataaat

SEQ ID NO: 1275 - DNA, 635 bp, Zea Mays
gaaggggctcatatgcaaaagaccatggccgaaagggtaaggactgctctgggtcgccagattagaagtctacggttcagattggactataccattttatgaatccatatgcatccatggccataggatcaaggatccacggcccgaaactttcgtaaatcgaagggggggtacgcgattctaatctcgaccgtcaacacagggatcaacgacggggatcggattcagtcaaaccactacccgacccaatccgaaccgtcactagagaatccaacggtccgcgccccatcttctaatctcggccgcatagctagatccaacggccgcgagcacgtcaccaacctgccaccagccgtccggacgaccgacggcgagcagccgcacggtggcgccatggctggagttcctaggcccccgataccacaccctaagcactaaacaaagagcgctacacgatgccctacttgcgacgatttcagcgagcggtcacgtaccccacaatgtgtcgccgacgagcttgaccacggtgagcggcggatctgcgaaatcagttgggcaccggcgtgaaattaggccgccatcccgcgcccgatgcaccgacccacaatctccaaggtttctgctgcgcaaacgag

SEQ ID NO: 1276 - DNA, 373 bp, Zea Mays
tcctgccaaaccacgacggtagggttcaatcaaggtgcacgaggagctcctctgggtgatgtagaggctatgcgcgcaagggcgagaaatggttcagtgggttacccggtccacatgctccggcggggttacaaattccggcgagtgtgctcgcactgttccggtggggctggtcctcggctcaagcttgggaaagcttcacggcctctcgaggaagctatccgagggctcggatcgagcggaggagggcaggagtggtttggccatggtgggcaccctcgagcggctctgatgggtcgtggggaggtcgccggagctgcgggctggatcaggaaagctaggcgcggtgcggaggggtgacagggaaggtggc

SEQ ID NO: 1277 - DNA, 1558 bp, Zea Mays
gtgtctcgcgccttcttataaataatcgctccctcaagcggttttggtcgtgccttgcttttgccttcttcgggacgattcctccgcaaccccttatggactcaggaaagcgtacgacggaagagcacccccccgatgttgcgccctctctattagaagatgattgactcagggcacgagctcttccttctcttgtccctagactctcatgacggtgcttgtctcattttctttcttgcgcagccaagtgatctcgacgggacaggtgaaagactttgggatgtccttcagctagggtaggatgccgactctttcgtcgtagacctcctcggacctctgggagagtttggtcgccacgaggttgccgatagcgaggttgccgatagcgaggtggctagtctccatgctcacctagaggaggcggaccgtcgcgtcgtggggtaggtggtgtcagggcgaactccatttctgtatgtctcactcccctctgtgtgattgtcctgtgccatttttcagagttagagctggaggtcgccgaccttcgtgagggtgtggacgaggtgttgcctttgttcgtgtctagggcaccgatcgtggatagtgcctcctcaacgttgccaatcgggtccaattggctgtccgtcgtggtgctcatcatggtgctattggagcccttgttttcgtgcagtcctggtcgggctatgagctcaacactggtgacctaccgtaggatgccagggctggtgcccaagaggatttcgaagaagacttcaacattgccgtcgaggccatggtcgacatcctctagctaacggatgtagtcaacggacccccctagttaggaagtgttcataggtggttttagccatgggacggcacgagcgtgtcggcctatatgcttttctaatgttccctatggacttggtgaaaatggttcccttcccttttgtccccgattttcttagtacttagtataggaaacgaattttggcatacttatttcgggggctctcttactctccgatcatgcaccaagcggctttggcatggctcatcagtcccgggaagcggtttcacaagattctggtctacctcggtgctatggcagccatccctaatttctggtgtcccgcacgcctccgaggtaataggaagtgttgcattgggggtagcagggtcggccgcggtgttgctcgggtttctcgctggtgattatgagttgtcttgggaggatgcattgtcccttcccacgcattccatccaccggaaggggaagagtgagctgtctcttgctccttttttacgacggaggttatgacgagcctccctttttgtggggcgagcccctgggtcccctgatcgttacggaggatcctctagggggcgtgtcccgtttcttctctgtttcttcccacgcataccattcacatggaggggaagggcgagctgtaccgtgctccccttagtggttgagatcatggggctcaatgggccaggaacgactgatccaaatgggcccttctttttgtggggcgagcctccgagtcccccgttcgtt

SEQ ID NO: 1278 - DNA, 728 bp, Zea Mays
cctgttcatcctaatagtcgccacagcgcctcgaaatgctgggagatcatcaagctcgcgaagcgcgtcagcgagcaacgcgagcaggcctccaaggagatctcaccacctcgtcgccgacctggcaaggagaaggtcgacgaaggtgacgcgactgcgggagaacgggacctcgggtatcagtcccccgagcaggtccttaaggacgtcttcactggagactccgactccggtgacgacaactaccgccgcaagaagctgtacatgatgtacggtgggagctgggagctgacctcccgcaggaacgtgaagtccctgcgccgagaggtcctttcggcgactccaggggtcccgaaggctgctccacatcagcgttggcagagcaccactatctccttcgggacatccgactgccccaaaaacatggcaggggccggcatactaccactcgtcactgcccctatcatcgccaacatgaagctgcatcatgtcctgattgacggtggggttgggctcaacgtcatcagccacgctgcgttcaagcagctgcggatcctgggatctcaactggggccctctcgtccattctcgggagtgggcccacaaccgttgtatccccttgggagcatcacactctcggttacattcgggactgaggagaacttctgcactgagaacgtccagttcgacgttgcggaggttaacctcccttttaatgtcatcattag

SEQ ID NO: 1279 - DNA, 293 bp, Zea Mays
cctaatatagacccgtcttcgaccaatactaatctattccatattatttcgtgtcggatagagctttagttatctggtcagggtcggggcatgagcatgtgcgaccagttcgaccgcacctgtgagtgcgacggtgtgagtcccttgttccctcccgtagtttccaaatcctgttgcacgactgcaaactgctcctctactcctgccgtgcctatatgttgttggacgttggctacttggctcctcctcccaagtcccaagacgctctatgtctacgtgtatagcaatttgtt

SEQ ID NO: 1280 - DNA, 654 bp, Zea Mays
gccgagacgacgatgccaagtggtggaggtggcgatggagaccaggacggggggcggagacacgccggtggacgacgccccgagtgtgtagaggggcccgacgctgtcacatcgggcgagtggggtcctggtagccagatccttcacagaaaaaccaagggggtcaaactcaatggaacaagaattgtcggtggtgaaccgacggacagaaaggagattgtgagtgacgtgaggggctacgagaacgtcgttgaggtagaacggtccagggagaaccgaggcacctactgaggtgaccggaagagtggatccgttgccaacgacgatcgaggtagggtgtgtggaaggaggttggtgagagtgagatagcatgcctgtagtgggagtggtgtggtaggaggcaccggagtcgatgacccagtcagaggaaggtggagcaaacgccatggtgttgtaggcggcggcgagggcattggcgtcctagcctccagccaacggggaccatggtggtgtggtagaggtccccataggctgttgcggaggtggtgctgggtgagtcggtggcgggtcgtacggtggcgcgccttaggcaggtggcgtggtcagaaagagccggcgccggagctggagggcgagaggcaccgggagtctgac

SEQ ID NO: 1281 - DNA, 368 bp, Zea Mays
gaagctccctgtcctcccaatttgggccgaccggcgaggcagccgaaaggcaccggcaatgccctgatctctctctcacccggagtctatggcgtgatatttttggtttacgcggccatccttttatagaggagggtgagtccgcgcagagggaagttcgtcggcggggaagggaagaccccgagatctccggtgacgaccatggtggccaccaagcttgagtggttgagtgacttccgcagacgggatttcagcgtgggtagtagggaggaggcgctgacggcccgggcccgattgccagtgacgcgctgcttgaggagctgacggtagggcgtggagagtgggtcggcttgttaggaatagaaaac

SEQ ID NO: 1282 - DNA, 484 bp, Zea Mays
aggctatgattatgctcacaccgtcagatagcaagaactttagacggtttcctcccgttgatatttgtcccggaggactaataaggaaaggcaaattctatcggtgacagtaaccatccagattagtggagcagttggaacgagccgtagcgttttacacagcctgctgctgtaggttccgtagtgcttgctccaagcgtcctctctttgggaaaaccagttcacagagacacacgagtagacgacgatgtcatatataagagcgcagctgaagtacgtaaagtaacaccgtcgtcgatcatgcaacggcaacggcaacacggcatatgtatgtgaagaacaggcaggaacgaaaatgcaagttgtattggtagctgatgtcccggcggtgaagtggcgctcaaggcttgtcgtacgtgtgaccagaccagctcttgtgagagttttgtctttgactcgatgtggcttacgtacagctagctgc

SEQ ID NO: 1283 - DNA, 538 bp, Zea Mays
cctggagctgaggggagagagggcttcactcgccgaggtagttgagcccttggaaggcagctggtgcgagatggtgtaataaggtttgattgaccatgcaaatcggctggtggtggcgagggtcttcatgttgcatgtgagcaatttcttattccagctccccggccttttactccgcatctaggatcatttgcctagctctggcctgcatattggttcgttgtctcttggctgcgagtatctccctttgtttttgcaggaagtttttttatgcgaagtgctcagagtttgagttggtcctcggtcgagattcctaggacttcaccatcttctatgatgtctttggctttagggggttaaagcctggcggggcatctcgagggaggtctttagagctgcacgtgcgaatgatgccttctagggtgggtgggttttatgttcgaggatgttggctgtttatgactccgtcgttcttagcggctgcctgaagggcgtcatcagcgagggttgccttgcctttcttgttagagagggtcgc

SEQ ID NO: 1284 - DNA, 545 bp, Zea Mays
gccaacgagcaccgttggattcaggatcaacggcgcagattacacaacccactttatgaaccagaatcttatcctggccatcagatctaggatcagcgacccgaaaccacccacgcccgattcactcgcctagcccttgatcttccgattaacgccccagattcgaagtgtccaaaggggacactcaagatctaatctgagccgtacacttgaaatcccgcgaccctggcatcttcttcctcgtgaacgatagctgagcatggtgacgcatctaggccggcggcgaatccacgatagcacttggcgataccccggtcccatcgcccccatccgcacggagtcgccgactacagaggggaaaacatgtaacacgctacgaagagcatctcaccgagattggaggcagtgggacagctggtcttcgttgtcgagcgattccacggtgtcgatggcgagagcgtcctcagaaccacgcccgcgagcccgttgttgtgtcgcagcgatcgacgaggcacacccgcgcgacgcgacctatgacgcggttg

SEQ ID NO: 1285 - DNA, 738 bp, Zea Mays
aaaggatgggaatttaaaggaaataatttatttccccctaaataaatgacaaggaaaacaataaataaaatattggaaataatagatgctatattttcttaaagggtgtgtttgataacttgggagttcataacatgagttgaattgaatttaaagggagggattataaatgggagaagaatatagaaaggaaaaagagaaaatagagaaatcccggctgggccgttttcctcttcggccggcccaactcagcttctctccccgctcagcccatggcgctcactgccgtacatgtatgtggcttactagtggggccgccctgtcatcacctattccttgctccgtgcgcatctcaacagaacccgccatgctcgcatggtcagcactccctcgccgcgatgttcgccgttcggttccctccgctcggacttcaccgtggtgcataaaagccgaagctccgcgacccccttccctccatccaccaaatcgaggctgcatcgagtcgttgggagcctcgcctggcatggagaggagatcggagcatgaacacagagagagattgggatgggccgccaccgtcgctagccgagcaccaaatcgactgatgacttgtgtgcggtttggggggattggagttcagtgtcgtggtggtgcttgtcaactccaacccggtcaccgtcttggccgactcgggcctcacccaccacacctgcatcgagcccatggcgcctccgctgc

SEQ ID NO: 1286 - DNA, 859 bp, Zea Mays
ttctgagaacatcatgtgcccctaggaatcgtccaacttaaagaagatgaatttcgggaattaactcaaggagggagatctgtcagtgagtacgaccacaaattcacagaattggtacaatatgcgcctgacgatgtcagcacggaagccaagaagatggcccgtttcttgaaagaggtaagaccaggactcaagactatcctcgtcagccaagacttcctcagcttctcgcacctctcaaacaagaccatacaagtggaaagggctagggaagaagaaaagggtcacctcaagaggaagtttcaagtcctccgagctcaacagcaggacaggcaccagagaattcgatcttttgggtttccacccaagggaccaagcttcaacaagccagttagatccactccgtcacgtttcagtcagcagggtcaaagttccctctaggccccctccgttgcaagcaaccaacctccagccaatgcctgttggcattgcggagaccccagtcactacaagaataattgtcctcagttgaagacatttgtgcctacctactccaactcggtgaatggccccaagagtgccccagcacccgcctccaaggcaccctcctccaacagccagctaagcaagacccagtatcatggcagggcacgagtaaaccacgtcgacgctcaagaggctcagcaagccctaggagtagtgctcgatgagttcctagttgaatgtactcccgtctctgtactttttgatttaggaccatctcattcattcataaccactggttttgtggaaaagcatggcattcccactgcatatctagaaattcccttggtcacccgaaccctaggggcagaccttc

SEQ ID NO: 1287 - DNA, 275 bp, Zea Mays
ggacgatccagattctgcgacctggattgaatctagtcttaatgaaacggtacgcaccgaggatcgtcgatcacgaaatcgacggtcacgatctaatgcgcgaaggaggtatactaccgtttgatctgaaccgcacaacatccatcccacggtccaaaccccatctgaccctggaccgttcatcccgagaacaacgacactggtgcattctcccttcttccgcaccacggcgaaaaatggcgaacagggccgcggcgccagactacactccggcg

SEQ ID NO: 1288 - DNA, 447 bp, Zea Mays
gcccgaagtccccgacggcgacaagcgcagagccgagctccggcgagcttgtaccgggtgatttacttaaggactggtgccctacttcggttgaaaccgaattcaagtcctattcaatgttttccccaagttaatttcaagaatgatgagctaatttggtctggccacggtaaccgcgcggatgaaccaaagaaccacgcgttcccggcgattggcggcggtctagctcaattaggtgggtcggcgagcatcgcagacacatgagaatacttaaacggggaagcagaagacatggactgacctgaatcgcgctggccgcggggaggctaaactatgcagtgttcttgagcagattgggggaaatccaaaattcgagttctctggtggaggatttgaggtgcaggtggatgcgctagctgcttgattacatgacggagctgagggcgc

SEQ ID NO: 1289 - DNA, 864 bp, Zea Mays
gaaaatatgccctctacaattgcccatacccacgtaagtctactcacagcaatgattgttgggccatgttgggccagacaccgaatcagacctcgatcagcaccgcacaggtttgtgcctcctcatcttgactaaccatacttgagcgtaggatcggagccaaccggagccttcgtcaattgcaacttcgttggagccttcgatgaagcaactagtattgactgaggcgaagactggtgcctaggcgagagcccgggcgcaagccaaacatcgaggtcgaggactccgtccaccccaacttttcgagggtccctcggcacaggctacgatcctgcaaggagcgaggggtcccaatgtgcgaaggctacgtgacaacaaaggctttaggaaagaagacatgtctgagttaccaagccactatgggggctacccggagagcccatgtgtaagtgtaaccatagggtaaaattgtgagtgcatgtgtccactaggcacgacggtgttgtaattactcgctacatagaatattgtaggaatgtagttggtaaccgggggtacggatgcactttaggccacctaccctagattgccctatcttattgctggacaggacacgtataatgagacgctacagttctctatctaacgttttgttttgcgttgttcttctcttctatccatgagtatgtgggtccacctatcaggacccaacatttggcgtccaccgtttgtgcgacgtagaccaatcccacgatgcctcccaagaagagcaccatgaccaactcctcactcgaggacgaggcgacgaaggtggtcctcgccgccaacgccaaaaggggcaaggtcgtcttgccaacgaaatcc

SEQ ID NO: 1290 - DNA, 423 bp, Zea Mays
ggcatttctagctacgggtatacaggtccccatcggagggaaaccatttgcagacgaattaggccatcaatcgtttggcagcaaacgacatcactcggcacggtgttggtggctgggcaagttaaagaacctcacctaagtactgaaatctgcagtgaagctgattcctaatttgcttttgtcacctttgcgcgttctggcgctgcatcatgtggctggttcgctcgctcactcccgtggaatcttcgtccacgaattccatcgacacggcacccaacttgttgttgttggtacctgacgcaacacacacgaaatctgcagcacgtgtagtccatatatgcccaacaccagcatctacatctcatcccactgggaaaaataaaagctctgatctcagcgaaagaataaagcctcgccaatgat

SEQ ID NO: 1291 - DNA, 311 bp, Zea Mays
attttgcatggggtgtaagaagttatctggtaagttatgaacctaaacaaacctaaaatcgaagtgcagttctgaaaacccagatggggttttgttggtgttttctcaaaatgaactcaaatgagaatcaactcggatcacgaccaagaactgcattgtgagggtgtacgcattggtccaaagagtctatatccgcccaaatcgatccctaatagtacccatgtcacaagaactcgagggttctccacaaacccacaagagaaggatatggaagaaaccaagaacacaaaacttcaaaatttcagcatgag

SEQ ID NO: 1292 - DNA, 666 bp, Zea Mays
atattgcataagggtcgagtcatgccgaagtttaactttaacggactcataaccatgctcattagcttgtccctctttttctcatccgctttcatataaaaccattcattagtccatctagtcggccacttcatacgatagccaataatcggggccttcgtatccttccgatacgcaaaattgtagcagccaaagttcctgtgaaggccatcttctctagccttcgtctagtagtgaagctcgtgcacccggcagaaagcttcggcatttgcatccattccctggctttggagagcccatatgtacacactaagtctaacaatagcattgggggttagctgatgaaggtatatttcaaagttctttagaacctcccctatcatgtcatttagcaagaaccaaagccctgctctgaagaagctcttaaagacgacaacttcgtcatccctcagctccggaattatctcttccccagcaaatcgaacaagcttactctcagactccccaaaatcgcccagttttttcatcatagtcatgtcatcttctgttacagtagatttttcaaattcaagatgactaggctttgtcgggtttagaatgttgtagtcctcttcgctctcattatcactctcaccctcaaccatagtttgtccagcttcaacattg

SEQ ID NO: 1293 - DNA, 381 bp, Zea Mays
ggagaagactccatggaacgaggatccgaggaccgatgaatctgataccacttgttagcaaccctcaccgatagaacatgaatcactgaaccagacaaagcataactcaagcaacaagtgctggatagatggagtttgggaaggaaacaacaagtagggaaatcacagctagaaggaagatgctataatgttctagatgatccgggtacaagagagagttggggaaagaagaacagcgctagacaaagtaggaagatgaatagtaaaaggttctgatattttctccccttccttcgtgctgaccttcactgcacctttgtagtatttttccttagctacttgggccggcatggaccgttagacataatgggccgatgtccc

SEQ ID NO: 1294 - DNA, 561 bp, Zea Mays
ccatattgggctgatccagatatacatgtacaccggggagtatttatctttgacacaaggagtatttacttattatgaaaccagctccaaaaagtggcttctgagcctatccacgtcgtccattaatctttcgaccgtaggatcggattccaacggctacacgagtgttctcacgcaccaggcgccaggcggcctcctcatgctggataaatcgtgacgcttccagatgatacatctccctcttggctgccgggcggcactctccatggtgaagagggtgtcgaccgcgatggctacaacgacgacgatggagcacttgacgcccccaacagatgcgagccattctcctcctccctacgtcctttccccctccacgacaccataaccgtgcctgctccgccgaatctaaaggtgtcaggatccccaatccttcccctcctctccccctctccacgacgctgcaactgtgctcgcatcgccatcccctcccctcccctgtctccaagccaggaatcccatccccaccccaatgtcgcagttctgctcgcgttggccggatct

SEQ ID NO: 1295 - DNA, 600 bp, Zea Mays
cacaagatatgatgagatcaactcctccattaatattcactagtttgggtattacaaaatgccagggtctcttcagcaatttgcgcacagccgaaggggtacctctgatttgtagccacctgatctaaaaccaactacagtgattatatctctatgatatgcatccagattcataggatctaagatgtgtggcttagatttaaatagccgagatggaaccatattcattcgatcatagatcaacgccctgcaccaaccagctgaaatggtatgcggcaatataatcatagcagtccacgtgccaacctacaattcgcacgtccgttaccagcaatccgggcacggcggcgctcggccccctcactgcggtgcttcgccggcgatacgccaaagcggcgcccaagtgcactgctctcgcccccgacagcggctacgcatagatacgggcataactaatcagatcgaatagttcttactggccataagggtgacaacgatgctactcatgaatcacgataagcagcgaactcgtggcggcgacgtagctcctgtgagaaattctcctttctctagttgtcccccatacatgcataccccttt

SEQ ID NO: 1296 - DNA, 315 bp, Zea Mays
gcgtgggctccagcctcgctccgaataccaaatgttagactcacgatatcacgctcacagtttcactccggccagcgtcaaaactgatcgccgccgtcgtcacagccgtgttctggttctcagttctgttcgtggtctgaggtctttcccctcgaccaagtcaccttattacacgtatgtgtttacagggccacttgggctccaaattcacttggaccactcatctcccgaataacggatgttgggccgtctcactcgctgggctctcctgggcgccgtcccgtgatccacttctccattcagcatccttccagc

SEQ ID NO: 1297 - DNA, 498 bp, Zea Mays
gggtctccgcctgagcggggagcgcatgcacagggtaaagcccggccacgcatcagcaccggacccttgctcatgccagggtttcccctgtcccgggaccctgtttcggcctggaccttactcgggagtctcgagccataatcgggggtccgggttgtgcgtacaggggtccggcgctcccttgcggaggttcggctcgactagcacatcctggatgtatcatctttccttgccatatgttgccccttgatctgcccatgtggtggggatgagcgttgttcaccgtgtggctaaggaacggcgtacgagcaccacgtcttcatgctgtagtaaggggtacccctgtttcagggtaccgacagtggcccccgggcccgcctaaggggaggatgcgagcctgcaggtggggccaaagtttgactggcgattggctcgctgctcctgcgcgcccgttgatgcaattactaccggcccacccatggtcacgccaacttccac

SEQ ID NO: 1298 - DNA, 628 bp, Zea Mays
ggaaattcctatggatctccctcgcattcgagtggagcgtggagtcatcttggaggacagctcggaggaacatctgcctacgcccaccctgttggcagagtcactggccttcgcagctagatcatcagcctcagcaccgcctgcaccagcagttcaagctcctgcacctggaggcgatgacccggatgactctggggacgatgatgaagatgacgacaacgaggatgacgaggagaacgtcaacgaataagccaatggtgttcagtaggactacttcatggggtttgggcctgtcaccgaacattatacatcaatgttcgagacatggcacttccctaacctactgcaagacgtgctgcatgcgttgggaacctacgtccgacccttgtacgagacaaggcgagtaagccagcctcctcggtcttgctactacatcactcgcattcatgtcagggtgatggatgtaggggatagagggttcaagactctatcagctcatgagtccctgacaccgctatccacttacgctgcttcggtcagcgatgctgctaggcggactatgtggtctctcagccacacctataggcaacaactgcatgacatgaagtacaagcattttcctctgtgt

SEQ ID NO: 1299 - DNA, 345 bp, Zea Mays
cgggtaccagtaccagcagcggcgaagcacggagagcaatgccaataactgagtgatggtggtgctgttaatttggcacatttcggtgcatgcatacacatgcgccttatctgtttttgtagcattgttcaccaaactagtaagtatactactactagtctctagctgctgctgcgtgattgtgattttggaaacatatatatggacgtccgtccttgcttgtttggccgcaggaaattcgtataattaattaactttagcggttaaaaatcaacaataacatctagtatatcatctatttccaacttcactctacaaacattgtcgtttatagttctgcgtctt

SEQ ID NO: 1300 - DNA, 650 bp, Zea Mays
accggcaaggactcacatgccaacgcccggtgaccaaaatccatctctgagttttccgaaacgtagtcgaggaaacaaatttacgcgaggtgcactttaccggggctcgaggcgacggaggagcctgtgcgaggtgtgactgcggcgaagctcctgtgttggtgaagaagtcgccccgagtgatggcgaaactcccccaccacacgctaggatcaaaacgacgacgtgcgagagctcttgatgtggctacacccgcctatcctccattattcgatggccacgatcggagcagaggaggcgaggttccagttgccatcagccgcggcggagttcctctccgatgcgcgtgaaggacgaaccgcagcagaaggtgtctcgagttcagcggatgcggcggctggattttatatccaagttgtagactccgcacgggcatttacgcagcgaggatcggttggttgttacggccgaggttcacggagtccgtcctaatccatagcagagaaagcggtcggctgtttgaagaggacgaagctgaccacgcggggcccacgcgccatacacaccggagaaaaagaaaaggccgtgggaatgatgggccagctgggcttagaaagcagagttgggtcggcgcggtgaagagaagggaa

SEQ ID NO: 1301 - DNA, 381 bp, Zea Mays
gttgacacctagggaatggtccctgacgatgatgcctccccccagttggcaacatgacggcctaccaaagcttcactgggcctctctagtacctcaccttcacccgacctgagatcgcctataccgtcgagcaggtgttccctcacatgcacacctcacaagagctgcacctcaccagtgtgaagcatattatttgctactccatgacactcttgaccacgaccttcttcttcgacccacctcagacttttgaactgatcgtttacactgacgctgattggggcccgacacgtgctagtcgacctcaggctatgccatgttcttcgacctccactttatccacaagcgtgtcgctgtcggtgatgtcaatgtcctccgcat

SEQ ID NO: 1302 - DNA, 592 bp, Zea Mays
aagagaagataggtggagagcttgttagatggaatgccacgaagtttggcacacttttttgttcctacagagtttttgggacagacaagacaagttccaagcttggatggtgtctagtgattggaaaaataatgattggagagatgaagaagaccacaaattcacctacaattgtttgataaataggatatggtgggagaaggttgaaatggtactgaaaactgtgacaccactctattctgtgcttcgatttgctgaccaatagaaaaaatggaaccatttctagctttcttctaaaaattttatctactcaagctgagatcttttgctaagttaaagcatgacaaaaatgtcaaaagagatttcatgaagaaagtgaatgaaataattaaaaagagaactcagtatcttcttaatgatactctcatgcttgtaggtattatacctattacctatttacactctcatgtttgctgctagtatagtttacaatttctgaaagttctatctagttgtcttgcttttttgtggatgcctattgtaggggctgcacttgatccaaaagcactttatacatcaaaattagccaccc

SEQ ID NO: 1303 - DNA, 406 bp, Zea Mays
cccgtcatccgggcgagcagtttctgctgccagggcgtgcgacttctcaacagctgcaagcgcagcggcgcggtcgccccgcacggtgaggacccagcaggggacggcatcttgaggaccaagtacccgtaatgggcaatggccatgaaccggtatagggtcggcctgctaatgatggcattgaaagggaggttaacttccgcgacattgaactggacgttctctgtgcggaagctctcctcggccccgaatgtaaccaggagtgcgatgctcccaaggggatacaccggttgagggcccactctggagaatagacgagagggtaccagtcgggatcctaggatctgcagctgcttgaacgcagcgtgacttatgacgttgagcccagccccaccgtcaatcagga

SEQ ID NO: 1304 - DNA, 389 bp, Zea Mays
tttggggggaatcccaaattagggcgtggtggtggacgataggagctacctaggggtgggttggacgcgtaacaaagaggcggagcaaagggtatcttcaatttatagatcccgattgaactgggcacgaattttggattgagatcacgattaccacggccaggatatttcacagtggcttgctcaccgtggcacgcgagagggaactagtccacggacgataaccagctgcttgccacgacccttacgatgcgaaggagtggtcattacgtgtcatggctggagaaacggtgagcttcctgtgatgccagcgtgactgaccgcggcaggacacgacggccggttcggccaacgactggattcacccctccccggatattttcaccccg

SEQ ID NO: 1305 - DNA, 602 bp, Zea Mays
gatctacgaccacgattttaaattacaagatctagcagtacgcgttcgatctcagatcgacgaccctcgtccatccaggccaaccattgatttaatctagatcgttgatttcttgatccaccaacatgacttcttcttctacctcccgactcggctgggcaacgacgccgcgccccagggcaatgcccccaccggaaccagatgaagggcccccagacgctcacaacacggcgacaggggatggtagcccccaagcaaactcccacaacaagcccccaaaaccaaaacccaccgctgctaaattatgcatgggacatggtgattatgagggggggtccataccagggatgatcagaacgatggggctgaccacggtctagcggaaatcatcgacattcaaacgacacctagagctgtgatccttctctagcctccgaatttgacggtcccagctagcttccgacacggtttggtgatggcgaatccctcccctcgctcagttcttcacggtagtagtcaaagtttgtgatcgacgggaccagagaaaagttaacggagatatatatcctagagcgaatctgtcggaggcagttaagcaacgc

SEQ ID NO: 1306 - DNA, 1196 bp, Zea Mays
aaaaattagagaaaatctggccccaaatcgctctgtcagtccaactgaatcaggttcgccatggtacagtgcctagacagatcagatcaaccgctcccctcaccgccgatgacttcgcgtcgggatcgtcgccgccgttaagattcgcactcactggtaaccggatagcactcggggtcgcgtaaatatcctcgccgtggatagactccggccattaaacaactccggccaccgtaccatgttcactgcagcggaatccgataacttcgccggtgaccgccgcctctcggccttgtgccgcgtggctctacctttccaccgcatcgtcgtgactctctatggtcgtctaatcgtcgccggtgaggtcaccacgacggtagacacgaatccactgcgccaaggttcttctctatctccggccgccagcgctgctcgaccgaattgatcaccgccgctcttgctccctacaaattgagcccacggttagctgcgctacatcatcacgaaaccaaagccccaatcccaccctcaatcgttcgctagagctcgtgaatttcgaatttcccccaattcggtttccgccaccgcgaagagtacctcaccgtggccagctcgattcaggttagctcaagtccctctgctacttgttctagcatccttaggtaccccgcaaacccctcgacccctttaattgaaccgtaccgctagggatcaccgggaacgcgtaccattgtcctcatcgttcgcggttcacgtggacagagcttgatagcttaccaatcgtgaaattaagttaggggaatcgttcggggatggtttaatctggtgtacgccgctcgggagcaccagtcgttgcataaatccaccggcacaacctcaccggagttcatccttcacgctgccgtcgtcgtggacttcgtgcggtaaaggaatagaagccgggggtcttttctgcaaacagtcagcgactcagtgcaacagtgaccgaacccatctccaattagccaaaaccctgagggctcttctgcaaagtcttccccgcgggcacgcgcgcgcgctttccctctggtgttgggccgcctgggctagaaccggcccagtactatttgatctttttcttttcagtagagctttggaaatctgttataaattgtagaaaaatcctaaaattgtgaaaccaattttcctagacttct

SEQ ID NO: 1307 - DNA, 462 bp, Zea Mays
cggagagccgccacggtagatgccaccaatcacttgcaccagtgatctcctctttctccggccaccaccgtgcgagaccaaattcactggccaccgcttagcgcccttataaattgacggcatggtctgctacgctaagttatcagcaagccaaagcacccatccctgccctcgattagccaccatagccggagaatttccttcttcccccaaattggtcgactgcgccaccgtgaatcacctcattgtaggtagctacttccaggtccgccctcgctctttttgtctgtgttttagcacccacatcgtgcttgtgatcgtcgtctgctcgacccattgagcttgacctgacttaatcaacgtaccggaacatcttgatcggtgtacggtgttcgccatcaccgtggtcaggcaaatcctaggccggattaatccaattagaacctattctagggtcgcctc

SEQ ID NO: 1308 - DNA, 543 bp, Zea Mays
ggtatgtcgccagtggggaaagtagtggagttccttctcctgctttgtctgccctcattggtctgcaagaattgtccctggcaaactttgatcagactcttgaagatatggttccagaagacctgttatcagagccagcagatgatggtgtgatggaggtttgtgctgatgtgctcgacgccgggttgggatcatcccgggcagcatcccgcgcctcgttgaccttagagcacggtcttgagggtcaggaaactgacttggatcatcttgctcccatggaagtaattgagggaccctcagccttagaggcggctactgcagggaacttggtcctcaaggatggtgctgacacttgcccagctcccgaggatgttgccagggatgattcggctcgagtgggagacgcgagccactgcccaggccccgagggtactgccggagatgatccggctcaagtgggtagcgcaaactatagcccagccctcgagggtgtccgagcagggtctccctcttgtacttccatgaatgttcacgcaggatctt

SEQ ID NO: 1309 - DNA, 741 bp, Zea Mays
aggatagacgctatagaggtaaccagtgatgagctacttggagcctactcgagggcagaggatgaggccatgactgttgccttcagcgctcgaggaaaaaggagactgaatagggtttttgatgtaattgggtttgtttatcctgattattgttttcctgtccaaaggcaaggaggaaaaaggaaagttgctacttcaacctctactggtgcgctgaagccgaagagggccaaggtcctgacacataggccgaagcctattgggacggctgaggtgctgaagcttattgaaagtgccgaggctaccccctcagccacgaaaacaactcctgccatgtcaatcgaagctaatatagatccgataaaagagccagaatcagaaaaaacagtagaacaaccaaaggtgctgagccctccagctgtaacagggctgtcaaagccatcgactactacaacagcgactccaaggaagagaagaatggctagcgttttaaatgctgttttagaatccatgaaagcgccaactcccgcttctgccgaagcatctggcaaaaaatctgaagatgcaagggaggcgattactgcaagcatggctactattcttgccgaagccagaccttcgaaagctgcgccaataaggctggtggaagagagtgttcctgaaaaatctacatctcctgctcctgaagcacctccccatggtgacttggaatacattgttcgacacgcttcgggaaagcag

SEQ ID NO: 1310 - DNA, 424 bp, Zea Mays
catgctaagaactatactaatcaaattttcccccttagaaaatgccgccgcgcacaaggagaacagcgcgcaaacatactggaccgattggtgtgccgagtcaccagctggccccaaggcatgataatagtagtggcggaagcaatgatcctataggggatcttgaagctgaagtgagtcggctccaagcggaacttcgtcgcaggacggctatctgggtcgtagatggcgaccgcataaatgagttgagaagagatatccgccatctgcgagatcagctcgcggaccgggatttggcactcgactgggttgttcaatcccgttcgcttgcatgggacaaggagcaaaaagctcaagctcgagtagccgagctcaacttggctgttgatgaactgcagacatattgcaataccttacatgaaga

SEQ ID NO: 1311 - DNA, 357 bp, Zea Mays
cttggctggatgtaacctttctctgacaactcatcgatctgcttcttaagttcaaccaactctggtccggatatcctgtaagctctcttaaagatgggggcggttccaggaagaagctctatggaaaattcaacttttcgctctggtggcatacctggtaagtccttggggaacacatctgggaactcggacacaaccttgatactctcaattgggtatgcttcactgctatcaacaaccatctgataacaacttccttttcgtggctcaggcggtactaactcggtcaccacttcctctcctagtggggacaccaacttgatcgtcctcttatcacaactgataactgcctgatac

SEQ ID NO: 1312 - DNA, 520 bp, Zea Mays
cggttcttgaaggcattgttctttgtttcccttatgtgttaagtgtttactttcccttttagcctaaggaaccaaacactccattctgaaaggaaaatttcaagatactttttgtgtagatcaccgatgcactgagaatcagcttccacgtagctggttatggattgaatcaacaatagtgaggaaaaaaaccgatggtacctaaatttatgttctgctcaaagtgcagacttatgcaggtttacagatccggattccagaacaaatatgcgcaatcaagaagaagtggaaaccaaacgctgaattcccaaaatatgctctactcaaaggatgctacagaagccacgagcaatcgcggcagctgcaacggcctgaactctcaatccataaggaccatagcacaccattccaatgcatcaagcccctatgcagtggcatcttcaaagcccatctagagcaatcaaccgattaagctacatatcaactgccacaaactgcaattccaactccctccagatcc

SEQ ID NO: 1313 - DNA, 716 bp, Zea Mays
gaggaggccaagaccggtgctcccgagcagcggacataggattgaaccattcccgatcacttcccctaacttaatttcagaaatggtgatctaatttgctttggccgcggtgaccgagggtgttgcggacagatgaacgtgttcccggtgattggtggcaatttagttcaatcaaatgggtcgacgagcatcacgagcacctaaggtcactcaaacacaagggcagcagggatgaactaacctgtatcgcgctggccacggcgaggtgctcttcgcggtgtctcagaacagatttgggggaaacttaaaattggcgctcacggttgcaagattgggggcgatactagatggtggggcctgtgatgatgttgcggagctaaccgtgggctcaatttatacaaagcagaagcggtggccggaaattgggacgatgacgcgcggcaatcggagggacaaggagttactagcgtgcgtaaactcgtgtctaccgtcgtggcgacctcaccggcgatgattagatggctatagagagtcacggcgatgcaacagaggtgctcaattgcgtggcgcaagaccggatggcggctgacgccggtgagcttatcagctcaagccgcaaagcacgggggggggggtacggcggggagtcaccggagtcatcctcaggcgaagagctattagctggcaagcttatcgggtcaccagtggcgtaaatc

SEQ ID NO: 1314 - DNA, 493 bp, Zea Mays
gaacctgacgccggtgaccttccgccgcaattcgtgctcgccttggagattcgtgacgtgtgagaagtagataacgccgggaaggggtgaaaagatccggggagaggataacccagtcactggccggtctggccatcgtgtcctgccgcggttagtcgtgttggcatcaccggagctcaccgtttccccggccgtgacacgtagcgatctatcctccgcgtcataaagatcgtggcaagcaaccggttatcacccctgaaccatttccctctcgcgcgccatggtgagcaggccactgtaaaaatatcctggccgctgtgacctcgatcccaatccaaaattcgtgataagcttagccagagcctataaattggaggcaccccctattccacctacttgttacgcgcccagctcaccacttctcgcccaaatttgggttttcccccaaatcagttctccgcgccgccgcgaacaacccctccgtcgacccacc

SEQ ID NO: 1315 - DNA, 722 bp, Zea Mays
gggggagtggtggagggagggcgggggagcggaggcagacggggtgcgccttgggcgtccggcgtcacgacccggtagacagtgggttgtccggccgtgggtggaggctggtgtggtggcgagctggcgcggtggaaagtcggtgagcggcggcgttggcggtcacagtaggattctaccatcggtgtggcgcggtcgcaggcagacagaattcaaaagcattagaaagcaaaacgcggcgttgccgctcccctgcgtagaaggcctaccattttttcctaagagtgtctgccattctgagccagttaggccatgcattaacgttggtctgatctcgttggttggttgcttcttttctatgaaccagagctgcataattatgaatttgactatataatagaactgataataggtagttcgtcatagaagaatatttataaggatgtagtagtcgattgtacttttgatggattatcatcacattatttggatagaaactgccttgtatgctatgagtaatttcttactggtcttttttagcttggtagacagtggccatttttctaacggctaacatggcaacagccaacaaaagtatctacaatacaagagtataaaatacagaggaaatgaccgcctatatatttgaaaatgaaagaaaccatttgattcaaagactatgttgctaagaaaaccttcgatgttaacttcaactcttgact

SEQ ID NO: 1316 - DNA, 365 bp, Zea Mays
ctcaacaactggtgccttcggagccgaagcttgtggtggtgtcccttcaataacttctgtcacagtgacaattcttcgcctttttggcccagttaccttctttgttagcaagggcttcttttccttctgaaaaagcttcgtcagatgcggccccagtggacttagcttgataggcaaagatttaatcattacctttaagatttcctccacgtcggttacagaaggtgttgcagcagtttcttcttctatatcagttgccttctgcttcggagccgcagcctttcttttcttcgaagcatctgtcttcggctcaggcctcagcttcttctttttcagtttttcttcatcatctttcactaatttag

SEQ ID NO: 1317 - DNA, 1191 bp, Zea Mays
cacacctccaaaaagttgcacaaaggctcggggctgatgtcgggtactcgggaattgggtgcccaaagtaggcccaaggcctcttaacgacccacttgccgaccaagcctctaccagcaacccaacaaggcggagcggtcgactagctctctgtcgaccaacctagtgaggcagagtggtcgtctagctctctgtcaagcatccctgtgaggtggaacgatcaaccaactctccactgagcaaatcagcgaggtagaccaacccaccaactacctaccaagcaactcagcgaggcgaaggccgcaatcccgtattgttgacccacatcagccacgacgagacacgtcatcatcaaaccacgtccaggcatacgtgcgcataccaaaggggcgctaggatgtccatgtcgacacgacggaacgccactgtgtacggtctcaagcgtatccccactgccttgtggggtcagtcaatcccattcttggggaacctcagcgacggagtctccacaatgacctgcacacctagaaatgatgggacgatacactatatcgggtgtatgtctacgcacacaggatggtgacacaagtctcatgacaaaagacaaatccacaccacgcacgactttgaagcatactgtaaatccaccctgcgagacatgccatgcgctactatgtcaacatcggacttgctacatggacccgcatatcggacggatgaagcagtatgccataccgggagtacggctacgcatgaccctactagagatgtcagaaagactaacgtcactcgaggtcgagggcaacatgccacaccctcatcagtagagtacgagtccccactgtaaggtcctacccttgaactataaaagggcaggacccctccttcacacacacgcagctgtaacgcatccctcaagcaatactacgatccgcattgcattggactagggcgtaagcctgaatcagtataacctctgtgtcaaatcccctcctcgagtcccaacgattgaccattcgaaatgagtccacgttagcatcccaaccgaacataaattctattgtccccgatttatggaaccacgacaggtatatcgaaccgatggggagaggtatattgaactaaaaatagtttaaagaattatgatactatttcttttagcttatttccgccgtgataagttgatgcaga

SEQ ID NO: 1318 - DNA, 572 bp, Zea Mays
tagtgtagcgtaagtagtaagtaatgtaatgtaatgtagtggcaagtgtagaagaagttgactcataatgagtcagcttcgagtttgtattacccccctattatgaatcaaggatgaagttactctagataatcactgttgtttgcttttcatttgtgcgtttgaaagtttgtccgtgtgcttgacagtgatgacattttagaggtaatgcccaagtgacgattgcagtttttacttttccgagtggtgatctggcactttagaggtaatgcccgacctaaggagcccatttatactcatgccgacgtgcctttttgatttccaagccctaacttcactttttcctctgccgcttctctgtttttctgaattcttgagcccgctcgttctgcccgagagattgcaatggctcccaaatggaagagacagagcgtcgttgctccaatcatcccgcccatcaaccccaacagccagcttcccctcgctggtaatcatatgtccatcatctctgaatctgatctttttcaccttgttgagactggggttttgtcgctaaaagaactttgttcttg

SEQ ID NO: 1319 - DNA, 742 bp, Zea Mays
gtaatagcacatctttgaaatcagcatcgaaaacatattgttgtttaattgtttccaagccaaaaatcttaaaatcaagttgagacagcatggtataacggcgagacaaggcatccgcaatgacattatcttttcctttcttatgtttgatgacatagggaaaagattcaataaattcgacccacttggcatgcctactgttcagatttgtttggctccttagatgctttaaagattcatgctccgaatgtataaaaaattctttaggccataagtagtgttgccatgtttccaaagttcgaactaaggcatataattctttatcataagtggaatagttcagactgggaccattcagtttctcactaaaataagcaacaggcttcccttcttgcaacaagacaccacccaaaccaataccactagcatcacattccaattcaaaagtcttactgaaatcaggtaactggagaaggggtctatgagttaacctatccttcaatgtttcaaatgcaacttcttgtgccttcccccaagaaaatggagcacccttcttagtaagctcgtgcaacgaccctgcgatggtgctgaaatctttcacaaatcgacgatagaaccccacaagcccgagaaagcttcggacttgcgtgaccatggtagggactggccagctatgtatggccaccaccttagcctgatcaacttcaattccctgcggtgtcacaacatagccaagaaaaga

SEQ ID NO: 1320 - DNA, 357 bp, Zea Mays
gttgatgaaccagtgttttctgtttgtggttcctggtctgttcttcggttgacaatctctcgtcatatgcatacacagagatggaggaagatggacaaggattttccatgcaaccattttcatgttgaagtagtgtcctgctgccatccaatagacattactgggacgaagaacaatcctatgatatcaagtccagcccatatgcgatcaagctgtctttttaagccatagacacttcattatcaatgcccatctaatcacttctagatcaagaacccagtcttccaagatcagttggtcttttgatccgtcccaaagcaacaaggcaataacctccattcacctcttttcaacctt

SEQ ID NO: 1321 - DNA, 445 bp, Zea Mays
cgattggacctgggcgagatccactgtgcccaccctggcctccagcacaccaatcgcgcgggtgttggtggtgactcggcgctccaacgtcgcccaatggctgtcctgtgcgtcgagccgctcagcgatctgttgaaggagacgcgattgggtcgccatggatttggactgagcttccaatgccgccgagatgctggactcagaggcggccgccatttgcttgctgcgtgtgtagtacgccagatcgagtaaaccctagccgataccaattgttagcagcctactacaactacggtagagaggagaaccagaggtaggagatggaaggagagcaatagtattttcttcattcttagcgttcactgtggccagtcttagttttagtaccccttacagcactcttacacggaccacttgtccgatggatatcgaccactgggcctag

SEQ ID NO: 1322 - DNA, 543 bp, Zea Mays
ggggagcctcattagggtgcgacggaaacatacaccgcacctgcgaaggagagcgtatcatggcgactacgaaatatctcgtcgaacttggcgtcgctaccgagttgttgccccaccacggccatcaacacccgagcttcggtccacggtatggagtacctcaatcggtccgctaagacttcctggttgtgttgcgctagttgcacgctaggattaggccccgggtcaccgaatttcttgtctccgacgagtgtgtcgccgcttttcgtgtgtgcgttgttcgggtcgacggcaaggggtaggagataagctctggggcattgatctttgtagcaacggcccagatcgaccgggggaatagctacctcagagttttatccagaccgtcggattcaagtggtgcggtcatgattggaccacgacttagttgctgcttgagtcgttgatctcaaatccgagggtcagcatcgcgtgcggatccagaactaattggattcgttggattaggatcgggcggccctaggtgcccgataccccttcggc

SEQ ID NO: 1323 - DNA, 560 bp, Zea Mays
gtccaggcgtcccggagacaactcgcctcactggagagccgtgataactgatagccatgccttgcagcatatgtctaagattgttacaaggtgtcacttaccaatgtgtactacactaatcactaatgttacagttagtttcaagtgatagtcagaacaaactggcatatgtgacatacctgggctgctactttacgaacagcactattggcaggataaattctgactatttgttcatatatttctgcagctttctgatattcacaaaggttgtgatacatataaccacaaagatacttcagatctacatcttctggatctgcgttcattgcttttaaaatgcagtgtcttgccagagaagcatccccctttttcctgtaaaatactagccaatgagtccactatcctattttatttagtatatatcaaagaaaaagcaagtaatcatgtcaaattatcagcatataattaaatttataatcatcaagtagattacttgagggtacaaaagcaaaagcaaaaaaaactcaacccccagaggaaagcctccctgagggtag

SEQ ID NO: 1324 - DNA, 689 bp, Zea Mays
cgaggaattccgggctgacagaaacgtaatccgtccaaatgaagtcgcggacgtgatccgcgagacttgatgaagcccccagacccaacaccgaagccctgacgatgatgaactcgtggatctaagccggtggccctttggtggcggcaacacacaccgttgttggaggcagggccgtcaggcgaagaagcgtgtgtccgatgcgaggcgcaggttcagtgctccactccctcttcccttctccggccgcgggtggagctcatgcttgcttctagcagcgcccacgaagaactccaggtggacggtgggttttatagaggcgagccgtatgacgttccttgagatggcgcggtttggccagctccagaatccagggcgcgttttgctgccgattcaaaccacccgagctacgattctttgatcccattggttctacgcctagcgaagattgagacgagtctataggggaggatttcgcagagggtttctcaccgtgagtcgtgcacaccgaggctcggtccccgtcggggttgcggcatcgcggcaagaaattccccatggtccgaggctgcccctgtcaaattggggtcacgcacagcctcccctcaatccaaccaacggattcttgaactccgagcgccgatgaaggtctgcgcccatggcagtggcaatcttcccccttgctcctt

SEQ ID NO: 1325 - DNA, 1051 bp, Zea Mays
tggcaacaccatatagcaatgttgtagatggtatattgctctacaattttgctgctgagcttgaattgagttgtcattaaaaattaagagaaaacccagctcaaaaacggtctatcagacaaactgaataccatttcccatggtacagtgtctgcaccggatcagatcgccagcgccagaaaaatctcaccgccgatgagtctcgccatgattcgtgtcactggcgccaggattcacactcgggttggatggataacatcgcggggtaaggatcctcgccgttggtgagctggaggtcactccggtgactcaccgccgcactctgctactttgcggctggagcagattagctcgccggtgaactgccgcctctcggccttgtgccgcgtggctttgcctttccaccgcgacgccgtgactctctacggttgtcccatcgtcaccggtgaggtcgccacgacgatagacacgggttcgtgcgcatcaataactccctgccctttccgaccgccaccgcgctcaacccaaattcccggccaccgctcacttggcctataaattgagcccgccgtcagattcgcaacatcatcccgcaccaccacacctagtattgctcccagccgatcaccagcgagctcaaattttgcatttcccccaacccggttcaaatacgccgcgaagaacacctcgccgcgaccagctcaactcaggtccgatctcgccctctgtgttattgttccaacacccttccatgctcttgatgctcaccgaaccgtccaattgaactagaccgccacccatcgccgggaacacgatcaaatgtccgtagtctccgctgttctcgtggacagaagagaatagatcaccattcgtgcaattaagttaggggaaacgttctccaggtagcgaatttggtttagtccgaagctgaacactggtcttggcctcctccggccagtctgcgtgctcgctggagctcgggtgcgcacaacaccgtcgaggacttggccgtgcaaagaattagaaaccgaaggggttatatgcaaaccgt

SEQ ID NO: 1326 - DNA, 406 bp, Zea Mays
aacgacagtggcccccgggcccacctcaggggaggatgcgagcctgcaggtggggccaaagcttgtactttgcctcaacatgacctgatcggtgattggcatgctgttttagcgcatctgctgacgcgccgctgtcaatccaccttcagtcacgtcaactgccatatctatccccgcggctgactgacccatggcccccacgcctggtggtttcgtcggaccacgcgtggggcgcctcgttgccgctgccttggtttaaaagataattgtttgtcttctgcagtggcccaaggcggcttgctatcgcgtgcgatggttcgttctttccgcacctgaaatccagcacacaaactgtatgacttgtggacccgagcccccgtgtcacaaactgggttgccttggtcct

SEQ ID NO: 1327 - DNA, 922 bp, Zea Mays
cagacacctgtttcacaaccttttatctctatggtaatccgttttgagccgagtgcgaaaaatgtttttcctctgccaaacatcaaaccgagcactcacttcactcattttcatacatatatacctatctatgaagtatcggctcaattcccagtcatttcttgcctcatttcgaatttcaaccctctatggcacaattcaccgttcaagcatcgttctcgcgccgtttgacctctgtttcttcaaatcactccatttttgtatcataactctatgtgtaagtatttattcacatttaatatacttatgactatgtgactaatacatgctcacatcttctgtcattttagtgatttcacctgctcgcctacgcgtctcctatcctgcctggttcctctctctctctctctctctctctctcgagaagttcctaggtagctatcactctattcaagctttacctactgatctctactctcgcttatcttttctccttatcttgcagcagtcaatttaggatagtgaggacgaagaatgtcacaccgtgtgggggaggagatgacgaggaccttcctcgccccttcagacaggtcaagggcatgactgtctaccttgagtagcaagagggaagaaagaaaaggcatcttgacagagccactcgtgcagtgattgcagcagtagatcaggtagagcagggaggccagttacggatttcttctgatcagattgccttctgagttcgtcgccttgggtctcggactcgctcctccactgcttgctccactccttccgacccagtctccactccacctcccacttcgctagctcctgccgctctcgagccgtccactactcccgctgcttccaccacctccaccactctagcttccactgctcccgcttatgctccacctattcctcc

SEQ ID NO: 1328 - DNA, 525 bp, Zea Mays
ccagtgctaaagccgccacgccgagccatgtcaggtcagccaatagaagatctgttgttatacatctccggcactactcacgtggtaagcaccacgttagtagtcgagcgagcagaggaagggcacacatatccagtatagcatccggtctacttcatcagcgaggtcctaggaccctctaaaaagaaatatccccaagttcaaaaactcttgtacgtagtacttctaactactcgcaaactctgtcactactttgacgaccacaaagtcatagtagtcaccggatttccaatagggtatattcttcacaacaaagaagccatcggaagaatagccaagtgggcctgcgagctgggagctcacgacatcgagtttcggcctcacacagcagtaaaaactcaagcactggttgacttcatatcagaatggaccgaacaacaagtacctgacaacccggaggctacagaagtatggcgaatgtatttcgatggctcgctgaaactgtagggagcaggcgtaggaatc

SEQ ID NO: 1329 - DNA, 1975 bp, Zea Mays
gattggtgctatctcaacgacgattcgtacacagacatttttcacaacgaggttaaacagcttgtggataaaatcttctcctctgatggccacaaccacgcatgtgtagtcacttgcggttccactagcaaaacccaccttgttatagtatgtttctttcatttatttatattcatgctaattgtaagaattgcatatcttaactgcatgtcttcaatcaagctcactcaattaaatttccaattcaggggtccgatcatcaaccgggcttgctcactatggccatggagcgaatatttgactatgccaaacctattagggcaactgtcagtgtttcctcttatcatgtgcttcaagacagccatgtctttgatcttttggatcctaagaacaacgaggtccttgtgcgagaggatgctgatggaaggactcatctgaagggcctctctatggtatcctattttcttacacttttttttttctgaattcatgttcttgtcttttcattttctcaatcacacaaactgaaattaatcaattaacgcaggttgaaatcaattcaattcaggagtttcagaatttgtgttatgatagtgacaaacaccaaaatcgcaccaaagtttccaaagctaaaggacacaatggttttattatttttatttctaaatctgatcagaatggcaaagaatcctctgtatcaaaaatgcattttcttgagttggcaggtatgtactttgcatacgtgaactgcaattttatattctacattatatgactaaataaaattttattctttaatttttattagaccatatcaatgataagcaaaagagccatggtgaaagatttgttcaacaaaattccaagaagtccttatatgccgtgatggatgttgtgcaagctctaaacagccaccagagcttcataccctatagaaaaagcaaaataacccatattttgcaagactctttatccaagacaggtggtgctttattaatagcatgtttggtaaggatagttggtcttaatattttgtattatgtatttctttttggtgatttttaagataaatattaagaaaaataaatgacttcacatatcatagattaaatgtttacattattttatgtttattgttattttttgtcggttttgataaaagaatctctataaagttgaaggtggttttaacaatgttgctcaacaacatatttcttaaaataaaacatataagtatattctgtattgccttttgttaaaactcaaaagatagtatatccatgtagctgctaaaaaagaatgtatacagatacattttttgttgtcgctattctatatcttctttgttgtttttgtttgacagaatacacatttctaaagttaggttgcattatttgttataacattctatattttaccttaccatactattggaattgatgcattgttattgctactatgccaatctaatgctatgcattcttgttactatgccgatctaatgctatgcattcttagtgtaggatgaagtctcatgccaagatgcaatctctactctaagcttggcttcacgctcaagccaagtggtcaatgaacaacggtacaacttatccttaatcacaaaaggttgttcaaagtcaaatgtaaagctttcagtgaacaataagaatttgtcaagatcgttattgtcttctatccaacaacaaagtcccgtgctggagaagccatacaaaacccaagttaataacattgcagtaaaagcaacaagatctctcaatgccaataagaggtcgaattctgattttggaattactacatttggtactagcattctatcaacatttaaaataataatcattttggtgttattcagatctgaaacaagcacacattcagcaaaaaagactgtaaacttagtctctgcttcgattaatttgaaacactctggtgctaagtctattctaagggaaaggta

SEQ ID NO: 1330 - DNA, 843 bp, Zea Mays
aagcaactaaccactggtgctgaatgaaaactgaagataaatgagtttgaagttggactgtcagattgcttggagtctgaaattcagactgacagtggaactgcatgaacttagggctcgatttcaaccatgatccagggggaatttggctatggtttctataacaaaaatgtagctggatcatagggctgtaactttgatacagagtgatgatcgcgttactacacgaaattgggagcaaaaccccctgcaaatcgctttgttaggtgttctaaaccacatgctgatggtacaataactggattaggccgccagctcagtccctcgccgccgacgaccattgcatccggatttgcaccgtcgccacgattcgtgctcacctgtaccggataatgctcctgggtgaaagattctggcgatgaataagtttggattggatcaacggggagttcaccgcacccgctcggattgcagctggccgaattggtcctcgccggcgttagccgtttaccaaccatgctccacgtgcccgagcatctacccacgtcgtagttagtcatgttaagcgtatctggtgatcgccggagggcttgccactgtaataggacaccaatcgcgcgcgccagtaattcctgttttctctggccgccgcgcgtcttcgcccaaatccccagccaccgcttagcgatcctataaattgatggccaggtctgttgcgccatattatcacgaagccaacgcacccacgcttgcctcgaatcgtcccctagaactctccaatttctcactctccccaattcggtttccgccgccgtgaaagcatcctcaccgtggccagcttgc

SEQ ID NO: 1331 - DNA, 668 bp, Zea Mays
ccggtgggcacgacatacttcacggctaggggaggcgaacggggcacgtcgattacttccccttcctgcaagctccctcttcagcaaccacaccctaacgtgaggaagaagtggacaactcacttcgcatgtagatacggataatgcacgacacatgagtgaattgtggatattcatgggatgtggacgcttcctcaaaccactattctccaataatctcaatcttcccctcctttcaactgaagagagccactgccgccatacgtcgccctttcagcaacaggctcacctttgacttctccactagccatgaagacatggagagcaggtccaagctattatttcgctactctagcgagcaagcaaggctggaagcatctatttaccgaggatctaggggaccacaccacatcgggcatcgcggttcgccgggcttcgtcgatgacacctcttcatggtaagcaatgaggcaagtgcagatgaggtaagatgtattcccccctccttcaattttgggtataaaacactgaatttttgaacgttgtggtagcaatgcacatcagttgcaatagactagcctcactcggtgcccaaactccagttttgtttctagccctgcatttggttttcttcacctccatatttgacactgttttgcagtaggctag

SEQ ID NO: 1332 - DNA, 631 bp, Zea Mays
gctgaagttgaccccaatgggtgtgaccgtgcaccgactgaccccaatgggtgtgaccctgctgaagctgaacccaaggggtgtaatcctgttgcagctgagcctaatgggtgtgatcatgcaccatcttttgtccgcattttttatgaggacgaagaagaagaagttccattaattcgcaagaatagccgactctacagaggtagtagagcagatagtgatattccttctccagccctgtctgctcttgttagccttcaggatttatctataacaaattttgatcagacccttgaggatgtcattcctgaggatatgctgccagagccgactgatggtgatatggtggatgtttgttctgacattccagatgtgggattagaggtatcccgggcagcatctcgcgcgtcgtcgaccttggagggcggtcttcagtgtcaagaggttggtcaagattgcccgactcccatggaggtgactgaggatccttcagccttagaggtggttgttgaagaaaacccagtcctcaagggtggtgctggcggttacccagcccccgagggtgttgccggtgatgatccggctcaggtgggtaatgcaagatataacccagcccccgagggtgttgccg

SEQ ID NO: 1333 - DNA, 810 bp, Zea Mays
cacaataccattgacaacctggtataacatgtttgctcatcaaatacctaccatcactcacctttacccttaggggtgtctacaactgcaagagttgcatcccttttaccactccagccgtgttcactcatgaaactagttgaactgcctgaatcaaccaggaccaaaacttgttggcaatgaatagatgcccacagactaattgttctattgtcctcacttccactgacaacggcaacaaagatagccagaactccctcttccgttgatgcctcagactgttccttagtctcctctttctcatcctcattcacctcctcattgactgttatcgcccacatttcttcgaccaaatgcaagggaacactactggaacaacaatgattgtagccccacttctctccacattaaaaacataaacccttagctcttctatatgcctttaatgcagtgagtttattttcttctgccatatgtccagtaactgttgtcttacgatgttctccatatggggtaaacccacgacttacagggactgctactaaatttactcccactgaattaggcttccctagtggttttgaatacccactcatctccacccttctattttccctttttccagtgtgcatcaacacaacctcttgcaacatggctggagaacaggtggtgtccaaatcaactggacgttgaatcaccacaaatgacttaatatcatccttcagcccatccacaaaccgagcagtaatcatagctagggttaattgtccctcatgtgctagcaaccgatgcattaaaatgtcaaactgc

SEQ ID NO: 1334 - DNA, 583 bp, Zea Mays
ctcgcattggtgggcaagaattatagtgtcgtgaccttttaatcgatcgttgtgtttgacttccactatgccatattggttttctcgcgttgtatttggagaaaaccaatcacaatcgaagaacaccactttgagttgtttatctccaaaaaacttgtactcgagtatatcattaatgactccataataattagtcaccttcccttcatcatcgacagctctagttacaactccggaatttgtcgtggctgctagaggatgatcatcttcgaaccttgtagaacggaatctaaaaccattgacatcataccgaccataacgtctggcagttactgctcctatggataattgtcaaaggtccgagtgtatattgtcatttgtatctacataatctcgaaaccaacacaagaaattaggtcccccatcttttccctctcaacaaatctggtcacgttcacagccagagatgcaattttgagaatcaaattcactgttagtacaaggaaacaaaccttttagtataacaaaaaaattgtagcggcaatgactaaaattaagtttacacttacaggagaaactgact

SEQ ID NO: 1335 - DNA, 534 bp, Zea Mays
tttttatctgagttattttgtacgctagaatcaccacacacaattaacaaacacatccaccacaataatcggacctggtacatatatgtttatcgatgcgctcttcacacaataatttgctttttaaattagacatcacatgagcaccactaattttacccgcgaccataaccatacacatttagaccacaacaagcaattcatcgtgattacgagcttaaccgaaccatctaactagagcaacgacatagcccgctaaataacatacacgtcggtttgcctgtcactacatacattacaacctctttataaacacacatattcataagtattttcgcacactgaccaaatcatacgaatcgtaaaccactaatctccaaatcgcaatcaccacacatttacttcccaaatcatgaacgcatacatgtttatcctacgaaccggagcatttcaataattatcctaaaaacaactaatctccattacacacttgtatcacaaacctaattgacttacttggagtgtctactcaaa

SEQ ID NO: 1336 - DNA, 647 bp, Zea Mays
aggaactagagagtgcaagggtagagcaatagaggacggcgagggagctttctgagcaccgacttcgtgcggatagcttcaaacaaagtgtgcaagtccatgtgtgggtggtcttcgaggatttccgccaagtgtatgagcagcttggtgtggtggttcacccgctggacttgaaggtgatggtctcttcgacagttaggtcgagtggttgcagacggagacgcacgggctacctatcgtcattcaagggctgatgactctatccgcccttgtgacatacgaaggcagttttgaggcgttgatctatgaagggtatagccatgttggtgcttggcgatgattttgttgtgaatgagaatgcatatactgaagtcagcgcggccgctaatatcgcaacagaggagatgttggaccgcatgtggagcccctcgatgctgatattgcgcgccgctggtcggtgacggcgttggagcgggtgtgtactcttcattattatgttgcttcgtggtttttgttgctatttatggacccgttttgtgcaggcgagggcgaaggctgaagatgatgtaacttcatcatcggatcctgtagagtccaatttgacccaaccaaccatagagaccgatgttggcgacaagaatgaggtt

SEQ ID NO: 1337 - DNA, 728 bp, Zea Mays
cgaggacaacggcagcagcagcgacgacgacgacaagggcagtggcgacggtgaaggagatggcgacgacgacggcaagggcgatggcaagggtgacgacgatgacggcaagggcgacgacggcggcaagggcgacaacggcaacggcaaggccggcggcataatgctgctggtttaaatattagtatagatagcagtagtagtagtaagtagtagtagattaaggtagtattagtgtaagtagtagtgtagtgtaatgtaatgtaatctaatgtaatgacggggtgaagaggctaactcatgatgagtcggtctaaagtttgtaacgatctccccctacgaataaaaatgcagttctttgctgatccactgttgcatgttttttgctcgcgcactcggcgactcactggcattttagaggtaatgcccaagtgatgcttgtgatctccagttttctgagttatggtctggcactttgcgtcgacttatcgagccaacccatacttctcctgacataccccttgaatttcgaaccctagttctcgctttttcctccaccgcttctctgttttctgagcccttgagtccacccgcttcgcttgagagatcgcgatggctcctaagaggaagagacagagtgttctgctccaattatctcaccaacagatcctaacagccaacttccatttgtcagcaaccacatgttcgttgtctccgaggctgacctt

SEQ ID NO: 1338 - DNA, 385 bp, Zea Mays
gatttgcaatacatgaactgttcattcattacgttgtggtttgtttgggtgttcgttaaatagtagcggatcttggtgtttgatcttttcagatttgacaacgccatcttaattgatctggcgtttgatcttggtgtttgcagttcatgaactttaggaaagatgctaagctcttatcgtgtcaaattggagtttgaccttgtttatttttagcttcataattacagcatattaatgatgatgaaggatgtgttggtcctgatgcatgcgaatattacatgtgtgctgtttgcttgatctttggtagctcgcgattattcataacttggccctgcagcctaattacgagttcacatttcaaatgttagcctttcttcacttcctg

SEQ ID NO: 1339 - DNA, 761 bp, Zea Mays
ggaccgaggcggagagttcacagcacaagccttcatcgagcattgttgcagtgaagggatcaagcgacacttgacagcaccgtacacgccggagcagaatggagtggtggaacggagaaaccaaaccatcatgggaatggcgcggagcatgctaaaagccatgaatctccctaactggttctggggggaggctgtggcaacggctgtatacatactgaacagatcacccactcaaggaaatgaagggagcactccatatgaggtatggcatggaacaaaacctaccgtcagtcatcttcgtacattcggctgtgttgcacatgttaagcaaggcaacaagcgtctaacaaaacttgaagatagaagtacacaaatggtgttcattgggtatgaaagtggcagcaaggcctggcgtttttataatccagtcacaaaacgcgtacatgtgtcgcgtgacgtcgtgtttgaagaggatcgtgcctgggactggaatgaggaggagaagactgggacagatgtcccatttggtgctgagttcgtgcctgtcgagagctccattcgtttgatggacaagccgggttcttcgtcctcgtcaccaagcatgtcaagtagtggtcgttctgggcctcccactcatcctggtggccagtgggatgttcaggatgaacagcaggtgcccacacctgagataatgggtaccgagtatgccacacctcccactgaaaccccagatcttgatgctgaccatgaagatgatgcgc

SEQ ID NO: 1340 - DNA, 872 bp, Zea Mays
gacggatcggaggtcgagcttggtgaagaattgggtgccatggagttcatctaggatcttgtcagcgactggaatggggaaggtgtccttgatggttatggcgttcagcgcacggtagtcgacttagaaccgccaagatcggtccaccttcgtgacgaggcccagggatgagaacgtagagatgctgcgctgaataatcccctagtccagcatggacgcacattgacgctccaattcgtccttgtgcaaacagggtattggtatggtcgaacggccaccggtggcgccctcggcaccaaggtgatgctgtggtcacgactgcgcgatggcggcaggttgtgcagctcatcgaagacgtcgtcgaaatccaccaagagctcctcgaggaatgagctgctagcagtggtcgtgctcatgaccagcgcacgagggcttgccagccactgccagcagaaagcgtggttctgatatgtgaaggagaccgcgcggttgctgaaatcccacacgattgggccgagcatggcgagccaccgggtgccgaggacgacatcgtatcgccaaaggcatgacatagagatcagcggggaacaaggtgccaccgattgtaagcggaatgtcacggatgacgctaacgcacatgacgcgttcgccgttggcgaccataaccgtgaggcaggttggtgctgtagaggcagtctggtccgaagggtagcggcctctaagatgaagttgtaggtgctacccgagtccagcaaggcgacgagggatgcgaatccgagctcgacccccagttgcatcgtgtcgttgatgcgaccctggctagggcctggcgtcctcaggcccacgtcctcgacggtctccgtggccgcgcc

SEQ ID NO: 1341 - DNA, 350 bp, Zea Mays
cgattagaagcaagataccgtttcggtgcgctaaatcgtggccatagatcggagatccgagggtggcaaaatgctcttgcgtagattgaatggagaccatagatcgctgatccaaggatcagaatggcataccgaatcgagtatagctgagtctaatctgggccgtcggtctagatccaagggcctctgtgtaacgacaccccttcgctagcccttttgcgcataagccgtttgtgatactggatatcaacccgtcgtcccgggctgctgcgctctgtgtctcagtttcttttacgctagaacccctacgttttccagatattgaggcccagtccagagaacagaaaaac

SEQ ID NO: 1342 - DNA, 601 bp, Zea Mays
gccggggttgtgcgaaattgagctgcggtgactaattctctggtccaaatgaagctatgcatagtggggaccgaggggaacttaacgaaggtgcttaccaccgtcagaagatgaagtgggggctcggccacagggaggtgcagactacagaggtgatggagttacgacgagcaattgtcgtgctcccagtcgcccacaacactaattctaccggtgccacgcgacgaggaggacgaggcgaactcagacgaggactacttaccgaggttttggctgcaaccttcctttcccacagggacatgcgatccatggcggctcccaaattccgatgaaaaattgcggcgggttcagaggtcgttccaatctcacgccaccatgccgagcatccaaatgggtcggtgattcacctagccccgccatgcacgcatatccgttggtggctcacgctcgcccagaagcatgtcagcaacgatggcgtgacagataagggtgggcaagggggcttggcgagcgccgagcgccatggcagaggaggtgagggggcccaagctgagaaagacatcggcgttgggcagaggagtaggagcagggctacccccac

SEQ ID NO: 1343 - DNA, 421 bp, Zea Mays
acaaagtcaagccgggatcaccataagtcagggaagttatgcactgaagattctgcagggagccgggctggcagactgcaatgccagtcacacacccatggagtcaaggctgaaactcaataagtatagtaatgatgattgtgttgacgcaactgagtacagaaggctcattggtgcacttcgttatttggtgaactcgaggccggatctggcgtatgcagttggctatgtctcacggttcatggagaagcccactgttgaacaccttgttgcagtcaagcgcatacttcgttatgttgcagggacagtgcatcttggatgtcattaccagaaggaagcgaggaaggtggatctccttggttatagtgacagcgatcacggtgctgatgtggatggtcgcaggagtaccagtggtattttg

SEQ ID NO: 1344 - DNA, 567 bp, Zea Mays
ggggagggatcgagcttgaggacgcaccctgcggcgaggtgtgtacagaggaggcgagagaagaactggagatgagggaggcaggatgtgggtgataaggagcgtgtggaggggtggcggcgaggtttcgggggaggtgtggtggcgcgggcgaggacgaaggagcacatgcgggcaaagatgaatcacgggggaggacgacggaaggacgacgggcgaggacgaaggagcacatgcgggcatcgggcgaagatggatcacgggggcgggggcacgcgaatcacgggagcggaggcacggtgaagcaggtggacgcctactttgctctcttatagagtagtaaagattaagcctggataatggtaaatctgcaagatacatgttgtttaacgcctgaatacaataatgtctttggtaacatgttttatctaaaaatatggatgtaatgcccttttgcaattttactgattttatttggtcactcaattgtagatgactcagtcgttgagcaagctcggtgacagtgaaaaagcacagtgcacagtgcactactgctgtggctgttgt

SEQ ID NO: 1345 - DNA, 836 bp, Zea Mays
tgagaggaaagggttccttccccccaaggaagtgtcgttgtggaggttggagaaagaaggcaatgtgtcgctaccccgagacaacaaggtgatggtgcttgcacctttctacgagcgcgggttcgggcttcccctgtatccctttgtctgagggttgttgttcttttatgggctggaggttcagaacctccatcccaactccatcttgtacatggcatgttttatcaccctgtgcgccgcattcctggggatcgacccccacaggaagttgtggcaatacttcttcagtggtagggtgaccccgggccacgacagtcgacagtatgttggttcggtcaccttccaactttgctcgaggcggaaggggggttacctcaagatctcgctccctacctccgtgaggtacgagggcaaatggttctatgtcaagaacctggacaacagtgctccatgttttactggtcgggagccgatgttgacgaacgactagaaccgcgggccagagacgagtttgaaggctggggtggatcctcttctagcggcgctcaatatgctgaaagaacaaggcctcactagcgcgagactggtgtgtgtcttcatgcaccgacgaatttagcccatgatggcttgccagaggtcaatgctcaagtattatggtgttaatgacctcaaccgccactccaccgagccgctcgcgttgtccgagattgaggcaagggtcaaggtcatcactgtgttagcgttagggttctccatggatgaggacttctcgcaccccttttctcggggtgtaccgagtggtctggtgagcccttcttgtcattcctttgtctttt

SEQ ID NO: 1346 - DNA, 845 bp, Zea Mays
agaagatggtatgagctgacctgaatggtgctggccacgacgagattgatttcacggtgttcttgaactgaattggggagaatccgaaattagtgctcgctggtgggggatttgggatacaggtgggtgcagtagctgctggaatacatggcgaagccgaaggggggctcaatttatagaccaagtgagcggtggccgggaatttgggttgaactcggtggcggtcagagaagaagcgagtcaccggcagggtgattcgtggcagttcatgggataagaagccacgacagtcactgggtaatgatcatagttcacggcgatgtggtcactaaccagaagcgtggcacaatcgtggcggaggacgcaaactccggcgacggccgcacggccacgttgccgatgcaagtggtcgggacacagcgaggccacagcagcccgaacttatccacgacgcaatctttccatggctaggcgtaatccactcacccgcagcacgaatcacggcgatcggcgcgaacccgagcatacggctcgccggcggcgaagttatccactccggtgatatttccagcattgtaccatgggatatgttcatcagtgtacctgacagccaagttctagggcagtttttctcgaaaattttcatggtaacctacccagacttctgcagcaaatctgtagagctataaaccagctaccattttgtcatagcaaccttggttcaattcttaataaatcaagcttgaattcatgctcaaagtctcagtggttgcactgtttgtctgaaaagtcagacccagtaacctgacagtccaactttggacttaattatctcccaaattttc

SEQ ID NO: 1347 - DNA, 596 bp, Zea Mays
ggggatttgagcgacgacgcgcggcggtcggagaagtaagagttcactggcgcgcgattagtgtcctattaccgtggcagtcattccgacgagccacagagagtcacaagggttcacagcgatgtggtggacaggtagagacacgcggcggacggcggtgatggcttaacggcggtgagaagcttatccaagggatcagtgagcaaggggagaggcacggcggctagccggagtggcgtctagctcatcgacggcgatgctttttcaccccgcgatgttatctacttgtcacgagcacgaatccagacgctggcgacacaaatcgcggtggaggtatcatcggcggtgagatcactgaagcttatcttcttcagttactgtaccatggcattcctcttcagtccatctgacagagctacttcagggcaattcctctccagatttcgcatgacaacttcatcacccctctgcaccaaagttgtagggctacaaaccagctataactttgctacattgtgttcccacaaaaaatcactggatcttgcttaaaattaagccctaagttcatgtaatcctactgtcaatctgaaattcag

SEQ ID NO: 1348 - DNA, 548 bp, Zea Mays
ggtagtattcttggtggacttagccgtcctgccatcccacggaattgatgtgatcttagggatgaattggttaaccagacataatggcgtcataagttgcgcagataagaccattcttctcactgccaaccaaggaaagttagtttcgtgtaaggctcagccactaacccaagatccaattgtgtttagcctagcagcagaaagcatatctgtggtagaagaattcatggatgtgttcctagaagaattgccaggaatgccgccagaaagggatgtagaattctacattgatctaatcccaggcaccgcacgaattgcaaaaagaccgtactgcatggctcccacagaattggcagaactgaagctccagattgcagaacttcaccagaaagggtacattcgtcccagttcatctccttggggaggaccagtcttgtttgtcaccaagaaggatggaagcatgagaatgtgcattgactaccgatccttaaatgaagttacaatcaaaaacaagtatccactacctcggattgatgacctcttcgacc

SEQ ID NO: 1349 - DNA, 617 bp, Zea Mays
aagacaaattcgagggtttaaaatttgatcacatgggaagggttcgcaatgcagcagcagatgcattgtcaaaattggggtccacacgggcataggttccacctaggattttcgtccaagagatatagcaaccgagcgtcaccgtagagcatgctgaagagtgcaatgccttagaccaagcagaaacagatctcaatgactagagggagccgattatcaggtacataaaaaatgaggaagaacagtatgatggggccgtgacagaacgtatcacaagacagtcggcccactataccatgatagggggtatgctatacagaagaggtgcaggaggagtcctcatgaagtgtattcattcggctagaggaagccagctactagatgaaatccatgcagggcaatgtggcatacatgcagcatcaaggacattggtagggaaagctttcagatccgggttctactggccaacagcaaagaatgatgtggcatagttggttctgaaatgcgaagcattcccgttcctattgaagcaacaacacttgcctgcccaacatttgcaaactattcctgtaacctggccctttgtgtgctgggggctggatatgattgggcctttc

SEQ ID NO: 1350 - DNA, 709 bp, Zea Mays
actcataccttttgttgccgtagtggtaggtagtacactagtacgtacgtacgaatagtcaccaggaggtgaggacacccggcctatctatcattgtactcctatacggtgtacgtcggacataggaacactgctctcaactgttgacgacactacgacagcgatctcctcctcctatccgatccggacgatccccggcccgcatgtctgtctgttgggcgtacgttcgctccaggtgcggttgcggcctcatgtgcagtggaaaggaagcggcgcgcgcgagacatacatgaacaggccatccgctgttgatcggaggaggtttggatcgcgcgtggcgtgggtcatcttctcgtgtaccactcctgcgcaggaagaaccagtgggcagggtttcaaagattgcctcgggatcggcggttttgaccgcaagcagcacgcaacgcaacctagggagctgaccccaatgcgtgacgtgacgtcgcccggagctgaccccaaacctggggagcaccgccctcggaactgccgtctggaaattactagtactggccaggattcatgcactctgcacggtcatcccatccagccttcccgagcgtaaacaacagaaaccaaggttctccacttgacggacgctgtacgatcctgctccagccagccagccatagtgccccccgcttctcaaccccacgtgaagcgggcccgtg

SEQ ID NO: 1351 - DNA, 997 bp, Zea Mays
cccgagcatgtttaaacttattgcatgtacgtccgttgactagaactctagacgatgatgtagccaagatggccgcaacccaatccctccacttttggccaaaacccagggccttcaagacatctagaaggtaaggccagctcaaagagtaaaaagctttcgatatatccaatttaataaaaagagctgccttattgctcttgtgaagactacgaataacattctgcacgtagaggaaattgtcatgaatgcagcgtttctttatgaaagcattctgtgaggtggacacgagcttatcaagcattggggccagacggtcagccaacaccttagtaataattttagccaggctgttgatcaggctgatcggccgaaactcactgaactctgtagctccatctttctttggaagcagaacaatgtgcgcctcatttatgagttgtaactttgaggttttatggttatggaaatcttgtaatgccttaatcaagtcgaccttgataatttcccaacactttttgtagaagatcccaatgaagccatcaggccctggggagcggctcgctggtaaagccttaattaagtcagtgatctcttggtcagtgaatggggcttccaaatgtgaaaggtcatagggtatgtagtcgagggatgaccagttaaaagccatggtcctaacagagctcttccctagaacattctggaaatgtgagaatgtcgcctcttctttttcttcctaagtgaatgccattcctgagctagtgttgatgttcgtgatataaatttttttccgcctgaccgttgcatgtatttggaaaaagaggtgtttgtgtccccttggcgaatccacgatagtttggaatgttgcttggccctggatttttggatggctgctaatccaagggcctttgttttaagatagtgacggaactccagttcctccccctgagagttgtctgtcttcttgtgcccactccagaagtagcagagttacttg

SEQ ID NO: 1352 - DNA, 607 bp, Zea Mays
cacacacaaggctggtttgaatttggaatgcactgttgttctgcctgtgatccacttggtggtttttatttgcgttcacatattaaaaaatatattataccctgattctgagtcaaactttggttagacctggatttgttgattagtttccgttgttgtgatctgttgaacaaactataggttaggtgagttgtcagattcttagatctgtcctgtacgtctgatctctaccatgttacaaacatctgaaacttaataatagtcactactacattcacacctatcttgtatggatttgctgttgaaattgcagaatgcttcccaacttgtgcatttttattacatccccacaacttcatcgtatagtccagacatcctttgtttgtgtagcaaaatagatgtgcaattgtttcattgtaacaatgtcctgtatattaacctcggcgactctggtgctttctgcaggcttctcattcttatctgcatggcatgtaactgctgcacagcgcgctacggctggcgtagcggcagcaactgctggtatgaccaggatccgtccaccctcattatcgacgatgaagcgacacccaattctaggcgcggacga

SEQ ID NO: 1353 - DNA, 425 bp, Zea Mays
gggacacaggcacactcgccggggacatagacgacgaagggccagcaatgcggctggtactgatggtcgtggtgacccttcggatgggctaccccagccccctctggaggacgttcgcgccatttctgggcccccttccccgcctcgtcgtttcatcaaacgcaccaagaggatcgcccaggctgaagatgatctccggcgtgctcttctcatctttgttgtgggactaaggtgttctggccgcaccgcggaagtctctattgcgctctctctaaaatttgatcttgaggatgatgcgctcgaccttcgcctggttgcgccgaataccttcatcgcccttctacccaacgtggagctggctgatcggatgctcagtgagggtcagtccttctatgcacctcctcttcagatgcacgttaggaggt

SEQ ID NO: 1354 - DNA, 360 bp, Zea Mays
gtgccttccattccattacttgcggaattttacttgggtccacggatatcccattttccgacaagatgtgccccagaaattgtacttccttgagccagaagtcgcacttactaaacttggcatacaatttgtgctccctaagtctagttagcacgattctcagatgctcttcatgtctcttttcacactcagagtagactagtatgtcgtttatgaatactacgacaaattggtccagctctggcataaaaacagagttcatcaagtacataaagtagttaggagcattggtcaagacaaatgacatgactaaatactcatatagcctgtatctggttcaaaatatggtctttggaacat

SEQ ID NO: 1355 - DNA, 607 bp, Zea Mays
ggcataccttctgtgctttgatgaagacgacgatgtaggcgcaaatctctggtggccgcttcatcatgattaccttcttcaccaaacaccgcatcatcgagaagacgtggacgaggaggtggtggtggcggtgcttgttgttgcgtctccaacacagcaagtctgtcgacgatctcggacaatcgtcgatccagcctctcgtaagtcttgccaaggttcatgtcaatgaaggcatcatgcactaacttgtggaccgtctcctccatttgctccttcaggagcttgttgtttgcctcaagatcttggtggctaacacattcatcgaagtctgtagggatccttgcttcttcttcgtcgcctgccatcgaaacacaaaaataggaaacaaacggtgaaggttatcctaataatttcactacactatcctctcaggtggaacacaggaacacactctatcgtatcttaccaagctcttacaagtgtctaacgaaatacaaagcaaaggatggtacaatcggaggctggttcatgatacttaccaagaggtagtgaaaccacgattgcaaggtcaaatatgtattgatcagaaggtatagtatgtggagtt

SEQ ID NO: 1356 - DNA, 527 bp, Zea Mays
ccctatattgttgcctcgatagtatgacaactaatgtaagggattctggtatatacacgttccgagcacagggcatgatgtaccacaatatcaagtcatttggtagggaaggtggggcagagcataaacaccttgagctttacttttatgatgatgatcccaatctctagcatcggtaccgtaagtgccgtgaagagcatcaatagaaagacaaggaggttatcaaacaaatagtcatcatactacgtggaaacccatactccaagcaccttaggaccatgggccacgttgagaaccttgatggctatcgtaccgcattgaacctagaccaaacattgaactagaagacgtataacacacccctcactttggaggtggccgctgtctggatcgaagggagcgaagggcaaggccagttcagcaaagagtgttacgctccatgggaaggacagctcaagccactacatccgctcataccatggatgctacgatgcactatcatatccactgttcttccctagaggcga

SEQ ID NO: 1357 - DNA, 577 bp, Zea Mays
aaggggcgaggaggatcctcgtcatctcctccccctggtgccgacacattcttcgtgcgcaccatcctaacccgaagactgtatatgagagagagaagctaagcacaagaagatagcagccgataagatgacaaaagaatggataatgacctggaaatctcacgagagaggaagagaatccaggcaggacaggagacagctcacgggcaggcgaggtcactgaaatgacagaagaggtgagcatgtattagtcacatagtcataagtatatgaaatgtgaataaatacatacatagagtgttatggcacagaaatcaagggatttggcgataaaggggtcaaatggcgtgaaaacaaagtttgaacgacgaatagtgccataggaggtttgaaattggaattgaggcatgaaatgacttggaattgagccgatacttcacgaataggtttatatgggtaaatatgagtgaagtgtgtgcttggtttgagtttaggtgaagaaagtggaattgtggcactcagctcgaaatcaatggctataaaggggaattagagtaaattgaaacctgggatattg

SEQ ID NO: 1358 - DNA, 658 bp, Zea Mays
gggaggtatctccgtgtttctgtgcagctgccgtgtacctcgcggaggcagtgctccactgtgtgacccttaattcctcgccggaatcactggtccgtcgcggaacagacgtcgccgtggacttcaccactgccccctcggaatgccggtaataacctcctctggttgttcgcatcgctatacacatggcagggacatattcaatttaggaagtaggggctaggggcgtgtgttggggaagcccgtcggcgttccccgccgcggtggccgctttcttcggtggccgcgggaaggaggtaggagatgcagtggccaccgtccttggtttgatgggcggtgcagatcaatccaggaagtaacctttcgcaggggcgatctggtccgttagatcataaatggacagacgcgaagtgatcctaacgttttaaatccaaaccgtcgatgtccgatctcgtggctgcggttgcgtaccggttcgcggtgggacgtatctaatccggaccgtccgctgttgatctcgcggccgaaaaccactgataccccttcgcgttggcctttttgctaaagaaaccctttacttttcaagaatagaacccgcagtccagtgtatagtgttctgggtctagggtttaattgcaccggggtccctgcctttctc

SEQ ID NO: 1359 - DNA, 621 bp, Zea Mays
cttatcgattattactttacctcatccttgattctgcttcaaaatattagtcacctcgactaattctatgttgtgctcctatatgccccttgccaaaagtattttattcaagtatggtctatacttctctcaatctattagatctgatctcactcttgtgcttgcgacgtctttgtagatgcccactgaccataactttcttgtctttttgggattctttcctcttttgtcattaaattgccaccatctagcgaactctagtcctttggtattgacatgcttgtacccctttaatgcccttgtttcaaatacttgcctctaaatttctactacctacttagacatttcagtttatatgttcctgaccttcctgtcttttgagagcctttcctcttctattgttaagtcgctatcttttagtaattcgtactcccttggtcttggtatgctcgcaccttcggaatcttgcatactcttactttttatataaatgctaacctttgtacccccaatgtctgtttaagacatttcagtttacatgctcttgaccacctttgtttcttcatgatccatgagcgatcgttctattcctcacatccttaatgatctcattgtttccat

SEQ ID NO: 1360 - DNA, 354 bp, Zea Mays
ggcgaaggcagtgttccatatccaagttgccaaccgatgaatatccagttatggccaatatcaaccatagagacctcattctcaggttacaaaatagacaaatcatcaggggctacaaggttgctctttcggaataaggccagcctcccgatagttgtacaacatcagcacaagctcctcgccctcaaaaagtgctctaagctctgactccctagtacaacaaggatcaaggagccccctcgatgctcttgttagcaaaaccctacaatctacatctgacttcgccccctcgcaaagaagcaagggagtcaaacctaatacctcatgaagcgagatcctaaaactaggcccgcc

SEQ ID NO: 1361 - DNA, 370 bp, Zea Mays
ggccgatagagatttggttgacaatgtccagtggcatatcagaccagtttgtgtagccccattagatggcgcctgctcattgagttgttagttgaccaaagtgtctatgcagtgctcgtccctgagatggcgcctagctgccccgtgcatgctctccggtgatattgtgagaaccttggcagtattcaataatggcagcaggaggggcggctgggcataattaggccatgtgtcaagagacctgtggacagccgcagatcaagacgacggaggccagagggaaaaaaaaaggttctctttctactactttccagcggccgtaccggtaccggtgaccgaatcattttagtacgtacgtagtagtagtgct

SEQ ID NO: 1362 - DNA, 683 bp, Zea Mays
tacaattcctcgtatcattcggcacttcggatgactccttttgaattggtctatggtcgcaaaccccctccattggttccttacagccagggcaccactctggtagatgtcgttgatagcaggttagtggatcgggatgcattattggatcgagctcgtcatcatttgttgaccgcccagaaccggatgaaacaacgttatgaccttcatcaccgtgaggttacttatgcggggggtgattgggtttggttgaagcttcagagccatcgccaactttcagtgagacagggacactatcacaagctggcgcccaaattttttggtccttatttggtggtcagcaaggtgggcgaggtggcatatcgcctagctctcccaaccacggccaaaattcatgatgtttttcatgtctccatgttgaaaccctttaaaggcactcctccggtcgtagctcccgatttaccggctgatgtttcttatccgtcttcagaatctgcacagttggttccttacagcatattggctcagcgcttcattcaaggtcatcgccagttcttgatccaatggacaggacaggatattgaagaggctacatgggaagatgccctggaatttcggcgtgcacacccagatttcaagcttgaggacaagcttgttgtcgaggggggagtattgatatggcc

SEQ ID NO: 1363 - DNA, 384 bp, Zea Mays
tcgcgctacccaccagagccggatcactaccagcgacaccctcggggtctaggttttctgcaacagccacttctaaggctgaaggatcctcagccacctccatgggagtcgggcaatcctgaccaacttcttgacatcgaagactgccttccaaagtcgacgatgcgtgagacactgctcgagatacctctaatcccacgtctggaatttcagagaaaacatccatcatgtcgccagcagtcggctccgacagcatatcttcaggaacgacatcctcaagggcctgatcaaaatctgttatggacaattcttgaaggctgacaagagcagacagagctggagaaggaatatcactatcccccctactacctctgtaacaccggc

SEQ ID NO: 1364 - DNA, 658 bp, Zea Mays
cggatccctcacggcaccatcgacggtaggttttcgttccgtcaaattaccatcgtttccgcaccgtgtagaacattttatcgtgggggagagtcgtccaagcgggttggccgcacttcggcgggcgcgccaccgtgttgtgtcccggtccgccgtggctgtgtgataggttgaagaatgggtgtgggccattgatgttaggaggagcggccaggattagaagttggggccagatcctatctccaccgttggatctgctaccgatgcgtatgattagatggtagggtaaccattcgatgtgtttagcctgagacgctgatcaacggatcgacggtccaatacactcggtgttgttcggccctatatcctaaatctaacgaccaccgatggagtcctatttgcttttaattctcgtcgtgcatcgcggatccgatggcttcagtcatcatataccccttcagccggcaccatttgcaaaagagcccctccgtttttaatgaataaatctgcaatccagtttgactgttctctgagtcttaggatctttgcgcagaagcccttgtcctctctgataattgaggcgcagtccaaggaaaatggaaaatcagggaaattgatttaaaaaacgattttttagtgttaaaataattccataaac

SEQ ID NO: 1365 - DNA, 653 bp, Zea Mays
gcgatccactaccacccatatagcatccctgccccaaggggaacgaggtagacccaccacaaaatccatggtgatatgctcccatttccactctggaatttctaatggcttcagtaaacctacaggccgcttatgctcggccttcacgggcagacatacttcacaggcggccacatacttagaaacgtcaaccttcatccgcttccactagaagttttgcttcaaatctcggtacattttggtttcgccagggtgaacggtgtaaggcattttatgagcttctctcaagatatccatcttcacctctgatttctgaggcacacaaagacggcccctgaaacgaaccaaatcattctcatcaacggtgaacccccgtggtttaccatcaccaaccctctttcgagcttcctgcaatagacgatcctgctgctgagccacacacactctctccatgagggaggattgaataagcatccgagtctcctcgctagcggtgccgacataacacaaagcatccccaaacggtccagatcagcgatcaatggcaaggccacttttggaaccccggacctgctaagggcatcaaccaatacattagccttccccaggtgataatgaatggacaaatcataatcttttatcaattcaagcca

SEQ ID NO: 1366 - DNA, 508 bp, Zea Mays
gaatgatggtgatcaaagtaatggccactatggacatgctaatcagggattgtctcaggggcatggtgcatttgggggtgggagatctggcccattcctgagggatgggtgtaattcatccttgggacgcatagccagagactgttcagggacttgcgagccaccagtcaccaaccaggggacaacttgctagatatcgtgcattgttgacacttctgaattacataaaattgctgacccacttctggattgtcttcttgctgattgggagactcgtcattcgtccatgtttcatcaatcgtccaggattttcattgatccctgctgtttggatatgacggtggacctaggaggttttgagccacaatcttcgaactggttacggatttctacagccagtcgggattggaatgggctgcaattatgcccacctataaattatttgaagccatttctgactccatgtagggaccttgggtatctaagagtaaatctaagtggattttct

SEQ ID NO: 1367 - DNA, 563 bp, Zea Mays
gcgacccttcaccgcggaggttgacccccaaaccgccgtctcgcactctcccgcctccctataactaatctcctcctttccactccccgccgcgcgaaaccacacgcggcggccgcctcctccaccacgccgatggcgacccctcactcacccagacccagctgaacaactccctccaccaagcacacgcaagcaggagaaggagcaggagcaggagcaggagccgagggcggcgacagagaatagaggtagaggaaggcgatcgacgaggagctcggtctcacctgctagcggcggcgaccatggaccggatgctgctcgaccagctggccggcgaggccctgcgggaggtgctgcacgcggtgcagggcaccctgttctgccgctccaccgccgagcgcctgcgccggagcgtcgagccgctgctgccgctcgtccagggcctcggcccgcacagcacccagcgctccgcgggggagctcggcgagctcgcggcgcgggtcagggaggcgctcgacctggcgcgccgcgccgccgcgtccccgcgctggaacgtctaccgc

SEQ ID NO: 1368 - DNA, 875 bp, Zea Mays
ggggagcctcgtgtggcgaaatgcccatgtactaggtgtcgtaacctaatccgactggagaagtttgacctctccattcatatatacaaatatggctttaagccaaattatctgttgtggcgcgagcatggggagatggatgctcctctagagtcgaacacagatgaggacgtagaccgaatggaggacatgctagatgacatcaggcatgagtttccagcactggagaccgatcgaccccgccggaagtgcagcagttttacaagttgatagaagccacggatgcaaaggtgcacgagggcaccaacgtgaccgtatttcaggtcataacatgacttatggtgatgaagtccaagtacaacatctcaaataactgctacaatgatatcgtgaagcttattattgatgtcctcccgctgaaccataagatgccagagaacttgtatgaaagaagaggtcacgtttcttgctctagttattgcctactccgtactcgtgttagccggtgtttattattgcctacaatctccctcctaccaaatgcatgaaagaaaaggtcacgtttcttgctctagttattgtgggccctaaggatccgtgtatgaaaatcaatgtacttatgcaaccattgatcgaagagctgaaagtgttgtggcaaggggtggaggcttatgatagccatctaaattgtaaatttaatctaccagcgacatatctatggtcaattcatgatctgttgaaatatggcattcgatgcgagtggtgtgtccacagtaggatgtgttttttgatatgtatgagtgagtttcaaacatataggttaaagcaagacaaaaaggaaacattttttgatatgcaccgacgtttccttcccg

SEQ ID NO: 1369 - DNA, 812 bp, Zea Mays
ttttttcttttccttttcattttcaaatccaagatttgaattcaaatttttcagaagaatttgtactcaaattaaatattcagtttgatcatattagttggataaatttgtttagtcatggatttattttgtgctccatattattacttccttactattctcctcatttttaatttccatttttttggtttgaatgtctatttcaacatttatttatttctactatcattaccttagtagacaaatgcacaaacaaataaacaccagcatgatgaatttttttatttaagtgtcatttgttttaattactcattcttatttatagttattctctttttataacgattagatggcacacaaaataaggaaatccgatatagtattactgtatccattttgggtattacagcgggtaagggcaagacacgatggccggaccggccagtgactgggttcacccctccccggatcttttcacccctacccatcgttatctatttctcacgcggcaagaatctcccatgcgagcatgaatttcggcggaagatcactggcgtcaggttcacaacactggagatctttccagctactgtaccatggcgatcttcttcagtccatctatacgagcaacttgcagggcctcattctctaattttcgtgtgacaacccactaacctgcctgtatcaaagttgttgtccaatgtaccagctataactttgttacaaagaccttgatcaaacatccaatgaaccccccacaaatcgatctcaatgttcatccaagttcactgatagtcaagattcagtcttaa

SEQ ID NO: 1370 - DNA, 818 bp, Zea Mays
tgacagggctgaatgtctcatcgtagtccactccgaggcgctaagtgaagcccctaaggacctaacggggcttgtaccaaaccagaataccaccacccttgagcttatgacagaagatccacttaccggtgaccactttggtaccagggggacatggcaccaagtcctaggtgtggttggccaacaaagccgcatacttatttttaggacagtgctagtggggatagcaagcatggttcgaaaggaggggactgccgagggagctagagtagtggcgatcgtgagcaccagctagtcaatgggtcagagaacaccaaccggtcgacatgtgaccatcgggtggatgtgacaagggttgcgttggatggcaactggatagtgcacactaactcatcacgggagcaggccagggtatgaggcgtctcatcaaaggaggggaccaatgttgtgggccatagatgctgctggtagacatggtcgagatcgacaaagcgagccaaaggtgggtggagaggctgggccgcacgtggcacacaccaaggcgatggggccacacgttgtgcaatcggaggtgattgagctatgtgaggcacgagctaaggcgacggggctgcgcatggcgcagatgtgcctaggatcgggtgtaggtgaagaggagggacatcgatgggatcaacaccacggagggaatcaagatcgagaggtggaaaggatctagcaaagggaaaacatcctcatcgaaaacaacatgacaagagatgataatgcggggtgagaagatcaaggcactggtcccctagtgggaaggagtggcggag

SEQ ID NO: 1371 - DNA, 876 bp, Zea Mays
gcctccgacttaggtaggttactacatgctcccttccttcggtctcttgcgtcagaacagatcccataactttatcttcagctataatgcataatctgaacagtactcctacctgtggcgcttttaacacgggagtcgacgacaaatactttctaatgagatcaaacgcttcctgttgttctgcccccaggtgaatttggcatcattttaagccgaaggataggagtgaaggcatcaatctgctcagctaggttagaaataaacctccataaataatttaccttgccgaggaacttctgcacttcaagcttataggtcggaggtcccacattccgaatgggtttaattcggtcagggtctatctatataccatgttcatgaatgatgaatcctaagaacttactagccgacactctaaaggcacatttacgtgggttcattttcagaccatatcgacaaattttatcaaaggctttgcacaaatcagctatatgagaagtaaactgagccgatttgactataatatcatcaatgtagacttacatagtgtttcccaacagctcgtgaaagatcaaattcatagccctctaataagtagcaccagcatttttcagaccaaatgtcatgacaacccactcaaataaaccaatgaagcctggacatataaaggtcgttttagatgcatcttcttcggccatgaaaatctgattaatccggcattaccatcaagaaagctaataattctatttcctgacgcattattgatcaacgtgtcagctatgggcatgggatattcatctttaggagttgctctattcaaattgcgaaaatcaatgcatactctaagcttacctgattctttcttctccaccggca

SEQ ID NO: 1372 - DNA, 419 bp, Zea Mays
attcatcaggggctctaatgcaaaataaacacaacaaacgggtatcagccgatcacagccgtcagatcaaccatcaacggatttgattagatctggactcccaaccatgctttgcccgttgatcgcgagatcgacggcaactaccccatcagtctcggctccatccgatctggatcagacaggtgacattcgctagggcgaaccattatccaacttctaacctcgctcgtccacgcatatatccacggccaaaaatcgccaccccgacccgcgttttgggcacgatagcaagattgcccccacgatggcgccattgccgacaacggggatttcccgatttaacgtcctacgaccctggccaatcgatgaaacatgtagtgtggatcaactgaatataggagagccggtactcacccagg

SEQ ID NO: 1373 - DNA, 369 bp, Zea Mays
ttggaaccgatttcattcagtcgatctcatattggttcttggggtactgatcattccgcaacttatggcccttgactacaagagtaggtgtgtggttacacacatgcatactaaatttcttaagaacattctgtatgtatgccttttgcgataaacctaataccactttccttctatctctgcgaatctcgattccgaagacgtaagatctgattcgaataaacttttcttcttggatctcaatcgaatctcttttcctactacttgctgatgtgttctcaatcaaaaccgaagatacgattctagggttagggttttggggaacttagaaacctagctcttgatgtcattgatagatctaaaaggatc

SEQ ID NO: 1374 - DNA, 318 bp, Zea Mays
tgcgctgatgttgcatgggattggtggagaggtagaccactctgacattttcgcaatcgacgagggtggagcgctcgagggggttctggagctcctaaagaagctatcggagccaggaggcctcggcaacgccgttggccacaagcccacaacgcgatacctggcctcaacgttgtagtgggagatgacaggttgccgctttgatgaccaggagacgaggttggcgcctacaaacatgtcgtagccaaatgtggaccagtgtaagggtagctagcccagtcggcatcagtgtagaccaccagctcggaggttggggaa

SEQ ID NO: 1375 - DNA, 404 bp, Zea Mays
accattgcaaagaaggatgatgaaattgatcagctccaactagccaacagtagcaattccctactgaagtccacgaaacatggtgactccttgttgaagcattcggcctcttctccaggaatgacatccttaggaaaagtggcaagctttggtagcggggcagcttctgatcttgacaactgctctgacaccagtgataggcattccgaagctgggtccatgctctctactgacgaggcccgacagctgagccagaactcggctgatcctggtggtgattcagatggaaggctaagtgatatatcagatggcggtatacccgcgggtgcagaaactgacagttcagcgaacaacgttgtggaccaagaacaagacaaaacatccgctactggaaaagagcggtt

SEQ ID NO: 1376 - DNA, 585 bp, Zea Mays
aagtcttcttctctcctctaatagagaccgggtgaccttcaagaatctagggatcttcatctctgacagattgaactgggttggatgaagcgggctcttggatccgcagggctctacgttggttatgggtgaccaagtaggcctccatcaacttttggacgtgctcatccttagcttgcttcagggcttcaacagcaatggcttcacgactttctaaggcagttgcacgggcttgagttgaggtgagatcaacatggagctgacggttgcgcttctttgcatcttctactcgggcaatcatctgacggtggtgctgagccaagacatcatactgtgcatcaagggtgagcaggtatgcagtgaggtacacgactgtggggtcatcctcaagcagctacttcccttccaatgcacgcatcctgaccatccaaactggacagtctctctgaaagggcggaaagaatctgagcggtgtgtcggccacttcttcatagatctgacacagggtgtaatactcaaaattctaaataaagaatatagagagatcttctcattttatgtgccttatttgcatcataaaaagag

SEQ ID NO: 1377 - DNA, 466 bp, Zea Mays
ggccaactgactgtagaaggaggaacgccaacgacaaactgtcttctggactccttcatgcctcgcgtcatgagcttgagacagcagtgccggccacagggaagaggcatcaggaacaaaaatcttgccctggaacagcagcatgccatctgtttcagtccaccctagtggggctgttccggctaccaactgtgcctgaagtgttgttgcttggggatctgagctggactcagcattaagggtatcaaacaggtcaaaagttggagatgagatactgtaaatagccccagtgtcttcatcccgacgagacaatgcgtctgctgctctgttgagtttacccagcctatattccaccgtgatatcataaccaaatagcttgctaactcaagtgtgctgcggaactgtggacaatcgtttatccaatagaaacttcaaactatagtggtctgttctgacagtgaaaggc

SEQ ID NO: 1378 - DNA, 467 bp, Zea Mays
gggaggacctggagaaggtgatcgagcgggagcgggaggctgctcgggaggagaggaggctgctcaagaagaaagagcacttggaccaacgggaggtggtcgtcacggaatatcatgagaagttgaaagcctacaatgtgatgcttgaggagcaacgggataagcagaccgctactgaggcggcactgcaaaagctgcagcaggagcttgacgacaaggctggcaaaatctctcttgccgaggaaaacctcagggcgaagggtgtcttcctggaggagcgggcattggatctcatccgacaggagaaggagctcgcttggagggaggagatgtgggaaaggcgagataagctgctggccgagcacgagcgcgaggcggagtagaaggagaagaaactggaggagcgggtctgctggttccaggcggcgcaggccgcgcatgtagcccagatggcgcaggcggctccg

SEQ ID NO: 1379 - DNA, 896 bp, Zea Mays
atacattgcttgatgaggggagatcagcgggaatgatatcaaaggcatgactcggaggaacctcagccccatcagcaggcggcagactcctggcatctggttcactagcctctagagtgaccagaccagcgagagctgtagatagatgtgtcaccgcagcctcctcgaattggactagtggcgatccaacatggacgtccatagaagcagcagagggggagcctgccccaacaccctcgggggctgggtcgctcctagtttcaccctcgggggctgggtcctccatgacagccacctctaaggctaaagatccctcagccatgtccataggagccaggtgactcgaattagcgtcttcccaaggtagaccccctccaaggtcgacaaaaacacgagaaactactcgggttatctcttgcccagtaggattgcgcggcagaagaccatcatctgggacctctgaacagatagtgggactgtcagctttaggaggctctgatagaaggtcctcagggatgatctcttccagcgcttggtcaaaatcagatattgacaacccctggaggctgatgagcgctgacaaggcttgtatgggaatgtcgttgaccctatggcgacgactattcttacggatcagtggaatttcttcttcttcctcctcctcttcctcatcaagcacaccgtcagcaacctgagcatcatcacaacctccaacattatcctcgaggatggtgctcgccgggccatcacaaaggaataacgtggaggggctaacgtcttgctccaagcctgacaatcgtcggagtcaccttttctttttcttctcctcggtaggtgcagctggatggttcactcggcgtgaacgcttgcggcaagcaccttctggtttctatttt

SEQ ID NO: 1380 - DNA, 599 bp, Zea Mays
tggcaatgcagtgtcagttggtcttctgctgaaatctcgaggtcctcgccttcttctaggtctttcatcctcatgtgttatggggtgtcccatgggtgcgaactcgggtggtgggacatcacttggtagctgtctttcgaagctgctagtgtcaatgctaccttgtggcgtgggcgggtgttcggtgtgagggtgcttgatgctttctgcttcagttctattgttctcacctgcggggacaaggtgttgtcgacgaaggtaattttgcatttcttggcagtgagggctgccttcacgatcttgcccgtgggggagttggccctagtggttgctttcttaggagccatctcgagagttggtctttggagcacagacggtggacgccaaatgttaggcttcgacaggtggaaccaagcactcagagacaaaaggggagctccgcgcatgataaaatgttaggtggggaactgtagcgtcttgttatgcgtgtcctgtttagctacatgatgggggtgtatatggggttgtccgggggtacttcgtctcttgatttgagaaataatactcaagctcgatctaagtgattgcttgagagagtg

SEQ ID NO: 1381 - DNA, 847 bp, Zea Mays
atcacactctacctctaaaaagaattcgtcctcgaattctgacgcttctatcggaacgacaaaatggaaaaaattaattaatcaacaacacttactcacaacaaaaagttccggatatttctgccgcatcagctcctcaagttcccacgtagcctcgcgctcagactgattagtccataagaccttgacatacttaattgatctcttcctcaaaacacgctccgagaattccaagatacgcaccggacgacactccaaggtcagattctgctgcaccgcaattggttccatctcaatctgatggtccagatcccacaagaacttcctcagcatagagacatgaaatactgggtgtacccctgccatggaatctagcaattgcaagcgataagccaagctgcacacctgggccaagatagtgaacggtccaatatatctcaggctaagctttccggagacaccgaaccgaacaactcctttagtgggtgataccctgagaaggacttggtcacccactgcaaattccaaatcccgcctcctcacatcagcataactcttctgacggctctgagcggccaaaatattctgacgaatttcccaaaccttttcagaagtatgctgtacccaatcaggaccaactagggatctctctcccaaggtctcccagcaaagaggggagacacaccgcctgccatacaaagcctcaaatggtgccatcttgatgctagcctggtagctgttgttataagcaaactctgccaatgcaagatgatcttcccagctacccttccaagacagaacacaagcgcacaacatatcttccaaggtttggatcgttcgctctgac

SEQ ID NO: 1382 - DNA, 1311 bp, Zea Mays
ccaacttcctaccccgtcacagcccaactaacctaaaccctagacccatcagcgccgtcggctccgctgcagccgccaaacctgttgtaccgacgcgtgggccccaaccgtcatctggacatcgcgcacgccaaatccacctgctggcgctggtgcgtggggccctccggtcaactacttcttctcccctgtaaccgaacgtgctcagctacgcaagcgcgcgggcgaaaccacctccgcgtagcccaattagactccgcgcttccactgtgctactgtcgccgccaggtggggccggatcgctgactcgtcgtcttcagcggattcggttcacctgttgcacgaaaccagggcaagatccgatctctccgccctcccatccggactccctcacaaaaccttgatctgggccgctataaatggtgaccgcgacctcctcttctacttcaccgcgcatggcacccagccaaatccaccgcgaggaagcagagggatcaagcagagtgcagaacgccgctaccgaggacctgtgtatgcatcgtcagtcgagggtcatcgaaggaacgtggagattctttaggtgtcaaggaacgtgatggcggggtgctccgcgcggagtggtgctcttcctgggcaaccttggtattcggaggcgtcagaattcctcgccgacgttgcccaacaccattgctccacccctcaccgtgattgggatcctctactgcacgacgtccggtaagaccgcgcctatatgattcgcgtaactgtatgctatgagtagacgatctagggatggtcgtggggccctatagcgaagaaccgacgggctcgccggtgctttctgcaaccgtgagctatgcgccaccgcctgggttttgtctgagggtagaagaacgtttgtggaccgtggatccatacgtggtcggccaagattagagtagagaaaatcgtttgtgcgccgtcgatcccgtgttggacggccatgatcgtgtgtagcgtaccccttcgtcaaataaatctgagccgtaggatggtagttcgatgaccgagattagatcccatcctcatgaaaccctagccgcaggattttaatcggatgccccacgttgggtaccggttcggagtgaatcgggtctattccgcatcgtccatttgcgattgtgcggcccagatttgatcataccccttcgtgggtatgttttactaaagagcccctgtagttttacggaattaacccgccgtccaactcggggatttctgagtctgcgtaaatctttcaagttagcccctagtctcttaaggaatggtgtc

SEQ ID NO: 1383 - DNA, 600 bp, Zea Mays
tgaaaatcgaggacaacccgaggtgttctcagcgatcttgtgtggtctagttcaattggttgggccgataagcatccttagcatgtaagggtgctgaaatgagggtaaggagaacatgaacggacctagagacggtggtccacggcgcggtggttcatggcagcacggagaaccgaattgggggaatttgaaattcgcgagctacggtggttaatcggaggcgagggctagtttactgggcgcgtaacaacctaacggagctagacaaatgctcaatttatagtggttatcagtggtggcgcccaattttggtgaagacacgcgggcgaccagagagagagagagagggaggttacaagcacgagttaccgtggcattcaccggagcaatgactcagccgatagacaggccatctatagcgacctattgcgacatggtaacaaggtaggagcatggcatgctcaggttaacggcgatcatcaccgcgacggccgcgcggccacattgtggcgcaagttgttacggccatagtgccccggccttagccacgacgaagatcttttcaccccagtcattatccgcgtgttcacgggcacgaat

SEQ ID NO: 1384 - DNA, 653 bp, Zea Mays
gcagggatgaacgtcggcgaggggttttcgaccatgtacaggagggacagtgggtttggcgtcgagcagagaacgacgcggtcgtcgatagacgtcgaggtacaaactccggcgaggctccacggactccgggacagacgacgaacgacgaacagcgcgtaggcacggtgagacaggtggagcttcggcgagcgacgacaactacgtggtgacgatgttgcgcgcaggtgggctagtggccgaggtgctaatgcatggcgaatggcgagggagagagaaccgagaggagggagagagcttggggtagggagagtgaagggctcggctggggttttatagagagggagggagaggagaggacgccagggtcttcaagctaccattagtggcgtgcataaatggagggaagagtggggagggagtaatggatgcagtaacctccattcacacagagaaacggacggtaatgaaggtccattaacgaggttagaagaacggacggggcacgggtggcgcggtcggtttccaggcatcgcgcgctgggcgcagcttctcggttggcgtgcacggctcggtcggcgtcggcttcaaagcatggtcgtcgcgcggcttggggtcggctctgctggcgctcgactcgcacaaggtcacgg

SEQ ID NO: 1385 - DNA, 461 bp, Zea Mays
aagcttggactaacctatagatggttggccacggtgagaagctcacggcggcgcgaaaaaccaaattggggaaaagtgaaaatggggcgctacggtggatgatcagaggcgagagctggtgcactgggcacgtaacaacctaatagagcacagtgagcactcaatttatagagatcctcgacgatggcgtccaatttggggaagacacgcgggcggccggagagagggggaagttactggcgcgagctaccgtggcagtcactggctaatgagctacggcggccactgctgagttcttacgactgacaacaacatggtgaaagggtcacgacgtggcgcaaccgagtgaacagcagtagccacggcaacggccgcacaaccacgtcgccggcaagtgagtacggcgatagggtggccacagtgccccaaactcatccacggttaagatcttttacccagag

SEQ ID NO: 1386 - DNA, 711 bp, Zea Mays
aacacagaagcgccaagaattatccttctttttgaccaataacactggagacgagaaagcactggtactgtgctgaatcaagccattgtgcagcatttccaccacctgggtttctatctcgttcttcagtgctagagaaaatcggtatgggcgaatactgacaggccgagccccttcaattagtggaatattgtggtcacaagaacgactaggaggtagtgatgtaggcggctgaaaaatatcctggaaagtttgaaggagctgctgaactggtgctggcactgagaggtcttcaaaggaatggagttgagctgcatcatcttgaggttcagccacatgccatatttccaataaggtacccgccggtacaagaggcttgcagccatgaagcaccactgtttgacctgaataaggaagggacaaccatttatgcttccaatcgacagtcatcgggctgaattgctcgagccagtccatgccaaggatgatatcataacacggcagtgggataactttgaaagtagaataaaactgcatgttttgtacagaccactgtgcttctggcaattccatgacacaattcagtataccaccatttgccacttggactgataaaggagtattcatatgtgtcaaccccactaatgaagaagcatgaatattgctcacaaaacagtgagagcttcctgagtcgagcaatatgagcatatc

SEQ ID NO: 1387 - DNA, 756 bp, Zea Mays
tcaagcttaattctaaataggatccaatggctttttgtaggaatcctatgtagcaaagttatagctggattgtggctctataactttgatgcagatctttggacaggatgccacagagatttgagagaaaatcgagttcaaacgttggctgtcaggccaactgaatggttttgtcgatggtacaataacctgcttgggttcagagcacttcaccgccgtcgatcactcctccgccgcaatacgtgtcgccggcgttaggattcgcactcgctggtaaccggataacatcacggggagagggaatattcgccgccggtgagctggactccattccggtgaacccccgtgctttccctctaccctacggcttgagccgataagcccaccggtgaaccgccgttctccggtcttgcgccgcgtgtcctaactgcgccaccgcattgccgtgcttcgttttagcttcccgtcgatcgccggagcaattgccacggcattggacacgaagcacttgcgccagtgaacgtttagtcctccgaccgccgcgcgtccttctccaaattcccggccaccgtcgatgccctctataaattgatggcacaggcagctgcgttaccttatcgtgagaccagagcccccattcctaccctcaatcatcctccagagctcaccaatttccaaatttccccaatttcggtctccgccgtcgtgaaacacgcctcgctgcggctagctcagctcaggttagttcataccgat

SEQ ID NO: 1388 - DNA, 348 bp, Zea Mays
cagtaattaataaaattcagcttctatttacttcaaaaatcgccgcgttctagagactcgacttattctaacttatatctaggcacatttaagcatagtcacacaatagatgacgtgatggctacgtagtcatgccatcacttcaccccacaatcccaagtaacaaaatcactctaaccgaacttggcatttagccgatcggttcctaacccatttttcataccaccgctacacgacatgcctaaaacgttaaatgactcgttcacaattcacatacatctttaccaaaatattcccacatcgcttgcaacttaacctaagcttcactacacaattttgggacatcta

SEQ ID NO: 1389 - DNA, 628 bp, Zea Mays
ttgggaggggggttgtagggcatgatgaaaaccggccaacaagagtatgaagttgaactgttgtcgtaaggagtgaaaccatcagtggacaagcctagacgaataatcctagcgtctcttgcaaattctgggtcaaaacgatccagagccttccaagcatcgccatctgatggatgcatcataatgtctgggtcttggatctcacgttctccttccttatgccacaacattagcttcgcagtttctggggttaaaaacagacgtttaagcctttggagtgatgggaatatatcgaagctgtttaactgccacttttgtagcataagtagctccatcctctttcagtacctccgcatatcttgatttaccgcatttctgacaatgggtggccgcttcatatttccttccagaacaacatgcaattatcttcgcacacatcaatcttcttatacttcatcccaagaccggacacaatcttttttagactggtataagtcttttggcatcttatggttcgatgggatgagatcaataatcagattgattacatcgttataacaattattcgagaagttatactttgccttcattgccataagacgtgtaaccacctgcaacacggtcacag

SEQ ID NO: 1390 - DNA, 374 bp, Zea Mays
gcagtacagtaccgctggcgctatctagggtttggcattttatgaccatccatggtctattcaggacagtttggtcaatctatagcttgtcatcttctacaggatagaccacagactattaatttgtactgctgttgcttgaaaggttacatttgtaggtttagtttatagcaaacagaacgagaatgtgtttttgtacagtcttgttaattatttactcaagtggaaagcgggttcaagtgaagaaagaacaagcagaacatgggaaggcaactaatatgaggactttatttgaacagttaaactggatgcgaaactcaaacaggggtatttgacaattgaatgatgtggactgtggagcttgattgattagg

SEQ ID NO: 1391 - DNA, 994 bp, Zea Mays
tcgggtttggttggctagaacttgggctaaatctaagggtagttctggaagtgcggggaggtgggtctcactttcctctctaccggcttctctttcagctctcaggggaaaccctgctccaaccccggaggcggtaggcatggttttatccgaagccatctgctagggggagagagtcactattatgcacatgccaattgttttcaaccaagttattttattcattacaccaatatgttacaagcatacggctactacaagtcgtactacacgcgagcattctctgaggtactaccgaactctttttctaaagtgtccccaaattccttgagaaggtcatcaaggctagctagggacatatcctcgacatcggacaaaattctctatcctggcgggagttggtgccggaggggccttcttcctccgctcagcttggcctccttggttcttggtcttcttttggattttcttcgtgggggcgagcttcttcagcttcttatcataatccatctttaaggttcggtaggcttcacgggtgttggcctcctcgccttctgctatatcgagacactcttggagggatgccttctccttcttaagttccttgacctgctgctctaagctttccacccgggagtttaggtgggtgcagtgggagaaaaggtcatcgtagtggttatcgagagtgtggaggtatccggccatgtaaacaatggtggggtcatcctcggtggggtctcttcctgatagggcctgaagtcttttcctccaggtgggggtatttttgttgctaggtgggaagtaacgaaggggggtttcaaagatctctctggtgtagttttggcatagctgtttaagggctttttgggcaacactttggcaagtgtctgggaagcggtgcccgatgaaggtgacttagaagggagggtggtttgggtagcttcagctttctcccaggtagaccgccatagagcacttctctattccattttca

SEQ ID NO: 1392 - DNA, 292 bp, Zea Mays
ggggttcgggagcgtcggatcatgatcgtgcgggcggagtgcaatcgcatggttttgaatccggaaccgtagattcttgatccgaggggccacgttcggatctcaggtatttaaatctcaatcatcgatctgcctgtctacggccgatgagggcgtaccgattcgctgggtagcggatccaatctgggcgatagatttctaatccaacagccaagggcactgcgtacccctttgcgggtgcgttttacagaagagtccatgttctttatttaaatcaacccgccgttcatgt

SEQ ID NO: 1393 - DNA, 502 bp, Zea Mays
cctgattctaaggagagattatctgatgcatatatattttcatttttatcttctatgatttttttggtgggatttacaagttcgttttgtttgagattcatgatgaaagggaaggcatcatttagctggcaatcatcttattcagttattatagcctagttactgtgaatgatatgccgttacgtcgccaatgtctgaatggatcgtcccttgagctgtgtgccatgtttgttgtactctgatcttgtctgattgtccatgtctatctgatcatctgtatgggccggtgagggggccggctggctggcgtttccatgaggtgcgaccaagctcaaagccccggtctgtagttccgcatgcatgttccttgctcactggggctccgccgctccgccccttcctcgcctacattgtttcgttcccctgtgctgcttgctgtcaccattgttttctgctcttcacggctgtcagtctccggcggtggcgagcatcggtgtttctg

SEQ ID NO: 1394 - DNA, 847 bp, Zea Mays
cctttgtaactagatagcacatgtatgtacgccagcccggtgaggtctgccctcataaacccggtctgttggtttgcgctcataaacattaagttatgaggagaagatcccccccagatttgctttatggtggttttattccgcttaagtttgcaaccattatttctatctaacccacccatatggtttccctccattgctggtatattgacatccacattgagtagccaggccatgtatcctgggggccagtccaagagaacggataattgtcccctagagaggtccggagccgtgcggccgcttagcttggtcccgtaccctaagcccgcacgcttcaccactctgtgacaggtatcctagtgtccggaactatagtactatgggtccggaagcctggggatccatttctaaagaaaggacacttgtctcctggggaggtccggagctgcgtagccgcccggtcccgtaccgtaagcctacgcactccactaccctgcaacgagtaccctagcatttgggggccgtgacctagggggtccgaacacacggatcggtttcccagtctaaatcctgcaggttctgttgcgtaaatcaaaggataaaatataccagttagtgggtcctatgagtgcactactgaaaactccctagctaaggctgtgtacaggtccaggtcccagttgagattacctcctggggaccaggtcaccaattctttcttgaatatactggcaaccagcctcgaagagtcgagcccacatcccagggggccaagtaccaggaagaagttgacaacgacgcacacagcgtagggaaagtagcatgcaaataagttgcaatgttg

SEQ ID NO: 1395 - DNA, 659 bp, Zea Mays
cagaagagagagagcaaagtgcagagagagaggaagcagcgccgctgccggcccggtttcgtgttcaccaccgtcgcgtccaagaattcggccctgtgagtctcgccgtgcgtcggggattgatccggggacctccctgctgtggattggcagccggagccctcggggttcgtcgccatggtgcgaacaccgtcgcgcgtccgccaaactccgtggggcggttcgttcattgccggaatcaaggtaagaattcctccgttgagttcgctatcatctcggcaacgcataggagctttcggatcgaaggatttgtacgtgtgtgcacgattggggttcactggtggggtctccaccgtcggacctgtgggtgccgccgtccttggccgtcgggaggttgagggcagtgcggtggccgttggattagaatgaacggcctggattagaaagcggcttaccccttcggctaagtgagcactgaccgtagatatgcgacccaatgaatatgatttgatctcagttatttaagatccgtgtcgtagatataggatccagcggccatcatggcaacctggttcggggaaggtttggatctaatcctaagcgtggaaccgagatccaacggccgaaaacactagataccccttcgccttggcatttag

SEQ ID NO: 1396 - DNA, 316 bp, Zea Mays
caacgaccatgcatgtcgtctgatccaaccaacacgctccgtgctccttccgcgcctgaccaacgctccgcgtgtacggatgcggccggcagattcggaccaaatagtcatcgcctccgtctcattgccatcgtgtctcctcctcagcttcgacgtggaacaccatcaccatggtcccttctctgcttcactactgtatagtaccagtacagcagtccctgtccaaggtgtcccttccagcgtccaggctagcacattcactgctccttcatcgctgtggcctgtggccctcgcttcctcagacctggtctctccg

SEQ ID NO: 1397 - DNA, 696 bp, Zea Mays
cgctagcgttttaccctacttgcgctttattaccggcgtcgtggaggccggtaagcttgcctggtggttgcgcgctttattggcgccgcatgtgtctttgtcccttcatgcatgtggtgtgcccggcctgggatcgatgagctccgctcccggttccgctcttcatcgaagttccggcgatatccgtaggtaccacggtgagctagcaatctagtttgttgatgtcctcgtcgtcgtcccggccccgttcatgtctgtacgaacgccagattgtgatttcctagcacgacaggtccacgacagcgccacgttcatgcaatgtgtgtgttgttatcgcacagatcgaagatgtagtaaatcacgcacgcatcaccgggatctgaacattctgatgaagattgaaacacactggcacggtgcgggtgacgatggggatagcggaaacatgcaaggtattactccctctcttccccatcagtcactaatactcactaagggagtaagggcgtgattggatacacagttgcgtccgcacagggctcccgttgagtgtgcgtgtccgatgatatgtgggctgcacgcgtcgactatggcctgcacgtgaggatgcagcctaggcgttgtttttaactgtacgcctgcacgcatggagatgtaggtagggaggttccctgtccacccccggcgtccttgagc

SEQ ID NO: 1398 - DNA, 446 bp, Zea Mays
aaactcagagaatggcctatttggcggcaggttccatgcagaataggccacaggagcaccagcatttgagactctgcccgtcaagatcatgtccagtctgctcagcagatcttcattgggaatcctcctattcgtgacccgagtggaatcaatgatgccactatataagtaagcaggataaatcatgtccttcaagggttggatatttttgaaaacgaagtcagcaactaaagattcagcacttatacctccatccttcagcaagcagatctcgacaagcagtacttgggcctctgttatctccgaaaaggtaggagattctacccaactaggtgtacgaacatctggttgcctccccgacttaggggggagagagttgcagtggttctccatgatgaaccactcaaggcgccaccctttgatactgtccttaagaggaatatcga

SEQ ID NO: 1399 - DNA, 361 bp, Zea Mays
cgataacctttgtgctcggaggagtagccgaggaagacgcatagagatgaacgaggagcgagtttatgggctgcagtggaggacatgtttgggtaacaagcacaaccaaaaactttgaggtgtgcataggaaggtgtagtggtgtgaaggtggaagaagggggtggaggaggcgagggttttggtggggagccggttgacaaggtatgtggcagtgtggagtgcctcaacccagtagaccggaggaagactcgcctgaaataagagtgagcgcaagatgttattaatggtacgaagagagcgctcagctttgccattttgctgggatgtgtaagggcacgacatgcgtagggcaacaccgt

SEQ ID NO: 1400 - DNA, 1021 bp, Zea Mays
aaagtggatagaatacaagcccatcgcctctttgaccttagcaaaggcagtggagttcattcaggaaataatgttcaggtttggaatacctaacagcatcattaccgacctaggatctaatttcaccagttcggagttctttgacttctacaagcagaggagcatccagatcaagtatgcatcagtggcacacccaagagctaatgggtagatggaaagagccaataggatgagactcgatgcactcaggaaaaggtgtttgacaaaagcgagaagctcgcagggaaatggattagggaactgacatatgtagtctggagcctgcgaacctagccgagccgagctttacacaaaaacaccccattcttcatggtgtatggatcggaggcagtgttaccagtagatctgatctttggagcacccagattaacatttgaaagcatagccgaagcagaagcaaccaggctcaaggacggctaaatgtgatcattcagtcagccagataccagcagaccctgaggcgttatcacgacaaagcggtacgacatcgatccttcacaatgggagatttggtcctccaccgagtgctaacgggggagggacgacacaaattgtcaccaccatgggaaggaccattcatcgtcgcagaggtaacacggccgtgatcctaccggctcactgaaatggacgacaccgaagtggaaaattcatggaatattgagaacctcaggaaattttacccgtaagaaatgcctcaaaactcttgaggatgagttgtactttataagcagaaggtttcattatcaataaagcttccatgttccaaggcatacaagttcttgatcaaactactgacctaggttagactcaactcgaaatcggcacggcactcgtacacaacttagtgtgatcattataccctactaacggagcatttggcttaagtcagaaatgccttaagccggtgcgacatgctcacgcttacacaacttagggtgatcattataccctactaacggaa

SEQ ID NO: 1401 - DNA, 434 bp, Zea Mays
tgtcacctgctttacgttggtaactctaacaagttcagtttgcacaaaactctctctacctctatctatattacccctatataacccatcgtccggattcaattttgcaaaaaaaacacacccaaccaaatcaccccatcacactcataacctcctctaaaatcactgataaacgaattacatccacacataatttgcccccctcaaatttatcaggcttatctcgtgccgtaaggcagttaggaacaatctaataagttcctagacttatcgtgccccagctctcagctcagaatgcattctgagagcttcatttccgacaagcacaagtacgtttctcacgcgtgatcatcaggctttctgagacgtactcgaattcgtatcctcctcctcatctctctctctctcgtgctatatatgtcagtgtatcactg

SEQ ID NO: 1402 - DNA, 502 bp, Zea Mays
tgtgagagacgacatggtgctgtcgccagcgctggagaacttgagggggagctcatcgccaggcagattaaaacatagccagtccaacgccgattcaaacgtcgccgaatcctaccacagaaaaaacaagacacacgaatggaaaatgatcagctcacagccaatacgaacatacggtcacatcatcgccgtgaggttctaagaacgctagtggatgcgcacgggtatcgcggagagcgcctgctcgatttgcgcggaagagaagccctcgagagcgagcttgtcgtacacgccacgcagccgccgcgccttctgctccctcgactcgccgcggacttccgagacgttggcaggtgacggggatggtgcggaggagttaaggaggaggcggcggaggcggcgctcgttctccgacgagatctggaggcgcggcgcggcggtggctgcggatgaggaggacgaggacttgggcttctgcctctgcttcgagtccggctgcttc

SEQ ID NO: 1403 - DNA, 390 bp, Zea Mays
ttgatgtttgactagtgattggttggcagaacaataacataaaacaaatagatatagagagacaacattctattgttgtttggttactaaatgtgtatatttagctacatctgatgttgtttaagactttagatcacttgtcatttgaaaagagccggtggttacaatgcccaattgtgctataatttgtcacctaaatacacgaggatttagtttatatactaatgcatattaggctcgtcccatatttgtcaaatacggaataaatacgggttcaatccggaaaaaaacgggatcccgcaaaaacggacggaataagccctctcccgtttccgtcccgtttccatatttttccgtaaatacgaaaacggtcgggtcaaatgtagaaaa

SEQ ID NO: 1404 - DNA, 851 bp, Zea Mays
ggtggataaaactacagcatgatgcctggagaaagagcatcaaaagactagaaatgagagatcgggtggatcaacattcgatacttgagaacgggttataggagataaccagataatagggtagaaattataggggatcccaagattcggatgataaagccaacatgattcacaagaaaaagggttaccagatctaggcaaaaggagaggtaggcaaacaggatcagctaggatgatcaacagaaatgttatgacgttttaggggcaaggacttatggaaagaaaacatggccttgataggggttgcgcaactagacaccaaacaacatttttttatgtaacatgtgcagaaggagacttgggttggtctagcggtcaagctgtggggttctataagttgtgcaggtgtaactttatgggtaaaacacacaagggttagaaaacactaacacaagcataaatatttttttgaggttttacttgctaaccactaggttgtttaaagaagggggtcttttgatgggcaaaacatacaacaatttttataagcaaaaagggttgaacaattgcaatgccacctagatagcaagacaagagaaacacataacacgacctaacaagacttaccaatctgacacgaggtaaggcatttttttgcagttcatagcaatacaacacattattcacaatttcttattcttggaataaaggtgagagaagcatgttgatgcacaagagacaattataatgcgacaatcatgatgcatgctcattctagtcgtcttctcagacctaactactttatcggatgcttctacaacatccttattaatagtagtagtagcctttat

SEQ ID NO: 1405 - DNA, 273 bp, Zea Mays
ctcctctcatcgatcttcctctctgatatatattagcaggcgtagccaagggacatagatatatacatccatttattacgccattacatcaactgtagcacgtcgtctttttaccactccattaagcattattattactggtcacgcgatttggttcagcttctgggacgacaaggtttctatcgcatcgcctagcggccatgctgcgtcgacgtagtattctccgtacttcacctttgtcaccagcgtgaactccttggtcggctccaaacc

SEQ ID NO: 1406 - DNA, 283 bp, Zea Mays
tctttgtcctatcataggtgaggttgtttggacattggtttgttgtcttcctcccattggtttgagttctgtggtgcattactatttgccctatatggttcataagattgaccattcctttctggccttctaggcgggaccggaaagtactcgcccccatgggcttgggattctgtattaatgggttggtgcattgtatagtgcgatgggaagtgttgctggaatgtgcgaggatttaggtaacaatcctcctcaaacaacccaatgccgaaccgttcgatcg

SEQ ID NO: 1407 - DNA, 484 bp, Zea Mays
gtgaaattgggggcggggattgaggctacacggccgtaagaaactatgctttcaccgtgcgcaaacgatttgggcaaaggtggagaggtcagtgcgaatttgactcgatttggttcactggtatgtgtgtgatgaccgagcctcgccgcgaaccatgggctatttatagccgcggaggtccggcgatcacctcatggcacgaataccatcacaagcgcatgccaagcacgtagagaattggtacagtgaggaagaatcacggtgccgaggacaccgtggcggaaaggattgatgcgatggccgccggtgaatcactccggccgagcacaggagatggcgccacgtacgattcacccttttcccggcgttatccgtctataccgtgcacgaatccgggcggcgatcaacgacggcgagctgagctggcggtctgatccatcggggcactgtaccatggcacatcttcgtcagtcgcctgaaccgt

SEQ ID NO: 1408 - DNA, 374 bp, Zea Mays
tgatcgtatccattcatgctcattatgacgaacaacgtgggcagtgtggggccccagcgtcatcattactacctctatgccacgctgacccttggactccatagcctaggtcttggcatggctcatcacgttgcggggcctatggatgacctacgcactcaggcctaggctcgataggttatgagtgcgccgcagcccaaggggctcataggtcataagtggaccataggccgagtggctcataggtcatgagtgggaggaggaccatccttctactatggctcggtgccaagcgtagttaatgcagccagctacttatgatgggtcagtcttgggccaagcgaggaatccactcgagtgcattcccttcagct

SEQ ID NO: 1409 - DNA, 981 bp, Zea Mays
gggggggttaggaggttagggtttcaaaccttgggttgggatttttgggatgttacaaacctaccccacttaaaggaatctcgccctcgagatttagactggatttgagaaaagataagggtattcccttctcatggagtcctcactctcccaggtagcttcctcttctccttctctgctccactgaactttacagagcttcacctctgaggtgcgggtatttctgactgttgaatcaagaatctttactggcttctcacggtactgaaggtcttcctgaatctgcactgtctcttcttcgatgtgactttctggtgcttgtaggcatctgcggagctgggatacgtgaaacacattgtggatgttggacatggattccggtaatttcagacggtatgctgcgggtcctaccctaccaatgatgggatagggaccgatgaatcgcggtgctagctttcctttcacttggaacctcctgacaccacgcattggagaaaccttgaggtagacgaagtctccttcctcaaatctgagttccctccgcctgttgtctgcataactcttctgtcgactctgagcttcaagtaaccttctgcggatcagtgcaactttctcttccgcctctttgacaaaggcaggtccttctagtgctttttcccctacgttggaccacatgagaggggtctggcatttccgtccatacagtgcttcgaatggcgacatcttgatgctggcctgatagctattgttgtatgagaactctgcgtaggttagactggattcccaacttctatgaaatgctagcacacatgctcttaatagatcttcgaggactttgttgactctttctatctgcccatctgtctgagggtgataagcggtgctaaaatctagcttggtgcccatagctttctgaaggcttgtccagaatttggaggtgaactgggttcccctgtctgacactatctttcttgggatgcc

SEQ ID NO: 1410 - DNA, 571 bp, Zea Mays
acagtgtcagcctcttccctcgctgtgtgtattgttctgggtggctgacttgtggggtcgtcatggcaggtcttccccctcgcgtaacagactcagcgtggagcttgttttcaccgccgaaatcgccgcgagcttcgtaacagagccagaccaacttcaccggggacctcgacctccgctcacatagaatctattccccgcatggtctataagaaccggacccggtgccccttacctatcttcaacgaagtaccgggggtgccgccgtcgccatcatagggaggggagcgccaccgcgtacaaatcctcgactggccgtcaattcaacccgggagaccgagctaatgagagcgcagggcgcagagagggtgtgtaatgggatttgtggccgcagatgtgcctgtaccagcggtaatcgctagccgaggaaccaacaccgctgagagtccaccaaacgctttggacaacgacctctatgtatgcgattcatggtgagatccctctcatcatgttcgccatcatttcctctatgcgtagttgttgtctagttcgtattgggcgcgtccggttc

SEQ ID NO: 1411 - DNA, 409 bp, Zea Mays
tgggtatgtgagaacgtgtcctaaaagtcaagaattttagacttggagggagtacattattactctatggtgacaccggtcattgatacacctttgaccaccggctaatcgctgtcaacatgagcatacaagaaatacaagatttggagtgttagattcgtagagcgagggaccatcctcagctctgtcaagtgtttaaagaataagcaaatgaactaagttcgatcttacagaacactcaagtactagaataagacatcgggcccaccagtcagctataaaaaaggccagacccaatgttggaggcttccacatgagtgggtctagagaaggaataaactaagggaaatcttcctattgtcacagtggatacactaaccggttcaacccataagattaagctgttaga

SEQ ID NO: 1412 - DNA, 628 bp, Zea Mays
acgaaatcggccttaggccttctccacgtctttccgccacttggcggcttcatctctaggtttggtctatcacataacgctgtcagatccactcttgcctttacgttatcctttgacttatcaggaatgtccataattgttgcccacattgcctcagcaacattcttttcagtgtgcatcacgtcaatgttgtgtggaaggagcaggtcgtcataataggggagccgagtcaagccagacttatgtgtccacatatgctgctcaccatatcccataaaaccaccttctgtattggccacgagcccatgtatctgttgacgaattttggcaccagtcatcgttgcaggtgtgtggtctgtcactacgacacctttcgtaaagttcttgatgtctaggcggaatggatggtcaggagggagaaattgtcgatgtttatcgaaggacgaatatttgccaccctttttcaaccaaatgaacctaagagcttccttgcaaactgggcatgggaacttaccgtgaaaacaccatgcgcagaatagcccatacgctggtaagtcatgcatggagtactggttcaaacatgcattctgaagtttgtttttgtacctcggtcatacgtccatacccc

SEQ ID NO: 1413 - DNA, 1101 bp, Zea Mays
cggctaagaagtgggacagtcgacgttgggagcctgtccttcaagcaaaaccatatgctaagggacctatgcctttaccaccaccaccaggcaaatcttcgtcagggggttccgcgccatcatatactgagaggcctcaccaggacatgctcaagcatcctccattagacgattgcctggccaatgtgtatgcttacaggaaggcaaaagggttgtgttacaagtgcggcctcacttactccaagggtcacaaatgtgccgacattgtgcaactacactgggtggaagaaatttggaaccaattcaccccatccgagtctgaagaacctgtggatacagtgcctgccgaattgcatgttgtagtcatgtctcaagccgctcatggcgaagtctctgcaactaaaacaatgaagtttctgggttccattcaggggatcgacctgctgattttattagactccgggagttcccatacattcatcagtgcagcagtggcgtctcagttaaccggttgttctcagctttgccagcctttatctgtacagattgccaacgggacgcgtctcatctgctccacagaattccctaatgccacttggtacctcaatgactatcagttcacctccacactgaaagtgttaccactatcctcctatgatatgatagttggtatggattggctacaattacacagccccatgttcgtccactggaccgacaaatggcttactgttccctatcaaggcaccactgttaaacttgtcggtcttcaacccgggggtacccaatgctcagttatggagatccttttggggcagagcaatgaggcagttatggaggtatattcagctgaacacatctcagagaaggatcagtctattattcattccctgctggtgcccctgcaggacctacttcttcggttctctcatgtgtttgttgtcccccagggtcttcctcccgagcgtgactgcgaccatcacattccactaattccaggcgcacgcccagtccaaatgagaccctgtctctatgccccagctctgaaatcagaaattgagaaacaagtggctgacatgttgcaatctggcatcatagaac

SEQ ID NO: 1414 - DNA, 634 bp, Zea Mays
ctgcattggagcgtcattgctgctatggttgcggttgttcttgcgaatcaaagggacaacttcttcctcctcttcatcctcatcaagcacacgaccaccaactctgacaccaccacaatcttcaatttcatcctaaaggttggcactcgctgggtcaccgacgaggactgaggtagtaggatcagcacccagttccaagcctgatgaccgccgaagttttttctttcttttcttccccttggcaggcatggctagatggctcgttcgacgcaattgtttgcgatgaacgcttccaggactctgaactccatcctcaccaaggcaatgtcaatttgcagcagtcaccggctcagtacgggcagagtctgtcgattcactcgctagcatactgagaacaacgttcacctcagcctcatcagtggttgtttgcatctggaaatgggtcagtttctcctcattagggagatttcggtatggagcaatgaaggcctcaatatcctctaggtaaggtcgcactctatggcccggattgccatattgaacaggagggttggaaacaaactcggaaaaggggctctgtggaggaagattctaggcagaatacgataaggaagcaccagcattcaaaatattg

SEQ ID NO: 1415 - DNA, 366 bp, Zea Mays
tggtcactcagagtgaacgatccaaaccttggaagatatgttgcgtgcttgtgttctgtcatggaagggtagctgggaggatcatcttgcattggtagagtttgcttataacaacagctaccaggctagcatcaagatggcaccatttgaggctttatatggcaggcggtgtatctcccctctgtgctgggagactttgggagagaggtccctagttggtcctaattgggttcagcagacttctgagaaggttcgggaaattcgttagaatattttggccgctcagagccgttagaagagttatgctgacatgaggaagcaggacttgggttttgcagtgggtgaccaagtccttctcagggtatc

SEQ ID NO: 1416 - DNA, 461 bp, Zea Mays
agagtatctatgctcttattacaggtcatgtgtgccatatactggcatcatggcatgttatgggtcctagcaatcgagctccgtatagttatagcgaggacctgtgatctactcacggtcacggccggagtgtgtgcattgtattcctgctctaatgttgtatcgtacgtgtctgtgcgtgagaatggatgtcgagtaaatttttaggttttagctagattctctgtttagcttaggcatcaactctccaatgtgagtatatgtttaaccattctttcaacatgctaatacaataatagccggacataaacactggcgtacatgtgcgcgcacttgtatatggatggcggatggattaacacacaagacatatcccgtggcctgcgtgtcgtcacgagccttcgtacgtacgtgcagcgcgcgatgatgttgtttgccttcaaagtggtagtgcccccgtg

SEQ ID NO: 1417 - DNA, 408 bp, Zea Mays
aaaaagatggtggtccaaggaagtcggctaatcagaaggatagcaagtgaggcgatgagcagagcttttgggtggtgtccgagggaccgtcgtattgctggttgaagttttcttttggcgcttgttggtagttggctgcagctcaagtgatgggatgtcattttggtggtttagatgcatctggggtttagctgtgtagctgcttttggcatgttgccattgtatataagctctacttaaaaactgtggattcacctgaactattgctagtggagactgatctttgcttatctagtatgatagtatgtagaggttagctccactaggcgctccttttggtgatgggttgtatcccatcgttttgttttgtaatgacacttatcctatttcctaatgaaatagggggct

SEQ ID NO: 1418 - DNA, 505 bp, Zea Mays
tctcaaaagatcaggggcctaaatcacaattaccctaagactcaggctaacccttagtgtggactgcgggttgtttatatggttttacgggggctctttagaaaatgttacaccacgaaggggtacgctctaatttggaccgtcagatcgattccaacggtcgggattagatctatctctttataaaccagcatttgaccagagcccttggatcccgagatcaacggtcccgatcacacacgggcaaaggagcatggctgcgccaatctggaccgcccgttaggatcaaacagccacaagcgttcttcaatttcccccacccgagtcgcactgaggcgagcagagcacggcggcgaccatcgccggcgtacagccacccggagtcaccgcagctcgattcgatgcaggtatgggagaaacacctagcgcatgccatggcaaatgacggtggcggcgtcctccactgtacctcggcgagctccacgtccggcgctacggtgttccg

SEQ ID NO: 1419 - DNA, 416 bp, Zea Mays
cgtggccagagttccgtagttaatcattagccaaattaatttgggggaaaggcttagggtcgatccaattcggtgtctgttgctcggagaactcagccgttgccccgttcggccggtacaggtgctcgccggagcacggccgcgcgtgaacggcgtcggggactttaaactcagaatagatagaagaggaaggacttttatgcaaacgtcagtgactgtgttaaatagtgaaagggctcgttcgctgttagacaaaaacgcgagggcttctgtgcaagtctgccaacgcgggcgcgcgcgcgggcgcctttctgccctagctgggccgcctgggctggattcggcccagtgctattcaattgtttttctttttcttttatccccagagccaaaacaattatagaaaaatgtagaaa

SEQ ID NO: 1420 - DNA, 552 bp, Zea Mays
cctggtagcaacgctgcggtcaggggaggcgtcgtttgctcgtgaaaaccatttgatgggccgtttccgggacatggtgctagtctataatgatcttgaggattatgcccatgagctgcatgagcaagtccaccagctttactaccagctgcaccccaacgccgtgcctggagccgtagaggcagaaggtggtgtggtgttagctgatgggggtgagcctgatgctgacttagacatagaagcaactcctatgcttgtgctaggtggtgagtccccaagcgatagtgatgtttctgaggtagctactgatactgagggttagtgtggcaggtgtactaatgtcgtgacctctgttgtaggcatagggttgtaagctatgccaattttggtattgtaatgaataatgccccatgtaccagttctatgtaatatatttcgtggttatggatgtatattcatgagctttgttttactccagatgcctatgtgtactcgcagttcgaatggggctggaacattgcgtggtgatgcagaagctaatctcaatcctcc

SEQ ID NO: 1421 - DNA, 708 bp, Zea Mays
atttgattctcccattcgtttttttctgggtcgattctacaagcgagtacttgtctcgcgctctccatcagtttctcgctgagcaagtcacccttccttagtatttttgtactggtgctcacgcttagaacggtgttgctaaccgtaagcaccgtcatcttcttgagactgctcgtgcattacacttgacacactctgtttctcctcagtcttgggcctaagttgtgtctactactgtttaccttgtgaacattcagctttttattgctctacatggtgtcactcttgagcgtctctttggtcagccactatagtcaccttcgtactttggttgtgttgcctttgtccttcttcagcctcgtgagagaaccaagctcactgcacaatctgttcagtgcgtctttcttggctatgcatttgagcgtcgggatatcgttgttgagaccctgtcgctcactgcattcgggtgtcttgggatgtcacctttgatgagtcccgtcccttctttacttattgttttgtcctcttcttcctctccctcttgaatttgttgatttccttcgtttggttccacctattcttaccaccttgtctccgctaccctcccctattcctctttcatcactgtcacctccacctccatcacctccaccactatcgccttatccacctccaccatcgcctcctctacgccacctccacgtccac

SEQ ID NO: 1422 - DNA, 498 bp, Zea Mays
ttcaaagatggctactcctgctcctactaggtttccgaagacaaaattgaagaattgggagaagctatcgctgcaagcgcttctcctgcctatgctgatgccggaccttcgaaaactaggccaacagagcaagtaaagtctgccagagaaattaaccctatcgatacccgaagcagcatcgaccgaagatcttgattttattatccgtcatgcttcgggaaagcagctgacacagaggtaaattgccgaggcccaacattatgctaaggaactgaaacatcctcgatggtcctcggtgtacgaaggagatgaagaaaacgactttctatattgtctttctaacaacaaggaaatcgacgtctgccgagagatgatggacaagatgggttatctgaaacttgagcttggattatccttaatgctaaaggaccatctcgcagacagcttaacatacaatagtctaaaggtttgtgtttacttttcctctcaatcttttgg

SEQ ID NO: 1423 - DNA, 330 bp, Zea Mays
aaagaatgttgccgaggcactttgggcaacaattatggacattcctgataagtcaaaggataacataaaggcaagaatggatctggcagcgttatgtgatagaccaaaccaagagatgaagctgccaagtggtggaaagacatggagaaggcctaaggccgatttcgtcctaagtagggccttgaggaaggaagtacttcagtggatcaagatgttgatgttccctgatgggtatgcaactaacctgagtagggggtgaacttatctactctgcgagtcttagggatgaagagtcatgacttccacatatggattgaacggattcttcct

SEQ ID NO: 1424 - DNA, 645 bp, Zea Mays
aggatacaattgagccctcttgagaagaattacaggatatgatgtataagactgtagcacatgtataatgaggttcaccatccatccaatatatccaagggtaattgtagtcattaacatgaaccaatcatatgtttggaaataatgaagcccagcaagagccagccttcggagctcctcagattgctccatggcagtttcatagtcccttccagatataagatcctcaatctgactgagcactaaagaaaagttcgccagtggcttaaaaggtttgaagtagagtgaactggattccttcagctctgagatcgataagggaagacatgcttaggggtaacagtatggtttgttgtttaatttggtagtcttggtcatcatactttttcattaaggaaaaaagaaattgaatgactgctgagattatagctaacagcatggagtagcctactgttatgggtgactctaattaaagatcaataatgatgtctctagcacccattcacaataccatactacaagcttataagcatggagtaggaaaattctgcagttcaagtatgtaacaaaaattgttttgaaaggatacgtgactttcggagaaactggttaagaatttgctttgtattggccagaacggcttca

SEQ ID NO: 1425 - DNA, 536 bp, Zea Mays
ctctcatatgcagtcttcaggtcaggatgccgcgcatgaagaatgtgtcggcgccagggggaggagatgacgaggaccctcctcgcccctttaggcaggtcaaggggaagactgtctacttggagcagcaggaaggtcgcaagaagcggtgtttgaatagagcagcctgagcagctctagcagcagcagcagccgctgagcaggcagagagaggtgatcagctgcggatttcttcagatcagattgcttatcgcgtttgtcgactcgcctctcggcctcgctcctcctcacctaccactctcgccactgctaccactccacctcccactttgcccgctccagtcactcctgcgtcatccatcacctcatccatacctaccacctccaccactccagcttccattgctcctcctctcgctcccttttccgctccacctattgcacctgtccgttccgagagcgagatgagactgaggtgtggccactggctgccgatccccgatggtttgatcttcagcgtgctacagcggcccagg

SEQ ID NO: 1426 - DNA, 572 bp, Zea Mays
catcttcaactagctcttcttcttgaatttcaagttcacccgtttcaacttctacttctgcatgatgggcttgtccccggttgatggataagggctgactctttcctgccgaggctcgtccttgcttcatcggagccggtgtagtgtaggcagctctgttgggacagtagttggcgtagtgtcccggttgtccacacttgaagcatgccctgttggtggatgtgttaggagcaacaggtcctgctggggtgcttgctagcggaggagcagttggtgcccgttgagtttgttgtccggaactgccactagctggtgtacttggagtggtagtatagcgaggacgtgaactacttccagcctgcccttggttagcagcccttcttttctctccaaactcacacctcttgttttccacagcaatagctttgtcgagtagtctttggaaggatggaaatgtgtgcgataccagttgatattgcaagggtccaatcaaaccgtccagaaagagctccttcttcctctcatcatcctcaacatccctaggagcatatcgagataactgcttgaatttg

SEQ ID NO: 1427 - DNA, 410 bp, Zea Mays
cgggtataaaggcctcactagtgatccccttcactgaaatctccagcagctcccaggacaggtcggtcttcgacccgcactgaatcctgccaatatcattggggccggtgtaccagcaacacaaacgtgacctcctctgcaatggcatgacccgacgcttcaggaaatcaccgactacgtgcatcaaggtcaaaccaccggccgccagttccttgatcctgtccagtacgggctcaaactccggtgcaagggacggtttggccctccattgcttcaagtcgagtcctggtccgtcgttcggcagggcaagacggtcattggcctctgcactggtgatcacccagtcattgcgccagttctcccacctcgcgccgccaagggtggcgatgtaggccacggttggatctggc

SEQ ID NO: 1428 - DNA, 603 bp, Zea Mays
gtgatcacatggtcgtgctggagggaagcccattggggatgagaaaacatcatcaaattgctagagtagggagtccatcattggtgtcgggtttgatgttgaaacacatgttgaaagtggcctgtgtatcacgatgtgagtagaattcaaccctttccacaaaacttggtaaccattcttccataatgccatgctcatgttggctaagtcccaaaagatgggaccaagagtgcgcgggaactgaacccctaatatgatgtcaaaggaatacagtggaatagcataagcatccatggtgaaaatatctagacccacgcaaagtctaagactgttggcaaggccatgacagtcgatcttgtcgccatttgctacgactacccgacctcggcttgaggagacttccaattgcaatgacaaggcagtgttgaggtggacaaaattatgtgtggagcctgtatccagtaatgcagtgagtactctgtctttcatctttacttgaatatgcatggtgtcctctgatctgatgcctatcgagcatgtagagagataactggttctggctcctcagcaacttcctttatggtagtatcctctacaaagtca

SEQ ID NO: 1429 - DNA, 548 bp, Zea Mays
cagccaggagcagacaactgcgcctagacacgttacaaccatgggagactgaaccatttggaggctgaagcagtcgatgaaacaccaggcatgatagtaggtatgtttctagtcgattcccattttgtagaagtgttatttgatattggagcaacgcattcattcattactgcatcatgggtagaagcgcataatcttccaataactaccatgtcaacacccattcaaattgattcagctggtggtaaagtttgagccgatagtgtttgcttgaatgtaagtgtggaaataagggggatagagtttcccgctaaccttatagtaatgggtattcagggaatagatgtcatcctagggatgaattggctagataagtaccaagcagttaccagctgtgataagaggacaattaagttggtgtccccactaggagaagaagtgactgagttagtctcgcccgagccaaggaatggaggttgtcaccagatggctattgatagcaaggaggctgatccacttgagactatcaaggttgtgtcagaatttcc

SEQ ID NO: 1430 - DNA, 696 bp, Zea Mays
cctttggcagttgctcgaaaggaggccgcacctttggtggttgctcgcaagcgctcctcacggtatgttggttcttctcgctcttctcatctttgctttctatccttgttccgtatttttctctgatttcctgagtcagtgtgtatgtgccacgtaagtcggtgaaggacgcggcttcaactacgaaggttgattctgactcctccatccctcatgccccctacgctgggggaaacaactcctttggctgtcgtggccatttcgctagccgacgttgcattagccccacccgcgccgacctccttggttgtcctagagaaaccaagagcgttggttcctaccgtggccctcctcgtgctgccgtcccctacacccgcccaggagaggtctcgatagtcgaagtagccacccttggtgggatctcatcaatggaggcagtggttctggcttcatcgctgtcgtccccaacccccttgcctccaggtgctgcatgagcgaccagtcaatctggggcagcgccgcctctagaagtaggtgagtccctggaaaatccaccaccgaccatcgttgtctctgcatttgcagggactgcgctacctatgctaccaggagagggctgtgcggatcttccctcttccaccttgaagtgccggggacagaggagtgaaagctcatcgagtcatcccggtccagtcc

SEQ ID NO: 1431 - DNA, 456 bp, Zea Mays
ggacacacgtctcatggggaggtccggagctgcgtgcctgcttagcctggtcccataccgtaagcctacgcactccatcaccatgcaacgagtaccctagtaattataagccgtgacccagggggtccagacacacgggtcggcttcccagtctaaatcatacaggtcctgttgcataagtcaaaggatgaaggataccaattaatgggtccgatgagtgcactactgaaactccctagctaaggctgtgtgcaggtctgggtcccagtcgaaataacctcctgagggccaggtcaacaactctttcttcaatatactggcatccagccttgacaagtcgagaccacatcccagaggggccaagtaccagggaagaagttgacaacaacacacatagcaaagggaaagtagcatgcagataagttgtaatgttgcttgacaagtagtacttaaaag

SEQ ID NO: 1432 - DNA, 905 bp, Zea Mays
aaaacttggagaaaaatgtgcccaaagttgggctgtcagtcagcctaaccctgaattttggtattcagggacatccaatgaactttgggagtcttttcgtggaagatccagtaagtgtttgactatggttgctataacaaaattatagctggatcatcgaacaacaactttgctactggccgatcaataggttgccatgtaaaaacttaagctctaagccctgcaaaatgctctgtcaggtgtctgaatgaagaactgatggtacagtaacctgaacatgatcccaggttcagcccccctcgtcgccgatgaatccacgccgtgatcgtcgccgccgttacgattcatgctcaccaatgaccggataacgattcggggcaaaagatcttcgcctggggataactccgatagccgactgccgtaccccattgccttgcggccagcgcagatcagttcaccggcgttggttgtccgtcgatcggctaccacgtgctaaagcgttagaccacgtcgctgtgaatcgcgcctcgcatgcacggtgatcgccggtgtactaccatggtgaaagccactcatctcgagcgctagtaccctttttcccctccggccgccacgcgtcttcgtgcaattcatcggccgccgctcacgaactctataaattgagcgtgtcgtgagctccgtaggataattacgcatccaaagcactagctattgcctccaatcgttcactagagaccgtgaattccttacttcccccaatcctgtttccgccaccgcagagacaccctcgccgcagccagcttgctccaggttagttcaagctctctggtcgtttgttctagcatccttaagtcctcctcaagctcctcgaccccctaattgaactagaccgccctggatcaccg

SEQ ID NO: 1433 - DNA, 977 bp, Zea Mays
agacaccctccaccaacaactagttaaccaagacttagttccacggcagggctcgagtgaaccacatcaatgcccaggaagctcagcaagcccctggagtagtactcggtgagttcctagtcgaatttacccctgctgctgtgctttttgattccagagcatctcattctttcattgccactagttttgtggaaaacatggcatccccactacaccattagaagtccctctggtcacccggaccccagggttagaccttctctgccacctcaaatgctcccaagtcagaattcttttaagtggggtagtattcctggaagacttagacgtactaccatcccacggaattcatgtaatcctaggaatggattggttgcagataagactattcttctcaccgaccaccagggaaagttagtttcgtgtaaagctcaaccgccaacccaagatctaatggtgttcagcctagcagtaaaaggcatatctgtggtggaagaattcatggatgtatttccagaagaattaccagaaatgcctccagaaagagaagtagagttctacatcgacctcctcccaggcaccgtaccaattgcaaagagaccgtaccgcatggcacccacagaattggcagaactgaaacttcagatcgtagaacttcaacagaaagggttcatttgtcctagctcatcaccttggggagccccagtattgtttgtcaccaaaaaggatggaagcatgagaatgtgtattgattaccgatccttaaatgaagttacaatcaagaacaagtatccactacctcggattgacgacctttttgaccaacttcaaggggccaaatatttctcaaagattgatctgagattaggataccatcagttgagaatcaaggaaacagatattcagaagatagcttttgttacccggtatggccagtatgagtttacagtaatgccctttggactaaccaatgcacc

SEQ ID NO: 1434 - DNA, 627 bp, Zea Mays
ggggttttggctaactgggaacgggttcttttactatttcattgtgccactgacggtttgcacataaaccctccatattctagttcttcgcagggggaggtccacgacgacggtgagcgcggtggagctccggcgagctagcagatcgtcctaacggggcaatgactagcgttcctgagcggtggacaccaaatcagacctactccgagcattttccctaagttaattgcacggttggtgacctactccgccctgcccacgagaacagcgaaggctaaggacttttgctcgtgttcccgacattgggtggcggcctaattcaattggacgggttggagagcatcaccagaatacagagacatgagaacaatgcgtgaattggacggtgccttaccagaacgggctggccacggtgaggttggtttcacggtggcggaaacttgatttggggagactccaaaattcgtgagctctggcgaacgattgctagcgattttcggtggctggggggcgatgaccttgcggggctggcgggggcttcaatttatggggctcaacggcggtggtcgggaatttcagtggggacgagcggcagtcggaggaagaagagtactggcacagtggatt

SEQ ID NO: 1435 - DNA, 632 bp, Zea Mays
ctaggtgatggagcatagaggaaaagagtccatgagtacgaggagtggggtgctcggaggagcgacgaacacgagggtgcaggaaggcttctagggaaaggagaaggcaggtgcttgggcgcgaagagtgtgttaatcgtaactgacaccaaccactgttccattctatttatacgtgggaacagcagaaccaagcagtgtctgaaaggtgggcctctgcgaacgacatgggaggatccactgcttcgatccataatcgcttcgggcgtcgtgcgagaaactgcacattttgcagggttcgcactgcctcggacggagcgctaggggagcacgcgataggagaggcatcagtaacggacaaggcagttaaccaccctatcacgctacctacgcacgatacgacaaataggtcgtttcgcgtcccatcaagctgcccatgccaagcggtgtcatgatgaccctctcttttaccacgtcgccacaataaccgcctcatgttaaccaaggtaaaaattgaaacttgccctgactcctcacgtagagcaaggggtggaccgagcaagctcacagcgagccgcaagctaggtggccggcccataggtcatttcctcatctccacatccaaggtcgta

SEQ ID NO: 1436 - DNA, 620 bp, Zea Mays
aggcccattatcctttttggttacctataaataccactaacctgtatacaaacgggtcacgcataataaagctctacagttccccgctcagtgtcttcctgtgcgcctgatcttacttatccactgagtgttgggcccacctgacatacagttccaacactgagacccaattcccatcagcaattgttgcagagtggaatactgcaaaaacttctctgagtgactggtgaccattatttttgggggcactttgtgaaggctggccaaaccttccgaaccatacaactccatgtcataacactgctagacacttctctagacactatacttttctatcttcaacaacatattcactacctccctcatggaaggcctagactggcaagccacctgcgtgcatgaaaccccaaggtccagcaagctcagagccttttcttgctcatcttgagaccaacacgtcatctcctcatccatgaggcttatgatgctgcggcgatctccatgctccaggttagttctcatccatgtcacaatgtcaataccatctccgaacgatgagtccacaggcgtcttcctgcataggagctcaagtagcactactccatagctgtagacatcac

SEQ ID NO: 1437 - DNA, 281 bp, Zea Mays
taccggaggatgtttctgacgaaggtgcacctgccactgaagttgagcaggttggtgctgaggaaggtgaatctgaagatgattacagtgccctgccatctaaacccagccacctggagtttgggaggtccactgttaccgaagatgatatgcctaagttgatgaagttaggctatttcagtgaatccaaaaagaagttgattcgctttggcggagaggaaattactccgaagccagaaaaggatgaggtggtagtctttaaaagcttctttaaagcagga

SEQ ID NO: 1438 - DNA, 634 bp, Zea Mays
caatattcccacagtgtggactgcgggttgtttctaaataaatccaggggctcatatgcaaatagtccacggtgaaggggtatggtcgcggctgagccgttggatccggaattgatggcaccgattagatcttcactaggtgaaccggtacgccatcgcaacccttggatccagaatccacggccgtggttttatggaacgagagttaatcctatccctcctatcagatcggacagcccacaacagccgattccaatcaatttactggcacaaatctgggccgcccatcacaaattgaacggccagatggtcgtctcctacctaccgatctgaggacggctgcgctaccagtgcttacgcggcggtgccatggccgattcccccccaaaaatccataacccggacgaatcttcaattcgaacgttgctacacggagccttgatgatcacgagcacaaagaaataagtctcaccggttatcgcggcgtggagagcaccggccacggtgcagcacggcccacggcagagcagaggcatcggagagcaattccggcggctatagggtccttccctctcccctgacgcccccataagcttccctgcatattgccgaaccccaccgtgcaccaatcgag

SEQ ID NO: 1439 - DNA, 648 bp, Zea Mays
gggatttttcgcgtgtatattacatggctccgcctcgttaaaaacctcaccccctgggaggaaaagagtgcgggccggcttaaaactgttctgcggattacaagggcgaagtggccctgaggagttaaacaaaaaatttgcgaagattatcaatgttccaagaatgttctaagtcttcgccgaatggcgttgtgagactgtacgcgctgagggacgccttcgtcttgacgatgaaagggccctcccattttggctccaacttgccccgggactctgtccgagctgtctggacgagtacgaggtctccttcgttgaattccctcgggatgactgtgtggttgcgccatgcttttgtctaagcttggtatttgtttagagcctgtagggcgaagacgcggtctccgtcgatgaggtccttcgaagtaggctcgtctacgttggggacggccgacgcgactgttcgtggtgacccatgttttatttcttgcggagtcatagcctccgatccgtatagaaggcgaaaaggggtgaacccagtcgccctgcactcagtcgtgttcagcgcccagaccacttcgggtaacaggttgggccacttgccttttttgtcgtcgaggagcattttcttgatggctgtgaaaattttgc

SEQ ID NO: 1440 - DNA, 1867 bp, Zea Mays
gccagcgccacctccggccgtggacacaacgggatgcagcaggaaaagggctaggcggccggagctgctcaacgccagggagatgtacggcggcggagtcatgttctccaataaagccgccaggtccacgttcaagcagcagtgccactacgcgcaggcgtctcagcccatggtgatcgcccgggctacttactccttgctttcttgtgcgttactgtattgtaatactctatttttttcatcatcgtgcggcttggcaggtctggaagtaccaagccaccacctctgtggctgataaggcgctcgaacaattggacgccatggttcagacaccgcaagggttgaaagagtccaggctgctagtctccggcagcatgaacggttcgattcggtaagagtcttcgttggtatctgtttctatttactatctatctactatttggattcatttgtttttttttgttcaagttatgtagagtcatggcattatgagactgaaattgtagtatgcaggccttgttgagactatcttggtatcaccatgtcacacttgctgtattgtctgctggcacagtcgcacagattgtcttttgtcttaactgttggttgttctaagagaaagtgtgcatttatctatacttcaattctcacaatccgtcgatatgttttatctctcaatgttcttacttctgtgtaagagcatgggttcatggccttactaatgtcaaatgtcacggtgcattttcctataatctcttaataggttatacggattagggactgctctgagtaactttgagaatgaggcagagtttttgccccaacctgcttgtactcttgtgggaaagcacaagccaggaccactccccagcatttggtcacctggaacaggcttcatagctttctcatccagtatatcatgcataaagaagctcggacgtcatgtccctgatgcatcgaacaccaattcatcagttcagcgagcattgtatcctgaactcgttacttattgtactctctatttatttggacatttggtgttgccatagttgcacatgtttgcattatgttttctttattattaactggaaatatgttgtgagcttgtgtcccttgacgttgtaaaacatggtggctactcttggatctggagaatctcgtgcctctttatatattatggatctttctgaagctgttgacttggcaatcggaccatggactacctacagagttcattcacttgatcgaacaatgtggacagctgattgtagttctgatggcacacatgcagctttcggtgagttcgttgagtcagagcttaaatattggagataattaaagtttcccttgcacttaggtacactatttttgcaacttgtttctgattgaaccttgtgttacgtaactctatcaagttggatgcattcactaagaatttcactacggaattagcatttctgaaattctttgataatttaaacgtgacagttgaatattgaacccatatagcaagacctgcttgttttggtacttgtatacatatgtgatttttttcacaataactcagttttggttattgtgatggccgttttgcaatttaaaggttagtcattgctatagttggaggaattaatttaattgtcatagcaagctgtactcattcttacagttttggcagtttgcagcctgcttatgttacagacacatatagtatcctttcgcttgggattcacttgttcatcttatttctaggttcggaccttggtgctggtctgatcgatttggaaacaaggggatcatcatggttatgtcgttctaaaagcgacattctttccctgaaatttgtgcactcggtaacaatcttaat

SEQ ID NO: 1441 - DNA, 771 bp, Zea Mays
tctcttcggcttctgtgcaccgaaagaggtcgaagctactatttttctctttaacccttgttttcgggcagggaagcaatagtcaggataaacaaacccaattacatcaaaaactctattcagtctctttttccctcgagcgctgaaggaaatgatcatggcttcgtcctctgccttcgtgtaggctcccagcaactcatcactggttgtctcaacagcctctgccaatcatcatttggctcgtcaaattggcttctataccggaaggtgtatcttagataactagaccacattggctggagcgagcagcagtttctttcagcatctcccaggcattcacaagaggccataccttgtaagcaatgtgttcctataccaaatccctagtaccgatgtaagtgcacatggtgttgaaagccattaaacacgcttgcacttcattcccaattgcaatggacatccctctaatgtcgaagtgtgaccacatgggacgctgaataatgcccctcatatcttccctttcactcagatcattcttcacataaaaccatttcactcagatcattcttcacataaaaccattgcttcatccaagagcccggccatttctttcgagatgttggcacgggataacttgcatcagagcggggcacgaagttgtaacacccgaagttgttatggtactgttccttcccagtagcctttgtcaggtaaaataattcatggatattgcagaaacacctggcatctggccctagcccttggctcatc

SEQ ID NO: 1442 - DNA, 330 bp, Zea Mays
atagatgtcttcgagtgaactgataggttcctaaggcaaatatgtgtaaggtgtttatagtaacactttatcccgaaaggtgttaagcctgcgcaaaaataagagataagtgtacttgttttatgcatgtgatcgacgattgggatagtcgaggcgaatgaggagtatgattaatccggttagagtcactatgctgttgatgccttgtgcgtaacctggggcacgtatgtgcgtgtgtgccgtggtgtattatagtggtggtggcgtaagatatttgattgagatgtgcgggtatatgctgtgatatggttatactcacgatgagggagg

SEQ ID NO: 1443 - DNA, 388 bp, Zea Mays
ggagaacaagaaactgcctctgagtcagtgatgtatgatcggttaggattgttagctgaagatgaacgtgaaactactgaaaggcaagatgcttttaccagcagaccatttggtgtccgccaaagcgatgaatttgatgatgaaactgctgcattgccctgcactgattgcataccacaagaaagggtatttgtttgcaacagatctaatccaataatgaagattggtagtttgtacaaggatatgaaagaattcagactggctatcaggcagtatgagattaataatgagtttgagttagggattgagtcaagctcacctttcagatatcgagcttattgcaaaggaggtgattgtccatggagaatcaatgcaaggctacaaaatg

SEQ ID NO: 1444 - DNA, 551 bp, Zea Mays
ggaagctccgcactgcccaatgcacggtaataatgcctctggtgcattccttgtgtcgttaggatcgtgttggtatcttcgggtacgctggtgggacatcagagcgcctgatggcatgttcaccggcgttggccgccgcagatggtgtgcaccgccgtgcgggaggccgtaggctggacgacggcatcgtgaccgttggatccaacgctgacgatcgagattagaggatagggtaacctttgcacaactaaaccgtgtccgtaggattcatggcgggcggtttagattagattggagcaggatcgaccttcatccgttgattccggatcggacgataggggcggattatctgttttataacgcgataatctaatcttgcgcgtcggtttgtgatcggacggtcagcgtccgcccgtaccctttcggctagcgcaatttgcaaaagagaccccgtagaagttgagtatcaacccgcggtccatccccctatgccctgtgtcttagtagttttagccccgagatccctgtcctttctgaaaattgatgcccag

SEQ ID NO: 1445 - DNA, 370 bp, Zea Mays
tttatgaagcctaattaatggtgattagcaaatgtttactgtagcatcacatcacatgagtgaatcatcgactgagtaggtttaataggttcgtcttgccgttttgtaccgatccgtgtaattagttttgcaattacagtatatttagtagtcctaatccaaacatctgatatggttggagatagtctcacgcgaaacataatgatagcattattcagttttctttttctctgcgctggcaatagctcaaaggacagtcgtgcaatttgtttgttttttaaacttaaagaaaaaaagaaaagaaaaggacaatcgtgcgtgcgtgcgtgcgtgcagggtcctgcggtgatgatggatggcatggcccatc

SEQ ID NO: 1446 - DNA, 662 bp, Zea Mays
ataaccgacctgggatccaacttcacaagtttagagttcttcgatttctgcgagcaaaagagcattcagatcaaatatgcctcggtggtgcacccaagagccaacgggcaggtagaaagagccaacggatgatattggaagcgcttagaaagaaagtcttcgacaagaatgaaaagttcgcaggaaagtggatcagagagctgctgtatgttgtttggagcctgggaactcaacctagtcgagctctgcatggaaacacacctttctttatggtctatggttcggaggcagtgctacccgctgatctcaagtttggggcaccaaggttaatctttgaaaacatagcagaagctgaggctactaggctggaggatgttgatgtactagaagaagaatgattgaatatggtgattcagtcagcccgatatcagcaaactctgaggtgctatcatgacaaggccatacgacatcgatcctttgcagtgggagacctcgtcctccaccgaattctaacgggggagggacgacacaaattgtcgccactatgggaaggaccgttcatagtagcagaagtcactcggcctggatcatatcgtctcactcaaatggatggcacggaaattgggaactcatggaacatagaacatcttaggaagttttac

SEQ ID NO: 1447 - DNA, 430 bp, Zea Mays
agtggatatccatggagaggtaaaaagatcttgcaggggagcgtatttgatcgcagaggaagcttatcaccacgcctgtagccgtgcgacgtggccggaccgccggtgtcgtcgtggaaactcctatgatcttacttatgccacgccgtagctctttaccacatggtagttacagtggcacacctagattcacctctttagagtcgttgcaccggcgagctccacgactaagccaccagtgatcttctttctctccggccgccagcgcgccatgcccaaattaggagccactaccctcgggccctataaattgagcgtgccatagctccgctaggtagtcaagcatccaacgcacccactcgtgtctcggattgtccactagagagctctaatttgagatttcccccaaatcggtcaagaacactgtact

SEQ ID NO: 1448 - DNA, 853 bp, Zea Mays
atagaccatgtctccacaccacaaggttcttgacttgtcttcatggaatcttggggcttctcattctgaatcaactcctttattttgagtatcttttcatccttgagttgaccctttggatactttgttctaaggtgggttccactactaaggtgactccttccgtgtggcatacaaaacccaatcctaattcattgatttcctttccctactccagtggcatttgatgccacactagcatgttgatctgacttcttttgacttaatgtgtttgccatgatgttttcctgtctaaggtgataatgcacatctagatcttagtccttggttaactctagccacctccattgcctcatgttgagttatgtctgggtgaagatatactccaggcttttatggtccatgtagatgccacacttgtgttagaatagatagtacctctatatcttcagagcatggatgactctggccagctctaggtcatgtgttgggtaatgttgctcattcttatgtaactaccttgacgagtaggcaataacctttccctcttacatttacacacaacccaatcctagatgtgatgcgtcgtagtatatgagaatgacttctgaaggtttggtagcactagaatcggggctattgtaagctatttctaaaactcctcgaaggacttgtgataactacccatccaaacaaacttagcatccttttctaagagctaatcataggtttggccaatttcgagaatccttcagtgaaccttcaataataaccaaccatttctagatggtttccaattaagcacatcatgcaccttcttggggtcaatagtaatccctcagttggagatgat

SEQ ID NO: 1449 - DNA, 567 bp, Zea Mays
cagagaacacgcatgttccatccatgcccacttgcgcgttttttttgttgttgcagttcttcctcgtttgcagttcttcctcgggatttgatttgattgattggattgggttggtgcgggggcatgctgggggcagatgacgacatgcttacgaagcagaagctgctgcctccgtgacgaggcacgccgtgttgctcgtcttccatgactctgatgcctgcctgcttcgctcccaccaccccacaccttaatcgatggattaggaattaacctgcagcgcccgtccaggtctcgtgagagatttatatgtttggatcagattttagtttcttgaggcagatgacgacatgtgcatcctgcttgagatgcagaagctgcctcccagaggcttagccatgttgctcctcttccatgactctgatgcctcctcgtcctctcccatcatttgtgttttgttttgtattggtttttttttgctgtcttgctgtcagtgatggcccatcccctagcggttaaagctaacaaaacaaaacaggcgatgtttccttttcttgtcgtcactcaggc

SEQ ID NO: 1450 - DNA, 1043 bp, Zea Mays
gtggaatgcttccctcgcattggtggcaagtcagtggtcctcacagtggtcaatcgcttgtccaagtacgttcactttctacccctgggggtatccatacatcgtcgtctttgttgctaaggcatttttcgacaacattgttaggcttcacagcgtcctgtgcttcattgtcagagatcgcgatcctgtcttcacccatatattatagacggaattgttcactctccggcatgcaactacacctcggtacggctttccacctctaaagtgatggtcagtcagagtgaccaataggatcttgggcgtctacttgcgctgcttggacggtgattagcctacaagttagctgcgctggctaccatgggcagaacactgctacaaaacacctctttctagattgctcttcgttccacaccattcaatgtggtctgcggtcgcaatccatcaacactgctctcccacaaccaagggcagtccaaggtggctgctgttgaccaacagctccaggagtgtgacgaatttctgcttgaaattcgtgatagattgttgcatgcctagattatgaaaggcaattacgacacccatcatcacgccgtggagatctaggtaggctaatgggtttggctgcgtcttcaacaccgtcttgcagcatcactgagtgataacgcttaggacaagctggctcccaaatactatgggcccttccaagtgcttgagtgcattgggcctatcgcctacaagcttgctctgccaccacatgcccgcatccataatgtcttccatgtggttttctccaaaaaattccagcgacagccgccaacagagtgtcatctcggccagtaacgattctgtgtgctcgcctcaaccgtggagtttggaaggtattggtcagctggatgggctaatctactgctgacgctacatgggagcaactcactgagctcaaggacgcgtcctcttcgtttcagctcgaggacgagctgtttcataatgcgagggaagtgttacgggttcttttattaggaggatctaccaatgctaac

SEQ ID NO: 1451 - DNA, 411 bp, Zea Mays
gcccagcgacctccccgccctaaccagtaccgtccacttccagatcgacggacgcgcccgcgtcttctacctcacggttctctctctcttcgatttcttttctcagctataccgccgcaaccgagcgccacagactctgaacaaaatggacctggccaccccgcgcggccgcttgtcggcgagcgcgcacgccgaggatccccgcacggccctcgccactggctccccactaccgaccgccatcactaacgctctcagatcaacaccgaagaatggtaacgccgcgccccgccacgacgagctagcaatcagcttcaacagtggtatgcacgctacgctaatgatgatacgccgagcaggtgcgagcgaggggaaacgcttaccgatgaccactcgaacaacgccttcgcg

SEQ ID NO: 1452 - DNA, 665 bp, Zea Mays
cgagatctactgttcgcgtcgtgtgcgagggataggtgacgcgagctccaccatccgcgctgccaccatcccctccatcgccaccttcgctccgccgtcgactgctccgccgctggctgctccactatcgtctaatctgtcgctggctgctacgctgcccctaggacatgaggtattcaaccattgccaccatacgcttctggatctagggctattgttggtctttgcgccgaataggctagggcctccggctcgcgaggccttcttcctatgccgaacttcctgtaccagattcactagcctatctgttccatcagacccgagcagacaagcgttgtagttggtacttgcttgattatttatggcattcgttgttgttctaccgaactcgtcttcttggttgtgaagacgcgaccgccgatcatgccacacatgccacacaactgcatagaacctagtggtctttgtcttgctccaaacaaccaccatggtcggtcagttttttagaatagcgaccactcttggattcccttttgaaaactacaagcaggctccatgttcttcgactaggaggaggccatgtgtggcagctgctcgtaagtcagggcaagctattttcttattctgcagttctggcatagtgtaaactaatttctctccatctc

SEQ ID NO: 1453 - DNA, 573 bp, Zea Mays
ttaataatctaagggcatgaacaacgaagggcacaacttatttcaaatacaagaaaaacaataagcacaaagtgaccattcaaatacaagatattccgttctgcgcacaagttcccatagttgtcctttggcgaagggggcgagggcagtgtttacacttgaattcacaaaagaacgaccatgtcaacaccgacacattacattggctctgccttcaggataaggccagcctcccagaaattgaacaacatcagtttaatctcctcgccatcaaaaagagcccatagatctccctcttcgaaacattgctcggtcgtcggagcagggatgatccggcaagtcccctcctccgaccgcattctttctcgtggacgagacctctccattccgatatgacgacgccttcgagggacttcaatgccttgcgaagggtcgccaatcattcccacactctgtttccaaactccgatccttctcttgccccgtggtgtagtgggggcaaccctagacaaagactccaccgcggcgggggcaaccctaggcgaagactctgcaacagacaaatctagcgcc

SEQ ID NO: 1454 - DNA, 1007 bp, Zea Mays
gtgattctccacgatgaaccactcgaggcaccaccccttgatgctatccttcagagagatatcgaggtactttgacttcctcccacgacgcagttccagactggcgccgccaacaagttggtgatgttccccagccatcccgggccgacaatgatacagatacttccaaaggccgaaatggggaagaatcccgagataggcctcacacagataaataaaaatggaaacttgcaagatagaattagggatcaagtgggtcaagttcagattgtaaaagtcaaggagaccgcggaagaaaggagaaacgggaagagcgagaccacggataagaaagggaacatagacgacggactcatgagtgtcttccatcggaacagtaactccatggcaaatccgccaagaacagagttcttttgaaggtaaaaccccgacatccacaaggcgcagaagatcaaactctaaaattacagacatatggttacccacgaatgacaactgactgttggggtcgattgacgggatgataaccacggtggagctctgtttcttccgttttggcgccatcacaatttcgccggcggaacgaacagtagcaaaatctaagtaaaacaggggagtggttcgatgcgaaaatgtgaggatagggctcagaaatcaaaagtgcacgtcgacatgagtataaatggggttttcccgggttgtgcgccatttctaaaaagtgccaagtcaacacttgggaaaatgagacttcagacataactcggccgttacctctaaaatgccgacagtgtcaagcaccactcggctgttacctctaaaacgccgacagtatcaagcgccactcaccgttacctctaaaacgccgacagtgtcaagcacgactcaacaattacctctaaaacgccagcatcatcagttatcgctcggtaattatttctaaaaacgccggcagtggtaggcgcaaagacgaactatcaaacaattataaaggaggagcgggaaaaaac

SEQ ID NO: 1455 - DNA, 453 bp, Zea Mays
tcagcatcataatgacccgaaaaagaaggtatagaaaatttaatcttagcataagggtcgtcaggagcatgattgttattaccttgctggcagtgtggcataccttctgtgttttgatgaagacgacgacgtaggcgcaaatctctggtggccgcttcatcataattaccttcttcatcaaacaccgcatcatcgggaagacgtggacgaggaggtggtggtggcggtgcttgttgttgcgtctccaacacagcaagtctgtcgacgatctgggacaatcgtcgatccagcctctcgtaagtcttgccaaggttcatgtcaatgaaggcatcatgcactgacttgtggaccatctcctccatttgctccttcgggagcttgttgtttgcctcaagatcttggcggctaacacattcatcgaagtatgtagggatccttgcttctttgttgtcg

SEQ ID NO: 1456 - DNA, 446 bp, Zea Mays
atctttgtcatacaagaccggacattgcttatgcagtaagtgtggtgagtaggtatatccatgatcctagaactgggcatatgaagatagtttatcaaatcctgagatacctgaagggaaccctggcaagggactgtggtttagaccaaatcaacatatgaatttggaggggtattgtgatgcggactgggccagcagtagggatgatcggagatccacttctggatattgtgtatttgtgggaggtaatctggtttcatggagaagcaagaagcaagctgtggtatctcggtccactgcagaggctgaacgtagagcaatggctctagtagtgtgtgaaatgatatggttgaagggtctcttgaaggagcttcaagtgttgaagaatgagacaatgttgctccattgtgacaatgtggcagcaatcaacatagcaaacaatccag

SEQ ID NO: 1457 - DNA, 520 bp, Zea Mays
aaataaacttggtctacttgatgggcaaggatatacgtgtcgtgtccttgaagcaatttttcaggttggatctgtgtcatcccaaattcggtcctacaatacttcgggtcataccatttacactcaaagaaaactagcgctaaaggcttatttatagcaaatgtaatctcgattataattttgattttcccgtaatagcaggcttcgtgtccttccatgtcggttgccctagtaacgactccactattttgagtggcggccataggatgactagattcgaaaatgcttgaacgaaatcgatatccattgacgttgtaacgtccataggttttggcagttacgcatccaatagataactgacgtaagttatcattcaaattcatttcctccccaaactgtcaattatgccacaaagcattagcaaattttgtaatattagttaactaaaattaggtctcggagccacataattgagacttacacggtcccgcgaagccacataatgaaattaggtcgccca

SEQ ID NO: 1458 - DNA, 454 bp, Zea Mays
ggagtttcttggtcatgtcgtgagtgctcaaggaatatctacagatcccagaaaggtggaggttatccaaaattggcccattcccaggtgtgtcaaggacgtcaggagttttctgggtatggctggttactacaggaagtttgtagctcagtttggaattataagcaaacctcttactgctcttgtaaagaaggacaatttgtttgtgtggactgatcagaccaaccaatcctttatggctctgaaggaagctttggctcaggctccagtccttgccctgcccaactttaccaagactttcaccgtcgagaccgatgctagtggaggaggaataggtgcagttttacagcaggatggacatcctattgcatacatcagccgtgcgctaggaccaaagaacctgggactgtctacctatgaaaaagagtgtctagcaattttattcgcagtcgag

SEQ ID NO: 1459 - DNA, 699 bp, Zea Mays
aacaccccctcgccgccgcaccaaggctccaggccaagcgtcgtgcacaacgcactagttgcagacttgcgcagtgcaggtcgctgtcgcaccaaggctccagcctccaggccaagcgtcgcgctcgcacactagttgcagacttgtgcagtgcaggagcacatcaacacatcccgtcaccgctacaaggattgatcaagcattcaaggttccagctccagagtccatagaagtgtgtacacgagcacaaaaaagtattccaggtttgcggccacatgctcgcctaatcgcctacaggctacaggtatctatcaattcctctccttcaccattcgattagttgtcatatttattgatccctcataggctcgtactagaaaatccatgctattgtgtttatttattaatccatgtattccatttaatttagcggttgtggccgctacagatccttgcctagctccagccactgcccattgatgtcagcaccatgacttcctcctcactgcctcaaagttcaggcgacgacggcgacacaagaaggtgagaactgagaacataattcccactccatatttactttggaatttggatctacctgtataatcttatatgattgtggatggcttaattgttgagtgactaacgctaacccaccggtgatcctcacaaagggacacctcgaacaagaactggcta

SEQ ID NO: 1460 - DNA, 926 bp, Zea Mays
aaaacctcaaacggggactgacccagtgcagtgtgaaaacaagtattataccaaaactctgcaagagatagccaattggaccactgtttagggcagccatggacaaagcatcgaagataagcttccacacattggttgacccattcagtttggccatcggattgggggtgatatgcgctactgaggcataattttgtgcccaccaacttaaacaattcctgccacaagttactggtgaatattggatccctgtcagagatgatagacaatggtaggccatggagtttgtagacctgtgataggaacagcttggccacagatagagcagtaaaaggatgggacatggctaggaagtgagcatattttgaaaatttatctactaccaccaatatgcagttgaagcgtcgggatgtaggtaatccagaaataaaatccaagctaataacttgccaagcctgatccggtatgggtaatggcaatagcagaccggggtatctatttctgtcggccttggcctttgtgcaaatctcacaagactgcacgaactccttgatctgtcctttcatgccagcccagtaaaacagcttcttgatgcgatgataggttaccgggaacccagaatgacctcctataggactgtcatgaagggcagtcatcacctttaattgcacttggttactgctacccagccaaatccttcctttatgcttgatcactcctgataccaaagtgaatggctctattgtatcccctgcagcaagcgtactcagaatgctcttagcttcctcattctcctcatagctgttagtcacctcggtgagccaacttggtaccactgtcgaagttgctaacacgttgagttgcagtttggaaccatcagtgcataggtttggccgtctagaaagagcatctgccacacggttttc

SEQ ID NO: 1461 - DNA, 397 bp, Zea Mays
gctgcctttgtgctgtgagcgcgttcagagcgggaggacagagagaaagagacgtcgccgccgccattcttcgcattcaagagtcgattggcgtacgtggtgcatccgaggttttcgggtgatggcatggatcatgcgcgtgggatggtggatcgtatggcttcctgggttggcgtgaattgctcgtcagagcgtttcttcgccattgatccgccgctgcgtcgtggactgcatcacctgtgcgacaatcaatggtgaggacccttccacccaactcgtcttcatcttctccacgtgtagcactcttcgaaccagagcttggcgtgatgtgtcaggatatgaggtggtacagccatggcgccaccgtgcagctgctcgccgtcggtcgtctggacgg

SEQ ID NO: 1462 - DNA, 749 bp, Zea Mays
agaaagaccataagtttgtgtggaccctgaaatgtgaaggaagtttccagatcataaaggagaagctcacaaccgcacccgttttgacactaccggatatacatcaagatttcgtcgtcttctgtgatgcctcgaggcaaggcttagggtgtgtgctgatgcaaaacgagaaagtcattgcttatgcatcgcgcctacttaagccgcatgagcaaaattatcccacccatgatttggaattggcagccatagtgcatgccctgaagatatgaaggcattacctaattgggaacaaatgtcacatcttcactgatcacaagagtctgaggtatattttcactcagccagatctcaacctccgtcaacgaagatgtctggaacttatcaaagattatgaccttgagattcattatcaccctggaaaggccaacatggtagcagacgccctcaatcgaaaacctttcgggataaagggaaccaactttttagaagattggaagaagcaatcagctcaattgaatgcatgtttgggaaacaacgacagtctccaagtccaacccatggtaaaagaactcctatggcaagctcaacgcctagactcagagacaacaagacttgtggaaaaagctctcaaaggacaacttccggacctcaggacagatgaacaaggagccctttggttcaagaatcgtctgtgtgtaccaaaaggggaggcacgagaagtcctgctcgaggaagctcacaactca

SEQ ID NO: 1463 - DNA, 455 bp, Zea Mays
atttatagccctcaacacacacatagccgttatgtgaactagcatagcttctgcgcacacgaggacggtccccgccccatggacggacgatccgccgtaccagtaatggctatattgagcatttgaaacctgttagagctgtcagaaaagtcaaggccggacggtccgccctccagggccgaatggtccggaacctgacaacttggaataacagagcgttggtcagtcaaagtaattcgagtagtctgtccaccattcatggccagacggtccgcacatggaccacttaccatctggctaaaaaccccggacggtccgtagtgcaaggacacaaaaatacaccgtcactgcccaaactcaattcatcttatgcgaacggttcggcctcctggcccggacggtccacgaagggggggacatagacagactgccagcagacctctctagcagagtcg

SEQ ID NO: 1464 - DNA, 541 bp, Zea Mays
tggcgggcttaggattctcggttgctctactgacttccttaattctagttttttggccatttttccttagcttcgacaggacgcttcgacacttcggccatctcagttttctcttgttcatctattaccatcggttcggcactttggctggttctcctttggcttcagcaggagaggggcaggctggctccacagcagaagaaggcccttcagcaagcttcggcactttggccgtttcaatatacctgggccggtgcgtcaaaactttaaccttttttcccttcgtcatggtagaaatagccaaagcagcagcctttcttttctttccctgctttcgcgagggataacaatagtctgggtacacaaaaccaatgacatcaaagaccctgttcaatctcttcttgcctcgccctccaaaggccatgtcagggcatcatcttcggccctcgtgtaggcaccaagcaactcgtcgctagttgcctcaatgcaatctagccagtcatcattcggctcatcgaattgatttcggtacctgaaggta

SEQ ID NO: 1465 - DNA, 873 bp, Zea Mays
ccacgttcttgctgggctaggtcttgttgtgaaggcttggtccatgtcctgctggattgtgaagtctcttttggctttcgctgtgactcaacttttctgtggtggagctcttctgagtgggcatattttttgaaaagctggaacaacttctacaggtttgttggtgggtaccttgtgcagtgactgtataggacacctactcgaaggtcgctgactgcatagtggatggctatatggtcatcgaccgagagcagctgtgattttaataggaggagagtcgcgaaaattttctttttctcgttgcctataaagtgagagttctgctagtgtgtctgtttcgggtctatagccttgtaaattcaatatgaatttgtcgtgaagtgtcttccatgaatcaattgataatggtgataaccttgaatgccatgtgagagctgggccctcgagggctatgatgaatgacttggccatagtggcgtcggcccccctgatgatgcaactgtgacctgatagctcatgatgtactaggttggatccacgatgctattgtactttgggtaactgcctcctctataattttgtggccaaggggaggcctggagctgtggtgctagatggcttcactcgtcaaggtaatttagcccttggaaggcagctggtgtgaagcctggtatgtggaagtggtgaaggttttggttggctgcaccagctggatactgatggcgggggtcttcaccctacatttcagcaatttcctactctagctctctggctttttgctcctcctctaggataatttgccttactctagcctgcatgttggttcgctgcctcttggccacgagtatctctctctgtatttgtaggtgattg

SEQ ID NO: 1466 - DNA, 587 bp, Zea Mays
ttgccggcgacgtggccgagcggccatcgccgaggtgtacaccgttcgccgcgattacgccaccgtgaccctttcaccacgttgttgccagccgtaagaactcaggttagttcaagcatctctgcttgatgttctagcctcccttaagtctcatgttgctcgtagacccatttgattgagctagacctcactgaatcaccaagaacacctcggtttgattccagatctcaccgccgtcgtgagcagacgaattctgggccggatttgtgcaattaatggagggattatggtcgccaggggtaggaataggcgttgaacgagttagggcgttagtcgttgcgcatcccggccggtactagctcgccggagagcacgctcaccgctgttcgccatcggggccctgggtttgcgaaggaatagaagttggaggggttttacgcaaatgtcagagagacacatgaatagtgtcgtgacctctttctaggtttttcaaatcgttggggtcctctgtgcaagatcaccagcacgggcgcaggcgcgtgctcgttttccccgttcatgggccggctcgggcttgtttgagcccg

SEQ ID NO: 1467 - DNA, 943 bp, Zea Mays
cctccccgcaccttcggagctgccattagatttagcccaagttctggccaaccaaacccgactcattgaggtcctcaccagaagccttgaaaactagcgcccaaatggtggaaggcctaaggataggatgggagattttctaaggctcaagcctcccacattcgctggatccagcaacccgctcgacgctgatgactggttgcgcataataaaaaggaagttagaggccattggatgccctgaaaaccaatgtgttcatcttgctgctcatcaactctctgggatggccctatcctggtgggatactttcagcgctgccgtcagagatgctacctgggcaaaatttgaagccgccttccgagagcatcatgtgcccctagggatcgtccagctcaaggaagaataatttcgggaattaacccaaggagggagacctgttagtgagtacgtccacaagttcacggaattggctcgctatgcgcctgatgatgtcagcacagaagctaagaagatggtccatttcttgaaggaactaagaccataactcaagactatcctcgccagccaagattttctcagcttctcgcacctctcaaacaaggccatacaagtggaaagggctagagaagaagaaaagggtcacctcaagagcaagtttcaagtcctccgagctcagcagcaggacaagcaccagagagtttgatcttttgggtttcctcacaaaggaccaagcttcaataaaccagcagggtctgcttcgtcacgttttagtcagcagggtcaaagttccctccaggccccctatgttgcaagcaaccaacctccagccaatgcttgttggcactgtggagaccccagtcactacaagaataattgccctcagttgaagacattcgtgcctacctactccaactcgatgaatggccccaagagtgccccagca

SEQ ID NO: 1468 - DNA, 398 bp, Zea Mays
cgactgtcctatgcctgacacactaacactgtgtttatctctaaacaacccggctacctcgtccctaattctttccaccacgtctggcggccctacattaagtttgtgggtggaaatctcaggttgcctgacatcattctgtcggtttccctccaagggatgtccaagatgtgtggtaggtgtcctattaacgccacaccttctgctctatatctctcatggtctctggtggccgaagaatattcggccctatgttcctgtggtggcatggcatggttacaatatgtcgccggtggggcaccatagtgttgctgcgatgagtgtgggaactgtgtatattgtgcaactctcggttctgcatacgcatacccggacggtctggcgtaaggggtcggacg

SEQ ID NO: 1469 - DNA, 363 bp, Zea Mays
gctagatccggcaaacgtgggaggcttgagcctcaggaagtctcccatcctgtcttgtggtcttccaccattcggacgttgattttccagatttcgagtgaggacctcgatgagtcgggtttggttggctagaacttgggctagatctaagggtagttctggaggtgcggggaggtgggtctcactttcctctctaccggcttccctttcagctctcaggggaaaccctgctccaatcccagaggcggtaggcgtggttttatccgaagccatctaccagggggagagagtcactattatgcacatgccaattgttttcaaccaagttattttattcattacaccaaaacattacaagcatac

SEQ ID NO: 1470 - DNA, 633 bp, Zea Mays
attattgcacttcttgatgaagcttggtgagtttgaacttcttctgttgcatgaaatttaaaaggcagctgtaaattgtttatttcatgctataaagagcattgtttatttctatttccaaatcaattcttctaataaaagttctttggtttttggtttatccttcgtgcaccagtatgtttcctaagtgcacacacgaatcattttctcagaagttgtatgagaaattcaggaataacaaaagattttgcaaaccaaagctttctcgcactgcatttaccatacagcattatgcaggagaagtaagcaattttcacaacatcacattcttgtcagtacatttgcttgagtacattcctttcaattttattttattttattttccaggtaacttaccaatctgatcagttcctggacaaaaacagagactatgtagttgtagaacatcaagaattactgaatgcttccaagtgctcttttgtgtcagggttattcccatcagtactagagaacacaaaagcatcgaagtcctccattgctactcgcttcaaggtatcattctcctacccgattattacgcctgcaattctttaccaggtcgactggagaaaaaaaatccttaccaaagtccca

SEQ ID NO: 1471 - DNA, 485 bp, Zea Mays
tggactgggcagatctctgaactgggcataacaaaaaaatgcagaaatctgaactgggaagtttacaatctgaaaatgctataatttgccattatgaacagagaacagtttatgcttacatcctggacagagaacagtttatgcttctaatgaacaaacgtgactggtccaatggtaactccttgctactgtgcgctctgttactgggcagaaacatgcagaaatctgaactgggcgctcggttacatcctggacagagaacagtttatgcttacatataactggtctctattactaatgaacaaacgtgactagtccaatggtaactccttgctactgtgaacacttgcgtcctgtgttcgagcttgggataggtaggtttttttggttttgtttacatttttcaatcatttttgtattttgcttttatttatttacatgtatagcaccagtttctccaaatcatttcaaccttttttttgggt

SEQ ID NO: 1472 - DNA, 612 bp, Zea Mays
gtctactgttagagatatagtgccaatcacacttcagaaatggaaggatttagatgaagacacccgcaataagctatgggctaagttgtctgagtcattcaaggtcccaaaaggcacagaggatgcagtaaggaagttggtgctctctgctatggccaagatgtttcgtgggtggaagactgagatgaatagggattttgttaagaagaataaggttcctctgtccaagaaaatggggaaaatcactcaagctcagtgggaggaatttgttcgtcagaagaccgaactgaatgccaaagaactgggtgaaactaattctcagagagcgaagatgaacaagcacccccattgcctagggtcaaccggatatcaccataaagttgtgcagtggaacaggataatcgaggaagctatagctaacggcactttggacccaatattaaaagatatcgatgagcgagctattcgttggatcttaggtcgggcaggtttgactgaggacggcaaacttttgcatccagaattggtaggcaaagtttcgacaaaaattcaagaatatgcagaaaagagaaagaagggcgaatttaagcctcggagggagaatgacatact

SEQ ID NO: 1473 - DNA, 513 bp, Zea Mays
caggtttagagccgactttatggtcaacaagcattagccagatggacatggccacactactctaacaaaagagtggcaaaggagaaatgcaagatttcagacatcgatcaaatggttttcaaatcacctaattgacatagtcaccatggtatcaaccagacgaactaattgcaatcaattgtagtgcataactgatcaccatagcaccgataagcccctctaaccacgattagtcaaaaaacttgataatgtccatcaaatgtaatttgttgatgtggcacaattgaaaacaaaaaataaaactatccattgggactggccaaataaccagaaggcaggaaggataaggcaccactctgggtctaaagactttcaaccttgctgcatccccaccagagcatttgatccctaagggaaaccacagaatgagaaacgaaacaaagagggagagtgaggatgggatcagttctctaagagtgtacataaagaaaaaggggttagatccaaaaagag

SEQ ID NO: 1474 - DNA, 630 bp, Zea Mays
ctaggatctggccttgatggcagggggcgcgacgcgaggggcgagtgggcgtttgtttatctgcggctgcgccttaaatgatcgacgcaaagtttcactgacgccttaaattttaatccgtgtgggctgcgtctgtcagtcgggatcgcgatgcctttttcactcgtgcagcgtgcaggtgctcctgccaagccgtgggggtaggtaggtagggttcctggaaaagtgaagagaaggccaaggcctgcagcggaagaaagttcaaatctgccgtgactcgactgctcgagtgactgccgtcgttccgtcaagaaccgaccgtttgagagctgactgtgattgaggtagcagtcgccgtcgtaggagagacggacgacgggtcgaaggccgttttgctcttttttttttgtgtgtgtgtgtgtctggtttgtacagtacattgtactctgccctcgcctctgcagctctgctcatccgctatgggcaatggccgccggccgccgcaccaaaggccaaaaccgaatgagtgatgtgacaccgcttcgcgcgccaactcgtcatccatccaacggcggggcaccccacctggccatcaatcatgcccgctccgcctccgctcatcaatcaaag

SEQ ID NO: 1475 - DNA, 775 bp, Zea Mays
cgtgtggtacataaccagaatgtttttcctctaagattaaactcactttacctgaattcaatggtacatataatcctgacgcgtatcttgagtgggaaattgccgttgaacaaaaatttgcatgtcatgcttttcctgcaaaccatcaagttagagatgctactagtgagtttacccatttttcttctatttggtggcgcgaacattgtaacacacatcccactaaaatccctaccacttgtgatgctttaaaagtccttatgcgccatagatttgttccctcatactattctcacgatttgcttaataaactacaacatttaaaacaaggcacacactctgttgaagagtactgtcaggagctgcaaattggtatacttcgttgtggtttagttgagaataatgacgcagctatggcacactttttgggtgatttaaaccatgaaattcaggatgttcttgattataaggagtacaataagatcactcgtttattccatcttgcttgtaaagctgaacgtgaagtgcagggacgacatgcgaggacacaagctaactcttctgcaggtggcaccacatcgttccactccaagcctgccgccgtggcaccaccagtagcgacatcgccatctaccagcactccacgtgacaaggatgtagcaaaaagtccagcgccacctccagcaacaaatggtgcttctttcgctggacgcaccaaggatattcaatgtcatcgctgtaaagggtttggtcacgaaatacgggattgtcccaa

SEQ ID NO: 1476 - DNA, 362 bp, Zea Mays
aaaatatatagcatgaacaactattggtgcttggcatgaggaggggggatcgtgagtatcagacattggtatctgtttatatctcaccagtatctcaatttcatccaaagcatgaaccaccctattattccatacaataagagctgggatgtttatggattgtcccagccttccgatgcgatcaacctagattccattccaacaacgtgtgttgatggttgcattcagacgagaaatcgcatgaaatgcctacataattcaaactctccagtagggacaaattgatgtcgcaaacaaacagtcgcgacccagcgaaatcaaacgcattcacgtaaatcgaatcgcttccgcactatcacgac

SEQ ID NO: 1477 - DNA, 699 bp, Zea Mays
aatacatttactaattcatttattcattttaaacaggctctggactgtgcgccaaatttcagaaaggtcaggggccacggggtaaaacttcctagactcagtaaacagtcgccgaggacggtgtgtttattctaaaataccagagggtttcttattatgtaataatgccagagtgaaagggtaccgtgcgctctcagccatccgatcacgaacagagcgctaggattagatctagtctattctgaaacggtacgcaacgttcaccacgcgatcagatttcaacggcggcgatgtttaagcaccctagaccgactctcgtccgcttgatctgagtcgaacgccccggatcatccccgcgaatcggtatccctgtgttctaatcctagccgcccgctgatcatccaacgaccgagcagcaataaccccatcccttaccttgcgacggcggtgccatccggaccctacggcggcgcgcccgccggtgttgcaattccggcaaccgcgaggccccggttctaccatgaatacgccttagtcgatgcgaacaacacgaagaacaagatgaggggggttttcaccttgagttatggcggtagcggtccggccacgcggaggcgaagatccacggcggaaatcaaactacggcgagcaattccgcccgcaccgatcgtccgcagtcaccgcgtctttccacaccac

SEQ ID NO: 1478 - DNA, 485 bp, Zea Mays
gccgcactgaaggtatcccaccatgctagggccatcctagagaattgatgagtagccaattgaacacgatgattttcggggcatcctatggcttccaatttcctcttgatcgtgcgcagctagtcgtcggcatcgaggggattgctagatccagcgaacatgggaggcttgagtctcagaaattctcccatcctgtcctgtggtcttccaccacctgggcgttggttttccaggcttctagtgaggacttcaatgagtcgggtttgattggctagaacttgggccaaatctagtggtagttccggaggtgcggggaggtgggtctcactcccttctcctctagcttctcctcctactcctaggggaaaccctgctccaatcccggaggcggtagacatggttttatccgaagccatctgccaggggaaaagagttactaccatgcacatgccaaatttttttaacaagttactttattcattaca

SEQ ID NO: 1479 - DNA, 518 bp, Zea Mays
ccgaaatgggatcatttgataggaactggaaaattaggaataccatcctgtgacagccgaccgtagtgtagttggcagccgtctcaccgttgaccaaactagattaaacacatcggcggccgcgccggtcatcaaccatcgtgtgtcggttgtattaagccactgcgctagggcaccattctactcttgcgtgtactcgtgaaaatcagatggaaaacaaaacaacgcggccatggctacacttcatcgagacgactagatgaagtctcgtacatgggattcatcagtcttgggctacggtgtccatatggccaatattactaggacaaggttgctttcacaagtaatgaggtccttcttcaaactggactattgtcatccactaatacttttagatatgtactaggccatgtcaaacttcattgttgtccagggacaacatgtcctcaacgtggatctgtccctgtcctctgctcatgggaaaccacccgatgtcaccatcggtgagggtgccttcc

SEQ ID NO: 1480 - DNA, 419 bp, Zea Mays
acactctaccccccttaaaaagaattcgtcctcgaattcgaccacttccaagcaaagcatccaaggtaccccatatagcaccatcattcaaaacatgggtccattattggtcttaattaacacaagaacctctacctcggactaattgtctaaggaaactacacaacgtgatatcaagcatgaaacaacatgcaatgaagctcaaagcaagtcatagatgcaatcaacactacaatttcacaccatcaaatttggatgcaactatacatcaacattaatgtcttaaaacaatactcttttatgaaggggtaatatgcactaagcacaacccttaccagcttcaacaattcattttaattcaatagtgaaacatccacaccagatgaatgtataagaagatcaaacacctcacctcaaag

SEQ ID NO: 1481 - DNA, 506 bp, Zea Mays
gcggcgacactccgcgaactcgaacaggggcgctgagcagagtggtggcccgaagcgaagattgaggaggtccttgaaccgcccccaggatggtgtgccctcgtcgtcctgcagctggatgaaccacagctgcgcgacgtcctccagattataagaggccatccacacgcgttcctccgccatggtgcgctgttggcgaaaatagtattcgcatttgttgatgaagagcatcgggtcggtggtgccatcgaactagggaaagtcgagcttctggaacctgggggggccgatccacacgagggggatcctcgcgctggccgtcggtggacgacgaggatgacttgtccttcatggttctttcacggcagccaactcggtctggaaagactgcatcagctccatgaggtccttgatggtgggctcagctatggtgatggagtggtcggtggaggcggtgggcgtggcaggggatggtggagggcaagagcgggtgggtgaggatcgac

SEQ ID NO: 1482 - DNA, 674 bp, Zea Mays
gtcattcatctcagggaggacaagttgtacgttcagcttggtgacaaagtgaaggaagaggcgcggtggatcctagatacgggagccacaaatcacatgacaggtgagcgctctgcgttctcctcgctgaatgagaaggtgcaaggtacagtgcgattcggcgatggttcagtcacggccatttgtggtcgcggatccattcttctccactgccggaatggtgaccacaagactctgacgggagtttactacattccgaggctcaccacgaatatcgtgagccttggacaattggaagaaggtggacacaagattctaatgctgaacgggcgtctgaagatctgggatactcagcgtcagctactggcaagtgtgccgcggtcggtgaaccggctgtacgagctggatcttgacgttgcaaagccagtctgcctcgctgcgcaaggaggcagcgcagcatggaggtggcacgcacgccttggacaccttaattttcgaagcttgagacgtctagccgaagaagaaatggtgcgtgggctgccacggattgatcacgctgatcatgtctgtgatagctgtctcgccgggaagcagcgtcgactttccttcccaggagaggcaggctatcgtgcgacgagcaagcttgagctgatccatggggatctttgcgggcc

SEQ ID NO: 1483 - DNA, 454 bp, Zea Mays
taagattctagaattattttaacactagaaatcattttctaattgaatttctgaatttcatatgattctggactgcgtctcaatttctatagaagacaggggccactgcgcaagaatctctaagacacagagcactatacaccggactgcgggtttaattctaaaaacccgaggggctcattagaaaaatagacaccgcgaagggtatcacgggatcagggccattggatcaattctagatggctccgattagatctaaccctctcctgaaccggtatgcactaatagtcgctggattaagatcgggcggcccagacattatgaacccctatccaccactcgttacgagatcagtggttcacaccatccggatccaatcccccgatcatcaccattgattaatcaatcaactgtcagattgctccctagcgaactgttacgtgcctacctcaac

SEQ ID NO: 1484 - DNA, 719 bp, Zea Mays
gcgcagacatacagacgtatacttatagagattacatggcactaagatttacgacggaacaccaaagcgctagctcatccgtccacccagggtaagaagaccgatagggcctagtaccccaccgcaacccaatcatttccctcattggcaatcatcgttgtcaaggtggaaagatatatggggaatggtacaatggtagtattcaaatctaatttaattcccaaatttcaaactaaaatggaatgtttcaagctcatcagttttacagtttcctggtggtgacaactgagatgccacactctcccggaaaaacataaccagccagttgcctctgacatcctggaccctggcaagaaatctagctctaaaaaaactgtataaacatgagcagcaaaaaatatatttgtgaaaccatttgatgtataattacctttgtcactcattccatgatctgcagtaaacacgtatgctgtttgattgtcattgaagtagttctccataagattgtacacactttcagctatttggtcaacaaccttgacattgttcaggtatatgcttgaatagggtcggtgtgcatggccattggtatcacaacccagtaaatgcaaaaatataaccaacttatcttgtaggagtaactgcctcaatttaatatcgtcaaaagacctgttgacaagatcttgaaactggtcaaatgaccaatgatccagaaatga

SEQ ID NO: 1485 - DNA, 570 bp, Zea Mays
cttttgactctcacttgactcatttgtcctcggtattacatttgcttcggaaggaccagtggaaggtgaagttatccaagtgtgaattcgctcaaaccagcattgcctatctcggccatataattagtgcccaaggtgtttccacagatcccgacaagataactgtcgtgcaacaatggcctacaccggcaaacagcaaggagctacgcagttttctgggccttgctggtttttatcgtaagtttgtgcggcattttggcatgatatctcgtcctctgactgatctgttgaagaagaatgtgctgtttatttggactgtggaacaccaacaggcgtttgagttacttaaacaggccttaagctcagcaccagtcctggctttgccagactttgcaattcccttctgtatttatactgatgcctgcaacactggcgtgggcgccgttctcatgcagcgtggacatcccctggcctttctaagcaaatcactgggacccaagaatcagggactgtctacgtatgagaaggaatacttggcaattctgatcgcaataacacagtggcgttcct

SEQ ID NO: 1486 - DNA, 472 bp, Zea Mays
agcgaggccctcgccgtggtctatgaacggcatcgccggggctcctggctgtgaaaggagatgaaaggggaatcacgcctcaccattggatatggagcaagtggtgagattagaggaagtgtaccgcttcggccagattcgttatgggccgttgatggcgtgataatgcaatcgcagattagatcaaggcgtggggcggtgctgaccgttgatcttttctcggacgactacaattatgttagggcaatacctgttcgtggatgcgtctgttccatccgatttgggcgtggcgtgtgttgggccgtcgatcgtcgagtgggctgtcgagattaaatgtcaacataccgattcgcgagcagtagtgggccatacgatctagatccaatgtctcgtatgcgtaagcagctgtctgaccgcgctatcttactaaagaatcccttcgttttatagtaatagacccgccatcctcagc

SEQ ID NO: 1487 - DNA, 567 bp, Zea Mays
tagtggtcaccctgagttaagtaagcgtgagcatgtcacaccgccttaagtcatcgccgacttaagttgattgctccgttaatagggtatagtggtcaccctgagttaagtaagcgtgagcatgtcacaccgacttaagtcatcgtcgacttaagtcgattgctccgttagtagggtatagtggtcaccctgagtcgagtgagcatgtagtttgacaataaacggttcgagtgcctttgagaatgaagtctttttattgatggtgtattttccaattacagaatacaatgtcgtcccaatagcttttgaaatctagctaggggtaaaacttcctgagatgctctatattccatgggttccatatttccgtgccatccatttgagtaagacgatatgatccaggtcgagtgacttctgctactatgaatggtccttcccatagtggtgacaatttgttccgtccctcccccgttagaattcggcgaaggacaagatctcccactgcgaaggatcgatgtcgtatggccttatcatgatagcgcctcagagtttgctggtacctggctg

SEQ ID NO: 1488 - DNA, 619 bp, Zea Mays
gcgaggtaatccactcggccgcaaagagggagagagggccacgggggccaccggagtgatcgccagcgcacgggcggtgaagatcttttaccccgcaaggttatccattagctatgagcgcgaatccggacggcggcagcacgaatcacggcggagggtgccgtcggcggtgaggacagccgcgctggcggtctgatccctattgagcactgtaccatgagatcgccattcagtccatctgagagcccaagttggagctcgattttctgcgatttttatgtggcaccagaactagccttctgcatcaaagttgtagtgccaccaaccagctacaagtttgttatggaaatcattcacaaatttgcactggatctcaattgaattgactctcaaacttagagcaaagtcactgttaacttgaaattcagactatttcagtctgacagtccaactttaggctcatttatctctaaatttttcttaacaactgagctcacactctttagcaaagttgttcttctatagttggtcttcaactttgatgtggtgacttagggcaaaaaccctatgctttgaaagttgcaaagctccaaagttgagccaattatctggttttcag

SEQ ID NO: 1489 - DNA, 280 bp, Zea Mays
ttcggacacgtcgatcagactacgttattaatcggttgagttaaggcattggctgagcattggctgcgccctggcaacatgatgcagtatttgtgtcatacgaacttggctgcgtcatgtgattgctatgtcgcactctagttttgtcggaccgctccggttgagtcggaccgtcatcaccgagtcacatatttttcgcatgccctgtaggcactgtccgtctgtcgtgatcatcgagccacaattgcgcctgttgcgcatgttgcatggacttatcgtg

SEQ ID NO: 1490 - DNA, 362 bp, Zea Mays
ttataggaaaactcagccaaggagagacacttgtcccaatcctccccatagtgtagtgcacatgctcgcaacatgtcttccaaaatctgatttatcctttctgtctggccatctgtttgggggtggtatgctgagcttcggatgacatgggtcccaagtgattcttgcaattgttcccaaaatcgtgccacgaatggtgctcctctgtccgagactatagtctttggtatcccatgcaaacgaattatctgatcaaatgtagatctctgcatatttctctgtcctgtgggtggtgtgtactggtaagaaatgtgcagtctttgtcaatctgtccacaataacccaaatagaatcatggtgcc

SEQ ID NO: 1491 - DNA, 412 bp, Zea Mays
gcagaagtcgcctaagggtgcagccggactagcacaacaagtgcgaaaaaccgaagtccaccgcgaagactatccgtgcagaagtcgcctaagggtgcagccggactagcacaacaagtgcgaaaaaccgaagtctaccgcggagactatccatgcagaagtcgcctacgggtgcagccggactagccgaaagtgcgaaaaatcgaagtcctccgcgaagaccatccgggcaacagcagcccaaaggcgcagccgaacgaagcgtaacaaaagcgaaaacgactacaccaaactgtcagcgcaaagaccgactacatgcgcaccagtccagcacaccaaatacacacgaccaagtacgtaacgccttcgcgagcatagccgaaagtgcgagggcacacaacttcatcataca

SEQ ID NO: 1492 - DNA, 431 bp, Zea Mays
gaaggaggccttggtttatgcggacgtggggaggcggccagggtgtaacgacccaatcacccaggcaacaatcgcgccaccacgcgtagggtttctattgtgaatccgataggcgcgacgatagcggtgttctgttagcagggaagatgaacagtagaggagggggccaccggtcatccgaatgcacggcgcgcacgcgcgatggcctagggtatgatgtgtggggttttccggtcagcgccggactcacaggagcgcgtgcatgcaggactgacagaaggggcctatgtgtcggcgccatttccccagcgtggccgagaggaggaagggaaagtgggccgcgaaggagaagagaatgggccgaccaaggaaggaaatgaccctggcgcaggtaaatctccttttcttttcttatttattttctgttttta

SEQ ID NO: 1493 - DNA, 522 bp, Zea Mays
caataaaatgtcgcctatagctagtagtggtaatgacttttgcgcagtacatataaaactatataccagcctaatgtgtaagctttatttggaaaccagatgaacaaaccgtaccacatgctactgctactcgcagttctggacaacgcaatgcttccacataagaaacagaagctaacaaaacacataagcaacgagtgacgtgagattgagcaaccgactaaccatcatccaactctgtttggaaactgatcgtcgcccatttccggcgctgcacggacgcacgcccgtgctcgcatgcagccatccatgcacgagagaggaacaaggaggccaacaggcagccgtgcatggaccatggatgcgacgtgaccttcgcgtcgtgctcgcctctcctccttttttttctcgcacgccaccgtgacacgacgcgttgctccgtcccttgcttctgcaagtattattcttttctttcttttgccttttggtttttgaggcattcttttctctggtgccatcggg

SEQ ID NO: 1494 - DNA, 487 bp, Zea Mays
gttctatgtaccatgagttcccaatttccgtgccgtccatctgagtgaggcgatatgatcccggccgagtgatttcaactactatgaatggtccttcccatagaggtgacaatttgtgccgctcctccctcgttagaattcggcggaggacgagatctcccactgtgaaggatcgatgccgtatggccttatcgtgatagcgcctcagagcctgctaataccgtgctgattgaatcaccgtgttcagtcgttcttcttcgagtacatcaacatcctctagtctagtagcctcagcttctgctatgttttcaaagatcaaccttggtgccccaaacttgagatcagcgggtagcaccgcctccgaaccatagaccatgaagaaaggagtgtttccatgcagggctcgactaggttgagttctcaggctccaaacgacgtacgacagctctctgatccactttcctgcgaacttttcattcttgtcgaa

SEQ ID NO: 1495 - DNA, 319 bp, Zea Mays
gtggggtagtccaacaatgaaatccatgcctatttcttcccatttccactcgggtatcataagcgggtgcagtagtccagctggtctttgatgttcgcccttgactctttgacacacatcacacttagccacatgtgcagcaacatctcttttaagcccataccactagtacttctgattcaaatcctgatacatcttagtgctaccagggtggatagagtaatcagaatcatgggcttccttcaatatagtctcacgaaggctatcaatctccggaacacatatccggtccttgaaccatacaataccttgctcatcc

SEQ ID NO: 1496 - DNA, 396 bp, Zea Mays
gtaaaagatctggcgggggatggattcggtcgcgggcagggggcttatcggatgcacctcatgaccgtgcaacatggccgaacgaccgatgttgtcgtgggtcgctggtgagctcaattgcgccacgctgaaatcctttaccacgtagtcgtaactgtggcacactcagaatgctgttgagcaccacgacggacccgccagtacaatgtcttgtcataaccgtgctccgctctcctcccaaattcggagccaccgcttcgagctgctataaattgatgccccagcctgcttcaccaacttattacgaactcagaacaccacctctcgcctccaattagtcaccatagctcgtgaatttcaaacttcccccaattccgttttctgcaccaccgtgag

SEQ ID NO: 1497 - DNA, 337 bp, Zea Mays
tgcgggcatcgcggtcgtctggtcaggtcgggaggaagaagacacgggtgtggccattgattcatcctcgagcggtccaaattaaaggacgtcatgtacccattcgtgattgaatcacagccgtagatcggcagatgtagggtcgagtgaagatcgcggtgtattaaatctggagcatcggattgggatctgatggtccatatcatgtaccggttcacttaaagattaatctaatctgggccctcgattttggatccagcgatcagaaaaccccatacccccttcgttatgacaaaattcatgaagagcccctcacaaattagctaatcaacccgcc

SEQ ID NO: 1498 - DNA, 718 bp, Zea Mays
tcttcgcgcaaccccaccataccactcacaccgctgatcgccgcgcagttggccgacggaactcaagcacagcgccgctgcaagtaaatccccggttagtcgacgattcgtcctcggtttggtgttcggtgggtccctctggctaaggagaaagtggtcgaggacgggccaccaggaatccatcgccagcgccgccggaatttctcgccgcactccagtttccgccatgcgccgcgggcagggtttctcaaccgattaattgaggtactaccgccgctctcgtgttcgcttatgcattaaatatgaatagatgtagcgaattagaacttgcatcaccaaaagcgcgttgaatcgctcgccggcgttggcagcgcctggctgagctgcgccgccgtgttgcggtagggtgggaggacgatgagtccgcggccgtcggatccatagcgacggcttagattagaatcaaggcaacggttcgtgtaagggtgatctgagccgttgatgtcaaaatggacgagtgaggctaggactcggttatgaggagcgcgggcggtagatctccgatccaacggtgggaatcgcttaccggttcgttttatgattagatccgatctggaccgttgagatgggatcggaccgcccatatcgcatacccgttcggattatagaaaatctaatcacagccgtagattgatgatcggacgactctgatcctagc

SEQ ID NO: 1499 - DNA, 533 bp, Zea Mays
gggtaaggtaagggtggaggttgcggaattgcgtgctgagtgcgcagcatgccactatttggatggtggttctcccgcccctgtcgggattcaacgcccttaccgttcaccgccccgtggtctctttgactatggtactctagactgcaggacccgcatagatttggatccttagatctacagagttggagtttgtaataatgcttagttcagtgtcttagcctaagtcagttttagttagagttagtttgcttatcttatgttggatgcttgttatgatggacatgtactaaagttggatctttgcaatgattgtcaccaaggtgtgggtatcccctgcaacttggtgtagttattaataaagtcagttatttagttgggtaatccctttatttcccctttcctatttatctgagaagctgtcagtgaagatggtcattcgttcagtgttatggagattttctatacatcttttcttatgctgaaagactacagagtcagatttgatatatgtgtgtgatttctacagatgt

SEQ ID NO: 1500 - DNA, 1142 bp, Zea Mays
ggagagcactatgttggatcctatcatggagagatggataagtgcagctacatacgcacagaggtggggaataaacataaacaactatagagtagggggtctctctatggcctatggctatctccggtagtttttctagcacaccatctatcttactccctatttgaaacttcattctatataaaccgtaccatgtatcatgtaaaacaatattgggtatggccatatgtagctctgttgagcatggtctaagaataaaagctgatgtagagatttgaggcgcccctcaattcagtaagactctcgctagaatattttttgcctctaaaccatcaaaaataggataaaagtagggttggatatcaagtcaactcggttcgtttgcaagctcgagctagatcgtttagctcgcgagccataaaaaacaatatgcacacacacactttatttggagcagtgagctttctcaaattaaaggaagccttaaccaaccgagcaaatctggctcagcccaatccaatcgtgctgaccgaaattgtccactttatcatcgtaaaaaaccaatcgtcgcataaaattcagttccaatctagccaaaaaaattcaccccttcacctgaagtcatagaggattcacccccatctcccaaaccatacaattcaacgtgctcgtgaactgattcaggggcataaactccttcctcgccgcctcctctctcttgcccacatccatctcacatcctccgtgtagtcatccgccaggcaaaagatcgaccttgttgcgcaccaccttcgccgcctcttcgtccccgatgaccactcgctcccgccccctttcgaaccccaatccctagcattacatcaagaaccctccgtcaccgaacccaacagatagtgtgagtcggttccgcgccggtcgcgcgtgaaaaaactcatcgtcacgtcatccctctccacttcttgtgttcatacacctcaaattcgggctcccaacgtctcggagaagaggagcatcatgatgggcagtggtgtgcgtcatctgcagcatcttgcttggtgcctcggtgcttgcgctccacctcagggagaggtctgttgccatcttgcccctgcccctgcccctacctccgcccattgacacgc

SEQ ID NO: 1501 - DNA, 284 bp, Zea Mays
ccgtaatccataccggtttgatgagatcgcaatctgatctggtccacccgctagccaatccacggcgcataagccccgaagctaacaggttttctatgcttgatctgtgccgttcatccattgatcaatggctctgcgcacttcttcaaccttagacccaggccacggcaggacagactgcccgcggcggcgcagaccgccggcgcccgcagatccacaccctcgcgctctcctagacgaatctgagggactctactcacggcctagatgagagtgaaacaact

SEQ ID NO: 1502 - DNA, 709 bp, Zea Mays
tcgactcttgtggtggtgttgtcatcgacacaatctgccgactctaggtggaggagtcgttggcagacatgaccgcggacatagggctcgccacagttgtagcacaacccttggtgtcggtgctccatctgtttggtcggggtgagacggaggaattggcgcgtcagtggagtggtgcttgttgcccctgctaagcccatcagtggggctcctgtcgtggaatggggtggccctggaagtggtggtcgcagcgcgctctagtcgcgctcgtgctgaaggagctaccctagaggcggcctcacgacgttcaaacgcccgtgtaaggtgcatggccagctggacatcttatggatcacgtagctcgacgtcgacatttatgtgatccggaagtccccccacacaaagaactccgccttttgggacgccgagaggttgtgtgcatgacacaatacctcattgaatctttcggcgtagtcatgcaccatagatgtgaacgacaaccagatgagtttggacaacctagccccacgtactgctggccccaaaacgtagggtgtagacctcgcaaaaattctgcaccctgacatgccctcatcctgctcgagggcatagtaccatgtctaggcggccctagtgaggtggtacgacgccagccaggtgcgatctgaggccgacgtatgttggccgctgaagtactgctcccattggt

SEQ ID NO: 1503 - DNA, 514 bp, Zea Mays
gaggactactgtcctactggggttacgagttcagataatttgaactctttgaacatctggtcgtggtgggctcgtggcctggccggggcttggcggcaaaacgtaggatctgacgatgggacttcacacatagctagagaagcgaggacgttattcctataggctgtctgtctagtgcctactgcgtgtggcgtgtttactccccaccattggccattgctgccctcttcctgtctcagttgattgatgtgtcccgtgaccttgcttctcgttcctcgatctcctttcacctttcttcacatcttttggtctggattggtggaaatacgaccggtattgagtattgactgcctttgacttaaatgtatggataggagatctaggttttggtacctcccgcgccgtcacacaaacaaacaaataaacagagcagcacaacacaagaacaacctatagctgtagcaaaccgcggcgaacttgcgccccgtacaccctccccctatcccgctcctcc

SEQ ID NO: 1504 - DNA, 600 bp, Zea Mays
ccgtgcacaagtcgcctacgggcgcggccggatcaacgaaggcacgcagcctcatcatacaaattatggttacatacacacagcgagggcatcacacattacattggctcaaccttcgggatgatccccatccccctgtagttgaacaacattatcctcaattcctcaccctcaaacagattttgcagctcttcctcacctacactcgccccagccggcgaggacaacaattcccgtttgccagccccgtccacacgaagacgaccaccctccatgtcaccacgatgacgcctatcacttcgcgacaattcactcactcttcgtttcgccaccgcccttcgccgcctacacccggtactcgcacccgaaagatcctcagcacccatcacacgcggagaagtctccgccgcagccacatccaatgctacaaaataatccaagtccttatccaaagactcctttgtccacacaatcgaactcctagaatcatcagattcaaaacacttagacacagagccaaacgaatcgtcttcagcagccatggtcgaagccaccacaaaattagcattgtcagtagcggttgcatgcgtaggcccaaac

SEQ ID NO: 1505 - DNA, 1563 bp, Zea Mays
ctaaaattttgtggataccttgaaaatatcctagagaaggtgtgtacaaaatcttagcttaattgaagttcatttggtagagttttgactttttatctttttgttcatgttgttggaagccatttgtgtggcactgaagtgtgaaagcacaacactaccacattgatttttgttgttgcatttttctctgtgtggtttgttctgtagtgtttatttcacaattttaagcacatattgccattggtttacatttgtgtgttctcgtgtgagtgttggctctttttgttcttgggatcgaaaccaagatcatcttaataaacaattttttttattagattccattattctccatctagccaccttgtatggtcctttaacttgaaaatgttttctaataaccttaaaataactagagatctatcctttagatcttgcatagcaattactgttgaggacaaaatttgaagtcttgaaaacctagcttagttggttccctaagctagcttagctagattatagactaagcattactattatgtaatgcttattgacctgagtaaaatgcatgtatataatgttagtttgagttcaagtgggcataaaatgctatagaaagtccatacttgtgaaaacttatttaaacctttttaaagtcggtaaagccatattttagggaagtctgagttaaagttataatttagcatggttgtgtaaatgattatgatatgtacccagggtagagatcatcccataaatataaagtgtcatcgtcgcttgatggcctcgaaccatatttgtcatcattttttatcttttaacacccttttgtcttttgtcccataacccaactttttcaactccatttgatgctcttcttcatctgcatagcataagaaggcatcctagttggtgtattgagcctagggcacataggcatgcaagtgctcaaagtgggacccctctcaggcgagcgttcgatgattctactgtcaaaactggctaagttggtttctaaatctgacttagctagaattcatagaggagccacaaaggtgtgtatgtgagagttgcatgagtgtgctcatgtgatggcgtgttctagcatcgaccgtaactgatgtgattgtcacttttgtttgtttttcatgtaggaaaggggaaacatatgtgcaagatgagaagcttgtagtgtaagatgagtgtgagcactgcaccattgattttgtcatgattgtcaagttctccaccgtttttgttgtatgtgaacagaagagaagacttgcaagtcatctaggtgggcacaacatccataagaccatgactccatgtgtgccatgcatgtgtcatcaactaacagacgcgcactgcatgtttgcttgcaaagaaatctggcaccgtttccaccacaccatctactagctggctctccatctgtctagtctctagcccactttttgtacattagtccctcacaccatacatccatcttgctcactcctttttctctctataaacaactaaaggaggcatctctcacatcatcatcatatctctttacccctt

SEQ ID NO: 1506 - DNA, 363 bp, Zea Mays
ttctggacgtccttgattcgggccggaggcctcattgtctcaattgctttgatcttctctgggtttgcttcaatgccccggtgcgaaaccaggaatcccagcaacttccctgcgaagacacaaaagacgcacttttctgggttcagcctcgtgtgtgttgcccacagcttgtcaaagaccagggttaagtcttccactagggtcgaccctctcttagtcttgaccacgatgtcatcaacgtatatatctatcttgtccctaatcagttcaccaaaggtcttactcatcgcccgtacaaatgtcggcaaggcgtttttcagaccgtaaggcattacaacataacagtaaagcccatccacagtt

SEQ ID NO: 1507 - DNA, 652 bp, Zea Mays
gagtcgtgggcagtggcggtgcggtggatgtcgttggctgtgctgctgctgatgttgctggaagctccggaattctgccgtagcctggaagcccgtagagaggaatggagataggtgccgcgatatgggcagtgcggctgtcaatatctgtaacgtgcagcgacaagcttgacaccttggccgcgagatcggcaatcaccttagtcatggtgtcaatcttttgttcgagggcggaattggtcggcacggccgtagtagctgatgcgatctcgctggtggtgtcgtctgatcccggcatagctgataccagattggtaggacctctccctcgtcatagattataccagtgattaatggttggccggggacgtaaggtcctgcggctaggaggtgccatgctgtcgcatggtgaatctgaggaatagattagatggaacacagataactggctgcagtaatagatcaactctatgttgatccctgtctgctttattctttcatcctcttagtatttatactcataatacaaactaatttgctgatcataatgggtcgaggagtagagatagggtacccgggcctaccaagtttgtttcacctacaacaagtatactaagaggatgagtataaataagttctccattaaggctga

SEQ ID NO: 1508 - DNA, 423 bp, Zea Mays
ctattagagttatggtatgtgaagattttaattgctatggacatagatttgggagaaatgcttttcctgttgggcctaatgtgggtatgtgtatggaaaagcataactcaaacctgattacccatggttaatactaaacagaattcctcgttgacatctctgccggctactgtagaaagcactgctataggtaatgttcgagcactttttgctgtagccaaattcttttcctgctcccatttgtgccatatactactcaacaattttttaaaataaatatctactacttattaaagccgtaagggcagcctgtcattccgtgttctgccactgttccgtgttctctcatttccattacttgttctgcctttcccatttctccctccctacacagctcattcccatgttctgccaccattccct

SEQ ID NO: 1509 - DNA, 356 bp, Zea Mays
attcctgaagtgagtggagaattctgcccatgaaatggtgttagtggcggcgtgagcagcgcaatatgcatcccaccaatccgcactagggccagtaatgcgacccgattcatagagtactttctccctgtcagtgcactgggctatgttgagcatcttttccatggactttaactagtcatcagcctgtagtgggtctgaggagttagagaatgttggtggcttttgactcataaactctcggtgcttatccctgagcggagttggtggtggtggaggtggtagttgttgtcgttcctgccgttcttgacacatttcttgacgttcttgacacatttcttgtcgttcttgatgga

SEQ ID NO: 1510 - DNA, 652 bp, Zea Mays
agtagatgcatcacaccctgcgtaactgcagggacttcaagaatacagtcggccacgactgaccattccagtcgcttcctctaccgctgtctcgataagcctagggttaacagcctcggcagctaggggcagaggaggggccttaccttgagttgatagggagttcaacttcatcttcggaggccatgggtcctaggagaacaagaggcaacagaagttgatgggacgacaagtgctggtggccacgaccgaaccaccgacaccatataggtggtcagagacaccgatcaccttcaatcggggccgactggtggctcagctttaattatccaatcaagtaccccctacttgttaaccgagtcaaaaaggtgttgttggatgggggagcggcatcaacgtcaccttcgcccggactctcaacgcactcgggatctccgtagccgagctataggagtctaatacccctttccttagcatcgtcccgactgagagggaataccccctcgcccacatctccttgcccacgacgttcgacactctagacaactactgtaccgagttcttgcgtttcgaagtggctcggttcgactacgcctacaacgccataatctagagaccagggttggacaagttcatggccatcttacactac

SEQ ID NO: 1511 - DNA, 520 bp, Zea Mays
agttgttgattaagaacttgtatgccttggaaaatggaagctttattgatgatgaaaccttctgcttataaagtacaactcatcctcaagagttttgaggcattgttatgggtagaatttcctgaggtgctcaatattccatgaattccccacttcggtgccgtccatctgagtaagctggtaggatcccggtcgtgtgacctctgcaatgatgaacggtccttcccatggtggcgacagtttgtgtcgtccctcccccgttagtactcggcggaggaccaagtctcccactgcgaaggatcgatgccgcaccgctttgtcgtggtagcgcctcagggtctgctggtatttggccgactggattaccacatttagccattcttcctccagtacatcgatgtcctctagcttggttgcttctgcttcggctatgctttcaaaggttaatctgggtgccccaaagatcagatcggctggtagctctgcctccgacccatacaccatgaataatggggtgttt

SEQ ID NO: 1512 - DNA, 624 bp, Zea Mays
cagccctgtctactcttgttggtctacaagaattgtctctggccaactttgatcagactcttgaggatatggtcccagaagacctgttgtccgagtcagcagatggtggcatgatggacgtttgcgctgatgtgcctgatgctgggctggagttgtcccgggcggcgtcccgcacctcatcgaccttggagcgcagtcttaaaggtcaggaggctggcccggattgcattgttcctatggaagtggttgaaggtccttcagccttagaggtggctgcctcggagggctcggccctcaaagatagcgctggtgcttacccagcccccgagggtgttgccggggataatccggctcggatgggtagcgcgagcgatgacccaacccccgagggtgtccgagttggttctccctctaacacttccatggatgttcacgtgggatcttctccttcgcactctgattgtatggcagcagcacgggtttcatgtcaagaggccgctttagaggccagcgtccctgatgacagagttctgacttctgctggtgacactgacttggttcccaatgatgcattgcgggttgttccagttggtgacccttcagcaagccgtcagttgatttccc

SEQ ID NO: 1513 - DNA, 307 bp, Zea Mays
caaaagataaccaaactaactctaactaaactgactagactaagataccgaattaagcattattacagattctgactccatcgatctagggatccaaatctatgcgggtcctgcaatctggggtaccgtagtcaaagcgatcatggggcggtgaacggtaagggtgctgaatcccaacaggggcgggagaaccaccatcaagatagtggcatgccgcgcattcagcacgcaattccgcaacctccgcccgaaccttgcccaactcgtcgagggtgttgtccaactctgtgttgagcacggcgaccaa

SEQ ID NO: 1514 - DNA, 394 bp, Zea Mays
gaaagggttaagtatctattccttgcgtaagagaataactccgggtatgcaagactgaggagccggtctatccatctgtcatgctagaggaatactgagcgatcatctcccacaaacactttcacgatgtttttgaagtatgagagggttttgagaatatctctccactagaacgagcctttcttatgatcaatggggacacccttgtccctgtaatggttgttccaaaacagccgcacccaaggaaggtcttgtctgttaaagaatttatgtaacgatttcgtcagaagtgcctcatttttttgtgatgtccataatgcctaagccaccttttattttaggtttacacgccaacctccaagcaacttgcggtggttttgtcttccatgtctgc

SEQ ID NO: 1515 - DNA, 741 bp, Zea Mays
tgacctcacaagcgaactctgcacaaggaagaacaaaaggtatatatgatgaggaatcaagtggtttaaaattttggaattgtctctatattgcccatgagtttatgaggcaaacaaagcaaccaagaaatgaaggaactgattgcttacattaaagaagttagacaatggaagagaccaccgagatgcctaaaatgtccatttatcaatatatatgcactatcttgtcccattttattttcaaaaaagttgtgtgtacaaagacgtttttatctatgtatcggcactgtcaaacaaaacatcagaatagctagatgctgttaaatcctgattaatcaaatgcagcattacttattgaaccataggtacatgtgttctgctttgataaatctatgtttatatgttacaaagtatagacactactgaatgtaaacttctacttgccggcatgccttgctagagacgaagaagatgatccctggaccactcaaacacacagaactcaacacaaactagactaggacaccaaactgcacccctgtgataggtgtattctattgatatgtttgtgtacataattacaaatgcttagaagaaaactagccaatctgctatcaattagctaagaaagggaactaatcaatcagctatcaattagctaagaaaataagctaaccaatcagctagcaaaattagctaagagagaaaaataatgaatcaactaagaaggaaacaaataaa

SEQ ID NO: 1516 - DNA, 845 bp, Zea Mays
gtgtagttcatcgaagagaacatgcataactccatagccatgaaagtaccaatgctcaggcttatatctgacaacaagcaattgctccttcctcttgcacgcattcatgtaccactggtttatgttgaacatttgcgtacccagtgatggccagtcctttttgccgactagactcctgccccgcttataggtccggaatatatcatgctctagtgtctccatcggtgcaatctcgcggagctatgccgttgacatacatgcgtcggccaggaatatttcgagttgctccgaatcgatttgttgaccgtacgctgctagaagctgattatcaaacatcaaacaactagcggcgggatagattgcttagattacatcccgagctgtggaacatctttggctgcactcttccctttctgcgtcctatacgcctgagctgactttacgagagaagagcggttatagtccgacaacggcggggacttacgtgtgtcacgctgttctttctcccttagggtgacttttctccttagttgttgtcatgctatgtactccggcttaggcaggtttttctcaagttccctcttctttgcatttccttccgctacacctttcttctagttatccacatccctttgaaccgccactattgattcctcttcagactcattagccaacttctttggagagggcttgcgacagctagctttctgcttctttagcttggacatcatcggggggcaggggcctcttatggctctttgacataggaggcgatggaggagggggagacgaccttgtaggagatggagatggagacagagaagcacccgtgccatggatggcac

SEQ ID NO: 1517 - DNA, 364 bp, Zea Mays
ggtgctggggttgattggcaccggcggtgatatccaccgcaggagctccactcaccgtcattgtcggtggccagggtggaacaacaaccttagccattgatccgtaaaacaacgaaccggattagatcaggttcaaacttgtggtgtgccgttcgatcttagcagacgtcctagattagaggtttaataccccctttcaccgatgacttgttcgccgtcggatcgcgatcctgtggcctagatttaaggtagcgttagcacttcgattgggctatgtctggcattgatcgggtatcctagggtggtggtcgtatactgttttcagtggggtgtgatctaatccgggccgcatgtcgttgatcca

SEQ ID NO: 1518 - DNA, 348 bp, Zea Mays
gctgaacttcacaagattgttgacaaggtggcagacaacctcccaaaatggaagggagcactcataaacaaggctgcctgactggtcactgtaaaggctgtcctgtccgccctaaatatttatcacatgactgcccttgatctacctaaatgggtgttcaaggcaattgacaagaagcgcagaggctttctttgggtcggaaaagataaagctaatggaggaaactgtatgatatcttcggattcaatacaacgacctctccaatatggtgggctgggtgttctgaatttagaggtaatgagttgggcccttcatgtctggtggatttggctggaaaaaacagattct

SEQ ID NO: 1519 - DNA, 1245 bp, Zea Mays
ctccgaccctgtaccaatctcgtcaaaaacctaatccgggaaaaaaaactcaacaacatgtccccgccctgtatgcacgtcgaatatcgagacgccgcccagaagatagtcatccacgaaaatatccatggaggacccgaccctgcccacatctgtcttagcagcacgcgacggcgggaggcctttgctcctgcatgggcatggcagggagcggcttgcagtacctagtttcctctttttagtggtcgcagctggcacagctccctgcaaagggccttcgtcgaccgccactgccgtcctttttccccggcggtcgacaacaacagcatcgtcgtctcctgggtaaccgccatatggtagacggtcaactcaaaaatgcggttcaaacgagcattagaaccacgaatatcccaactacgcaaggtctccgtcctcggcaggtatcgccctacaatcctcgcgcctcggcctccacctcacgcacaaacgcagccgggttccggccccgcaaatccaaggcgaaggcatgacttcacaccaactgatcgcccaaggacggtattcagtgggagcacacttcgccaagtacccatctgtgcgccaagggccatactccatatccaatgaattcctcaactagatcgcgcacgctactcatgcgggcagcgtaccgaagggccccttcgtcctcatcatcctccgccacctcgaacggtgggaatgccacatagcagtgagagcacataatggctacagggagcccagggagatcttcgacttccccaccagagacataaaaccaaaagtcccaccaattgccccacttgttccgagcacaagggactatttccacaacttccgccgaagtctttccagtcctcggcgtgaaggtgcacgatccaaattgtgcaatattatttcctatttccttcttttgccagtgcagcaatagttcttggtgaagacttccatagatggctgaccgccatatgaagcaaccgcccaaacgtacttcgctacgacaaccacgacgttaggtgtcaactggtggacctgcacgtcgaacctccgcaaaacctccaccatgaaatgatgcgccgggagacgaaggccggcaatgaaaaatgcctcaaacacaaccaattcgcccttaggctcaaggatctcctcggcacccgaaacccggccgacaccgtcaccgaagtatccaagctgctacatctcctgcacgtgaaccgaggagat

SEQ ID NO: 1520 - DNA, 346 bp, Zea Mays
gggctatgatgcacggtagaggctaactgcgggtggtatgagcgcgtaatagagaggcagagcaagggtagtgctcaatttaaaggaaccggcaacgtgcttcaccaatttgggccgaagacgatcacggcggcggtgggatattccacaggacgagctcgtcgtggcgtccgctggtacaacggctcaaggacggtaattccacgctttccacgattatagctatgtggtgaaagagtcacggcgtggcgcaaccacgaagaacggcggccactacggcgatgatcgttcatccacatcgctgcgcaagtgggtacggcgaactgagcagtaacggtgcccaagc

SEQ ID NO: 1521 - DNA, 783 bp, Zea Mays
ggcgaccgctgtcctgcctggcggagatgctccagcgacggccaccgaagaccctgttgcgtcgaccgctccttcgcaggtggcgggatcgtgttaggggtgttgtgtttaggaccttatttgtgtgataatgaaagtcggttgttgtgcaggttccgacgtctaggcctacgcaagcaacccctactgatgatactaattttgtggtggctgcaaatgcagtgcctgttaatgataggttgtctggttctgaaccttggtcttggtcatctgatggtggtgagtttgggagcccgttttcctggactgaagagtcttcggatgaagatttggattattttgctgcgttagatgtggccacagctgagtcctcgccgcggtaggaggtgtgcaaagcgtctgatcccacagctggcgtgaggaccgatcgtcgtcgatgaaaagtggtgtcgaagcatagcgttggcgagatgtcgcaaagtggtaggcgccgtcggatggggatggagcgaacccgtcttcaggtagaccgaggtggccaacgagatttgttgtcctcgtcgttcgggatgagtattggtgagggggatctgcggaatcttttttagggtgaggagttgaaaatgatgttgtttaattttcgggaggcgggccttatcccgaaggctgagccgatgtagcatgtttgctgccctcactcttgtcttgtggtagtgagtaaaaacgttgccctcccccagctcgcaataaagagggcggggcgacaaagtgcgatttgtacat

SEQ ID NO: 1522 - DNA, 390 bp, Zea Mays
cccaaacccaagaaaacatccaatggtggtttcgaggaccaaatcacaaagctctcatgagtaacatatcggatacgctctatatctctagcaccttcggttcacttggtcggctcccatattggcttggtaaatagtctactccttgatgtactcttacacttgtttatatccccataagttggtagtccacatttagtcttctagactcttttgtctcttggtccaagcctcacgacgttcgtccttcgtcgtgctaagttcatcgccatgaacacacctcaccttctccatcgtcgtcgatcgtcactatgaatgacacctgtgtgccacaagtacagagatatgttgtacaccatcgccaactcaacgctatggttagcctcaaac

SEQ ID NO: 1523 - DNA, 673 bp, Zea Mays
agaccaaacacatagagagactgaacataataatgcatatcaaattggaactacagaaaaaaccttcatttgctatagcaattagaccgcaaacaaaatgaagtgcaataaaaacataactcggggcacatatatacatgcacactataatagaagtgtagcgcttgttttacatagcaaccctttattaatctgtgcatccatattgtacacatccaaaagcaggataggacatattgatccaggttccagatgctaccaccaaaggctcagcttatatgaggcatcaataggatattttggtttcataagacaagcataattatagagactaagctacagacagatcaacatacatccctcgcattgtcgcgatgaacacaaaaacacggtgtttccttatccaggacaaaacctaggaggagataaacacatatgcactacatagttcttgcgaacacaaaagcacaacatccccggattcgtgacaaaacgtcagcttcaccggacctgttaggggaaagagttttttttatgtaagatataaaaactaaataaacaatagtaatggctgatttatgaaactccagtacataacagttctttgcaaacatgctgcagtgttttttgggtgaaagtaataatagttttctgtgcatatagtctagattcc

SEQ ID NO: 1524 - DNA, 689 bp, Zea Mays
cttgtcgatgtgatattaaggtcaaaccagatccgttttcaaataagatttccattaaatgctcattgaactcaaattcactacctgtcgagtatcgtaattaggggtacctaaattacgtccctaaatgcgcttaatcccgaggtttccgccaggcacataccctgaggacaataatgtataaaccatgactcgtctgaggcccctgtcagcagtcacgcatgaccccacctcacctgagcctgccctcggacaaggtacgtactcgagaaaattctcgtcccggccgaggtcccctttacctagaactaccgtctccgcctcgcccaagcccgtctcaagctaggaagacaaccccgaggtaggtctcagccaaaggtcgcatgggacatgagcatttaatgcgcatacctatcccacgcagcaccgcaggagaacaggagcaacactataggactgtggtcctgtcagctttcaccaactacgatgtcgtatgcctaagtatagtggctactgttcccccacgccgcctgccaacttctgatgggacacgcatactacaaagcgtgggctggacctcaggaggaaactatgcctcgcccgaagccggccttagcatcagaacaaactccgcctcgcccgagcccggtctcggctacctactccctgtgaatctcgcaggaggtcac

SEQ ID NO: 1525 - DNA, 556 bp, Zea Mays
atttagttgcagcatcgtgtatgatatgtattcataaattcacatacttaccggccagtgatgatggatgtctagtggaacacattttttggtcttgtcgtactttccacctttaaacttatagaacctaaatgctttgtggtctcaagtagaatctccatgttattttaaaattctcaacgatataagtatgtatgcatgcatagaaaagacttactgctctaagatactaaggaattttgcataggttgaagggtcatagttcaaggagtcgagcacagcacctttccaaccttaggataaatgaggaagcatatcccgtggtccctgtacgaatcaaattaatttgtgatgcatgtgtattgaaattattaatttttatgcaaaatcacacttacttaaagttgtacggggccattatagcttccctgtcttgaaatttaagcattgcatttgctatgtaggtggcgtatcttgcttcaaaatcctttttcatagtatttatgctatgctcaactttttcatccatctttccctttaactcttcattgtattt

SEQ ID NO: 1526 - DNA, 549 bp, Zea Mays
tgaggcagcgtcggtggctggaattgattaaagattatgatttgtccattcattatcacccggggaaggctaatgtggtggctgatgcccttagcaggtccggggttccaaaggtggccttgccgttgatcgctgatctggaccgtttggggatcgctttgtgtcatgtcagcaccgctagcaaggagactcagatgcttattcaatcctctctcatggagagagtgcgtgcggctcagcagcaggatcgtctactgcaggaagctcgaaagagggcgggtgatggtaaaccgcgggagttcaccattgatgagaatgatttggttcgtttcaggggccgcctctgtgtgcctcagaaatcagaggtgaagatggatatcttgagagaagctcataaaacgccttacaccgtccatcctggcgaaaccaaaatgtaccgagatttgaagcaaagcttctggtggaagtggatgaaggttggcgtttctaagtatgtggccgcctgtgaagtatgtcagcgcgtgaaggccgagcataagtggcctgcag

SEQ ID NO: 1527 - DNA, 646 bp, Zea Mays
ggtgtgtatagtcaccttattgtgtaggataaaagataggttagggcaaaaatagcctagggtaagcaagtttatgatggggaagaattccgtgttgagtggtaatgcatttgaaaattgaatttgacttctctccttccttgacggggttgatcttttcctttttccaatcttggtctcattaattcgaggttaatgtgtatctcgtcggggttggggagtatggttatgatagatatgaatgagatagactacatgatgtaggtcaaaagtttgtttaatgttaggtgagaatagacagattatgcaatccatcatgactctattggttggatcagatctcatgcatgtggctgagttggtttaaggcactagtttagttttaagtgcacgaggggtatggccttatcttttataccagcattaagtaacttactctagattagatcataatagattagataaaatctagattaggttggatatgactagattagactagttaagatctaattaatttgcattagatcatggctgttaaactagggtggataagtatgcttattaggataagatggatccataaagataagatggaatcttttgaggttagtaagatctattaggatatgatagaatcttttcg

SEQ ID NO: 1528 - DNA, 1066 bp, Zea Mays
gcggcgagcaccccgccacgccctcgtcaacgccgtcgcgggcggaaccacctccgcggactctctgcgtctgggggcgccgtggcttcggcctttataggcggcaccataatggctctgccttcgtggccaacatagcagagctaggtaagccccaactcgagaaccgtgtgtgggagacgaagtcgccgccgcgattcaccgccgataaggggagtagagtgccaattggactagctggggttgctcgtgagggattaattggtgggcgacttgctggtgctccggaaaatcgctcaccggcgcgctcttcaccgcggaacagccgtcgcccgtggaccgccctcgattcgtcgtccctgccggtgtgtactctctccttgcgttctccgtgcctggtgttgcttgaatcacgttgtagattagagattatggccctctgtgtcgcgggattgttcaccggagttccagctccgctcatccccgccgcgtcgcgtggcctgccacgtccattgcctttcgcctgctcacggtgcctcgatagcgttcaccatatactcctctatctgtgggcgtgttgggtcaacggatagggctcgggagtcactgggggcaactccggtgagctcctcctctgttcacggggggcggcgccgccgcgatacggtatttaggaagaggattggggaaactagctctcgaccgttgatcaaccattgtagggctaggattagatctgtgggcagggttggccctggccgttgatcggaagggcaacgaccatgatcaagtcagccataccgcttcggtcgaaacaaacgtcagccgtagatctcagatccggtggtctgcgctgcataccgcttcatggatttaatgatctaatctggtgcgtccgtagcagatctggcggccgagattgactcataccccttcgccgtttgattttgtaaaagagcccctgtagaatccagtaatcaacccgccgtccacccttgggttgggctgagtctggtgaattattcaaactagccctgaccttctcagtaaatgacgcccagtccag

SEQ ID NO: 1529 - DNA, 358 bp, Zea Mays
gcgatcgggtgcgataaggctcggactaactccggcgagggtaggggagtgccgtgggccaacataggggcatgggacggggctaaattggccagtcaccgcgtggggcacggcgaactggcacggattaactccgatgaggttgaattggctaaggtcatgtgcgaataaggaaaaccaagcatgggaatgggtttctcaccttaggacagagctcggggtggcttggcacagcttctgatgggctagatggtcggcacagcgagcgtggaacacaaaaagataaaaggcaagaaggctccaagctcaagtgaataagaggaggaagaagatgatgatgatgatgaagatgatcagg

SEQ ID NO: 1530 - DNA, 358 bp, Zea Mays
cacaaatcttattgtccccctattttcgaaaccacgataggatccatacctccactccttatataagagggggtacagtcgattggcgaacaacacaatcgatccaatcaagctatttatcagttcctttactttcttgccttagaagtagtactaacctagatctagtttatcctttcccaaccccattcttcatcgctctttgactctacgtcatttagggacgtctcgggtggcctgccgaccccggagcatggcttagaactattctctccgatgtggtgcctcccatgaggtgagttctagggtttctgcagaagaagacgactctccaccatagcgaaccatacgagcccta

SEQ ID NO: 1531 - DNA, 1176 bp, Zea Mays
aagagggccaccaggagtgccagggtttgtcgcacatgggagaggggggtgtccgagcccctgtagcaggtatagcccttggtatggcctttgtacttgctattgacttgagccaggtggggaatgtctggttcctgtatttgcatctttgactaagcagagagccgaggctagtgcctgtgctcggtcgcatgcccgagcctgtatgatggaggagctgcccgagtcgtagtggttggagcagtggtaggtatggcaaaaagctcttgtaatacgtagggtatccgacgtcagctctgcagttctggtgatgtcaggcgtcctttcatcggtattatcaaggccaaagccatgctcgggcgagtcggaagtcttcccgaggctgtggccatgaccgagcctgctctagggctcgcaaccgtgcaaggcacagttaaaggagtggccttccgcgggattcgtgaggggcaggtggccaaggatgagctcgggcgaggcagagtttgttcccaggctgagaccggcttcgggcgaggcgtagtttcttcccgggggccagaccaagctctgtcgtacgcgcgtcccatctggagttggcagatgacatggggggggggcagtagccgtgggcatgcgtcatcatagttagtgaaagtggacgggaccgtggtcttgtcactcatgttcgcatgcgacgtcacgtggggtagttatgcgcattgaatgttcttgtctccacggatcccatgacctttgattgaggccaggctcggggttgtcctcctgtttcaaggcgggctcgagcgaggtggaaaccgttgttccgtgaagagggtacctcgggcgagacgaggattttcccgagcgctcaggctcgagcgaggcggagttttggatgactatcgagcgggggctcgtgcgattcgtggctcatacttaaccaacctcgaggaacgtgtctcacgacggcttagggtttaagcgtgtttaggggcgtaattcaggtacccctaattatgataccaggcagtagccccgagcctctaaggaagtgtttgacacttgattgggggctcttctatctttgtgcgggtatatttttactctaagaggcgatagacttgtttctgaggggtgcacgtgagcgcacccgtcgagtgtagtcactgaggcctc

SEQ ID NO: 1532 - DNA, 356 bp, Zea Mays
cacagaattcatcgggcatggcaaacccacaagtgtagcctgcaaaagttgtgaagaattgagaaaagaaaaagggtttacttaagaaatctaaataaaattaagaactgaatatatggttgcacatggagattttcaagccaccattaggggagctatgtcagcctggttgacatctactctttcaaatccttcaagggcccagtcttttggagtgggtgtatcatgtttgtggttatctacaaaccgaaagccgtcatcaggtttctctgtataagccaggaactttgggcttctaattccagcaccccatgccacaagaggagtatctgtgtttgaagggtgtccgtctccat

SEQ ID NO: 1533 - DNA, 593 bp, Zea Mays
tgaagatctcacgaagcagtgggatgatgaggcactgcgagaacgtgcccgggtgcgctaagaagcgaatgagaagttcctgtcacacttccgacaccagaagattatcaagcaaggggagatcaagctagactctctcgtgcctttgctccaaaatagcaatgtaagtaattctaataataatcaatctacttagaacaacgtatgggagtggtggaaaaattactcaacaaacccacatgtacatttgaaaaatctattgttcctagttttccatcgcatgaggttacaatagaggcaacctcaccaaacgcatcagcgacaaatggacctctacagtcccagccattatatgataagccaatgaactcatactcagggtagccactgctcccacaacccctgtgcgatatgacaatgcccctgaccacagctgtactatccaagtataatctcggaccatctggcccagaccggactgttcagtaatccactgtggaccgttcgatgtcgcgctggatcgtccgatgacgtaccacagatcgtctgatgtacaacactcaaattggtacaatatacacacaacacgcgcg

SEQ ID NO: 1534 - DNA, 731 bp, Zea Mays
gccatgagaccttcctagcgcttgttggtacctcgcctaccgcaagagcgccacatcacgggcttcatcgagttggtccagcgcatcctctaagcttaactcgttttgtttggttgtgtattgttttaccctcagggcgtcgtagtcgagatcggtggggagcatcgcttcttccccatagatcataaagtagggcgtataccaagttgagcaattcggggttgttctaaagctccagaggaccgctgttagtgcctccggccatcgttgggcgagctgcttaagtagcgtgaaaattcgaggtttgaggccttgcatgatcattctgttggctcgtttgacctgcccgtttgtgcggggctgagccgcggcaactcaatctgcacggatgtggtattcgtcgcagaactctaggaacttgtttctagtgaactgcataccattgtccgttatgatcgagttggtaccctaaatggtgaatgatgttggtaacaaattttacggcttgttcggaggtggtctttgcgaggggccacgccttggtccacttagagaatttatcgtttgcaaccaacatgtgagtgtagcccctggatgctcttttgagaggtccaactagatcaagtccccagacagcaaacggccaggtgacagggttggtttggagtgtctgtgtgggtaaatgggtttgtcgcgtgtagtactgacacccttcgcaggttctcgccatc

SEQ ID NO: 1535 - DNA, 744 bp, Zea Mays
cggtgggctcagaatttctggcagcactattgttttttcaaactctggctttttggctgccccatcttcggcttcgactggctcaactataggcaccttcggcactatagtcgattcctcagcgctccgagcggcgagagcagcttgttctgcttcggcagtggaagatgtctcttcaccaaattttggcactatggtcgtttcaatatatcttggccggtgggtcaaaaccttgattttcttgcccttcggcacagcagagatggccgaagtggcagttttcctctttttttccctgctttcgcgagggatagcaataatcaggatatataaaaccaattgcatcgaaaaccctgttcaaccttttctcgccccgacccccgaaggctgaggacaaagcatcatcttcggctctggtatatgccccaagtaactggtcgctagtagcctcaatacatttcagctagtcatcatttggttcatcaaactagtctctgtatctcaaggtatatttcaaacgaattaatccaccttgactggaccctgtagcagtctccttcggcatctcccagttatccacaagtggccataccctgtaggttatgtgctcttggatcaggtctcttgtaccaatgaaagcacagacattgctgaaagctttttgacatgcttcggcatcattttcaattgtcacggtcggccttagaaggtcgaagcgagaccagatggggcattagataatcc

SEQ ID NO: 1536 - DNA, 1481 bp, Zea Mays
tggaatttgatcacgcactagtaatattttttttctaaagagaaataatatgggtgcatgtgggattatgttagggagcatttacttcaataaatactaatataagtataatacaaaacctttgcatatttatgctggagtctatactgtgcatagtaatttgaattgaaaactggaaacctaggtttaatttgtttttgatttaaaccatatttaaacttgagggaaatagaaaactaaaaatgaaactaagaaaaagaaaagggaatggcgaacaggccaaatgggtcgaatttcatcagctgacacattgcataggcgttctcctggtccaagcaccatataaccagctccccaatgacagctgggccccacctgttgccgtggttcttcctctgtattgtggacccggcctgtcatcttcttcttctctccagcgaaacaaacggcaactccgtggcaattccaaacggaaatcgcgagcacctcggccgattcgcggaactcctccctagattcgggtcgatccgatcccgtgtccgcgccgcagcctggtagggtcgcgccgttatcctctttccccaaacaaatcccacatgcggaccgacattgccgtgttcgctgtgatccgtccgccgctgcgccacctgcgcgtcgacccgtgcgcgatttccgcgggcgcctcaaccaacctccaccggggcctataaaaccaggaaccattgatgtaggcacgaaccagatgccagaatatcacagcatcgaacagggatagagctggccgcctcatattcatcaatcagagagagaaagaatcgagctgcgccattgccctgcgtgttcgtcgttgtcacgactccagtgtcgtgccgtgaagctccacctgtgcgtgtcctcgccgcgtggaaccggcgcccggggctcgggatttccttcaccgtcgtccgcttcctgtcccggccgtgaccgactgtgttccgccgtttcttccagaaaggtaccctcctcaggtgttcgcattgtcctcctctgcgtgtatcagtgatcgtgtcggtagttggggccttggcgagctggtttgccgttcaccggcgggagcgccgccacgggatggccagctccaccatctggagtctcgggtagggaagatggtgctgccaccgtcgatttggtaatgggtgggtgagattagaggagcgtaccgcttcggcaggactcattctgggccgtccatagcgtgatatgtggtcgcagattggatcatggcgccgggcgctactgaccgttgatattggatctgtcggccatgattaggtaccggtttgattaaaaatgcgatctaatctgaaccgtccggatcagatcatgcggttgtgtgatgtccatacctcttcatcgtgtaattattgcaaaagagaccttggggttctacctattcaacccgccgtccacccttatgctgttaatattacggattggtc

SEQ ID NO: 1537 - DNA, 838 bp, Zea Mays
atcaggtgttgctgctactcgatctcatggatcacaaaggaagctcacttcgactgtttgggaagacttcacaagagtatgtgatgatgatggagtttggaaggctaggtgtaacttttgcaagaagcttctttcagctaatacaagaaatggtacaaatcaccttcgtactcatttgaaaatttgcatttatcgaaagaaaccaggtgataaagtgcaaactaatttgagatttggagctgttgacaagggaaaagtagctgtagagaactatgtttttgatcaagaagtggctagaaaggcattatattctatgattgttttgcatgaataccctctgtccattgtggatcatcatggcttccgtaaatttgttagttcgttgcaacctttgttcaaattgggaactaggaacactattaggaaagatataatgagcttttactggttggagagaagaaaagctaggaatttcttgcaaaagattagatgtcgtgttgctattacaactgatctgtggacagccgataaccaaaagagaggatatatggcagtcactggacattttattgatgacacgtggacacttagaagctgcattttgaggtgaataactaaatctacttgctgcaatattgtattatatatgaactaaaatggtgccttttttgtaggtttgtgtatgtgccatgtccccatactggtgaggctatttgtgatgctctctacaagtgtctccagagttggaatattgattgcagggtatcaaccgtgacccttgataattgcagcagtaatgacaccatgattggtcttatggaaagcaagattgggccag

SEQ ID NO: 1538 - DNA, 448 bp, Zea Mays
aatcgttcgtcagagagcttgaattttggttttcccctaaccaagtttccgccaccgcgaagaacacctcgccatggccagccacttccaggtttgttcatgccctctgctaccttgtttcagcattagtatgcttccctgatgctcatccatacacccaattgagctagaccgccaccaatcaccgggaacgcattgttctatgggttatccacactgtcaccgtggacagaggcaattaggtagccattcatgcaattgacttaggggaaacgctggttagggcgtgaattcggtttcggccgaagtagggcactagtctttgccccatttggccggtctaggagctcgctggagctctgcagtgccgctcaccgtcggggacctcggtctgtgaagggatagaaccagaggtgcttttctgcatcagtcagtgactcaattaaac

SEQ ID NO: 1539 - DNA, 906 bp, Zea Mays
acttagtttccattttctcaggtctagtccctgagttgttgtcgaggatgaaagctctttccagattcgtctagtgaatctacagtccgtgaataggtgaatgtcggtttctggcgatcgatggcaaaggggacactggcctgtgttgttccagccacatgcctggagcttatcatatgtccaaatgcgattcagaattgctaaccagctaaaaactttacatttcgacggtgaccaagtgtcaggtatcataattagggttacctggattaggaccttaaacacacttaacccctaggctactgtcaaacacattccccgaggtcaataaagtatgagccatgattcgcccgggcccccacttgggcatcactcgaaactctgcctcgcccgagcctgcccttgggcaagggaaacacttgaggaaatcctcgtcccgcccgaagtctcctctccacggaaccgccgttttcgccacacccgagcccgtctcagggaggacaaccccgagcctagcttcagtctgcagcgggagttagtagagagtggtcatgctatcgactgggttgtgagttcacgatccatagcctaggattgtgaggcgactgcccgagcccgggtggaagagctgagcctagccgtggaaaacctacaagtgtataacaacatcctgcacgaggaagtgtgtgtgttatatgaccaactacatccaaacgtaccacccgaagttacagagatgggtgctggcacagcgggagtaggtgaaggaggaccctatggagagctagacatctttggagctcctccttctatgaacatcgtggatgatcaccctcctgaagctagtagcggatctggagcgacaaaggacgtggatgactagagtagtatagtagtgggttgttt

SEQ ID NO: 1540 - DNA, 793 bp, Zea Mays
atcgtccctgtgaggtggggcccacctgtcatcttcgacacttcctcacaacagattaccccgtgcgctctggcgagtccacgccggggaactcggcagtcaccatggctccctcgcaatgatcatgcccacgccacggtataaagttgtccccttaggccgatccttcccctatctcacgctcaagcctttttcctctcgtcgtcacatcgcaccgccataatcgagcttctgtggtaggtgacgcactgccgctggtgacctgtgctcgtcatcgttccgcacgctctgaaagtcacctcgctgtgttcaccattatacacacattgtatatgtcatcttgggtggggagttgggtctccagctggcctttttggttgtcgtcggtgagaccaccactgtgggtgggtgggtgccggcactctgctgatcgggggtgggagatgactgcgctgaccattgattcgataggggatattgggtggttaggataggtcgggccataataaaatctgggctgttcaatttggatcaggcgttgatcggtgtgtaccgcttcaggatccattttggaccgttgacccgggatcctgcggtcaccatgccataccggttcgcatgggtgaacggtctaatctgagccattgatctgaatctatgtggttcatattaaaccataccccttcgctgagccagttttacaaataggaccccctggtttctattgattcacctgcagtccaccctagtagaaagactcttaaagattagtcctagtatttacagattcaac

SEQ ID NO: 1541 - DNA, 335 bp, Zea Mays
cttgccattagcgcgctcaacaacaccgttggattgtgggtggtacacagaggcaaagataggcttggtgtcgatggaaaagcagaaatccctgaagtcttggctgtcgaactgtttgccattgtcgactgtgagttcggacgggactccgaagcggtagacaatgttttgccagaagaatttttgggcggtcttagatgttattgtggagactgccctggcctcaatccactttgtgaaatattcgacggcgacgaaggtgaacttgaggttcccttgagctgtaggcagtggtccaacgatgtccagcccccagcgttgaagtggccatgtat

SEQ ID NO: 1542 - DNA, 485 bp, Zea Mays
ccttgtagctcctcactcctgaggaagcacttgtcctagccgctagcaatgacttgtgacgcttcgtctctcttctccgccacggcactcgtgacgatgacgctcatcatgctcatcggtgacggcagcactacgtgccacaccgtgcgacatctttctcactccctgcccccatcgctcctatcaccgtcctgggcatttctgtcgtgccgaagccgtcgatcgtgcccgtgtccacccttccactaatgcttgccataccgacggtgggtgtcggtgccatatatgccatagatccatattgtgccaaacagcgccgcgctgccccctatgccgactgttgtacccgccatcatgccaaaagtgatgttgccaccaatgtccgtcgtcgtgccgaaggttggtgccttgccgctaatgcttgtcgttgttcctagggttggtgacttgccactgatgccctctgtgtggcccatgcttaaccg

SEQ ID NO: 1543 - DNA, 311 bp, Zea Mays
attttagagatgatttttacactacaattttggaggcagatggggtggtaatctcctgtggttcaggcatcaagttttttgggagaagattgacataagatcggttgatgttgtataagttggcatgtccgacgtggaaggcttgaacaaggttcatgatagtgtactttacagaaggctaggcagctttgtagaaactaggccgaagccatcagggctgggagcactatgggatggcatggagaggatagcatctatggtttctttcgacatgaaagggagatcgaggctggctaggagggattagtggg

SEQ ID NO: 1544 - DNA, 414 bp, Zea Mays
aggtgaggtcactggaagaagcacttgccggagcattacggagagaatcaactgcagaaaatactataaaggaacttgaacttcaaattgagcagttgaatgaattggtaatttctggtggaaaaaaatatgttttgcattaccaaccgataacaaattgtaagacggcataattattgttttatgatgtgttcaaaggttcgacaaagagaggatgacacaagatcggctaagatgatgcttaagtttcgggatgataagattcatagaatggaggttcttgtgaacagtaaattgccagcacaatcatatctactggaggaaaacaaaaccttatcacaagaagttgaacttcttagggaaagagttgataaaaatccagaagtaactcgttttgcactagaaaatattcgt

SEQ ID NO: 1545 - DNA, 353 bp, Zea Mays
cggagaaggcagcttcgccctgggccatggtcttgatatggtcgcatcctgccttctccaagatggctgaaattccccgcgcaccggagaacgcgcagacatccccgcgatcacttaaaatttcttcgaaggctttggcctccccacttatccattcaataacaccttcggggtcgcctcgtatgatgttttcttcggaagagtaggcgtccacgttggcgaaactagtttttattttcttcacatattccaaggacttttcaaagcatctttccttggatgtgcgaagttcttcaacattcttctctaaatgatttttccaatattcgctgattcctcggttagcttctgcg

SEQ ID NO: 1546 - DNA, 337 bp, Zea Mays
cgacttggaagtgcattaccaccctgggaaggccaatgtggtagcagatgccctaagtcgaaagtcacaatgcaattgtatggtgatggattctcgcatcaataccctatgtgaagagttgagtaaaatgaggattgaagtaattccttctggtaccttgacttacatctccgtcgaaccaaccttgttagaccagattattatggcccaactcggtgacaagggagtgcaaattatcaaagagaatcttaaccagaaagtggagaagtacaagtgcttttgccaagatagcaaggggatactatggttcgaagaccgattggtggttcctaaaaat

SEQ ID NO: 1547 - DNA, 879 bp, Zea Mays
ctggcagaggttctccacaataaaccactcgagacgccaccccttgatgctatccttaagagggatgtcgaggtactccatcttcctcccgcgacgcatctccagactcgcaccaccaatgagctggtgctatccccctgccattccaggccgacaatgatacaaatacttccagaggccaaagtgggggagaatcccgaggtaggcctcacacagatgaacaaagatggaaacttgcaagacagaattagggttcaagtgggtcaaattcaattcgtagaaatcaaggaggccgcagaagaagggagagatgggaagagcaaggccgcgaatgaggaaagggacatagatgacggattcatgggtgtcttctgttggaactgtgaccccgcgacaaattcacctagagcagatctctttcggcagtaaaaccccaacatcgacaaggtgaagaagatcgaactctgagataatggacatatggttacccacgaaaggcaactactgttggggtcaatggggggaatgatggccacggcggaactttgcctcttccgcttcagtgccatcgcaatcttgacgacggaacggataggagcaatatcctagggaagtagatgagtggttcgaggcgaaaatatgaaattagggcacagaaatcaaaatgcacatcagcgcgagtataaatggggctttcccgggtcaggtgctatttctaaaagtgccaagtcatcactcgggaaagtaaaacttcaggcatggctcgacagttacctctaaaactccagcaacatctaactcggctcggcgttacctctaaaacaccggcagtatcaagcaccactcgacgttacctctaaaacgctggtagtgtcaagt

SEQ ID NO: 1548 - DNA, 612 bp, Zea Mays
gtgctgttgatgaagatgatgaagaagaggatgagatccctctgattcggaagaacaaccgacgttacatagctagtggggaaagtagtggtgttccttctcctgccttgtctgccctcattggtctgcaagagttatctctggcgaactttgatcaaactcttgaagacatggttccagaagatctgttgtcagagccggcggatggtggcgcgatggatgtttgtgttgatgtgcccgatgccgggttggggtcatcgcgggcagcgtcccatgcctcatcgaccttggagcgcggtcttgagggtcaggaggctggtctggattgcactgctcctatggaagtgactgagggaccttcagccttagaggtggctgctgcagagaactcagccctcaaggatggtgttggcgcttacccagcccttgagggtgttgccggagatgattcggctcggatgggtaacgcgagctgtgacccagcccccgagggtgtccgagtgggttctccctcccacacttccatggatgttcacgtagggtcttctcctccacactctggttgcatggcggtagcccaagccttcggtcaaggagtcgctttagaggcca

SEQ ID NO: 1549 - DNA, 475 bp, Zea Mays
cagtcctcctccaagatcagcatccgatcgcctatttcagcaggccggtcgcgccccgccaccgctctttggcagcatacgagcgcgagctcattgggctggtccaagccgtccgacattggcggccgtacctatggggacgtccgttcctcgttcgcaccgaccattacagcctcaagttccttctcgatcagcggctcgcgacgatcccacaacaccactgggtgggcaagctcctcgggtttgacttcaccgtcgagtacaagccgggcaccgccaacaccgtcgccgatgccctgtcccggcgtgatacctgcgaggagggggcagtcttggctctctctgcacctcgcttcgacttcatcgaccgtcttcgtcaagctcaacttcaagacccagctctcgtcgccatccgtgatgagattaccgcgggtaccaggggggcgccgtggtccctcctggacgacatggtggc

SEQ ID NO: 1550 - DNA, 770 bp, Zea Mays
ggcctcttgcgttgcacgagagtcgtcgcaactctctggagacgcctgagggagaggaggaggagataaggagctcggccgtagcagcccgatgggtggcgatgtgacctcctgatcagcggtgaccgcactacgacaaaaggagaagggagaaaatatcaaggctgagaagggggtcggggaactcagaggaggaaacttacctcggctcatggcccatggagcacgacatcctagcggcccaagatccatcggccgacccgggcacccggcagaaggtgtgttcaaggaagaggccaaagagaaagggaaattgagggtgactaatcagcgaacgactactcgagacttataaagagagagaagtgtctcactccaccccgagggacgacaagtcaccatgaaagcagcccaagtccctaggaggaataaaacaccatgatcactcgaaaggcgaaaggacaaagcgttgttgaacccttcatcagccccgaagggagatactctcaccctctagggctggggctactgtcagggataagttgcctgacccctaggcccatcggtcagcgaacacactagggagaggcctctagcaactagggtcctctgttcagtcggaggagataggtaacgtctaccctggaggcacccgccctagacgaacctcgcagcaccgagcttggggttgggcatggtggaacctaacagggggccaggcacggcaaagggaaaccactcgagtagatcctgcgtctagcccgagaccg

SEQ ID NO: 1551 - DNA, 474 bp, Zea Mays
gtagatagtgatcacaacttgtaaagggataactctctggtcgtgtatataagtccaagggggacccctacaaaatcatctcatcttgtcccatcacacaccagccctcatcaatgacacctgagcaccatcacatctcacttgtaatcctcatactccagagaaattccagtacacaacctccacatgaagtagggtgttacacattctagtgacctaaacctatataaatccttgtgtaagttcgacgtgctcctgcacataccattgagtcgcagtcaacgacgtcgtcctacccaaaagcatcacgtgggtaaccccgtggtgcgctgtcgagtcacaaacaccgacagcgagggtgcaccaaacgcgtgggaagatggcagttgcgtatagctactagagcatgacggacgacgccacgatcgcacacgcatgaagcctgaagccaacgatcattggggcaagctgcga

SEQ ID NO: 1552 - DNA, 530 bp, Zea Mays
tgcgggctggcggctgcaccctccagctgaggtcggggcgcgcacagcagtacatccctgcctcccttgtgtcttcgaacaaggggtggcacaaccggtggttttatctccggaatgacaacggggtgctaccgccattttcccaacgagtggtgaccgccgccggcgataactggcgctggggggccacacgcgagaaccaggagaagctccagcccattctctgtgccctgcagaagttacaagccgaaggccttaccgctgcaggggtcatcgctgctatccaccgtcggagggtgctcccattggcagagtggcggttgcggctttcggagatgaagtcgggggttgatttggagggttcacggatgtcctcgacccccctctccaccgacgacctcctcagacgggtagcgagcacggtagggaggctggacgatggcgtccttaaccagcccccgatgcgtcccgaccacgggtatgtgtccctggtaagtgtccgacccttctcctgttgtgtgccgtgtttc

SEQ ID NO: 1553 - DNA, 395 bp, Zea Mays
gcctctcgttagctgaaggcgaagagaccaacacccgtgaagcttaccgcaccctcaaaatggactacgacaaggtactaaagaagctcgcccccgcaaggaaaatccgcaagaagaccaaaagccaaggatgtcagactgagcagcaggaagaaaacccacccaggaaccagtccgacgccgaggacatgtccctggccagccttgatgaccttctcaaggagtttggggacactttagagaaagagttcgggggtaccttaggtagcactcgtgtgtaataagcttgtggtagtggtatgctatgtaatgtaatggcttgatgtaatgaataaaataactagttaaaaaaaatggcatgtgcataatagtgactctcttcccatggcagatgg

SEQ ID NO: 1554 - DNA, 820 bp, Zea Mays
gtggctataaaagaatgggatgctcctgaatcgaaaagtacagtagcgggagtaaattcaacaaggaactcaccgagcactactcccggagcttgctgagcctcctgggcatcgacgtgatttactcgtgcccttccttgatactgggtcttgttctgctggctgatggaggagggctccttgggggcgggtgctgaggtattcttggggccatccaccgagttggagtaagcagatcctgatggcttcagctggggcagttgttcttgaagtgactgagatctccgcagtaccaacacgcattcgctggtggttggttgcttgcaactgagggggcatgaaaggagctctgactctgctggctaaaccgtgacggagtgggtccaactggcctaatgaagcttggtcccttgggtggaaatccaaaggatcgagttttctggtgccggtcttgctgctgagctaggaggacttggaatttcctcttgagatgacctttttcttattcctttgccctttccacctgcatggctttgtcggagaggtgcgagaagctgaggaagtcttggctggctaggatggtcttgagttctggtctatgccccttcaaaaagtgggccatctttttgacttcggtgctgacgtcatccggcgcgtagcgggccaactctgtgaacttgtgcacatactcactgacaaatcttccatcttgagttagttcccggaattcatcttccttgagctgaacgatcccttggggcacatggtgctctcggaaagcagtttcaaactctgcccaggtagcatctctgatggcaac

SEQ ID NO: 1555 - DNA, 482 bp, Zea Mays
cagatgcaggcttttggatctatgttggaaaaaatcatttattgccatggaaaggtcgttttttatcaactcgaagcagcatttgtagaacagcccaatgaacccatccggcccgggggccttttcagattgaagccccatcacgacgtccttgatttcactgtcatcaatcaagttgtccagctcagataactcaaaaggagcataccccagatggtcccaacggacaacactgctcctccttcatgtcgtgcctagtatctggccgaagtgatgttgtacctcgttcattttgtcttcctgactcgtcaacagtgtgccatctagaattagcgatctgattaaatttattcgtcttctgttattggccgctaagtgaaagaacttagtgttagcatcgcccaaccgcatccaagtaagtctggaatgttgtcttgcaagtgacctctgagcggaggcaatatccagaatcttgattttaa

SEQ ID NO: 1556 - DNA, 720 bp, Zea Mays
atcagaacccactcaagtggattctagtgtccgtcagactgctctcacagccagctctgcacacgcctcgtttaccacgcctaactaccagacatgatgcgggtaaatctagtcttcctcccactcatgatctacaggctctaggcctgagccccactcatgacctgtagattataggcttgagttcctcaatgccctatgagcccgcacgacgacaaggggagaccaatagtcaggctatgaacgcaaaaggtcagcataggaagaagcgaacaagaatgagtaatgacaacaccggacatccatcactagcatggatcacacgctccccatacaattttagagatgcgataggagacccatgcggggaaggatattgatgcacgacaaggttttaccaagggtgaaccgttcctttacccccaacattatgctcccttctaggagaagctatctgtaaccacctcccccttgatcaataaaagggggagggtcagcctcaagaggggagcccttgggagagaaaagtataagagacatataaccactagcaagatcggggcaacctttagatgaacaacacacaaatacatgagatccttccctctctcacccgcttgtaacctctactatgagcaatcatgtcccggtagcgcgagcaaccaaagactagaagtagggacattctgctcaaactagtattactctggcacccaatcg

SEQ ID NO: 1557 - DNA, 948 bp, Zea Mays
ttctcatgtcagtgctaaaagaatggccattacaccaccattctactgcaggtaccatagaatcactcaccgactccttaccattagccacctttaccttgacagcaggacaactgatagatggtaaccccacttgctgcacaaaagcagaattaatgaaagtagtagaactgcatgtgtccaccaataacaaaaatgcttgatccttcaccaatgcttgcaaacgaatattctgcatacttttagtaccagaaatagctagcatcgacggtttacaagactcatcccctagttgatcttcctgatccaactgctgtaaaacttcctcactgagctccaaggacaaatcctcaacagaaagtgtattcaactgcataggaccttttattttacacttagcagcatgacctgcatcatacttctccccacaaacaaaacatagaccatgaatccttctataatccttgagtttcctttttttggagagatcaacacccccatttatctgcttatggtcaggtctatactgcccaccttgtctgatgacagcccccctcgtagaagtcgacctctacctttctccaaaacttcagagtgcaactttgccaatagcacaacacgattcaccgtagttggtacttgacacaacactgagccccgaatatcaggtttgaggcccttcacaaattgttgcccaaagaaaatttcatccaacgtaggattgtgcatagcagtggaataacgtaacccaacaaactcctctacatactcatccactgaacccgactactgcagatgaagcaggtcatgcatagcttgggggtactcataagaaccaaaagtactcaccactacagcagtaaactgattccaatttcaaagaggttgattcaacttgtaaacctgcagctatttcgctgccttgccttccatatgcatagaggctgc

SEQ ID NO: 1558 - DNA, 318 bp, Zea Mays
cgggggttcggagctgacatgtgtccagacctggtctggtgggatccggatctatccgcttacactcctgctccccgctcaggcggagacccgatgctgccacatggcatactgcgtgcgacataagccaatgagcggaacctggtatgatgcctctgggctacgcgtgccttcgcattcattacggataagacgtgcacctgtccattccgctgacaagcggtgtactcaatccatgatacgtgggctgtgcagttactcaccattactcccgcgttaccaggaaaagggtaacaacctattaatactgcatggact

SEQ ID NO: 1559 - DNA, 468 bp, Zea Mays
aaaagatctagtgggtgggtaaaagatctagcggggggtggatttggtcgtgggtaggaacttatcagctgcacttgatggccgtgcgacgtggccgagcggccggtgtcatcgtggtacaccggtgacctcaattgcgccacgttgtgaccctttcaccacgtagtgataaccgtggcacgcccgaaattaccatcttggagcccttgcaccggctggcgccacgacgagctcgccaatgaaatatcccaccgccgccatgttcgatttcggccaaaattggcgtgacgtgtagccaatccctttaaattgagtactcccctcgctccgcctctctgttaagccttcattccacccccaggtcggcgttttcgtgcaccatagcctccagtcttcggacttcccccaaattggtcatccacgccgccgtgagacgccgcaccatggccagcaacccacaggtccgct

SEQ ID NO: 1560 - DNA, 513 bp, Zea Mays
ttagtgccataccggctagtgaaacaggcagagaacggcttataagcgttggtgcagccccaaatgttaacttgctagtggctcaatgacgttggtagagaacgatttaggtaatgttgtagatatttgttttgcttggcgaggaaattggcctgctgggttgcatgcgttgggagggcgagggagcagagctgcgcgttgggcccgacgtgggaggctgggaggcagaaccgtgcaccatccggggtgtggacgtctacactctcctcttatatagtagtagagattaattattaatttgtacatatataattatgtatacgtgtgtataaacttgtgattgcagatcataatctatgtttttttacgtgtatgtataccattatttacactgttgtagacccttaaatatatcaacgacgtgtatgggcatagcattaatgtactagttaactttttgggaaataaaagagaatttaaactaattaatgttttatttcagaagcatctttg

SEQ ID NO: 1561 - DNA, 373 bp, Zea Mays
agcgtggccagcaatttggaacctgggagccagggcaccgtgggtgcagtgcagtaaatgaggtgttgcaatggcgatttatcggggggtggtggtggagtgaatggatccacgagtttacgttggtgctcagtgctgctctgccagccaacgtcggatcgtattgatgcgtgcttttccctggctgtgaggccccgccgccgtaccccgtccgtgcgtcataggatacgcgcgcaggcaggggcagcttcgtgtctgtgtctgtgtctgtccaacgtgttgttggccgtggatgaggacgagatgagtaaacgcccgccggccattccattccattccgttccatgtgctttggagtgtgggatttcaactt

SEQ ID NO: 1562 - DNA, 517 bp, Zea Mays
gggctcttttgcaaaagatacccgcgaaggggtatctagggtttcaggccgtccgataagagtcctacggatcggattgacttatgaccttttattaaccggtacctaatcctagccaccaaatcgccatccgacggtacgcaccaacttcaatccggaccatcgatctcagaacccacggccagatccaaaccaccgaacgggtgccctcacgatctaatctaggccgcccaaagtcgatcggacgattccgaagatcgcccccaacctcagctcaacgggggagcgccgccgagacaaccccacggcggagctggtcgccggtgctcatcgttcgacgcccccgagcccgaatcccttgatttcttgcccgcacgcaaccacccgacccccctgaactcgaaggccgaccgcaggtaaccgattgacatgcctagcttcatatccatggcgagtcacggcgaccgaagctaggtgaacaccggtgtgcaattgccgccccaatgaggagtaattt

SEQ ID NO: 1563 - DNA, 665 bp, Zea Mays
gtcgggtcacaacatgtatcaggtgtgagtgaggacaccatgtacttgctaagggtagaatcgacgtagttcctcgatattccacatgttggcgagcatcgtgcctcgtttgtcttccagcttgtaggtgcccagttagagaacttctccaattacgaatgaccctttccatggcgatgacaacttgtgtcgatccttgttgctctgcaccagcctaagcacaagggggcccacttccaaggtcctccctcatatgcagcagtcatggtatcgccatagcgtctactgatatttagtagtgctacgcagcaggcttcatcgagctgatctagggcgttagctctagtccacgttttgcttcactcttggggagtcgtattcacggtcggtggggaggatgacctcggccccataaaccatgaaatacgatgtgtatctagttgctcgactaggggtcgtccttaagttccaaaggacaactgatggatcctgcggccaatgttggtcgagtcgattgaggcgagcaaagacccggggcttgagcccttgcaggatcatgccattgattttctttacttgtccatttgtgcgggggtgggctacggtggcctagtcaacacgaatatggtgttcgtcacaaaactctagaaatttcttttctgtaa

SEQ ID NO: 1564 - DNA, 565 bp, Zea Mays
aaattccaaaaggattggcgcctaagtatcagcatatttaatggaacattatttatctcaacagtataaaatctttagtgcgaccaaaagtttattgcaagtatgatccctgatcctgccgccttagtggctgaaaggtaaagattgtgttcaaccagtgtatgaataccgccaccaagcacttgagagatctccatcctgaaactcccaacctaaaattgtacataaatccaataatccatatatcatcagcgcataatgaaaacaaataaagaacgaaattcttcaaggagttccccattaattgaaatgcatggagacaaacaaaagcgatagcacgaccatcaggatcaacgaatcggagcttgcgtgcgacagcatatgcatacttttgtacctttaatctctgtcggggtgggggcgagaaacgcgcatggggacgctggggacgcctgctccggcctctctgtcaagcactcagttttattactgagattactctgtatagagattaaaatacatgtatagaactaacgctatatactgctccatcacaggcatccgc

SEQ ID NO: 1565 - DNA, 905 bp, Zea Mays
cgggaggacgttcaagatgtcgtggagacggcggccgcgcgcttccagcgcgaccctgctgatgtcgagtagctcatacctgtagaaatgaggctagggctccgcttgaaggcgaatgtaataacttttgtttttgtaagatacttttgggaactatcaattaaacaactcttatctgtatggtgcttgttcttgctgtgtgtggttttatcaactcctgtcctggtacttggcccccctgggatgtaggctcgttgtgtcgaggctagataccagcatacctaagaaagagttggtgtcccgacccttaggaggtagcctcgactgggacctggacctgcacacagcttcggctaggaagtgttagtagcacacccattaggacccattgtttggtatcagccatcctttgattcatgcaacaggacctgtagggtttggcctaggaagccaagccgtgtgcctggacccccctgaatcacagttccagatactaggacacccatcgcaaagtggtggagcatgtaggcttacggtacgggaccaggctaagcggctacactgctccggaccaccccaggggacgtgcgtccattctctagaccggaccccaggttcccagacccatagggctatagttccaaatactaggatacccatcacagagtggtagagcgtgcaggcttagggtgcggaaccaagctaagcggctacacagcttcggaccaccctaggagacgagtacccattctctagaactggcccccaggctgccggaccccctgctttcgtagaggggtcctaaactacaaacctagctattcaattcggatgtcatcataccagcaagggtgggagaccgtatgggtgggttagataaaagataataatatctggaatctgta

SEQ ID NO: 1566 - DNA, 874 bp, Zea Mays
tgggagtaccaagatgtatcaggaattgaagcagaagtactggtggagtggactgaagagagtagagatatgtggctgcacatgtggctatgtgcgatgggtgtcaaagagttaaggccgaacaccaaagatctgctggactattatacccattaaagatacccgaacggaagtgggaagagattggtatggatttcatcactgggctgcctcgcacccagaaaggttatgattctatatgggtgattgtggatagattgactaaagtagctcatttcattcctgtcaagactacttataagtgatctcaattggctgagttatatatggcttggattgtgtctctacacggtgtaccgaagaagatcattttggatagaggatcacagtttacctccagaatttggaaaagttttcatgagaatatggatacgaagttgaattttagttcgccctaccatcctcaaactgacggacagaatgaaaggactaatcaagtattggaggacatgtcgagagcttgtgcccttcagcatggtagtagttgggacaagagtctaccttatgctgagttctgatataataatagttgccagggcagtctgaaaatgtcaccgtttgaggctctatatgataagaagtgcaggactcctctattttagaaccagactagaggaagatagttgtttggacctgaactgattcaagaggcagaagaacaagtccatataattcgagagaatttgagggtagctcaaaccaggcaaaagagctacacagataatataagaagaccactggaatttgaggaaggtgatcatgtgtacctcaagatgtcaccacttcgtggaatgaggagattcaaagtcaagga

SEQ ID NO: 1567 - DNA, 576 bp, Zea Mays
aaaggtttcaaaacactatattattgtgcttcaaaatgttttatcaaaagatgcttgcatgatatggttattatattgcccgttgatttgttgctggccatatatgacaagagtacttgtccatgtcctaaactagaactacatattgtgtagcataactctggtaatttggtgggatgcaacagtaccacatatttgtaagtggtgtcacatcgtggcagtatcgcacaagcacacgacagcgccacatcttgaactacaacaacagtttggtcaacatagtagttgtgttggctcactttttccatctacccctaaggggccatagtaaatccatctctagcatctgtctccctcacccattatttcgctatgatgtctctctctctctcttgccactcgcctgcatcgttgaccttactatagcgctatgtaccatcaattgcatgtcactcgttgactaaattcatttgtccctagagtgtgtttaaggttgtgatcgagtcgttttcttccctctagtcaacattccctcagtttcaaggtgaaaaccctaaccttctccatatatgtcat

SEQ ID NO: 1568 - DNA, 540 bp, Zea Mays
tctcaagttaatctccaaagcatggcctctcagcatgttgatgcatcttttatgggctggtggagatggctgggcaatcaggtccatggagtggctgggtaaactctggtaattttaggagcatggacactgtagaaacaacggaataactttgtcttcgacagaactagacctaatgtggatcttgctgttaggatggctgatcaagagcgagagaagtggaagctggctggagcaagaaagctatccttgctaactagtcacatcccgggtcagtaggctgtgttagagttagtagttttgtgtgttttatacatggatgagtattagtgtgcctgtacttggcccccgtaaggtggctgttttgtattatctttgtatttcttcttaatggaatggtatgcagccctcctgcgtttttcgagaaaaaaacttcttgagctaaaacactatgtgatgctgtttggggggcatttgcaggatgttatactaccatgaatattggatgatgccactctagcaagtttaaacacaatgata

SEQ ID NO: 1569 - DNA, 582 bp, Zea Mays
ctccccttcttcccctgattgaagcacgccaacaaccgtcttcgctcgtcctcaccgcctctagcctcgccggtggcctcctgcgtccttgccggtcgtcgcctccgtcctcgccaccctccgccactactccattgacaaacgccgcaggacacctcgacgaggtgctaaggttcccggcccccatgatggccatcgcacccggctggaaccctaaacccgccatgaagccaccatggccaggggcatgtcattggcggcgctaccattccgcagaaacctcgagccccgcggcgttattgacggcgacgacgtttggtgagtgaagatgccgagacgacgatgagaagcgacggcggcggctacagcctacaggcgatgctttctctgccaacgaatgtgggaactgggaaggggagggggtgtttgaaaaacaaaattatagcacaaggacagctgcgggagggttaaaatgtaaatttttttgtcaccgtcggatcaacgtagaaaggccacgatcgcacatgtgcatatgtgcacagacccatccttgtgcatacgatacggtccctaaaaaaaatg

SEQ ID NO: 1570 - DNA, 326 bp, Zea Mays
cgagccacttgaaagtagctggtacccttcaaccactaccaataccatcatggaaatgggatgacatcagtatggattttattgtgggattgccccaatacatctcagaaacatgattccatctgggttatcgtggatagacttactaagatggcccattttctcccagtgcacacaacttattcagcaaggagatatgctgagatatatctggaccgcatagtttgcctgcatggagtgcccaaaaccatcatttctgatcgaggtacacagtttgtagcgcgcttttgggagcaattgcaaaattcccttggcaccaagcttat

SEQ ID NO: 1571 - DNA, 423 bp, Zea Mays
aaaccagggaactacaggggcctctgcgcaagttgtttcaagactcagaatactatttgtagtactgcgggttgattctagaaaagcacagggactcttaagcaagtttccaggttcgaaggggtatcgtgaacttacgaccgttcgattccaaactaacggctcagattagatcagccttataataaacagatgcggcgtgctagctgttagatcgaagatcgatggtttaacgtcccagattgtacgagatccgcacgatcatgatccgatggaccagaccgaatcccacgaagggatatgctcaacctaatctcagtcgtccgcaccgatccaacggtagggaacactcccctaacctcccgacgcgagcagaggtgccccggccacggcggagccctcgccggcgccatcaaattccac

SEQ ID NO: 1572 - DNA, 805 bp, Zea Mays
tgctgaggcccaacgaattgctcaccgaagcttcaatcaccgccgcgggtggacttggattctgacgccaacaacaccggtatgagacactccctggaaagcacctttgttcacgcgttgtatagcgaccaacgacgtaggatttagcgctcttttatgttgtgaattgcttgtcggtgcgtcgggccaccaccctggtcatgcgcctccgtgagccataggctctgctggaccatcgcgtatgaaacctcactgaatcgaatcaccgtgttgcgggccacgtgtagcagcttttaattcgagtttggcacggtggtgtgccgtattggccgtacgccggtgatgctacgtcgtggggcgcaagcgcaccgtcgctcgaccaccgccgggttggttgatgaacacaggtcgtcggattcggatctaatgacatggtttagatctgcatacccctttggcttgggcgccactcgaccgttgatcacttgtgctatgatcgggattagattggcgatagcgtttatgatgggatgatgtggaccgttggatccaccttaggcggtcaagattagatcgttggggtgctgttcggttatattggatccgggccatcagatcttgatctaagggtgggcactacgtaccggttcggggaaggactcgatataatccgtgctgaccgcttttgatcgggcggccgtgatcaaactgtacccattcaatcgtcacttttccacatgagcccctgtcctttgagttattcaacccgccgtctgtaggtgttgttcgcctgagtctaggaaag

SEQ ID NO: 1573 - DNA, 275 bp, Zea Mays
agggcacatgtacagtttttccttttcttactgcatgcacatcacacgcatgagagatattatgcactgggccccacgttcttcaactgcagaacacgcacgatagctttccttctccatttcacatgcacacacggttactgcatgagcattttctttgtccaaaaattatcagccatggcgctggaggagaaggccaacagccgaccgtggctaggcgggcggcatggcgcctcgctgataggagtggaagcagcgtagggacgcgactacgt

SEQ ID NO: 1574 - DNA, 470 bp, Zea Mays
cggcacccacgcttctaatctcgttcgctcatcggcagatcaacggatggcatgccttcttcttcctcccgcgcacaggccaataggcgcaggtacgacatccatggtggcgccattactagcgcactaggtccacgcaattccgcccagccctcattactaccgttcctacacgacgcagaggcataatcgaactgctaggaagagttctcaacagcggaggaggcaatggagaaactgccaaactggccacgacgtgctcgccgaccaccataacgccaggcgcaccttgagcgatggacccgcacccgagatgcccagacggaacaaaaacagagggggagacactcaccgaaattagtggtgcaaagaccctgctccacgacgaggggtggcgcaacagctccggttgcatgatgtcgaggcggacggcctgccggtggagcttgagcagcgaggacgaatcctag

SEQ ID NO: 1575 - DNA, 769 bp, Zea Mays
accacttcatacccttaaaagtgtttcatgccataagtctcaaccttaatccttgccctaataatattttgcctagcagcccttctttccacctacatatggttatatccataatcacccttgtcaaactcacattcatgtgactcaatatctctcatatatctcatatttctctgtataccaatctccatctcacaccttgtgccacaatgtcaaaaccttgtaacttgtgtgtgtgtgtgtcttagttcacatttcatgtctatatgatgatgtgactaactcgtgctcacctcttctgtcatttcagtgtgacgacatgcttgctcatgtgactcttcccctgcttggcctttctcgagagatgtgtcccagatagctagttcttccattctctattcttatctcttgctttgctacactcgcttatctactctgattcttgtgcagcgtgtcagtgatcagtgggcaatttctatggtcagtatggtgaggaccaagaatgtcaccccagcaggaggggagatgaggttagactgtctctagcaagagtcggtaaacggtcctctccgctaaacatagagattcctcatctcctatatgcgtccagcaatgttcggtacaacgtcctctaaattttagagtctgcttctcgtccgctaaatatggcgcttgcgctatccggtaccaggccgtcggtgattgcttgatgcccagcctcccgcactgctacagtgtgctgtcgtacgatgtaccattggtgattggc

SEQ ID NO: 1576 - DNA, 438 bp, Zea Mays
cctgtgttgtcgtcgtggacgcttggaccggtgtggtaggactgccttggtgcacaacgcgtgtgtgcgccggttgcgtgctcgggtggagtctcatcatcggccaattcctcgccggagatgggggaaatcgttgttgtccgcctctcgccgtggtcagcctatcttctacacctatcgccggtaaggagtcatcaattacgttcgccatgccttacggtgtgtttatcgccgttcggtgtgacagattagtgcgtcttggtgcgggttggccgtggatcagtgaatcgccgccatggggcgcgggcggtgccgccgtctggggttgctggagaagaaagccctcgggaccgtcgatcgtggatgaacagctacgatcagagcgtagtgtaccggttcgtcattgcacatgggtcgtccaatcagtaataaaggctt

SEQ ID NO: 1577 - DNA, 765 bp, Zea Mays
ctttgtcccgcgaggggtgcaggcatttggaggtcttcgaccagtcggacgaaaactttgaacgtgaaatcttcaaggtcgaggaccccgtgctgaagcagtcggcgggggtgctcttcgacaggatgtggggcccgcacggccgagaaacggtccgggagcggtccgactggtcaatagattaggtaaaggctattttttgtgtggttataagtgtgggtatgtgtggttttgctgaatgagtgtgttgttgctgcagatggggcatgccaaaggcgttgaggaccttggtggtctagacggcgcgctacccaaggctgcggatgtggatccggtgccgccatctgatgtcggcgagggcccctcgtcgacccccgcgccgactgcagccggcgaagaccccacaccagcccctgcgccgccgtgtgaggacgccttgaaggcggtggtcgagcccgctaccgaagaccccgcggcggcggccgagccttcgcaggtgtaggaataggggttagggattgcatgtgaacttttgtctgtgtgatactgaacctcggttgctgcgcaggttccgacgtttgggcctgcgcaagcaaccactactgacaatattgattttgcagtggagacttcagttgtagtgcccgctgatgatagtgtgtctggctctatgtctaaatgttttgagtccgacggtgagtctgggagttcgtttccttggatggaggagtcctcggatgaaggcttagattattttgttgcgtt

SEQ ID NO: 1578 - DNA, 531 bp, Zea Mays
tataacccgtacatccattaataacatatccacaagaaaatcaatgagtcaaacgggaaatgatgaaagaaaaaattgcacagttattgagctctgttgtgggagcaaaacatcagacatgtccataaaataactatgaactgcaatctaaatatatcatccatcttgtgcctgcaatctaaatatttcattcagaacatgaactgcatagagtaaaatgttatttgtaatgggtcagccatggtgcaaactaagatatcctaaatgagatatttagttatatatgagaaagtgtttaagtgctacagtaaattgcaggttctaatgtatagcttaaacacatcaaagagtttgatatcaaaaatactataattgataattcatagttgataactgatgatataatacatgagttgcttggctcaaacaaacatgcaaaagaaaagggtcggtagttaacctaggaattctgatagccatcaatttcatttcattatcttcttgcatctaatctgtgccggtcaaaactca

SEQ ID NO: 1579 - DNA, 1192 bp, Zea Mays
cccgaggtcttaactaatttgcaaaacgttctacagaattttctaagagtcactgacatcttacaccgaggtccctgaaacttaattcgtttcttctccaaataagtccccgaccacggcgcgtttgtcgttcatcaccgacgccgcacggactggccctggccggcggcgaatgctcagtcgagcgacagggggagcataacctacccaaggcgacctaggaacgagcttcactttggcttgaacactttgagagcggtctgcccacgtgcacggcggaaaccgtgatgttaatcccgtgttcccaatcacttacgcccgaattggtcaaacggatgctacggtgagcattacgtgcctacagagttgctagaacaacactcgagagaggcagagccttaccagagtggtccggcgacggagcgcggagtcttgtgctcaccggtgacagagaaaaggggaaaatgacgtcgcgtcgactctgggtgaaattgggggatgggattaaggctataggaccgtaagaggctgtgctttcatcgcgcgcaatcaatttgggcgaaggtggagagggcagtgcgaatttgacttcgatttagttcactggtgttcgtgatgaccgagcctcgccgtgatccatggggatatttatagccgcggaggtccggcgatctcttcccagccacggatagcttctttagtgcatgcctagcacgtaaaggagtggtacaatgaggtagaatcatggtgtagaggacaccgcggcggaaaacgattgactcggtggccaccggtgaggtctccggctggactcggggtagggtgccacgtatgcgctatctaactccggcgttatctgttccctaccgcgcacggattcagacggcggcggcacgaatcttcgcgcagagaggtcgccggcggtgagcacacaacgctggcagtctgatccacatccgagcactgtaccatggcgtttcttcagtcagtcgacctgacagagcatcttggagctcgatttactcctgattttgtgaggtgaccaggctagctctctgtaccaaagttatagacctacagttaatcttcaactttgccatggagcttaccataaaatagttaccgaatccaactcaaaatcaggttcaaagtctgcctaatttcactgttactggaaattcagacttaagat

SEQ ID NO: 1580 - DNA, 599 bp, Zea Mays
gacgggcgttaggactgtgggctgatttcccataaatagaggggttcatatgttaaaccgtccaccgaaggggtacgcgataatcctggccgccagatcatgagtgaacgaccacgattagattgggggttttatgaatcggtaagaaatcgggcccatccgatctcgatcttgcggtcaagattcagcgccatcgtaagccgcccgataccgtatctacgctctggattttaaaaacgccgcgatgaatcctcgcccacacaatcaccgatcgacagtcaaggcaagatctcctgaagcgatacgcctgatctaacctacaccgtccgttcctagatcaacgcctcagcgcggcggcgccacccaatccgcgacgcgccatcgccggcgagcgcgagattctcgcccctggcgcacgattcctcaccctgaaggctactacgcaacgaaaagtaggtagcgaacttggtccgaggctacataccgattatttggcgcccgaatcgaccggccacgaccgaccgcagatccgccgcgcggagtactccggtgacggattgaccagaccacgatgatcctcacgcccagatgcttgcttg

SEQ ID NO: 1581 - DNA, 871 bp, Zea Mays
aattatccaactcatgatcttgaattggccgcggtggtttttgctctaaagtcgtggaggcattatctttatggcgaggcttgtgacatttacaccgatcataaaagtctcaagtatattttcactcagaaggagctgaatttgaggcagcgttggtggctcgaattgattaaagattatgatttgtccattcattatcactaggggaaggcaaatgtggtggctgatgcccttagcaggtccggggttccaaaagtggccttgtcgttgatcgctgatctggaccgtttggggatcgctttgtgctatgtcggcaacgctagtgaggagactcgtatgcttattcaatcttccctcatggagagagtgtgtgcggctcagcagcaggatcgtttattgcagcaagctcgaaagagggttggcaatggtaaaccccgggagttctccattgatgagaatgatttggtttgtttcaggggtcacctttgtgtgcctcagaaatcagaggtgaagatggatatcttgagagaagctcataaaacgccttacaccgttcaccctagcgaaaccaaaatgtaccgagatctgaagcaaaacttctggtggaagcggatgaaggttgacgtttctaagtacgtggctgcctttgaagtatgtcagcgcgtgaaggctgagcataagaggcctgcaggtttgctgaagccattggaaatttcggagtggaagtgggagcataacaccatggattttgtggtgggcttacctcgttctcctcggggtagggatgctatttgggtggtagtggatcgcttgactaagtctgcgcactttattcccatgaagaccactaattcagcttcagagttggtcc

SEQ ID NO: 1582 - DNA, 799 bp, Zea Mays
cttctttggttcttttatcatataacaacttttcttgacattcagatattgaaatagcacaactcattgtatctatagtcttattaacagcattcaagttccacttgctgaatataacctagatttgttagttttcttcagggttcagaacctcgacttagttttatgttctgcataagcagaagggcttgcaacttaagaactagtaggtgctttcaagtttggtactccacttatcattaagttttgcataccagcatttgtcattaagaaattactgtgatttgccataaagataagagttggttaaaaggaatatgatggaacattactgttgattattttagtatggaatatggattgtatttttattggaacattcagtgcctggtcttcggttggcctcttgtgctagttgataagttaaacaaaatgacagattgcatttcttgtgttgcagacaagatcaaaagagtttacggggtctatagttttctttcttcattcaaatactatttattgttgtgtttaagagaaaccgtactaccagatgtctgagtggttacaacctattgtgtgtaactcatatatagagcaccgacacattcttgttactcgaatagtgcaaaactatgaaagcttggatatctgtttataagcagtaacttgcaggacaaggggctgtagattttagatgcttattttacagctattgtataaccagttcgctgctgcatctcacaaatcaacttcagtgttataaagttgtatttattgatatcgattaatcacaattagt

SEQ ID NO: 1583 - DNA, 507 bp, Zea Mays
gcgtacccagcttatctgtattgtggtatcactgactcaacccgggtttccaacagaaggattcctgttgtggatctggtaagccggcttgagatgattcttagaggccaggtgtcgaatatcggtgctcctattgcgtattctgcctagaatctgcctccttccaagactttcatcagttttgtgtcaaatcctcctactggtgatagtggtttgggccttagagtgcgaccctctctcgaagaggtcgaggctttggttgtttcgcttggtgaaatccccaatgacgagaggcaggttcattttgagatgcatataaacccgagcgacgcagaaataagtgctatgctggacatgttggctgaggattcctctgattcggtccctgctgaaacactagctgtagcacctatcccagagcctggaaagaccttggacatttaaagatctgatagcactcgcccgaagcgtcctcgccaggccagtcatccaacttctcctgctgac

SEQ ID NO: 1584 - DNA, 582 bp, Zea Mays
tctgcagctgttgtgcaggtaaatgttgttgctttgataagaattggcaagcttcacatctttggactaactcggcagcatcactcttcgctgttggccaatagaaaccagacctgaaagccttcccgaccagagttctagatgctgcatgtactccacactgcccggcatggatttcatccaatagctgcttcccaatagtcgagggaatgcacttcatgaggactctcgtcgcaccccttccgttcagtgtgccccctatgaggatgtaatgggccgactgccttgcgatgtgttctgctgcagccttgtcatctggttctccttcaatttttatgtacctgatgataggctctctccagtcattggggtccaactctggttggctcaaggtgttgcattcttctgtctgatctgagagaatactcgggtgtgatacttctcggacgaatatcctgggtgggacctgggcctgactggatcccagcttcaacaacgcgtctactgctacgttgcggtctctttccacgtggtggaactccaacgctttgaatttttcctccaattttcggacggctgcac

SEQ ID NO: 1585 - DNA, 628 bp, Zea Mays
tcatacccaggaagctccaaaacatggtcgcgaacgtcctttatcgcaaacccaaatccacaatattcaacagctcgaacacacccatcacaattatgaccaaaattactagtcatcaagaggtgatagaccacccaggagcaggggacttggatgtggtccacctcgcaagtacaagccctactgcatttttcttgactagtcactcaaccagagactgacgcgcatggaaaaagggatctcccagagcagccagcgaaggccatagcccacatattccaaccacaattccaacactctcagcaagaagcatacaaccattaccaacagtaccaaccaaattaccaaccactgccatcacacctagaaaggctacaactaccacccccctccgcatccaaaccaccaaagacagttaccccctccccaccaaaggaagaagagtgctaccctcagctactggtccatgacataataaatgtaattaacggaagctccaatatagacttcgacacgaaaagacaaagaagagagtactatcgaagtgtcaaccatgtcgctgccaacggggcagtcgtctagaccaagtggttgcatatccccctttttgaaacgagcgatgccagcc

SEQ ID NO: 1586 - DNA, 597 bp, Zea Mays
accttggtgtgctgcctgagttggatttactggtattcagatcactgaacatgagtcgctctgagtctgaaatagataattgctacaaaccattcgtgaagctcttcaaggctcttgagggtaagtatgttgtaagggatgcaatcttcaagctacccaagtcacttgatctgcatttgaagtatcttgagttgcctattgtcaaggattatcgtgtgatatatggtcgaaccctcttcccgaagcttttgatctctataatgtactgcgaagtgcatcgacttttgagggagcagtgcccggcacgtggacagagtgctgcagccaatgcaatcatggtgacgattgaagagaaaatctttgacttcatgaagtcatgcagtacaaatgttatgctaattagctattctggtgctcatggtgagagggcaaataagcaaattgtgtgcagtgaagatggaggagatgaggcgctgacatctgaagttagtaatgtcactaaagatctcaaagcgtcgaatgtcccactgaaagttagaaattttatgggcaacaagaagctcagtgttgagggcaaaagaactaccgcagaaggaa

SEQ ID NO: 1587 - DNA, 673 bp, Zea Mays
catggcatgattataatatgctgtcaatagggtagcgtagtgctgttgcgatgggtgcaaaaactgtgcatattgtacaaccccctggttctacgaacgtgtgcccggacggtccaaagttatacctggacgattcagccgtatatggtgctatttgggttgtctgcgcgctggcttgtgtagggttggacggtctgagttatctctcagatggtccgactatgtccagaggcggtcgcgcgtaggcggtggcggctgtggtggcactacgaacgtattcaacggcataccatataatggtagcgtacaggatgacccatttgtagtcgatgtgttaagtgcgggtggcaccgtattaggctcatgcaaggaaaaactaggggcagtagatttttcatacgaacacgcccatcctttaactgattcatctatatattgttttaattgagttccccgttgtcctatgaaagccttaaaaaattgatcgaaaatacttacaatgggagcctaagccgaaagtaggagaattccatatcgattttctctttaacgaatgatcttctggtggcgatccactatgaattatgataggtatttttcctccgcctttgcgcgtcatttggcaagttgttgcagcacatcttcctccttgcgcctcgtgaggtcatcaaag

SEQ ID NO: 1588 - DNA, 540 bp, Zea Mays
aaggaatcgccaggaataaaggaaacaacaaataaggaataaaagagacagcagataagtttctatatttagtcagtcagcagattaggaataaaagaaacaacagataagtttttatatttagtcagtctgttttctagcaagttgagagtgatatgatttgtttctatattaacctgggctcagtctataagagaccgggggtagtttgtactagggattatcaaaagaagaaaatctcctagtcctaggaggttgcctggggcgcactagaggaactctccagcgtccggaacgccaccaggaatcctcctcccccttctcactcctatttcctgcgttcttgtccacaacctcctgctgagcccccaacgaaagcagggagtctgcatcatttagtatcagagacagccagcgtcatgacttccgagtccggcactggacagaatcctaatgggcgtggactcgctgactccctacgccaaatccttgaccaccaaacccaaatgctagcccaaatcaccaccatcaacacatgcc

SEQ ID NO: 1589 - DNA, 539 bp, Zea Mays
gtcaagtgctgagcagtagttttcagttcctcttcctccgcagcagctttttgtgcctgggacttctcagttcgtgccgatgcagagttttcctcagtatcaggccgcgcctactcctacaccgtctactcctatgtcgtctcagtttggagctccgcgtctgcctcacccggtggctcagtggggttcttctgttaatttcactccaggagcttcctcttctgcgggtatttctggagcttatgtgctacccgctgaggatggcagggagcaaggagacgtggtgacaggtacgatttcagttgattcgtttgcagcccatgctctttttgactctagcgctagctattcgtttgtttcggaggattttgtgtcgtgggctggtctttcagtgcagaggttgggtcacccaattctagttagatctgctaatggctccattagtagcggttcagtttgtcaggggtgttccgtcattcttgctgatgaggtcttctcggccaatctggtggtgatttccttgggggcattcgatgtta

SEQ ID NO: 1590 - DNA, 300 bp, Zea Mays
ctgacaacattttacatgacatcgatgtaccaaaatggtatggcaccaacgttacaacagctcaaggacctagcaacttaacgtgtttctgtacagtgcagtctagatggtatatgaacaatccatagcccctaaagcgccaatctgaccagagtcgatgtggagaaatgttggcattcttgctgaacgcggcctcttgctatccacaaattagccagatggttatgttcagtgcaacattgcagaacgtggcctcttctgccgcagacacaggatcctcgaaccgtccatccctcagag

SEQ ID NO: 1591 - DNA, 340 bp, Zea Mays
cttgggagagatatgtttggtaacattgctcttaatataaccttgttgcatctgagcaacacaagatgcattatcttcatagataatattgggtgattcaatgaaatgaatcccacatgatgattgaatgtgattaatcacccttcgaagccagacacattgatgtgaagcttcatacaaggcaataatctctgagtgattagtggatattgttactagagtttgcttgaggacttccaagaaatagcagttccaccattcagaaatacaaacccagtttgagaccttccattgtgggggtctgaaagataaccagcatctgtgtaccctacgaggctag

SEQ ID NO: 1592 - DNA, 557 bp, Zea Mays
tatcacatttctagttgttgaatggcacaaattgaacaattccttggcattggatgggttattcccttgggcagcccactcattcaagtggtagcgagtggatcaatatggagcaagaaagcctggtccattggtgtatccagcatctactagataatatttaccacttggaatagaaaatgcatcgtcccgagacatggtatcatgtagcacacgtgaatctgaagctgacccttcccatccagctagaacataaacaaacttcatgtgtcgatcacaaacacccaaaacatgtggtgatttgttgcttcctattcctataccccccttgatcagccaaaggtacaaaaacatcaacgtgtgtacaatctagtgctccaaggcaatcttcaaaccatctccacttagaatcttcaggttgtacaactaaagggttaggaagcttgataaattcatgacataatgatagaacacctctcaacacctcattgaaatagcggctaattggttcaagtgaccacccgtatgagctacgaatcatcctcatcttagtgcca

SEQ ID NO: 1593 - DNA, 370 bp, Zea Mays
ccgatattgaagggtgtcgtacgcaggaaagtcgggtgggcgctacagatagcgcacgagtctgacgggttgcctgggtccgagtctgcttctttctcgtgttggccctctccgctagtagttccgacccggcccacgaagggatggccttgcgaggtaactgacccaaggccccgcgcgaggccttcttgccttctagtggacccgggggatatctgtcccccacacgggagtccttcctcgccgacgtccgttaccgcctccatcaggctcaagagggtgcagaagcgccactacgatcggcttcatcggccagtcacctaccaggtgggcgagtgggtgctgctgcgcctacgccaacgccaggcca

SEQ ID NO: 1594 - DNA, 440 bp, Zea Mays
gggtaaggtactcctccccgttaccttgaagggtccttcctagctgggggagagttgtggagcccctcttggtatggtatctgccatggggctaagccccgacccagggttcccatctgtatttgacacgggagccctcgtctctggctgtgatcacttctgcatatacctgtctatagctcggacccgtggggggtctggaagggcctccggacgaaaggtatgcttcagctccgtagaccggggaacatggggtccctctggggtccgtctagttgtcttcaccggagaggcagggaatcgtctttgaaagactgctcgcgccgctcgctgacgcgttttgcgaggtcaatgatctcgcgacactccgctgcattgtggcgaccatgcgggtgcacagggcatggaccgctgctacccttctgcggtcgtgggcgctt

SEQ ID NO: 1595 - DNA, 640 bp, Zea Mays
tgcgcgacgtagtggcagatgcgcatggcgctggtcagccatggggcggggggcgccgcgaagacggtggtcggtggtgtgggggtgtgggcatacacacggggagccacggggttcggatgtgggcgggcgtgggctagacgacgtgctactaccaaggggacgagaggctggtggtggctgcggagggaggatctagacgcctagggaggggcggggtggacctaggagacgtggcgatcagagttggttgctagggggaacgagaggcggggcgactgctgtggagtgaggaggctctcgttgctcgtgcggccgcggacgatgcggattgacacagacagtatagattgaagggggcagaacagggggaggcagcctacccccttaccttcttcatagtagtagagatatgtgcaccctcatagtgctactcaccaccctcatactgttactctccatcctcattctgctgctctccaccctttccatcctcatagtgatgatatccaccctctctaccctcacgttgcttttcatcttcatcatgtgatcttttaagtgattcccgactacaactcagcaatgccccgtgtcgactattgttgaaagaactcccatggaaaaaggttatttgtcg

SEQ ID NO: 1596 - DNA, 621 bp, Zea Mays
gagattttagataacagacataacgtaatcaccaaggtaagatcaagggatgagaaaggtaaaggtaatagcaaacaaaagtaggcaaaggatggagttaaaaacttgcaagggacaaagaagatgatacgcccaagagacaaataggtaaaacacacaattctcagattgatatgggagggggagactttaaagggtaggtatatgatgaacatcaatgcaagatatagaagtgtcaagggtaaaggtgataataataataaagagcataacaaaggatggagttaaggcaagactcgcgaagtggcaaaatggagaaaacaatcacaggtaaggtaggtaaggttccaacagaatggttgaagtaaaagaaattattaccgagggaagttatatggaaacgatgagaacgttaaggatgtgagaaatagaacgatcgctcatggatcatgaggaaacaaaggtggtcaagagcatgtaaactgaaatgttttgaaccgacattggggtacaaaggtaagcatttatataaaaagtaagagtatgcaagattttgaaggtgcgagcatactaaaaccaaggcagtacgaattgccgaaagatagtgacttaacaacagaa

SEQ ID NO: 1597 - DNA, 665 bp, Zea Mays
ctcagattgccgacgaccgcgccctcgaagtcttatctaggggccttgcgggttgtcgactgaagatttcgcggccatccgaggaaggaacgaccccggtggcggcctgaatttgccgtcggagcttcgtttccgccgcaaatgtgctgtgcatcgtgggtgacatcaccgcctcgtcaaatcttggtatggcgccccctatccaaatcacgagtaggtgaatttcattttgcgcgattcctcggggtggtttgctcgtcgggctcgcggttagcgagacgccagtgagggaccgccgtactctgggcacaccaccgtactccgccgtcgagggtaggagtggtcctctgtgttgtccgatcctagcgtgatggcgaggattagaactacgtgtaccgattcgcactgcgcatctgaggcgtcgatgcagtgtcgggcggttaggatccagtcacgtgtacgataaacctggacccttgatctcagatccgagggctccgtttgcgtaccggtttgggattaaactgatctaatctacatcgtttgcttacgatctaacggccgagatgtgatagttcccctttgcagaaccatatttacaaacgaatccctggccaatgcaataatcaacccgtcgtcctattgcatggtgcgctgagtcttgg

SEQ ID NO: 1598 - DNA, 675 bp, Zea Mays
ggcggagcagtggctccggcgagcctgtaccggctggaaaacgtaatgaccggcgctcaagtgtggctgacacctaattctacccataatgaccttaatccctcaaccaatttcggagttctatctcacaatctctctgtccacggtgatggcgcaaactgaggacaaaccgaggtgttcccggtgatctaaggtggtttagttcaattggctaggtcgatgagtatccatagcacacaagggtgctaaaacgagagcgaggagggtgtgaacggacctacagaaggctgggcacggcgagctcactcacggtggcacgaagaactggattgggggaaactctaaattagagctctctggtggacaatccgcgacacggacgggtgcgctggatgcgtggatacctagcggagttccctgggggtataatttataggttccatcagggtggcgtccaatttcgcaaaggcacgctggcggccggagagaggggaggtcactggtggcttagtcgtggcaagcctaggcgtgccacgtttactactacgcggtaaagagctacgacgtgacataattgaggtcgctggagtaccacggcgacaccggcggtccggccacgtcgcacggctacaggcgcaggtgataagcttcaccccgcgaccaaatccactcccc

SEQ ID NO: 1599 - DNA, 362 bp, Zea Mays
caactgagcatttgactcgagctcaccggagagcccacgtagccccaaattccctcctcccctgttcttagctccgccgcaagaatccttccgtgaccagcgcgattcgagttagctcacgacttctacttccccgtttaagtattcccaggtaaccgtgatgctccccaacctatccaattggattataccaccgtgaattgcttggaacatgcggttcctttaagtctctccgctgtcaccgagggcagaagggtgtagagctccaattcaaaaattgagtgaggggaaacctcgggttaggtcggaatctggagtcagtcgtcggtgagcaccaatccttgcgtgctccgcccagtcca

SEQ ID NO: 1600 - DNA, 863 bp, Zea Mays
tttgtctccatgggtccctcctccccacctcccttcaacttgccgccgccaccccttcctcggtagcgtgtaagccacatacgctagaaccagtacacaacctgccttgatgccctcgacattctccaagaaaccactgtgcaaatcagctgcccagcacccttctcatgctacctcatgttcatggctccttttttctgaccctagccattgatgtggatagctgtcactgaagcagttgttgacctcctgtgcgcacaactagctcgtcataggccctcgctagtggagccaagcgctcccataagaggacatgaggttcgatatgtcctagcgctgttgaatgtcgctaccaactgtcctagtcaccgctagcccctgctcttcttggcttcgattcaatgagaatggacacatgagtgagcaggtgaacgacagttaatggggatgaggaggccgagggggaggctagggcaaggaggacaacacagcgaacagtagttgcgggtagggtgtaggtgaagggaaggcgtatgtagggtggaagaatgtatggccaaaattcccatattaaagggtgtgtgtatgcatattgtatattatgagccctaggcttccaataactaaggaatgtcctggcccaatggtgcattctagtttagtcgcaccacctcaagcagaccaagccccgagccatctacgaaacctccccaaaataattagggttccctaacgatgaaggcaacagaagaggataggcaagaactaggtggtagtggcggcctcgtggggagcaatggcggtagccacatgaggccggtgtgatagcggtgcccacaagaggagcgatgcgcgcgaggcct

SEQ ID NO: 1601 - DNA, 806 bp, Zea Mays
agcaacatatcctcctcttgggctaccaatgccaatgcaatacggttcatctccttcgtactttcatccttatccatattggggctggtatgattcaaatgcttattgttcttcatattttagaccatataacatagagtattaagctcatagcaattctaatttttgagaaataatcatataacaaagatcgttttatttctaagaatcggcctagagctcaaaataagaatagagtggtcaagcaagtttatgtggtgaacagggataatatataagccaaacgtttagatctgaattcatgcattacagagccgaatgaagtattagatacttcggatagtagtgcccaaacaatagagaaatcagctagcgatagtcctggtattagatctaaacttaagaagcctaatgtgctaaagattaaggaagacgtatcgttgtccaacactaattcacaattgagaagcccactcggattatcagtctggcacaacgagaggctaggaaaactcggtgtacaagagttgaaaaggagaggcatgacatggtctcctaacgagagttctcaagatcaggtaaggatgatgctttagaaataggtggagtgaaagtagacaaaaaggaagaaagcaagtacaggatgtttgggtgaaaggtttgccccaagtcagaaaagctattggtcattgcatcatccatatttttcagccatgccatatatcagtatgccgtgcagttcatcccaaggtatgttcggttatccttcatggcatcattttgcttcatatgcatctttgtatttt

SEQ ID NO: 1602 - DNA, 587 bp, Zea Mays
caaagtatcaagatcctgttggtgagttgatgtctagatgaatatggtatgcttcttaaaaacgtctgataaggggccttctgattatcccaaagtgcctcacaaattttcggtagaagcctgcaagtcccaagaagattctcagttcctttactgaagtaggtgtcggccaattagcaatggcagcgatctttttagaatctgtagcaataccctgatggctgataatacggcctaactagacgagttctgttttggcaaagtcacatttagagagcttcactttccaatgatcttgctgcaaaagatgtaagactgtctttaaatgttgtaaatggtcagcaaaagatctactatagatcaaaatatcatcaaagaaaaccaaagctgatttgcgaaggactagagctagagtttcattcatagcttggaagaaagtatttgaaaccccaactaaaccaaagaccataactctaaatttaaaatgacatatatgtgtctgaaaggttgtcttgtattcttcactcggttgcaacaatatttgatggtagccagctttgggatccagcttgctgaaccattgagct

SEQ ID NO: 1603 - DNA, 447 bp, Zea Mays
tcgtcgggtgttaaggcggtgcctttgctccgtggcataggcccgctcaagggtgtctttgcttgctgaagatcccttgtctgttggtgccttcgctattagtgagccccctcttgcgcgggccttcatatagtcattgttagtggagaccatcgaagggaccttcgttggtgcgggtctggcgaagttctctaacgcgtggaacactgcacttaaacatgggttactttcggcctacgcagggctgatcaaggtcgggttcggccttcgctccaataatcaccgcactccaatcgccatcgagccatatagatgctgattgccaagagtaacaagcactagacttttacttggctaagataagcctaatgtgggtggtggatgcacacaaatctctctttaggcactaatgaggttgctaataacaagatccacaattctctaatc

SEQ ID NO: 1604 - DNA, 735 bp, Zea Mays
gagttttctaactctttgtgcatttttatattaatttaagccttaaataaattcctggggcggttttgtaaattcctagggacccaaaagtaatgcacttcctaagcagatggacgacgggttctaatattaaaacactcgagggctcttatgcaaactcgcacggcgaaggggtatccatgttttctagccacttgatttcaatccgagggtccggattagatctacatcactatgaacctgtatgcgattgtgattgtccatcaaaagatctgtggcgtagattaggtttaaacgaacatcaatctcatccctccatcatccgatcgatggacgcgaagcccccagccgaacaggtacgcacgacacgattcgggccgttagcggcttgatcaatggctccgggccttcttctacctccaaacgcagggatgcaacggctccaccctgatcacagcggaggatagccgcagcgaggccacatcggcgaccaaccccccacagttagttacttggatatagccttggctatgagataatcgatgcagatggtataaagagacgatcaagggcacccctaccgacaccatagtgatggcgatgttgcccgcaacacgatgtggaccggcgactgcgcccaaccccgacgacttgttatacccactgtggaccaagcccttacgcgacaagttgtgacttgtgtgcgtggttgtgctgcagattttgagtcttgtg

SEQ ID NO: 1605 - DNA, 484 bp, Zea Mays
cacgattgatactgggattgcctcggtcttttacttccatgaatagatgcatgtatttcctttatatagagataacaatcaatagagaatatgtagcctttggcagctccaaataccatcgtgtacagtgtgttcgtgtgaattttgcctccctccgatcggtgttctaacaacccagcaactcgcttaccagccgaccagccgccacaccacatttgcatacctctgagccccttccgtcgagcaccgagacccctgtcccagcctacctgggctccagccattcgaccgtcacccgccctagcatcaatgcctcgcccgctgggtcgtcgctcgcatcgctctcttgcctggcgacaccttttttagtgcagattgcagaggacatgtcgccttggctgtagaataatcgagtaagcgatagaagccactcgtatggagaggtagtaggaagaaatcatgaaacatttttcaccgtcagaat

SEQ ID NO: 1606 - DNA, 629 bp, Zea Mays
ataaataaagccaattaaagataaataatatacaacagttgaatcagagaaccgactagaacgacaaaatgaatgaagagggaggggggtaagccatggctgttaagccttccttcgctgagatttttctatccctccaactcagatgctgctctggtcatttgtcaaatttagatgggaaaggaggaataatcttgaccattgaagaaaaattggactaggatagcgccatcagtggttgaagctcagatatcagatgcatactaaggatgaagggatatacatttattcagcacaaccatcaccatcagtagattattcagcacaccaagaaaagcattggcttatggattatttagcattgcgatagatcgtgcagtaggcttagcaccacatcaatctacaaagatacttccggctacctggaaatgcgcgaaaatcaaataatcaggaaactctggagttgcatggcaccacgaaaatgtggattgacatttgataccgaactgcaataatcatcactgctgctggtgtgcgcaaggactgaaaacttgcctagcccaggcaacgattctcgtgtaggattttgatggcctgcctggatataaaagctgcctggcaggtagcaa

SEQ ID NO: 1607 - DNA, 359 bp, Zea Mays
tgaaaggaagataggccatggcgcgcttggcgcaacagaagcgcaacagaccgccctacatgtccggccggaagagagacaaggggaaaaaagacaggcgagatccacgggtggaaggtcggcatctagttgagatttggggcagagtccgtgaggttgaagaccgacctgaaggagtggcccacgcgtaagtgatgaggagggagaatggcgagatggccccacgcgtaagtgactcagagaaaaagataagggcgctgatgggccagtggggtgcgattcagtcttgggccaagcaggaaaatagggcccatagctcagtttcttatcccttttttctttccttttatccattcttt

SEQ ID NO: 1608 - DNA, 545 bp, Zea Mays
aactgcgaaagtacaatgaccgtcacatacgaggaagaactatggaggtaggagacattatacttcaactggtacaaagcgacaaagattggcacaagctatctccgccctaggagggtcgtttataattggagagatacttaggctgggcacctacaagctgaaggacgagaaaggtaggacacttgccaacacgtagaaaatagagcagctacgacgattccacccttaacaaagactcaacgtccaaagtcgttcctttgtactgtctctaaccctatgacgatgaccccagaggtcaagaacaatgggggttgatgagaagtcaataacttggtagaccatcctaggaaaacactgaataacacctcctaatatgcatgactgtgctaatatctctcctcttttgtttgctcaactaacgcaggcccacccacccatgctcgataaaatcgaagggaaccaaaattgttcaaagccgacgcatcggactaggccacccttcgaatcaccccggcctaggaaatgaagcgaacaccgaggac

SEQ ID NO: 1609 - DNA, 916 bp, Zea Mays
atcctatgagaaatttggagaaaaacccaatcaaagatggactgtcagactgcctgaagtctgaaatacagattaacagtgttgtgacatgaactttgagctcgattttgatttggatccagtgactttttgtgggggcacattgtattaaagtcatagatagattatagctctacacctttgctgcagaaagttgacatagattccacataaagactggagaaaatgaagctctaaaatgcactgtcaggtttatctgaactgcacttcgccattgtacagtagctgaaacagataaggtcgccagcaaacccaccgtcggtggctttccgccgtgattcatgtcgccggcgtcacgattcgcgctcgggtatgtggataacttcgcggcgtcaaaagatcgtcaccgcccatgacttggacaccactccgactagtcgtagtccatctctcctggctcaccgcccgcggtaaagtgctcaccgccgccgtgccctcgctgttggccaccgcatgtcccaatcgcgccatcgcattgccgtgacctcctctgaactctccgtggctcaccggagttactgccacggcgataaacacgtgttcactgcacgccgttcttcttcacttccgaccgccgtgcgtctcctcgaaattcaccggccaccgcccttggagcctataaattgagggcggggatagttgcgccatgtaatcgtgaagctgtagcacccactcccgtctccgattaactcccatagctagagaattgctcatttcccccaacttcgttctccgccaccgtgaaacgagtctcgccgcggccagcgcaaatcaggtccgatactgtcgtcctcagtcttgttctaacattctcatgtgcccttgatgctctccaaaccatccaattgaactagac

SEQ ID NO: 1610 - DNA, 361 bp, Zea Mays
atgaagaggatccctgcgtctgccccctgcagcttcagcgagccatcgaaatacatctgccatacttctgcagtctccgagttatctggtacttgttgcttggtccactctgatacgaagtcaactagtgcttgagtctttattgcagtgcgaggccgaaactcaatgtcgtgagctcccagctcgcaggcccacttggctattcttccgttggcttctttgttgtggagaatatcccctattggaaatctagtgactactatgactttgtggtcgtcaaagtagtgacggagcttgcgtgcagttagaagtactgcatataatagtttttgaacttgaggatatttcttctttgagggtc

SEQ ID NO: 1611 - DNA, 726 bp, Zea Mays
cgggttgataacttaataacggaggggctcatgtgcaaaaaggcctgggcgaaggggtacagtgggatatcagccgcaggatccagaatcgagggctaggattagatttctttctaaacgaaacggtacgcgttctgtgccgcgagatcgtcatccaacgacgcagatgcctccacgaactactcaagcgatctaaccattgatagtaaggccagcggctcagattctatctcctactatcagatagtccccccaccatcatggccgttgctgagtggatcaacggcccaaatgcttagcccgagagatcccagcgctcttccccccgcacagagcgcacggcggcggaacacacagcaacagtggcgagggacaccgtcgacacgattctggtactccggttcccattaacctaaccaactccctaaatcgcagcggaataatacgaaatacagtagggagggatttttaccggaggtctacgtagcgataacggcatgcggcgaagagcgggtccgcagcgattgcgtcgcgccggtgagaaattcgccgatgccagtgcacaatcctaccagccccggacgcgagcaccttcccactaatccagcggagcacctggagctagcaacgcagaaatggtggtggcggtatggtgaatttggccagcgaccgatctctctctctctcttctctcgctccgcaggtataaccctttctctttttttg

SEQ ID NO: 1612 - DNA, 1461 bp, Zea Mays
atccccgccgccttgcgcgacgtcgcctcgtggaactccctcctcaacccgctctcccgccaccaccccgtctccgcgctctcccatttccgctccatgatgtcctcccccgaggccgttctcccctcgccgcactccttcgctgccgcgttcactgccgccgcccgtgtgccctctgcgtccgctggcgccgtcacgcacgcgctcgcgtgcaagctgccatcctcctgcggctccaataatgtcttcgtctcgaccgcccttctaaacatgtactgcaagctgggagctgtttctgatgccaagagagtgtttgatggaatgctacatcgcaatgcagtgtcctgggctgccatggtgtcaggttatgccactgggaagtgttctgaggaggcctttgagctcttccggctgatgcttcagaagtgcccattggagaaaaatgagtttgtaaccacagcagttcttagcgcagttagcgtgccactgggtttgcttatggggacgcagttgcatgggctggtattaaaggatggtttggtgggatttgtgtctgttgagaattcgcttgtcacaatgtatgcaaaggctgagtgtatggatgcagcaatgagggtgtttgggtcatctaaggagaggaactccatcacatggtcagcaatgatcacagggtatgctcagaatggagaagccaattgtgcagctaggatgttcctacagatgcattcgtcaggatttacgccaactgaattcacctttgttggggtactgaacgcatgcagtgacatgggcgcattagtggttgggaagcagacacattgtttgatggtgaagcttgggtttgaaacgcaggtttatgtgaagagtgcactggtggacatgtatgccaagtgtggttgtattggtgatgcaaaagatgggtttcatcaattatatgatgttgatgatgttgtcctttggacagcaatgattaccggacatgtgcagaatggggagcatgaggaagccctgatgttgtattccaggatggacaaacagggcattatacccagttatttaactgtaactagtgtacttagagcctgtgcatgccttgcagcactggaccttgggaagcaattgcatgcacaaatattgaagtgtagatttagcttggggggttctgttggaacagctctgtccactatgtattcgaagtgtggaaaccttgaagatagcatggttgtcttcagaaggatgcctgatagggatgttatttcatggaactcaattatttctgttttttcacaacatgggcgtggaagtgatgcacttgacatgtttgaggagatgaagctagagggaacggcaccagatcatataacattcattaatttgctatctgcttgtagccacatgggcttagttgacagaggctggttttattttagggcaatgaccaaagactataatttaattcct

SEQ ID NO: 1613 - DNA, 724 bp, Zea Mays
ccggctttatccctaaaacccgggtgtgacagtcacccatcattgtcattatcgtcgttttctctagggtgtcccctgtgtgttgggtgagggcgtgagggcataccattgcaattggtagagcatcctcatttcaatcgatggggactcagtgcaggaagagatagcatggctcgggaccgctagatgcagagcttggtcctacaatggcgaggatacccaattcaccccactcccctcgatggactaagcaagaggagggaagggcggcctcacctccgccagctgcattgaggtctcaccggccaccaaggggccgaatagatactgttcgatgacctcctcatcgctgaagtcatcgtcggtctcttcctcttcaccctcgtcgtcactacccaccaacctccatcagcaagcttcctccctttgtagctttcgatccctcttcctcttcttttgattctccctcttcttcgcctccacaactcatcgtgtgcatagttgtgtcctttaggagcggcgtgcgggagaggcatatgtggaaaccgttctagacaaataaactatgagaatccgataagattagaacaccaaaatgaaaagggagaagaaacttaccacgtccaccacgtcaagagcggtcaacatcgaggggtgccccacgactaggaacaccatgtttgagtcctcagtcgcctcacagatccattaggcgatctcgttg

SEQ ID NO: 1614 - DNA, 771 bp, Zea Mays
cattttttaacggatctgacggcttctgatgattaccgacagtttggcccttttttccgcttctctttcctatattttttcctccccttcccactgtcactgatgcagcgaagcttggtatagcatgacctgaattcagcttgtgtagacgaggagccaagtttcttcttcttttcctttgctccaaacagatcgctaattgtgttcgtgttttgttctggtagggccgaaagttgctggattctgcatatgcaatcccgtgatgaattcttaacttcgagaacctcagtttcagttcagcgatagaaaatagacactttcgatttcggtgttctagctgattcttcgagccacaggaactttcttttctttattgttcgtttcactttagtctgttttctgttttacttggctgtacatgttgttatcctttcttttgggttgcaactcgttcgagttgttggcatgtcaatgaattgttgagaagaagactaccgttcccggcctgatgcctgtatctgcctatctggtttcgtgcttagggtccacctgcagcttggaaatgttggaatcttgtgtctgaaaccttgacccaaaagaaaaggacagatgctgagactgagggcttgatgcttcaaatagaattgacttgatgaaatttatcatgttattaggttccaccttccagtagttggaaattctttaatgttactgatctagaaccgtgctctctttaccacttcccaggtgtggtgttgtgcagaagtttga

SEQ ID NO: 1615 - DNA, 684 bp, Zea Mays
acaatatccagcccccagcgttgaagtggccatgtgtgggcaatcagctttgtgaattgcgaagggttgcccgaacggggagaaaacttctggcaggcttcgcacgacctcatgacttgattcgcgacgcagattatagcgagccagtagaacccttgacgaatcaccttggtagcgagggccctaggccccgagtgagagccacaagttccgctgtggacttcgcgcaggatctggatgccttcggtttcagtgacgcatttaagcatgggttgactgacccccttcttgtatagctggccctcaatgattgcgaagtcccggctttgatgcttgaggcgcttggcctcattgacatcgcttggatgataatatccttgcaggaacagggttattggggcccgccaatcttcggtcatgatgaggttgactatgcgatggccctcgatgtcattggttatttgtagaccctatggactgcggacggctggcgtgccgatgacgtggtagaacacgtcggagggcaaggcttcgcctctagcagctgctttggccattgtgtcggcctcctcgttcctggctcggtccacatgctgcaaggtaaagcccttaaattgtctctcaagactgcgaacagccgtgagatactgcatgagtgtggggtcttttgctgaatattctttt

SEQ ID NO: 1616 - DNA, 421 bp, Zea Mays
tcccccccgaaccggtacgagatcccggccataggatcctaatcttacggtcatgattttatgagatgagatccaacaggatccgtctattaacagatcagtggcccagatcgttcacgcgaaagggtacgccaagctctaatccctaccatccatcgggaatcgacggtcacaaggttctctccctccacgacagtcgaccatggcggcatcgccgacccacgacagaggggtagttggatccacgccaatcgatggtgcaagacactagtccctattctgaaggtggctacatgatttagagaatacggcgaatgcgtggtatgaaatcttaccagagattacattggtgggacaactcggcgacgacaacggcggacccggccgcaccgagccaacaccggtaagaaattgcgcgtcc

SEQ ID NO: 1617 - DNA, 442 bp, Zea Mays
gggaaatatacctttaaaaaggggttcacccttcgagtagcagccatgtcttgcttctctcccactcgcggtgccctttcatcttcgagctctctgtgcccctttgccttcaaggtttctgctttgcgttgccgtagtttgccatggccttgtgactttatccccagcacacccaaactgagtgagtgctcgaaatggtataccacctgcttggatggaatgcaccggtatttgccgggaggacttgtgctggggtctctcctttcggcaacctttccgccgaagagtttgtgttctttgtttccaaactcccagcgggtcggtcccgtcgatcccatctttcttcgtgcagctgttggaggggcctggcccccgggctctacccgtggtgtcctgtttcattcttcaggcgaccatcatcgcctacctccgcgggatgtcc

SEQ ID NO: 1618 - DNA, 288 bp, Zea Mays
gaagaattttgtttctagactggtggatggctactatacccttacaagccatgatgaaaaggctgcttgtgtcgatcccttctacaccaacctcattggaaaaagtgttgatcgagatagggtgattgatctcgaagccctggggatgcctacttttgagctgtctgagcttgatgcccccttttctgagcaagaagtggaggatatcattaaaagcctccctgctgacaaggcccctgggcctgatggttttactggtcgtttttacaaggtatgctggcctattat

SEQ ID NO: 1619 - DNA, 506 bp, Zea Mays
agcactagattccaatgtgtcagagatagagctccttctgggacagaggcaccctgcaatcgcagctgaccagccatctcgtcaaccaatgcctgacattaaaaacagatgagtataagaacagtagtctacctggagtatagtcagaccagaagaaaccaaattacctgaaggttggagaaaaacgaaggaacccccaaatcatgggaagtcagttgatagctcgatgaaggatcaccaaccggagcaatccgcaatgcatcagtggggaccaattcagcgtcatcagcagaaatcaaaactctatcatcaagagcgccggcctctaaggcgacttcctgacccgaagctcgtgctgctgccatgcaaccagaatgcggacgagaaaaccctacatgaacatccatggaagtatgagagggagaacccactcggataccctcgggggctgggtcatagctcgcgctacccatctgagccggatcatctccggcaacaccctcgag

SEQ ID NO: 1620 - DNA, 1004 bp, Zea Mays
gctgctgacgctctttctcggatgccggcagaagggcaagccatgcatatttctcaaggtactccaatgtggattcaagaaattgtcgccagctacagcgacgatccacaggcacaggacctgttgaccaaactggtcgtctccccggatgctgctgccccatacactctatctcagggagtcattcgacacaaaggacgagtgtggctggggagttcggaggctatacaacgccaagtcatttcggcccttcatgattcacctattggcggacactctggttttccagtaacctacagccgcattaagcaactgttctattggaagggaatgaaacaggcagtgcgtgtgtatgttcagtcgtgcagcacttgtcaacaggccaaaccggatcgatctcgttatccaggtctgctcgcacctctcccagtgcctccccatgcttggcactccatctccatggactttattgagggccttccgaagtctggtgtcgtggattgtattctggtggtggtggatcgtttttccaagtatggacattttctggccttatctcacccctttacagcacctaaggtagccaaactattcttggatcaggtgtatcgactacatggtatgcccgacaatattgtttcagaccgtgatcgtgtcttcaccagcgccttctggcaacaattgtttgcactgtctggcacacaactttgcatgagttcttcgtatcatccacaatcggatggacagacggaacgggtgaatcaatgcattgagccataccttcggtgtttcgttcatgcatgcccaagcaaatggagccaatggcttcctgtagctgaattctggtacaacacaaattctcattcctctctagatcgctccccatttgaggtgttatatgggcaccatcctaaacattttgggctgcatcacaattcggcaattctggtcaccgatctggaacagtggatgcaagaaagggaagtggtttccaaacttataca

SEQ ID NO: 1621 - DNA, 401 bp, Zea Mays
atctcggtgaggacaccgctgtggggaatgatttccaccgcactcggttgtcaggggtagatgatgaaatctgggccatgggatctacggtcgatggcggggatggaatctggggagtgatggtcccctagggcgtgagatggtgatcggaaggatccagggagatctcggcttcattaaatccttacccttgatcttagatccaagggtctctgctgcgtaccatttcgatgctaggataacctaacctgggcggtctgtctttgatcggacggcgctagatccccgataccccttcggctacgtagttttgcataagagacctcagagttttatcaaatcaacccgcaatccatagggatgtaacctgagtcaggtgtttcttgcgtagaaacccccgg

SEQ ID NO: 1622 - DNA, 351 bp, Zea Mays
gcgacccaggcggatgctgaggtgagacaggcgcaggcaaggccatcttcaatgtcccagtatcttcaaacgacaaaacatcgtctggggtcatctctggcggcccaactcgaggtcggggcgagacatgcccagaagacacgatctcaagcttcccatctcgaatgtggggcgagacatccccagtcatcgtcgtgttcaggagcccaggtaggcagtggggcgagaccagcgctggaagcctcatctctagcgtcgggcaaggctggggcgagacaggccttgggagccatgtctcaagcggcccagttgtccgaagcggcgagaccgagtcattccaggccatctcag

SEQ ID NO: 1623 - DNA, 372 bp, Zea Mays
gcgtaggactgtgagtggggtccgatccaccgcccctagctctggtgccacgtcaccgtcgcgttccgggtcatggccaccaattatgccacacagtctgtgtctgcggccaggaactcgatggcggcacgtgtggcgcttgaaccgaatggagaatactccacagtttgccgtccatatcaaatgccttaatccatattcatgaaccaagatgacatatgtaaaagcattgcaaatacttgaattcaagacgggaactcagaagcactgaagcacacacaagcgctgcagcagaattggccagcaccggagatcccagaggacatgcacgcgcgcggggcccacactgacagccggccatttcgatttccc

SEQ ID NO: 1624 - DNA, 311 bp, Zea Mays
tgatcaagttaggattgtggaacttgaagtgaagtctacgagaaggaaaccctttagaagctatggaagatgccccattctctgtcttatccccgccccgcaagaagtttcgttatagatctcttggatctattaccattcttcttggttaggttgataggatagttctatagtgctaagtttttgactagatcgataaggacgatgttatattgtagttgttttctaatccataatattgttatataacccttgatttcttctactcttgttttcttgccattgtattgtcatccttggacaatatctac

SEQ ID NO: 1625 - DNA, 567 bp, Zea Mays
gccgaaactctatgtcgtgagctccaagctcgcatgcccacttggctatccttccaatagcttctttgttgtggataatatcccctatcaaaaatcctatgactactatgactttgtggtcgtcaaagtagtgccggagcttgcgagcggttaaaagtacagtgtataacagcttctggacttgaggataccttatctttgagggcccacggatttcgctgatgaagtaaactagatgttgcaccgggtatgcatgtccttcctccgcccgctcgactactaacgcagtgctcactacatgagtcgtgcagaagatatataggagcagatcttctgctggctgaccaggcgtagcccggcgcgacggctttagtactggtggtgtgatcaagaacttcttcagtgcctctaaagcttcctgtacctctgtggtccactgaaacttgtccaccttcttgagcagtttgtaaaatggcatccctttctctcctagcctcgatatgaacctgctcagggctgccatgcatccagtaagcctttgcacctttttctgcgaccgcgacgctt

SEQ ID NO: 1626 - DNA, 327 bp, Zea Mays
tgagccggatgtcccagacattcgttctaaatctatcttagacaacactaactcatgcaagaattgtggaaagtcaggacactctactcaagactgtcgtttccctaaatcagtggctaagccgcagtcgctgatcaggttacctcggtgtaactgacaagatactagaaagaggagcagagttgtacctaggtggggacaggttaatcttactcatgcccatgctattccggagggtgctccagttatgatgagtgtatttcctattgccaaccatcctgcggtgactctattcgattcaggcgcatcccataccttcatcaaccg

SEQ ID NO: 1627 - DNA, 781 bp, Zea Mays
tcgatttcgagtaggatccattgagtgtttggttatggtttctatatcaaaagcaaagttggtttgtaggagatcaacttttctacagacggattagtgagttgccacctaaaaatttgataataaagccctgcaagttgctctatcaggcactctaatggtgttcgtgatggtacagtagctgaacaagatcagattcaatgaacctcgccgtcggcgatctctgcgctgcaatctgtgctgtccgccacgattcatgctcagcttgggcatgatattactgcgggcgtgaaaagatcggagggcgagtggattgagccggcttcaccgtacccacttgcgccggcgacatggctgcgcgaccaccgccattgtgccaccatttgtcgcggttatgacacgcctgcggttgattcatctcgttgtcgtaggccgtaaagactcagcagtgaccgccgtagaccgtaaaccagtgagcgccacgttagcacctccggtgacttttccccctttctccctgcgagcgcttccccatccaaattcgcgctcctcgcggccgttctttataaattgatgcctcgacctgttccatctacttgttatgaacccagtgaaccactcctcgcgcccgatcgtccaccgtagcgccctaattcgggatttccccaaatccgttcttcgcaccgccgtgagcaccacctccatcgacccactgtcctgtccctccacccaccttcctagctgccgttcttgagccctggaacattgtaaaagcttatca

SEQ ID NO: 1628 - DNA, 536 bp, Zea Mays
gcatgaactctctagcggcaagctcatcggagtggatgacaccggcgcaaatccttccaccgaggaccggtgcattccatccaagcaggcggtataccatttcgagcactcactcagtctaggagcgctcgggatgaagtcacaaggccatggcaaactacagcaacacgaagcagagaccttgaaggcaaaggggcgcagagagctcagaggcgaaaggacgccgcgagtgggagagaagcaaggtatggcttctactcgagggatgaacccctctttaaaggcagactcccctgctcccgcctcgaagcgtcgcgagaagcctcccccgatgcacaccggggtatccatcccatgacacgggggcccggtcccacaggtcatatagctggcgcactggccttcgagtgcgaagaaggcgaaccgccgcacaggaagcgtcctaccgccccgcggtgatacgcctccttcatcttcgcctacgaccaacggtcaagaaggcaaaccgccgcacaaggagcatgctaccgccccac

SEQ ID NO: 1629 - DNA, 441 bp, Zea Mays
ctttgggcagcaaccacttgatcgatttcaacagatggaggattgggaggattcatttctgcttgctattgtctgatgatcttttcttcctggtatttaccatcgaagttagaatcatatgacaaaatagttttgcaagggaaattattcgataagcggaatgaatgagctagtatctggttatgatctgaagattcttagtagggcttaatctttgttttatatcaagattgtgataactagtcgtataaggtgaatgtccaaaggtacgatagaatctatcaaaatgagagatatatatgggtgagatagactacaagatgtaggttaaaagtttgtttgttgttaggtgggaatagaaaggttataccattcatcatggctctatgggttgggttagctcatggttgagttgatccaatgtgctaagttaagttaata

SEQ ID NO: 1630 - DNA, 1200 bp, Zea Mays
gttgctagaagtccaaataagtgttgctgagcataataccaacgcataattatgtgttgcctatattgccgttgctaggtactattgcaacgtttacatatacgttggtaagccataactataagcgttgctatgctgcaacggatatttagtccctactccaacggttacatgcgtttgtactggcaatgacgagtaggttaaggcaacattttgattggatttatggtaacacatatatgtgttgcaaggtggttgaagcatatagcaatggtaacatttgtaatggatttgtggcagcacatacatgtgttgcaaagaattaatcgtttattaataaaaatgattatacaacaacatttgccaatagtaaacgagaaataattttgataatcacaggcataaacatgacaataatggacaaataattttgcatttaaataaaataatagtcacgattcagcgtaggagaacttaaaataatcaccgcttgatgcgtgttcaagtatttttgggacaaagatataaacaacatatgactcatatcctaaacaaatctgaaattcatggtagtgaaataagcaaaactatttaaatggaggtagtgatccacgccatctggtttgaaataagtagtctttggattctgtagaaatcttgcagcttcgaaactgaaaagaaaataatataagtaagtgatcaacaacattaatgtttcatgatgttctatattgtacccgtgcataaatttaaatggaggtagccaattatacacaagaatcaagttaacaacaatatcattgttgttggacatccctgcgagatcaattgcccctgacgaaacaacctaagaactggatgtgctactgaatgtgtatagtctagaacaatactgtactcaactccaaaccactccctctccccaaaaccgatatgcactgaattgcatgtcttggtgatgcatggataattgatgttccttctcctcctgttcctcctcttactccacctattcccacatcttgggggacaaaggcagcttcagatcttcctgagtcaaaacatgcaacttaggagccaataccttgctacatttcaatgcatgtcctggttcatacttctcccaaaagcaaaacacaagccatgcactctttcagttctctccttactgcatcccctattctctgccactcctcttac

SEQ ID NO: 1631 - DNA, 846 bp, Zea Mays
tttctcagtatctactcgaacccactagaacgagtgaggaccatcatctaacatcgtgccagagaagaaaaggcggatgaaaaaagaacagagtagtgctacgccggcttgagcatatcgtcgagcaccatctgcgtgtcatcctcggcatcgcctgcattgcctgctacacgagagctgattcaaacttcggctgccacacgagttcgaggatggagcaggggatggaaggtccagcatgacctcaatggcgagcggtggtgcctgcatggccttggccatccccggcggcgctgcgcctgcgagcagggaagagcagcatgacgagcgcgttccataccgccttgagctcgtgttcggcaactcggcgaagtgcacggtcgcagaggagacggccgacgaatgacagtcggtcgtctttcctcctccacgacacgcagccacgtgctccttctcccaggcatcggtcgtctttcctcctccatggcgcgagctgacttgctagatggctgtcgcgatgtgtgtgggcgccagatgacttgcgacgacgctggcctgcacggtgatgggggatagcatggtcgaggtgctctgtgctgccgcagtctccaacgaaagctccgaaggccatggcgtggtggtggctggctgtgcgtcacagtgtgttgcaactcctccttggacgatgcgaaggacagatagcggatgaacaacgattctccacctttagcggctgtcagggggctcctctaaattagcgaacctcttagcggacgttgttggagcggatagcgcatgtaccgaacgctaaatttagcgtacagatcggtttaccggatattgttg

SEQ ID NO: 1632 - DNA, 989 bp, Zea Mays
cgcgacgtgcggcgggggaagaccaggcttcaagcctttgtattcgcacatatataaagtgactaaacacccgaaaaactgcggcggttgcacaggcaaatatcatcgtctccattccaaattctatgagtgtctgcgttccagggaggtgtcttacctcgccgtggtgaccgcgcccagaaatcgtccacgacctcgacgccgctgttcgccgggcctcagatccaacaactggtatcagagccggttgatgttctacggtgggtcgatcaatccaccgcgagaaccatcgaagaagaagcgcgtgattccccgacaatcatcactgacgccggaagagatggtggacatgcgggcaagttcaagtttggcatcttctgggatcaaggaaagcactctggtatggccaatgcttactcgatccaattatgcggagtgggcgatgttgatgcaaattaactatgaggcaatggagatttgggaggtgatagatccgggcacaaatccaaaacgtgctcaagatcggcaggccatgggtgcgctgttgagatcagtacctaatgagatgtggggtacccttggtgctaagaaaactgctaaggaagcctgggaggcagtcatgaccatgagaattggtgctgatcgagtgaaggaggtgaatgtgcagaagttgctgaaggagtttgagaacatagaattcaaagaaggtgaaactgttgaagactttggcatgagaatcaccaatctagtggtaaacatcaagtcactgggtgaaacagtggaagacactagagtggtgaagaagtttctgcgtgtggtcccacctcgcttcaaccaagttgcagtttctattgagatgttttgtgacatgaagactctcacagttgaaaatttagtggggcgccttcgtgctgcagaagatcggttggaagacaaaatggagcaagtcactgataagactggtcgtttgttacttgctgaagatgagt

SEQ ID NO: 1633 - DNA, 917 bp, Zea Mays
ataagtgtccatgtgaacagtgaaagcctataaccaaatagtaaaaggtggggaagcactctctagtctcaaaaaagggagagtaaaagatcagtaaaaccaaacgcacttgagaaatcatagctcaactgttaaacagcagtagacaacaagcagcccttctttaggaaaggcaaagggccaagactctgacactatgtttcgagattaataggagtgggataaggtaataggcaagagcctctgcttgaacagatttgccaattgcggtggtccaaaactgtcggtttaatggtgaagaatgagtgaactggtctggttcttactttttagtgtatacgtggggcactggggcatgattattattggggtggttcaaaactgcgtgaaccaaaaagttgggtgacgatatgttaagtgcacttagaaagaagttgggtgaaccaaaaactgcatacttattacgtcttattctctcaatcgatctgtagcctcaaaaagtttagccaagctcaaacgctacaatacggcgaaatgtggaaaccatttgagctcccccccaacgcttcgtttgtttgacactgatgggtgattctgctcgctgctcagggccgcccagccgctaggagctagtatttcatcctcgccattcttcttgcagcagacgcacgtccacagctcgcagtgtccgtgggtgtagcccttcccctcgacgcccaggcactcgtcgacgcatctcttgttcttcacgcagtagttgtcccacagccggaagcatttccactgcgacttggtgtctccggggtccacgtctccctccagcagtggcgacagctctcttgctgcgtgacatggaaacgaatcgatcgagctcgtaaaaaccaatcagttcaaccatgcgtttcatttcacttttt

SEQ ID NO: 1634 - DNA, 700 bp, Zea Mays
acagtttaccgccggaacgttcatcggttcacgctaagtccgctacactgcaagcggatgacagaggacaccgccagatcaaggggtggtgcagccggccctcttcccttgatgtgcgtgcacggtggtgtttggtagtggatgaaaaattggtaatggatgataaataggtatgaaaaatgatattttatggaggtagttggatatagggagagaatttaggaggaaccgctgcagagagtgaaaacataggaggagaccggttgctgacgtggcgggatagtgggatatagggggtgaaatatagatggaaccattgaacacagtctgatagctcgtcgcctagttggtctcatagctcggagctatgtactgtggttacagtgacacagggagttcataggaggagcctgctggctggtcaatggacggcaatggccccccaacaaccgtgtgcagaatgcaaagacgtcttgcacaaaccggcgccttcccttttataagcttaaatatactccaacgattattcgatcaacgtagtcagccacctcggttggtgaaacagaagcaggcaccagaagtgacgaaactcacaaaagccgtcgccagaaactgtaaatgacacttcagattgaaatttgagataagaatatatgatacgagacatcgtcgcttcctcacattcacccttgcctttccg

SEQ ID NO: 1635 - DNA, 386 bp, Zea Mays
tgaagctttgcgatctggagttttagttctgctaattcggtgggagccatgcggtatgttctctttgcgatgggcgcagtgccgggaattagatctatgtagaactccacttctctttctggcggcattcctgacaattcttctaggaatacatccatgaattcttctactacagatatgctttctgctgctagattaaacaccattggatccttggcgggtggctgagcctgacatgaaactgactttccttggtggtcagtgagaagaacggtcttatttgcgcaacttatgatgcccctgtgtttggttaaccaatccattcctaacatcacatcaatcccttgggatggcaagacggctaagtccgccaagaacactacccc

SEQ ID NO: 1636 - DNA, 462 bp, Zea Mays
attcaatgctcgtagtaggggttacaagtgggcgggagatggaggagactcccaagtctcctatgcgtggagtggcctaaggactacgaatatggtgctctcaacctagctaagccttgggcgtcgtggcgatgtgctccttggcttcggcctccgtagtcctctggcgtgtggtcgtctatctgtcttctgtcgtgcgtctctatgtctgcgtatgcctcttcgttccggttctccgccgaccctcccccttttataggacaaggtgggagccggttttcgatagtttctcaaggaaggagctactgcgctatggtaaacgaggtgttctaccttggtagaatcgtgtttgtcggcatgtgcatcggtcgtctgggcttctctggccgtgttgtttaagattggctgcttgggcggcaaagagctctggcaccatcattaccgtctctacgccacgccgac

SEQ ID NO: 1637 - DNA, 379 bp, Zea Mays
gggccgaccaattacctgaagtggtatgggccctaaacacgacagagtgccgggcaaccggattcacacctttccgcctcttgtatggatctgaggccatgacaccgcaagaattaaaacacgggtcccctcaaaaaaacaaatcagtcgtccccgatgtcgacgaaccaacttccaaagacctcatcgatggagaccgcgtctttgccatgcacaaaccctcgacaaatatcaggttcaaaccaaggcctggcacgacaaagcagtcatcccaagggaattcaacgaaggggaccttgtactcacaagaaccacccggacagattcacggggcaagctacagccgaagtgggacggtccattcatagtcaagacaaag

SEQ ID NO: 1638 - DNA, 910 bp, Zea Mays
cccgaatcgcctgtgctctccgctgtggatgcgcccacgaccgcgcatttcccgcccacacccccacgcgcccgagccttttctagagcccgcccacactcactcgccctcccctgcttagttgtgccctcagccgagcaccctcgccatctctctcgctctgcgcgtgaacccagggagcttcgccgccgttcgcactagtctcgcacccgttctgcggtcgtcttcgaaccctcgccgtgtctgttgcctcggtgagctttgcctcgtcacccgcgacccaggacaccccttggttcacccctccccctttgtttctctcagtccacactcaccggttctctctctgccccgccaccgtcgacccgtgaccttgtcgtgccccaaccaccgttcgtgagtcctcgagccttccctcaagttaaccgatctaaccccgcccctaatttcccctggtctacccttagttgtgcgtgattgctcgctggagtattccccggtcctccgaggactctccctctgttgtctgaccgcctcagccccattcaggcaacccctgacctcgccataatacgtgtcaagtcatccccaacctctccggctacccagaccaacccctagcgccctaggagctccggtatgcctcgcctccgacgacggcgccgccatgtccacggagtgctccaccctggatgaccggagaaggtaaagcccgtggcgcccatcctaaccacccaattctgatctaacgacccgacttcaattaaaccagatctaatcctaaccgtccgattcgaatatgatcgctcggattcgccccctcacccgcaccctgcaattgggcccagccggccagtccgcctcgcacttgggtcgctgacatccttggcccattggtcagcccgctctc

SEQ ID NO: 1639 - DNA, 307 bp, Zea Mays
atgcgcacctgttgtaacatgagttgacggtccttcaaatactgttgaagatccggaatggtacactgagcagtcgatatcaggcccaattgtgatggtgagtgaccatatagaaccagaaaaggagatttgcccaatgaagaatggtagcaggtgttataccaaaactccgcgagaggcaaccacattggccattgtcgtggacacgactgaacaaagcaacggagatacgtttcaagacactgattcaccctctccgtctgtccatcagactggggatgataggaactgctaaggcataactgag

SEQ ID NO: 1640 - DNA, 425 bp, Zea Mays
cttcactccaaattcataaaaggcatgctcggttcctttaaattgggtgcttccctcgctccgcacttctgttacgaacgcaacccaccctcaaccaacccctctcatgcaccgtagcccccagtcaccagaattcctcgaaaactgtccccaacgccgctgtgagaagcttcgccgtggctagcattccttgggttagttcatggccctctagctcatgttttggtatatctctggcccctaggttcttacgaaattgggcgtttgaactctaccacagtacaattctgagaacgccatctcgtcactgcagaacacaactgcagaccgcctcgaccagcttttccatgccttctctatccaagttcgtgtgagcaccataacattggtgagctgctggtcctttccaagccgattgattaaag

SEQ ID NO: 1641 - DNA, 601 bp, Zea Mays
cgacaggtttattctcaataaagccaggggctcatttgtgaaacggccgggtcaaaggggtatcagacgatcctagccatccgatctgttatcaacgatccagattataactcgagccccgtgaaccggtacaggcctacagccgttggattatcaatctacgccccagattttatgaagcccggaccattcacacatgttcgatctgaaccgaacgacctatgttacatctacccaacccggtatccggatttgatcccgaccaccagatcatgatcaaacgacacatatttggttacctgtagatctaatccagaccgttcgacgtggatctaacggcccccacacatcatcactcctacgaccgaggggagcggcggcgcgcccccaacgacgacggagccattgctagagtacgcctagttctgggttctagccgccgatgtgggacacgactaggcggaaaagggaccggagaacctaacgaactcgatagagagcaccatacctggatggatgcgctgaccgacctacccacggtgacctgcgatccacggcggaaggattgctccggcgagcaattgctgagagtccgaccgcc

SEQ ID NO: 1642 - DNA, 389 bp, Zea Mays
gcagggttttcctcagtatctggccgcgcctactcctgcaccgtctactcctatgccgtctcagtttggagctccgcgtctgcctcacccggcggctcagtggggttcttctgttaatttcactctgggagcttcctcttctgcgggtatttctggagcttatgtgctacccgctgtggatggtagagagcaaggagacgtggtaacaggtacgatttcagttgattcatttgcggcccatgctctttttgactctggcgctagctattcgtttgtttcggaggattttgtgtcgcgggctggtctttcggtgcagaggttgggtcacccaattttggttagttctgctaatggctccattagtagctgttcagtttgtcaggggtgtt

SEQ ID NO: 1643 - DNA, 386 bp, Zea Mays
gacacgacggtcggtctggccagcgaccagattcatgccacactagatattttcaccccgccctgacgttatctactcttcccgtggcacgaatctcccagacgggcacgaattgtggcggcagatcaccgacgtcgaactcacggcaccagagatctttacggtcactgtaccatcgcgatcttcatcagacattctgacagcgcaatttggagagcttcgttctctctttttcatggagcaactcggccacttgtctgcatcaatattgacttccagagaacaaactacaaatttcagttactcactcaattcctcacaatttgatctccaagttcttccaagttcactggtggccataattcagtcttctgactcgactgaca

SEQ ID NO: 1644 - DNA, 1326 bp, Zea Mays
cctgccgacgaaaataggctattttcgtcggtttaggcttattttcgtgggtttttggcccatgaaaatttaggcgtttcctgtagtcagtttgtttagttcacttgtgacatgatctgttgctcctgtgtcggtgtaccagttggtgtcgacattgtaggcgttcatggcgatggcagcattgacgtggcgctcttctgggacgtagttttcatcgaaccgatgccagcaccgggacgccctgtggcctgtcttgaagcagatctgacagagcagtaggtcatcagacccactcgctgcatcagatcgttgtggccgccctccattgcgttgcttcggtgggccgtttcctcggccacgcacctggacgcgtccacgctgaccacggccacgggaattgcccgagccacggctgccattgccacgaccacgattcaccatgcgggcatatgagccaccatcttgcagctccaatctggtctcgaaactgagcaattgtgaataaagctcaggaatcgagatgggatccaatctagctgtgaccgaggtcacaactggattgtaatcagcatcaaggccattgcagatatgcgccaccagttcttcatcatctagggccttgccgacagcagccatttcatctgcaaaacctttcatcttggcaacataatctgtgatcaacatggtacctttcttcgtagtggcgagggcaagcctcacattcattgtcttggcgcgagtctgcgcagagtacattttctccacggccgaccatgcttgtgccgccgtctgggcagcgacgatctgcgcctgaacttccttcccaacgtttgagagaatgagcccgaggatctgttgatcccgagcataccatgtctcaaacgtagggttcggattggtgacggccgtgccgtccgccgccttctcgacgacctcagcatcagggggctcggtcttgctgttgatgtgcccctcgtagcgagcaccgcggatgacggtgaggatctgcgctttccatagcgcatgattggtcttggataacttttcggtcacctggaaaccgaagaagggattgctgacgatgcttgaacccgtcgccatggaacactaggctctgattaccatgtgagaatttcagaggtgcttggaaggtggaaacgccggagacaggcgtgttgcgtgttgattttctgagtggctggaaaagccccagccgtggcttacatagaggatgccaggagatgattgaggagataaaatagaaacaaactatttctttcttttacaattcctaactaccatatctcctggccttttctatttttg

SEQ ID NO: 1645 - DNA, 732 bp, Zea Mays
ttcccggtgatctatcgtagtctagttcaattggccgggccactaagcatctatagcacatagggatgttgaaacgagagcaaggaagacatgaacggacctgtagagagctagccacggtgagctcactcccggtagagttttgactgatttgggggaaatcccaaattggagcactatggtggacgatctaaggcacgggctggtgtgttgggtgcgcgactacctagcggagctgatggcatgctcaatttatagggcccgagggcggtggctcttgaatttagcatggcgcgttggcggcaggagaggaagaaggttactggcgcaaatgattcgtggcccgcaccgtggcgtgacatctggcgatgaacaaacaggttaaggtgattcactgcaacgcggtagagcacctaggaacgtggcacgcgagcggtaggcagccaaccccggtgaggtgatcaggaccggtcgtgaggcaagtgggtacggcggccagggcggaacagtgttccaagctcatccccaatgccggatttttgaccaaggatcgttatccttgttcaaccgagcgtgaatcacgacatcggcgcaaatccgggcgcgagatcaccagcggtgaggggggctgaacctgtgatctgattcagttattgtaccatcgaaaccgttcatcagcgtgcctgacaaagcagattaaaggccttggttctccaattttcgtgtggcaac

SEQ ID NO: 1646 - DNA, 476 bp, Zea Mays
cttggccggatgtaacctttctctgacagctcatcgatctgcttcttgagttcaactaactctggtccagatactctataggctcttttagaaatgggggcggtgccaggaagaagctctatagcaaactcaactttccgctcaggtggcatgcctggtaaatcttccggaaacacatctagaaattatgacacaaccttgataatctcgagtggatctggctctttgctatcaatagccatctgatgacaacttcctttccttggctcaggtgagactaactcggtcaccttttcctctcctagtggggacatcaacttgattgtcctcttatcatagctgataactgcctgatacttatctagccagttcatccctaggatgacatctattccctgagtacccattattatgagattagcgggaaatgttatcccccttatttccacacttacattcaagcaaatgctatcggc

SEQ ID NO: 1647 - DNA, 1281 bp, Zea Mays
agagcagagcagatagccttcgcaggtagcatgacctgcaattaagcgacaaagtgcaccaacagaaacttaggaaaaatcaagtaatcaacccccaacaagcgatccagccagcagctcttggagtccttttgcaccagcagagcaccatagaatgtattcatttgtgagtgtctgcagtaatattgtgatgcttggacttgcaccattaatgatacactcatttctgtgcttccaaatttctcaagccaccaaggtaatgagtgaattaagccaccaatgtttatttggataagttgtgtttcttagtctcaagtgcacaagattaggagagttgttgctggcatatagtgtgcttataagctgaaccgatgtgcttgtgcaaagttaagcaatacacgaaccttccttctatctccattttctgcctctacacttcccattttctcaacatagggtgttgaggtgaacagcctcctctcactcccatctaggatcacgattagctcccacctcttacacatatgaaaaagctaaatacttgtcgtgcttatttgtttcaggagtaaaatgcaccatgggtcctcaaacttggttcgagtgttgtccatgtccctaaacttactaatcatgtcacattaggttcaaatcaccatgacttgaggtaatcaacttgcatagcacattgagttcacgatgacatagcaccaatgtgctcacatgctcgggagggaagagatgggactcgcatataggcccacatgtgtgccatgtcatcatgtagtcagcgtgtcaatattgagatggatcttctagaggcgccccattagtcgaacgaagttgcaggtgaatatccattggtgtcaacaatgcgagcatcggtaagactagcacgatcaagatcttgtatgtacttggactgggagtggtaaaaactgttcggagtctgaagatcctcaattcccaagaaataactaataggacccaaatcagacatatgaaattccttactaaggtgcttctaaacatgagaaatatgctttgaatcatcacccgtcatcagcatgtcatccacatataagagaagtgaagtgtgtctttcagataagtatgaatggataatacatgatcatggtcattagaagaaaaaacaacctcctttatgacaaaaataaatctttcaaactaagcacgaggggcttctttcagaccatataagacatcacgaaggcgacataccctgagggagcatcaacaccaggaggtggatgtagggatgac

SEQ ID NO: 1648 - DNA, 325 bp, Zea Mays
aacagatgttggactgcagataggctggccatgagaggtctgtctcatttagagcgatgtcctctttgtcatcaagctttcgagaccgtcaatcacttgttggtggtttgtgtctttgccaaacaattttggtttgtgttcctcaggctagcgaatctgcaggatctgtctccccaacaagttgatctctcctttgaaacctggtggaggaatagttgttctagagttgcagttcacctcaagaattgtctcaactccatggtcatcttgggcgcttggatcattctgaagcataggaataagtgtgtgtttgataagtgtcgtc

SEQ ID NO: 1649 - DNA, 827 bp, Zea Mays
acggcgaaaactgagaacaattcgacatgttcttggtgatccagggcagtctaattcaattaaacgggtctacgagtagcaggggacttaagggcgtctagaacatcaagtaaagaagctcgaactgacctgcagagggctggccacggcgaggtgtgcacgatggcgcggaaacccaatttgggggaagtttggaattcgcgagctaaagtggctaattgaaggcgagggctggtgcactggacgcgtaacaacctaacggagctcactggggcattgatttatagggtccatcagcggtggcgcccaattactggttagcctccatggctcaaagcgacgtggtaaaacagaccaaggcatggcacgaccgaatgaacggtggcagccatggcgatgaccgtgcggccacgtcgtcgggcaagtgggcacggcgatagggtgaaacagtgccccaagttcatctcatgtgcgatatttcttaccctgtgtagttatctgcactccaccgggcatgaatcatagcgccggcgaggatcgtggcgcgggatcaccgatggcaggatacactgcacctgatcatattcagtcattgtaccatcgaaccgttcatcagagcgcgtgatagagcaacttcagagatgtttttcataaattttcatgtggcaactccctaatccgtctttaacaaagttaatctccaatataccagctccaattctaccataggaacttgggtcatttactcactcgattaggcttaaatcaacttcaaagtctgccagaactcactgttagtccatattcagtctcaggactgactgaca

SEQ ID NO: 1650 - DNA, 298 bp, Zea Mays
aagaatcttcagccaacatatccagcatagcacttatctctgcatcacttggattcaaaggcacctcgaaatgaacctacctctcgtcattagggacttcaccaagtgaggcaaccaaagcactaacctcttcggggagggtcgcactctaaggcccaaaccgctatcaccagcaggaggatttgacacaaaactggtaaaaaccttggaaggaggcagattccaggctgaatatgcaataggagcaccgatgttcgacaccttgcccctgagtatcatctcgagccggctgaccaag

SEQ ID NO: 1651 - DNA, 360 bp, Zea Mays
ttccacccaagctggccgaggctatcgccgccctggtcacctcgaccgctgacaacacccgcttccttcatgaaatggcgggatagcaacttcaacaacaaggcgggagggcttatccgcaaggaccccgcgaaacttcatatttggatttctcggaaacccgtcccccactattcgtcaaagctgaagatcccctcgaagctgacgaatggatttgggttattgagcagaagtttggacacatctgatgcacggagacccagaagccattatttgtggctcagcagttaagaggccctgccagcacctggtggggaaattatgtggccattcagcctgccgggcatcaagacacctggg

SEQ ID NO: 1652 - DNA, 721 bp, Zea Mays
cccggcgcgccggtttctgggtgcagaaaagtcgcaccgccactcgcgccaataccgtgcctcctcgaggccgtcgcagaagactgagaagataaattttcaaaaccaatgcagcgactcgaggcaccccgcgcatggcccaacaaatacattaagtgcggaggtcacgggccagtcagccgcgggggcaggcgtggcagtcagcgtgaccatgggcgggccggcagtaactgcatcaacgagcgcgcaggagcagcgagccaatcgccagtcaaactttggcctcacctgcaggctcgcatgctcccccgaggcgggcccgggggccactgtcggtaccctgaatcaggggtaccccatactatggtatgaaggcgcggtgcccatacggtgttccctagccacacggtgaacagcgctcgaccccaccacgtggaccgctcaagaggcaccatgtggcgaggaaagatgatacatcccaggatgtatcagttgaaccggacctccgcgagggagcaccggacccctgtacgcacaacccggacccccgattacggcccgggactcccaagtaagcatgtcgggtcccttggatggggtccagatccatccaagtaaggtccgggctgcaacgaggtcccgggacaggggaaactctggcgtgagcaagggtccggtactgccacgcgtccggaccttaccctgcgtgcatgcgctcccc

SEQ ID NO: 1653 - DNA, 440 bp, Zea Mays
gttgacttgtcctattggtagaatgacacgatcggttttacatgtcgtcgctcgtgagtaggtgagcaaggtcgctttgttagtcgatcacttgggtcggccttcttttttacatatttagataataattgatcaaatgtagggctagatttgaccagtcgatggatgccttgaacgtgtttgtcttccatgtatctatctatggtcatcaaggtttaaaggtatatggttgtcgttgctcctgggcattgccagaccatctgcttgatctatccggactgtccggtggtgtcacggaccatccgcgtttatgcgccaaaacgtccgcggtgcgcagaactgggggccacgcctgaccgcctgcctgtgcctgccccccagtgttggaggtcgtgatggtgatcttcagggtctcccctccattaggagtcttttctgtc

SEQ ID NO: 1654 - DNA, 514 bp, Zea Mays
gaatttcgagttgactggactgggcctcaataaccagaaaactcaggggccgctcacataaaatttcccaggcacagcgctccactctctggacagcgggttgatatcctttaaccctagggtctctttagcaaaaggtgcaggccgaaggggtatcggagagctctggtcgccagatcaacaacggacggctacgattagaacttatctattatgaaacgttatgcgatggcgtccctcggatcagagactgacgatccagattttaagtagccgaggctctgccggatccgcccgatcgtgatccaagggccaccacagatccgcgcgacattacatccccgattgaatccacaccgcacaacagcgaatccacggttcactctagttcgaccctccatctaatcacggccgtccgaggaacatctaacggtccgagcttgcctccccaagctagctactgacgcggcggcgccgctggcccaaacgacgaagagatggccggactttggcc

SEQ ID NO: 1655 - DNA, 762 bp, Zea Mays
ggttattatgctcgcatggtgtacagttgtacacccagttttcaactcacattttgaggttttcattctgattctggttgagtaattatcccacactttttcatagtttttgacctcagaattaggttgttgaacgcaaacactgtcatattatagttggacactcttttgattgcttcttttgttccttctcatttctaggttagcaagtgtcctagtgaagttctattggtactcctagctagatcaccttagagtttttggatccatgtgctatgttttgcttgcacctcatgagcgggctaagctaactgcttagctgagcagggttttcaagggtatagccccggcacaaggcttatcgtcattgttagccttcttgccgcatttgtatttattgtaatggcacctttgttgaggaccatcctttcttttataactcttctgctctggcctcatcttttacgaagtccacgtctttatgtcttcccctatttcagttagtgataatgtcgctcttccaccatctctcttctatgtccacctactattcttgaagctcctccaccagatggtgttgatcctccatatgttgttcattagtctcccccatgtcggctacctatctcccaagtctatacccattgtccttgagttctcactcctaattcctctgccgtaacttgtaacactcttgatgttgatatttctgttaatattaatgagtcattgctatttctgatgagtcacagagtggtcaaa

SEQ ID NO: 1656 - DNA, 840 bp, Zea Mays
ttatcggtcaaggcatgacaagatgatgcattcgataacacgatacataactgaaactcagggtactaacttaaaagggatgacagaaaaaaaaacagaactgctaaaaaacagaggatgatatccagtgcacacgaagggtttgtgcacatgtagaatcttggtcttcaaaatcagatataacggtgcacgtctattttaaaaacccactctcatccatgactggtttgtttcatagaaaaaaccctgatagcatgcaccgttagatctgattttaaagctcagtatcctatatgtgtacatgtgcaccaagccttcatatgcatcagataccatcccgaaaattggtaaaactataaatgacaccttgtacctaataagagagaaggcaagcaagttatcggcagccaaacaacaaagcaagcattcacaattggatgatcacgtcccactggacagacagattcgttcggtttcggtctactcaaattcctatagaaaacaaacaagtacacacattaggagaacaacttcataaaggtctcaagtcgttgattgttctgggcgcctggactctatgaacttactggaataggtgtgtttgatggtgtgtctcctaacctatctagagccctaatgctcgctggtgaagagctgcaggtttggggtttggccgaggccagagatacttcttatctcctcgcccttcgaccgcggtagatgattgtggggatggtcgtttccttgatgtttcttaatacaatgatgtggaactctcctgcgtgcccggtaaaaaaacaagtacaatcattcaccagaccatacatcggcacatcgcga

SEQ ID NO: 1657 - DNA, 755 bp, Zea Mays
ctttttcttctcgaacggggacactaattttggtatagaaactttagatttctttgatggtcatggatcccttgatggctgtggagaaggtggatccctgaagggccatgtatgtggcggagatggtgggccaccatgaggatgaggagaaggagggtcagaaagaggatgaggagcagcatgtgaagtttgaggaggtgatgatggatgtacaataggaacaacaatttgagaaggcggagacggttgggcctgcgacaacggctgtcgtggtggatcaaccaattcgacatcccttcgaggccaaaggataaaattcttgatagcttgtccaagtgtctcgataccttcaggcccagggatgtctagcatgtcatcctcggatccttggacgactgtcgtcacttctaccctgcaatattcttctggaatgtcgtttccatggaacttgcatcctgggatcgcaaggcctgtggctactttctttgtacgctgattgttaataccatatcttataactagtgtgcatgccacaggccttgtgatgtcatcaattggatagcggaccttatttcccgttgacgcgatagagcttgggatggtcgaacccttggtggaagccggctgttgagctgctggaattatttgcatctatggagtggtcatctgttgaacagacatcgcactcgccaattgctgcatcaattctagaggaggattcgatagcatttcagacatcaggcctttgaactctt

SEQ ID NO: 1658 - DNA, 413 bp, Zea Mays
tggcctgttcccttcgtggcggaggtggtaggagtggttggaatggtcggccattgccgactgagtttttgaagtccttgcaattacgtagggtgtggcgcatctccttgtaatacgggcattgggtgtcgaggatctcatccagtgtctaggtgttgttgcttcatggtgtgccacggggccgagtcaccggaggccctaaagcatgcacttcatctcttggcctcttgtcccaacgcttgtccggatgctggttcccttccatctttagtgcctggggtgtaggcttcgtgtggccgatgaggtcatgggcctgcccatcaacggtgatgtagatgtctacttctctgaagagttgtttcgaggtggttgaagctttctggaggttggctcggacgaagccgattcattgg

SEQ ID NO: 1659 - DNA, 379 bp, Zea Mays
ggaggaggtctcttcaccaaatttaggcactacggccgtctcaatatatcgtggccggtgggtcaaaacctttattttcttgcccttcggcacagcagtggtggccgaagcagcaatttttatctttcttccttgcctccgcaaggggtagcagtaatcagggtatatgaagccaattgcatcgaaaaccctgttcaatcttttcttgccccgaccctcgaaggctgaggataaagcatcatcttcggccctggtatacgccccaagtaactcgtcgctagtagcctcaatacattttagccaatagtcatttggctcgtcaaacctgtctctgtatctgaaggtatatttcaaatgaattaatccaccttcactggac

SEQ ID NO: 1660 - DNA, 638 bp, Zea Mays
ggcgaacagcatgggtacggtcacgaggtgctgcgtgggcgacgaagctccggcggggaactcggatggtgagcacgaactccggcgaggctccacggactctgacgacgacgtgcggatgcggacggtgaggcaacgagcttcacgacggcgattacgtgggtgacgagtggcaacggcacaacaatacgttgtcgcgagttgatcaaggacgtggctttgtgcagtgggcgagcaaggagcacgagagagaaagggagtttgggaggaagagagctcgtgcgtcggtttttatagggagggagagggagagggagagctggggagggggagaaacggcgaccaaagtcttcaaggcaccattgatggcgtgcatcaatggaggggagagtggggatggagtaacggccgagttgacgctccattaactcaaggagacaaacggacgggagctcggtgcgggcacaggctcggggtcgcgcggttgctgcgcagtgctcgggtcgcctggatgcgtggctgcgcgggtgggcgtcggtttgcggctcggcagcgaggttgctctgctcggtctccaggtgaggcggggtcggatcgggtgcgcaggggcgctcggctgctggcgcggtcgactcggg

SEQ ID NO: 1661 - DNA, 910 bp, Zea Mays
ccccttaaaaagaattcgacctcgaattatgacgcttctatcggaacgacaaaaggaaaaaattaatgaatcaacaacacttacccacaacgaaaagttccggatatttctgccgcatcagctcctcaagttcccacgtagcctcgctctcagactgattagtccataagaccttgacatacttaattgatctcttcctcaaaacatgctccgaggattccaagatacgcaccggacgatactccaaagtcagatcctgctgcaccacaattggttccatctcaatctgatggtccggatcccgcaagaacttcctcagcatagagacatgaaaaactgggtgtacccctgccatggaatccggcaattgcaagcgataagccaagctgcccacccgggccaagatagtgaacggtccaatatatctcgggctatggtttccagagacaccgaactgaacaactcctttagtgggtgataccctgagaaggacttggtcacccactacaaattccaaatcccgcctcctcacatcagcataactcttctgacggctctgagcggccaaaatattctaacgaatttcccgaaccttcactgaagtctgctgaacacaatcaggaccatccagggatctctctcccaaggtctcccagcatagaggggagatacaccgcctgccatataaagcctcaaatggtgccatcttgatgctagactggtagctattgttataagcaaactctgccaatgcaagatgatcttcccagctacccttccaagacagtacacaagcacgcaacatatcttccatggtttggatcgttcgctctgactgaccatcagtctgaggatgaaaagcaacactaagggaaagcttggtacccaatgcactgtgaagactctccca

SEQ ID NO: 1662 - DNA, 502 bp, Zea Mays
caatgagtggcggtcggtggcggggcctccccggcgtggcagagttcaatggagcgaggctacaagcttcgggaaggtgcaggggagcctctgggagcttggtttggtgagggggtggctggggcgatctggccatgatggccgagcttcgggtggctctagcaggcgacgtggagttcactggagttttgggcttgtccgagggagtgaggcaaggtgaccatacacttggggagggctttataggcatgctcgggcatggctaggcacaacagcgtggggtgggctatctggcgctcaatgtgtgcacgtgggaacgactagtgcgcaatcatcccctcaggcacagcgtcgagcacgtggcacaacttggtgtagtcactttcaatggcccgctggctccatatctcggcgaatttgggcaagatatttttgtaagatctcttccttggacacccctctatttgtcttgtgtggaggccgaggtgtttcatggtctgtg

SEQ ID NO: 1663 - DNA, 417 bp, Zea Mays
ttcatggcggcgcagagagtggatttgggggaaattccaaattagggcgctatagtggacgattgggcacgaggagtggttcactgggtttgtaacaagtaggcggaacaggccgaggcatcaatttatagaggacggtcatgaggagggcgaatttggacggggaagagtgcgcggtgagaagggggaagagtcaccgaagtttgctaatgtggcgttcactggtttacggtctacggtggtcactatcgagtcttcacggcttgcgacgagtggtgagatgacttaaggcatgtcacaatcgagctagatggcggcacaacgacgacagggcaaaacaatgccccaagttcatccccttcgcgagatttttcaccctacgtagttatctgcactccaccgggcacgaatcgcaac

SEQ ID NO: 1664 - DNA, 616 bp, Zea Mays
cagagatcagggagacgtggtgacaggtacggactcagttgattcgtttgatgcccatgctccttttgactctggcgctcgttttttgtttgtttcgaagaattttgtggtgtgtgctggtctttcggtgcagaagatgggtcacccaattgtggttagttctgctaagggctccattagtagttgttcagtctgcccgggttgttccgtcattcttgttgatgaggtcttttcagctaatctcgtggtgatttccctggggtcatttgatgttatcttgggtatggattggttaactcaatatcgcatagttatatcctatttttggaagacagtgttattgcatgctccgtcgggtagggaggtggtattcttgggaagctctacaaagttcactctctccttgttgtcccaattacttccggatcgtcggtcaaggaagtcgggaatccttttctccatgatggtggagagtgaggctgccttgcgggtgcaggacatccgtgtggtgtgtgattatgccgatatgtttccagcggagctaccagacattccaccggagcgcgatgcgacttttgaaatcaagctaattccgggtatgcaacctattcataag

SEQ ID NO: 1665 - DNA, 917 bp, Zea Mays
ctggcttctagcatttcttcttcagataatttcttccccgaagcatgtcaaataatgtagtcaacatcttcgttcggagcttcgggagcaggagcttcggtcttttctggtacaatctgccctgttgttttatcctcaggcgcggcaggtttccattcggtgggcactgaaggcccagcttcggcttcggcctgaactttcgtagcttcggcaattttcttaggagtagggctcaaggcctttgtagtctctataacagcgtctaatacgctggccatcctcctcctgggagttgcaacaggaatcttttgcatctttgacaaatctgccccttccgatgggctcaggaattccggcgtttttatcactttttccgcctgtggctcttcagccttatcatccctagcttcggctggcccgactataggcacctttggcgctacaatctgctctttagcactctacacaatcgaagcagcttgctttgcttcagcagctgaagaagtaccctcgccaaattcaggcactacggccggttcaatatagcgcggccggtgggtcagaaccttcacctctttgctctttggcacagcagcgatggccgaagtggcagtctttctctttttcccatgcccttgtagcgggtaatggtagtcagggtatacgaagccaatcgcatcaaataccttgttcaatcttttcttgccccgacctccgaaggctgcgaatagagcattatcttcagccttggaatatgtcacaagtagctagtcgctggtagcttcaatacatttcaaccagtcatcatctagctcatcaaacttctccctaaatctgaaggtatatttcaattggactaggccactttcattggtctcggcagtagtctccttcggcatatcccaactctccacaag

SEQ ID NO: 1666 - DNA, 1436 bp, Zea Mays
aaggaggtgtttgttttgcgcattatctccccctgtaagagcagaggggtgtggtccgacatgagggagggtagggagtggatgtagcaggttgggaagaggagctcccaatcgggcgtgcagaagaatctatcaattcttgtcatggttggttcagcctgcccattgctccaggtgaattggcggccattcagacgaagttccttaaggtggatgtcatctatggtggatttgaatgaacccatgaggcgcctatttaggtttagattgttcttgtctgaagcctggtaaatgagattaaaatccccaaggactagccacctctcgtgcccctgggaggcaagggccctcaattcctgaagaaacaggagcttgtctgcatcgggttggggcccgtagaccactgtaatccaccactctgtgtcgtccgctttcatggtgatcatggctgtgatggcgttgtcggaagtagatacgttagagagtgtgaagaagtcttccgacacagcaagcaaaatgccccctctggtttggtttgctggccgagcaacatagttagtaaggaattttgaccctaaagtgtgtgcgatgacatggtggtctaccattgacagctttgtttcttggagacatacgattgtgctacctgtatcacgaacaagatcatgcatagtgtcccttctcgccccttcattgaggcctctcacattccagctcaggatttggcagtggcgttgagtcattcctgtaccagagaaaacccaacagcaactgcaacgcccgtcatacggactggcgtgcaggttctggaactgaaggtaaacatcacaaacacagcgagcgttgacggcatagaagaagtggagcaacccgctggatatattgaagtagggtacatgcagacaacaatggacgactgaagtttgtggccgcccagccggacacgcgaaacacacttgaaggcgcatatgtagacaaagcttgcgaaggtaatccgtagctgtaggcctctggctgctacctcatgccccaacgagctaacaataactaatgtagtgatacaagtggcagatcgcatcccctgaaacaagcagaagtgtgcacactttccacagacaaagcagatgacaataaacatacctaacatggcaaagttgtttcccacaacaacattccacagctcaagatgactgcagtccagcctcattagggtcatccaatccgcatagggcgaccaaagccttggtggctaggtgggtcagcgggccattgaacaggctgaagtagcgcttgagctcctcgtcagttgcccggttctgcctctgattagagcccgactctggtaggattcccagtcgcttcatgagcacttggcgcgcgcggctctgaatgtctccacgcggccaagcgatggccgctagcctcgcgctcttgcg

SEQ ID NO: 1667 - DNA, 728 bp, Zea Mays
ctgaattgggcgcactgttcatcggttttcagtaacatcaccgtggataaggattggctcgccggcgataaggacgtcgccgtggctcgggtaagacgtcggcagccacggcaaaggttaccggcgacgtgtcaaagcctccctgaggtggcagaccccggttgaacggcggccaccgtgccatccccaggttccgccgcgcggcgagctcacctgcgcaatcaaatgtccgcggttctcatccgattccggccggtaggctataaattgaccacggacgctgcttcttctccacatcccgtgccgcagcaactaagcactggactcgagctcaccggaaaaacccacgtaattcccaaactccctcctcctctgttcttgctccgccgcataggactccaccgtggacaacactcttcgggttggtagtttctcaattactctctgttctagctcatgtatagtctcctattgctctctgtaccgagcaattggaatttggccgaagtccatcaccggaacgcgcccttgtcttgtaaaacgccgctgtgacccccgccaccgtcgacctgctcctcagttcttgttctgcccaaaccaaagtgtgtacgtaggccctggtgaacccgtgaacctttacccagcctcaatttggccattcccgtcgctgtttgatcggaacatgttcatcctcttgtccatccgctcggtcaccgtgaactgattga

SEQ ID NO: 1668 - DNA, 366 bp, Zea Mays
cggcaggagggttcgggagctacatgttcgcgatgagtgagaggattagcgagcaatcgggggagacatgggatgcgcacaacatcaagaaccccggtctgggctggatgatcggtttcctcttcatcgtcagcttcctcggcctcttctccgtcgtgcctctcaggaaggtacgaacgcacgcgcacccacaaactctgtgtccgacgtttattcatcacatcatgatatgatgccggccggctgtgttcagataatgatcatcgactacaagctcatctacccgagcggcaccgcgactgcccacctcatcaacagcttccacactccccagggcgccaagcttgccaagtactcataacccgg

SEQ ID NO: 1669 - DNA, 375 bp, Zea Mays
tgcacctaagtgtgcttgcagtagggaatacaagctgagcgggagagggaaggatcccaagtccatgggcttgattgaggcaaggaccaatatcgtggtggaggagaaaaccatgaagtgttctcctgcctccctgaagccgtaggctgccctatttatagcctcaaggagggctgcttggagtaccagagttggccatgtacggtgaggaggcgaagccgagcccctgtagatggtatggcccgaagcatgggtcatgtacttgctgttgacttgtgcccgctcgatttctgctgagagccgaggccagggccgagggttcggtcacgtactcgagcccccctgccaaggaggttgcccatgtcgtagtggttg

SEQ ID NO: 1670 - DNA, 454 bp, Zea Mays
ctggggtgttacagacggcgggttgttttcctaaaaacataagggcttttctgcaaagtgggtaaactgaagcggtctcgacatgttctggccgttggatcttgcgcggacggcgcggattagattgagtcaccagtgaaacggtatgcagcgcagaccgtccaatccgcgatcgacgacgcagatttaattactccggagtcgctctgatccgttcgatcagatctctacagccctgattcccctaccgaaccgataagtataccttctaatctcatcccttgcccatagatctagcggtccagattcttatagcacgaaagggtacgtagcctctaatcctggccgcccaaacaggatccgacggtgcacggttcttcctcaatccgccgaacaggacggtggttccaccccgcgtgcacgacagagttacaccgtggtaattccaatctcc

SEQ ID NO: 1671 - DNA, 493 bp, Zea Mays
agaaaagtgaaccaagagaaaaaagatttaccaggtggagcgcgcccgtgaaaagagcatctttcgcatggggagaacttccaccgaaatgacctgagactatcgtcccttgcgtcactcggctggcaccttgggcatgggagtcgccaatgtcgtgtcctctggtccactctcatggcattcgaatgataccactaacacggggagatccaccgctaccaccccctctaatgctcgagcagtggaactagcctcgacgccagcatggtgggacgacccacccaccaacacctgggccacagacccaccagaggccatggaggtcataacctccatatcagtagtgggggttaatactccccaggccccagcgtgggagcgctcagctttcttatttttcttttttcctatcgacacttcttacgcgccgcctggaccgctgcctcctgctccctctttcgcttcttcttcacctttgtggtggcatcctcag

SEQ ID NO: 1672 - DNA, 1032 bp, Zea Mays
cggtgtatgaggatgcagatatttacctctttgatgatcctttcagtgcagtagatgcccatactggaagccagcttttcaaggtctgttcaaatgcacaaattacttcaactttttactagtaatgtgataatttgactgtctgaggctcattgctgattcagaagagaaagtaattggttcatatcctaatcaaacaaaataatttcattctacaggattgtgtaatgggaattcttaaagataaaacagtgttgtatgtgacccaccaagtcgaattccttcctgccgcagaccttatactggtaagtatcaaaaaatacttttggtttaacccatcgtatctatattccaaagatcaaaattgccaagtaactaaccgtttgaattcaaattaacaggtgatgcaagatggtaaaatcgtgcagaaagggaaattcaatgaacttcttcaacaaaacatagggtttgaagctatagcaggtgcgcatagccaggctcttgaatctgttataaatgttgagtgttccagcagaataccgccagacaacaaaaaatcagcagacagtgaggatgagttcgatacggaaaatgaaatagatgaccaacttcagggcataacaaaacaagagtctacacatgatgtctcacaagacatcagtgacaaggggaggttaacacaagaagaagaacgggaaaagggaggcattggcaagaaggtttattggacctacctgagggcagttcatggtggagccttagtgccagtaacaatagctgcacaatcgttctttcaaatatttcaggtagccagcaactattggatggcatgggcatcacctcctacaactgcaaccactccaaccgttggattaggcctcctcttctctgtatacatagcactatctatgggaagtgccctgtgtgttttgtctcggtccttgcttgtgtcactaattggtctactaacatcagaaaagttcttcaaggacatgctccactgcatcctgcatgccccaatgtccttctttg

SEQ ID NO: 1673 - DNA, 785 bp, Zea Mays
ggctgtcgtggataaaccgacctcgatggttggggtactcgcgccttcccctgcggctgccgagcacacatccgccggatctcctaccaactcgccccatgggcatcacgtcgaacttcattcctgggaggatgagtttgggtcggtcaccacccttattcatcccccggtcaagggtatgtgccagtccttgccttcggttctcccaattcctcgaattgagtcgaaaccaattgagatgtctagtgcacgtttggaacaagcgcttgcgggtggttttggcagggctgttcggggtcgtttgcctcaattgaattttccatcatttgacggggaaaatcctaaattatggatccgtcgggcgcatgattattttgatatgtatagcgtcgaaccccatttatggatcaaggtggcttcgatgcacctgttgggagctgcgggtcgttggttttcttccttggatgataggggtcaggatctgccatggtctgaattttgtcaaactttgctagaacgatttggaaaagatgagtatgaacttttcattcgtaaactattcaatgttaggcagctcaacacggtatctgattatgtggagcagtttacgtccattgttgataatcttcgtgcatatggtcagcttatggaccccatgtactttgtgcaacgctttgtggacgggttacgtgaggatattcgtgctgctgtttttgtccaacgacccacttccttggatactgctgccgttctcgcattgttgcaggaggaagttgctggcacca

SEQ ID NO: 1674 - DNA, 438 bp, Zea Mays
ttgagtgccttttctgacgctgattgggctggtaatccagatgatcgtcgtagtactggaggctataccatctttttgggcaataacgtggtttcctggagttcgcgtaagcatctgacagtgtctagatcgagtacggaggcagagtacaaggctgttgccaacactacagctgaacttatctggattcaagtcctacttcgtgaacttggtatatccttgtcgcgacctccttccttatggtgtgataatattggtgccacctacctctcggcgaatcccatttttcatcgccaaacaaaacatgttgaggttgattatcatttcgtccgtgagcgtgtcgcctctcatcaacttcatgtccggataatctcatccaaagatcaaattgctgacattatgaccaagccattgcctggacctgcttttcaggggatt

SEQ ID NO: 1675 - DNA, 902 bp, Zea Mays
tggaattcatacaagacataatattcaggtttgggataccgaacaacatcataaccgacctaggatccaattttactagctcagagttctttgatttctgcgataaaaaatgcatccagatcaaatatgcatcagtggcacacccaagagccaacgggcaggtagaaggagccaacggaatgatactggaagcactcaaaaagaaagtcttctacaagaatgaaaagttcacaggaaagtggatcagagagttgccgtatgtggtctggaggctaagaactcaatccagccgagctttgcatggaaacactccattcttcatggtctatggttcggaggcagtgctacctgctgatctcaagttggggcaccaagattgatcttcgaaaacatagctgaagccgaagctactaggctggaggatgttgatatactagaagaggaacagttgaatacgatgattcagtcagcccggtatcagcaaactctgaggcgctatcatgataaggccatacggcatcgatccttcacattgggagatctcgtcctccgccgaattctaacgggggagggacggcacaaattgtcgccactatgggaagggccattcatagtagcagaagtcactcggcctagatcatatcgtcttactcaaatggacggcacgaaaattgggaactcatggaatatagaacatctcaggaagttttacccctagctagatttcaaaagctattgggacggccttgtattctgtaaattgggaaatacatcatcaataaaaagacttcattctcaaaggcactcaaactatttactgtcaacctgcatgcttactcgactcagggtgaccactataccctactaatggagcaatcgacttaagtcgacgacgacttaag

SEQ ID NO: 1676 - DNA, 862 bp, Zea Mays
ccccaaggacccatatccacttccacgtatagatcagatcgtggactctacctcggggtgcgactttttgtctttcctagatgcctactccggttttcatcaaatccggatgtctagggaggacatgaagcacactgcttttgtaacgatagatgggctgtactgttacgttgtgatgccttatggtctgaaaaacgccctgccaacatttgttcgggcgatgagtaagaccttcggggatctgatccgggacaaggtggaggtttacgtcgatgacatcgtggtcaagactagaagggggtcgaccgtagtggaggatctgaccctggttttcaacaagctgcgggcaacccgcaccaaactgaacccggagaaatgcatcttcggcgtctccgcaggaaaattgctgggtttcctggtttcataccggggcattgaagctaacccagaaaagatcaaggctatcgagataatgaggcctcccgctcgtgtcaaggacatccagaagcttgcgggatctatggctgcccttagccgcttcatttcaaggttggctgagagggcactgcctttcttcaagctcctacggaaatctggcccttttgcctggaccaaagaggcggagcaagccttccaagaattgaagcaacacctaacttccctgccgatcctggtcgctctagagccaggggaaccgttgtaccagtacattgcggcggctgcggaagcagtgagcatggtgttagtcgccgaaagggcgacaccagaagggcagggacctgagaacttagaaccagcgtcgggcgcccggactatccagaagtcgatttattacatcagcgaggtcctccatgaagcaaag

SEQ ID NO: 1677 - DNA, 738 bp, Zea Mays
gcggcaagtgactgaaacatgttccaaaaagaagtacacggtgtgctctattctcttctctactcatctaaagcaccagattctacggtcgtttagcgtcacacatgaaacatataagtttgttctcttccctcgtttctcgcctaacaaacaagataaaataactaattgcatgcgtaagcatgcttgatgcatgcttctctcctcccctgcccgcaactccaccctcctcgagcgtccaaccaaccacccaccatcacaacaaaatcctcctccacttcgcccccaccggtgcgggtcttctccttcccgacctccactccgatgcactcttcgattgcacgtggttagagtccgatgactccctctatgtcgtcgcctttgcggacggtgagatccgggcatggtagctgcaacatggacgggatgtgggagggattgatcgcccgatccccgccatgggcatcgcgactttgggtgcatgccacggggtcgcatggtggatgttcgcatgctacgtagccctgcgttcgggcgctactagaggcggtgcaacgtgtgttcatgttcgaccagaagggcatgttctagattccctccaccagtgtcgagtttcgtcgggccattaacgtcgaaggctactagtgcagacagcagcaaatatgatgggaaatgttagtggcacattggattactcgaaaattggactcatgcacacatgtttaatatcgggataca

SEQ ID NO: 1678 - DNA, 395 bp, Zea Mays
gtttttatcagtttaataaatatttattattatgtgctatcagtttaataaatatttattatatgactgtgcccgcgggtgtacccgtgggtgccataaacccgtgggtagcgggtttgggtaacatacgctacccgtcgcgggtagcgggtgcgggtacgggtttaacattaatctcgcgggtacgggtttgtaatctctgtacccgcgggttttaaacccgttgccatccctaaccccatgttggttggtggagattttaatattttaaggaaagagacggacaaaaataagcctaggggtacaaataaatggagttctttgtttaactctatcattgactttcacaacttgatagagcttgaactgaatggtaggctttatacttggtctaa

SEQ ID NO: 1679 - DNA, 420 bp, Zea Mays
aggataggggtgagagatattcagcgctctcacttgggtcaggtgctggtgcagtttcacagtgttttggagcgtgataaccttgttttgcttggtcctcaacaatacctggatgctactttcactactcttcgtcataatgatgcttggaatcatcaggctctttttttcaatcgtgaatgttggctcatgttattgggtttccctctggactaccgctcttcagagtacctgcaagcagctattggttcgtttggcaggttggttctttgggaggaggatcacaataatgtcaccaggatgttgcttcgtgtccgtgtcacttcccttgaagaagtccctcagttcattgttttttcggaagcggatggtttcattagggattcctagacagtccagtgtgaaatcatccaacaaaac

SEQ ID NO: 1680 - DNA, 460 bp, Zea Mays
tggggggttggggttcttctgaccccgataggaggtctaagctagagtaggcgttgcagggctatctaatgtggttaccaccctggatggttaacctcacccatgagatctgtcggcagatgacgccgtgtatttcgctcgtacctgcatccttcccttacgaaattctatgctggagggtcggcttcatccacaagatggttggttttgacacggacgaggttcagtcgatcccgtgagccaaccgttcttagcttgactggacgaattagctttaggtgtgcccgacccctactttatatcgaagcgaagtgagggtcgggcgcccatggcctgcctcttcctgcttgagtaggctgagtttcgcatgggtttggttcgggcgtgcttcttccttccctccattcatgggccttaaccccctcgggggtcattacccctaacagacaccatgcacttg

SEQ ID NO: 1681 - DNA, 335 bp, Zea Mays
gaggagtgagtcactgcggcgatcaaccatggcgatcgcagggcaaggagctatgacggtcactgggctgtaactacggctcacgatgacacgataaatgtcctaaggcgtggcgcccccatggtgaatggcgaacacgccggtgatggccgctcggccacatcgccggtgcgaacaaatgattaatcgagcacacagtacttccaaactcatccgtggcaagatcttttacccggggattgttatccatgtttatccaagcgtgaatcgcggagttggcatgaatccgcgcgcaagctcgccggtggcgaggtgcactacacccttgattatat

SEQ ID NO: 1682 - DNA, 628 bp, Zea Mays
ctagagttgatcatgctgtcctgcgtggacccaggtatgagcatgcttgcttcaccatactgcctggactactaaccatgtgcatgcacatgcagtctcagtttgcattcccagccttgttttgatgaaatggataagcattcagtcttgattcctgatgaagtgtgcactagaatggcccaagccttgatggtagctttgttagactacattgcaatttttacttgaatgacatgtatgtttaaaggacaatggtgaagataattctaaatgcatgcatatagaagctttctcttcatttggtcatatattcttcaaggcctgaaatattagagagttacatagctaaatgtactacatgctacgtgaaatggtacatttaagtagagtgcaccccaataggctttacattgcacttgcgtaagttttctccttttcaccagcacctaatttaccacaggtggaacaaataggtaatcttcaagatgaaagacaagatcgctacacaatgcacacaatagctcaggctcatgtgtgtgttgcatcccacagtctcatgcgcatgtttacttacagaagttcatgaaaagacacgtgcacttgtaagttgtaaccaccttgaagaagc

SEQ ID NO: 1683 - DNA, 932 bp, Zea Mays
acgaaagacaaagcgactaagaaagaatgatacagagatgaggaaagcgaaggaagacgaagcgactagaagaggaccgagggcggagggagcgagaagcatccaaaggcaaagtgtcagatctcagatggaagtcatggcactctccagaggagatcctcgtctttttttctttgtttactcgccactgatgcagcgacatatatgatttgtaatcgaacgggggacaactttctgatgacgtggatagtctggtcgttgccgttttgaaccagctttaataataaagaaataataaatcaatcaataataatgtgaccggctacgtacctgctttgcaattttcaagttctagggttgcagttgaacattggattatattcgatgtggcgatgaactgaactgataaaagggcagcactggccataataagacttctcaagttttaggattgctgttgcagattcgattcgatgtggcgataaactgaactggtacaaggagcacgcggcgcataaatctaggcagacgatgtttccgttccaaccttctagctagtcggagctaacctgtgcaacattccacaatacgcatttgtgcacgcagactgcatgtacttgggaggtctgattagtgacgatgcatccaccaatttcacctgagtgaggtaacccacggccggccccggtccaccaatttcacgtagacgtagtacatgccaatgtcgtactgctgctgctacggtgctagtatatatcccattagaagatcagttcatcaaatgctcgtacaaatcgcgctcacacggaggaccaaagcacgaactgtatgtgtacgtgcgtgcgccgaacttcatgcatgtgcacgcagcttgtctctactgtcgctggcacatacaccacagacactgtatagtctctgaccctgtagcc

SEQ ID NO: 1684 - DNA, 939 bp, Zea Mays
cgagcggcttctgccgccagggcgtgcaacttctcgacagctacaagagcagcgaggcggttgccccgcacggtgagtaccccagcaggggatgacatcttgaggaccaagtacccatgatgagcaatgggcatgaaccggtgtagggtcggcctgccaatgatggcattgaaagggaggttaacctccgcaacgtcgaattggacgttcttagtgcgtaagttttcctcagtcccgaatgtaaccgtgagtgcgattctcccaaggggatacaccagttgagggcccactatggagaatgggcgtgagggccccaatcgggaccctgggatctgcagctacttgaacgtagcgtggctgatgacgttgagcccatccccaccatcaattagcacatgatgcagcttcatgttggcgatgacaggggaggtgatgagtggtagtataccagcccttgccattttttcggggcagttggatgccccgaaggagatagtggtgctccaccaccgctgatgtagggctgccttcgagacccctggagtcgccgaaaggacctcgtggcgtagtgacttcacgttcctacgagaggtgagctcccagcttccgccatacataacgtatagcttcttgcggcggtcgttgtcatcaccagagtcggagtctctagtgagaatttccttgagaacttgcttgggggcctgatacccgaggtcccgttctcccgcggccaggtcgccttcgtcgaccttctccttgccaggccagaggcgaggcggcgagccatccctagaggcctgatcgcaccgctcgctgatgcgttttgcgagcttcaggatctcccggcattccgaggcgctatggcgactgttggggcggacagggcatgacccactgtcacttccctgttgttgtgggcgcttgccacgctcgtctcgg

SEQ ID NO: 1685 - DNA, 542 bp, Zea Mays
gatgaagtagtagttttcaaaagctttttcagagcaggattacggtttcccctgaacgagatgattggagaagttttggataattgcgaaatttatcttcatcagctaacccctaatgctatcgttaggctcagcatcttcatctgggcccttcggagccaggggatggacccaaatgttgaagcattctgccgagtgcatgaattgcactatcaaataaaggctagagcagacgggctgcacgaaaattttgtcagctataacttcgcgtatcgcaaagatacgaaggctccggtcctcagctatcgtaccaagtggccaaccggctggaagagcgaatggttttatatcaaggccgatgaaaagaaaagggggaaactgatgatgatggccatgtgcccgctggctttaagcttcagaatgactagacctttgtgcaacatgaagccagggtcaccatgccagctggccatagcagaattcagagtggtggctgaacaaatcagcaccagggatctagtgcaagaatacctggccaacag

SEQ ID NO: 1686 - DNA, 347 bp, Zea Mays
cggccaccgtaccatggtcaccgcggcggaattggataagaacgccggtgatcaccgtcgcacggccttgtgccgcgtgtccgagcctttccaccgcgtcgccgtgactccctatagctgacccatcgtcgccggggagattgccacgacggtggacacgaattcacagcacccaggttcttcttcatctccggccgccagcacggctcgaccaaattgatcaccaccgctcgctccttctataaattgagcccccgggcagctgcgctacctcatcgtgaaaccagagccctactcccaccctcaatcgtcctccagagctcactaatttcgaacttcccccaaag

SEQ ID NO: 1687 - DNA, 683 bp, Zea Mays
agggtattggtcaactagagtcgttcgatcagatgtgggcggcgcggatcgacacccaaatcccgtgaaccggtatgcaacatggctcaccggatctgagatcaagggccaaggtttaataagcacgagatctgatcccaactctacatccatgatccaacgactgatatgcgcgcaccccgaatccggtaagacaaacaaatctcaaccgctcatctccagaccgacgatcaggatctaaaatatccgagatagaattgtacatgttcgatccccatccagcgattcagatccactctaccccaaccggtacgttctcttataatcctaaccgttcttgcggaatcaacggctcgaaagccatcatccccacccgaccccaagccacggcgatgagggcatcaccgcggcgacgacattgccggtgtctgctagatccccacatcagggctcaagctttgagacaaaagtgctatacatcggccagataaatgacaaatcacaagggtagattctcaccggccctggaggcacagacacccctgtccacggagagttgcggccttgaaacggtgttgttcgtccgacgaggaattcctatggcttcagctagtttccctccaattaatccctcacacagcttctatgcagccagaccaacctccaggtagcctcgtaggagc

SEQ ID NO: 1688 - DNA, 386 bp, Zea Mays
ggcggaggaggcaaagaaatagtgggaggccggggacgctgcgcgctggcctatggacatgagactgaaatgtgatcggtatgctatcaggaaagacgaagttttaatccaaacaacatatttgttatagaagttttggagctgaattcttttctggtggggatatagctgagtaaaaaattagattatagaataatatagtgatgtgcaaaaaccaatgaattggttttgggtcatatacactatctagagatatttctggattttacaatatataaatccaattgttaatgctcatggcctattttagtggaaatggaagatgcgctttaagatttcagaacttgtgtttttggggtggggaagagaaaggatccatttgttga

SEQ ID NO: 1689 - DNA, 691 bp, Zea Mays
gtttcgctaggaagtggcttattatatgcggattttgtaagatacttttaagtactacttgtcaagcaacattacaacttatctgcatgctactttccctttgctgtgtgcgtcgttgtcaactcttttcctggtacttggcccccctgggatgtgggcttgacttgtcgaggctggatgccagtatatttaagaaagaattggcgacctggtctccaggaggcaatctcgactgggacccggacctgcacacatccttagctagggagtttcaatagtgcactcataggacccattaattggtatcctttatcctttgatttacgcaataggacctgtaggatttagactgggaagccgacccatgtgtccggaccctctgggtcacgacttccaattactagggtactcattgcggggtggtggagtgtgtaggctcacggtacgggacgaggctaagcagccacgcagctccggacctccccatgagacgagtgtcctttctttagagccggacctgaggtttccggacccataggactatagctccggatactaggacacccgacacagagcggcgaagcatgcgggcttagggtactggaccaagttaagcggccgcacggctctggacctccctagggacaattatccgttctcttggacttgctcccaggctacacggcctggc

SEQ ID NO: 1690 - DNA, 856 bp, Zea Mays
gatttcagaacgggattcggccattgattgggccgtcaactcgcgttcaatcacgacaaggtggcggggttctcatggcggtgaggtcgtgatagggggtgggatgtggtgctctgtgttcgtggtgatgtggtgaagttagtgagctagcttaatttgaccctaggctactgctactggagaggggaggaggagagctcaccagagtgaagggaggcggcagcgctagctcgattgagcctaggggagagggagggagagtggtcgaggccggtgcgaggagaaatggagctcggggaggcctttttataggcacccaggggaggggagcggctaaagcgggctagcaccgatgaggtgcacagcagcggcgataatagcgcacaacatcggggatgggatagttcggggaggtgtcgtgcgagggtgcaagcatagtgggcggggggttacaaaacggtgcctaactacactggcgcaaagtaatggcggggtggggaaagaacggcggccgacggtgatcgcgatgatgccatgcacgggtgaggaagaaagggttgatagctgggacccacttggaagaggaagagcgggcatgagggagcgagagagagcgcgactggcgagtgggggcgagcagtagcgagagagaggggggagcgcgcggcaagggatggcgcacgcggtgatgggcccagaaatcggccgagatagtgggggagctcgggcgcgagagaggggggccaatgggcgtgggccgaagtcggtccagccgggggaagagggtttttctttttctctttttcttttctttccttaattccttcttcctatttatgtatatataaggtatttt

SEQ ID NO: 1691 - DNA, 514 bp, Zea Mays
tggtcgactttcccagctgccagcggcggcactgcccgacgttgcagtgagacatcgccagaggcgcgagcgcgaccgcaccgaggggtcatgtggcgctgggaagggcatgggaaggttcaagatggcacgacgggcaagctcgtgggcacgacaccaacgcgggggcactggagagtagcggtctgcgacgaggtggcctagcggcgacacagacatgctctgacgagcaattgcgcggacgacagggcagtataagggaaattaagggagtgggggagttgctcacctcgagaaggaaatatggagcgcctgagaacgacggggatgcagggatgccttgggtcgatggcgatggagcttcggctgcacggggagaaggccggtgagcgcggaccgggcaaaacagaggagttgggggaaaaccagagggtgcctcgtgttgttggcgaataggcggagctcatcgaggcaacagacacgcagacactcaacgacggccatagaacgggcg

SEQ ID NO: 1692 - DNA, 477 bp, Zea Mays
cagggaagtggataagagagttaccttatgtcgtttggagcctgagaactcaacctagccgagctttacatgggaacactcctttcttcatggtttatgggtcagaagcagttctacctgctgatctcaaattcggagctccaaggttgatcttcgaaagcatagcagaagccgagactaccaggatggaggacgttgatgtgcttgaggaagaacgactgaatgcagtaatccaatcagcacggtaccagcagactttaaggcgctatcacgataaggctgtacggcaacggttcttttcagtaggagacctcgtcctccgccgaattctaacaggggagggacgacacaagttatcacccttatgggaagggcctttcatagtagcagaagtcactcggcccgggtcatatcgccttacccagatggatggcacagaagttgggaactcctggaacatagagcacctcagaaaat

SEQ ID NO: 1693 - DNA, 461 bp, Zea Mays
gagactaggattagatcgccagcggcctgccgtgtaccccggacgcggaaggctaccggcagatcctcacctaggtggcaaaccatcttcttcccctcgcccatccggtaccggacatgcactacgtcatcaacagtcagcgagacgtgcggagcaacatcaacacttcacacggtcgacgacgcgaagatgagatgaggtggcggcaagtgtatgactgagatcatggtgcaccggcacgcaaccatgcaaccaggacaaagtgagcagttgcctctatgaatagcatggcaccacaccggttgctagggagaggtgacacgacacacggtgtcactcgccgcccaaggactaccaccatgaccacactcgagaagaacgccgggaggaccggggtacatgcggaatctcagtccttttcccccggttccagccaattcaatggccacctaacttcatgg

SEQ ID NO: 1694 - DNA, 411 bp, Zea Mays
cacaagcatggaaggaagccctttgtcgactacatcgcgcacgctgacctcttggtctttcatgtggcttagaagtgcaggaaaccgtatggcaagttcatcatccccgcaccatgcgtcatgccagaaggaggtccctctcttatcttttacctgcgaggttgtgatagctctgtatgtcggtagcagcgagcgcatcacttcccaatgatcacccaccaacgctccctgtgtggcaagacaaacctggcttcgaacccagaccgcccaggaggagctagaagccgtgtgcaatcggtgaagcagtttcagtagtaagcaaatgttttggagcgccagtttcttgaccccaagaccaccagcaatcttgctctgctgaacctcctcccaagcgaccaagcattttgcacc

SEQ ID NO: 1695 - DNA, 633 bp, Zea Mays
ccagccgcacgggaaaggagcacgggatgaagtacctggcaagtctaccagccgcacaggaaaggatatgcagccgcacgggatgaaccaccagcgatcggatggagcgggcaactgcgatggcgctgccgccggcgtgacagagaagatgaagacctagctgcgatggcggcgcgaaaggacgcatgcaacagtcatcgggcacaagtaacagcagagaacgtgatgtaagggtataaatgtccattataacaggtaattagtgcagtggggtattttagctaggaaaggggtttaagtggggtaattagacgagcgctacgaataccggggtattttggcgagcggcaacgaagagagacctaaaaaagcaataagcccgttttttccctgtggctatgctgctgcattatcgtttgtgatgcttttgtaaaatttgaaaactcatctatgagtgttgtcgcaacaggaaacaacagtgcggcagggaaaacagaatttggctccacacggcgagggtatgctacggcggcaacgcaacgcgcgcatggcatggaggccggagtcgggcctggtggtgacacgtttcaggctcagtgcacacctgtcccgtgcagccagcctggacggcga

SEQ ID NO: 1696 - DNA, 784 bp, Zea Mays
gctatgacaaagatgtagctgatttttagctctccaactttgctgcagatctttgggggagatgccatagaaaatctggagaaaatgggacctaaacttgcgctgttaggctatctgaatgagacaccatggtacagtagcctgctatggatcagaacgccagcgcgacagtctcgccgctgatgaccgatctctgccgcgattcacgccgccgtcgttgcgattgacgccgccagtaactagataagcctgccaggtaatagctcgtcgcctgaggataactccgatgactcaccaccgtgcccccgtgctttgcggcttgagcagataagctcaccggcgacagccgtcttccggtcttgcgccacgtgctctggtacctccgtcgcgtcgccgtgactctctatagccatctaatcgtcgccggtgaagtcgccacgacggtagacacgagttcatgcgcgccagtaactccctgtccctccgaccgccgcgcgtcatcgtcccaatttccggccaccgcttccgcttagtataaattgagcctgtggtcagctccgcaacatcatcacacaccccaccatctagtatcgcccccaatcttgcaaccgtgagcgccaattttaagtttcccccaaatctgttctgagacaccgcgaagaacatctcaccgaggtcagctcaattcaggctagttcttaccctctgctcccttgtttaagcactctcatatgtctgtgatactcgttaacccacctaattgaactgagaaacctctggtcac

SEQ ID NO: 1697 - DNA, 628 bp, Zea Mays
atgcgctagtcctaagggcccaggctgcatagatggtattgatgtattagggaaggtttatctgattgtatcctattgatgtattaggcaaggttcccctgattaggatcctatgtaccataggcgagctgctccgaaaaggagcaaaagtgttatgggtggacggagggccagcccacctaccctcctcacaacgagtctggactaatgtgaacagtacccgtggtagtgtacctatgaggaagggataaggattaggaaagagattatattacatcaggttgctcccttagttctagggattagtttcttaagggttaagtccactctcataaaaggatgggattgtatctcccttcaagcaagaagccaagaaatgaagaattaatccaatttccccaaataactctaagtctctcttcacgccgactttgctcagccatcttcctgctaatggttgtcccaaatgatctaaggatcataacagttcccatcgcctacatgaaaaaataattaatgtgttctctaccacaagttagcttgggccaacttcaatacatctgaacaagttcaccaatacattgtgccacaagacaatagtaaacttgacaagaaaacaccatcggca

SEQ ID NO: 1698 - DNA, 457 bp, Zea Mays
gaaatagttcagacttttgaatgggctttcaattcattcaaaacatgtatgggatgcgagggtccgagagttatgctaataggtatgtggtatgtcaatttgttatgcaaaaaagtgaattaatttattgtgaaagtaaattaatagtttgtgagcaattgcagatcaagatcctgcaatgccaattgctctaagaactgtatttccaaaaacagttcacagactgtgtttatggcatgtccagaatagatttatgccattcttaaatgagatatatgcaaggtttgctgataaggattttaaaacaacattccaatctattatacatcatccattaactcctcatgagtttgaatgtgcctgggaaatgatgctagaggagttcaatcttcatgaagatatgactctacgcaaattatatgaaataaggaatgaatggataccagcattttttaaa

SEQ ID NO: 1699 - DNA, 815 bp, Zea Mays
gttgcctcaagacctagtgtggagcagggatgcttgggggtcgaatgagacagaagagggtcgagcgaaccacacccggtctaaagaggtcagccgaatcagacacgagcgaccgaaccgcatgccattcgagggtcaaacgtgggaggctaaccgctctgtactcaacccccatcgatacaacaagtgtcgcgacatggagaagaatggggggatgtcctgttctgcctaacctccatacatattatgtcttaaccaactatgagctctcaccccgctcgtacaagggtgaaaaataattgtttagatgtactacgtgggtatggcgatctgacagatatgggggtacgaacgaacccatcgatacactagcccataccggaggtgagaatcaccgccacaggtggcactatgctaccagctctacgataaggcagatgacagacgttcgtacatatcactatgctcaccacgaactgcacctagccccttcggtcaagagaagtcagcaatgtcatggctacagaggaacgaatgacgaggaagaaggacatcattagagtaaaacacaaccatccttcccatagatgtcgtatgtccttcttcacaattgtaacagacccctcacttagcatatagggagggcttgggccatgactccatcatttgagccggatcacactcaatccaatacgccaaaaccagggacttgggagctcctccctccctcgctcgacacaagccaccgaagactggagtagggacatttcgcccaaacaagtataaactcttgcatcctactaactcaccattcg

SEQ ID NO: 1700 - DNA, 385 bp, Zea Mays
cgctggaaagacatgcgccggttggccaggtcccagacaatgggtcccaacgcgccgagccacttggtgccgaggacgatgtcgtacccggccaagggcatgacgaatagctccgccgggaacccagcaccagcgatgagcagtggggtgtcacggatgacgccggcgcaggtgatcttctcgccattggccaccatggccgtgaggcggagacgttggcggagaggaagggccgatcaccgtgcggcctcttcggagatgaaattgtgggtgctgccggagtcgaggagggctacgagctgggcggcccctagagttaccgcgagctgcatggtgtccgtcatggacacaccagccaccgcctgcagcgagaagcagggggcgt

SEQ ID NO: 1701 - DNA, 387 bp, Zea Mays
cactacaactcagacaactcctccatcagataggcttgggcacacgactgagcctcgggcattagcctcggctctctgcacagtcaaagatgcaaatacaggaaccggacatcccttcccggctcaagtcaatagcaagtacaaaggtcataccaaaggccataccggctacaggggcttggacacgcctcctctcccgtatacgacaagccttggtgctcccggtgaccctccgacaggctataaatagaggagcccaggtcttcaggcagggggagaacacttcatagttttcacctccacactgatattggcacttgtctcaatcaaccccaaggacttgggatcctttccctcccccgactagattgtattccctactacaag

SEQ ID NO: 1702 - DNA, 444 bp, Zea Mays
tctgtccttcagccttttcttctatagccaaaggtgtttccttcctctgtaaaagttttgtcagttccaatcccagaggacttagcagcttgaatggcggagaatcagtcattaccttcaaaatttcagccacttcggcagcagttggcgacagaggggttctctctgttgtttcgtcgaccttcggttcaatggagggtgtttggtcaagcttccacttcttaattgttgcctttggctctggcgctgtttttgttttctttaaggccttctcatcttcttttactgagcgggcagcttgcctgcttaagatgctaacaaccatttttctcttcacaccctagcccctccgtcaaacctctcgtaatctgggtattcgaagtttaacacatccatcacccggttcagcctttgtttcgatcgggtaccgaaggcagcagtcat

SEQ ID NO: 1703 - DNA, 535 bp, Zea Mays
ttccattcagtccgcttagcacttggaggacgaaggtgcagtcgcggatgacctcgccgagagcgtctgttagccccttcatcttgcagcagtagtcgtcgatcgagaggttgccctacacaaagacacgagattcggcgtcaaggagaagagcgcgagcttcgtggttggtgtggaattacgcctcgacagtgattcgggtgtggcgtgggggtgtggacagactccatcagctcaggggagagtgtgcctagcaggctagcacccatgacaggacaacgacatccacgcgtcgctatgatggcatgatggggaaggcgacgtcagagaggacgtggttggtgagggtgtgttgctcgagggtgagggggacagagtcgcgttaacggttgtagtatgaggacagggggtccataactatggatgagggcacatatgtttggacgcaagggtgagggggacgaagtcacgctaatggttgtgatgggaggacagggggtccagaattgtggatgagggcacatatgttttggat

SEQ ID NO: 1704 - DNA, 386 bp, Zea Mays
gatcatcactagagtcgatgtcaaggtcgctgagggaggtgaggaaatcatgctcttgggacttggccttattgaggtacttctacttgagcgcctcattgtcgaacctcccttagatgtgtgcttgttttatgtgtaattgcacttgctaatggtgtcattgcccttcatattggagcagttggtgatgaagtggttggatgctctatagttgatgcaaccttccttctaaccaccacaccatcgatttatgcggctgttatggaacatcatgaactagttgatgaccaatactagtgtgtcgtcattgagtgcctcaacctgctcctctataacaaaaaccaaagaagtagagcaaacaaagcaaatgaggggtgaaagttgtc

SEQ ID NO: 1705 - DNA, 503 bp, Zea Mays
cccggcaggttcccctgctcccgaggtctaccctcggcatgcaccggagaccaaccgttggcgaatcgaagcttccccccccgcagaggaccctctcctctctctcccgttgcgcggtgacagcgaagtggccccgttttcctgccgtatcgctcagatgatggtaaaggagagttgcctcccatctttatcacccaagagaaatccgctggtgctatggtcgagccggaatttcaggatcggatcgaagcctgttgaggttgttgcgagacttgcgcgtcaacagggtcgctggcctcccttgattcggcttgaggaagaccctggcaagtaggctccacacggcagtgggacgccagcgcgcagctgaaggccggtcgacccggtggtttcctgggtcgcgcggaatagaaataaggtgggccggcagagggagaggatggaggtgggccgagcaggggaagtcggtccagtgtctgttttccatttttttattctttttc

SEQ ID NO: 1706 - DNA, 517 bp, Zea Mays
ccgtgaatccgccgccaatataggcttggccgtcggtataagtaccctatccgtggtcccgagctcaccaatcgccgccatgctcgggcaaagccaagagagagagagagagccgagggggaggattgaggagaaccaggattgaaattgggatttgagttctgccatcgacgtaattaccaccgacgagaggggtgaagcactcgggctcgtcacgggtgatcgctggcgctcgctagggtcatcggtggcatcttggccgtggtttggcggccggtgacctccgaattcgtcgccggagcgcacgcttctccgcctgtccgccgtgcaccgtggtcggcgaattccatgcctcagattgaggtatgatacccctactcataatcaataggaaagtaggatcgtgttgcaaacttcggggaaacgtttggggaaccatagggctatagcgcgctggccggtcatggccgccgccgcgggctgcgccaccgcgtcaggtcatgaggcaatggggtga

SEQ ID NO: 1707 - DNA, 1033 bp, Zea Mays
atgtgcatggttgccttctaaaactgggtgtgacaccctgtctccgacgacgaaccaaccgtgctgggggagaagcacccatagtgcgaggcacgtcaccgacggaacctctgtcgcaacatcttacatcaccatgcccctagggagcaggttctgacctagttgtttactagtatgaggcgtccgaggtcggtgagactcctaagcagctgtgtttcctcctacaaaagaactcccaccaccggagtgactgcatcgcccaagagcgtgaacataaggtggctgagcgtaatgctatacccccatgtgatcacttaccccttcctcgcaatctatagcccgagttcacttaggccatgtaaactctgagccaggttggatgagtactggctctgatcacaaacgacttaccatgcatgcccaacaaagagggttactaacagatcctcaataaggtggcataccaccttctttcaccagctcatcttgatggcgacatgcgccaccacctcaatagccgatgcaacacgtggactagcgttgagtcatcaggcagtcgatggcacaaagaagtgagaagccgagaggtgtgcgattagggcccgacgccccgctgcgggaagccgtgggttgaggagactccagtaccacctcgacgaacaacccagcaccacatcgatctgcctatgaccgacttcaagatctgcgtcacccggcaccgcaacgggactaactttgtaaccttgtccgccgtgatcacctagaggttcggggagtgttcgaggtctcagccttaacccccaaattgcgcatggtctagtggtcgcctaacttaaaggtctacaatgtcgacaagtatgaggccaagttggatcccgagggctggctgcccgtctacttgacggtggcccaaaccaccggggcaatggaggacgtaatgacggtgtatctctcgattgtagtaggacaagacatgctctagtggctccattatctccctcgccactgcatctaccattgggccaacttcttt

SEQ ID NO: 1708 - DNA, 344 bp, Zea Mays
tggtagtacccaggggctcttatgcataaaggctcggcgaaggggtacgccaggatccgagccgtccaatcaaacgctaacgaatcagattagaatcccaacaccacaagtctgtacgcgcctgctgctaatggatcacgatcccacagtccctgatccatcccgaggcgggacgccaggccctgatctcagtcgtagcttcacagatccacactccggaactcatcaccgaagtggaacgctcctatctaatcctatgcgtccaccgcggatccaatgacctgccagtgccacccccaatcctcacccgcagcatgaccctgcccggtgacgcaaggacatca

SEQ ID NO: 1709 - DNA, 556 bp, Zea Mays
gcatggaaccaaggggtgagcgcagagaccccgcacgtttccctttcctcatgtcgatgaatgtgccgcctgtcccggggaggggagcgagtctcatgtcgccttgactgtcctaggaccggactattggtggaggttgccgcagattcgatcctggtagcacggctgcgtgccggtgcaccatgatccctatcgtattcttctcggcgccttgtttcattttcatgtcgacgatcgcgcgaatcgctgatgttgcttcgcgtgtctcatcggctgttgatggtgtcacatagatcgttcggtgggtgggtgagaagtagaagatgattggccgcctgcgtgagcacccgccgatagcccttcgcgtctggggttcgcgggaggccattggatatctgcgctaggacccctccaaccttgcttggtgtgtttagcgcccgagcgaagtcagggtataggttccaggtgaggagcgggttctctcgctggagcctagcgtcttgttttgcttgctcccgctcgcgttcttgagcttggcgacaatcacggcagcggg

SEQ ID NO: 1710 - DNA, 709 bp, Zea Mays
tcgatattattctaaattatagcctaagcttgtctttcaccatggtaaattcttgaaaacgtctgatgcccgcccgccataaggcacgctagacagagggagcccacaaccacctgtggcaaaacacatgcataaagaaatcgtaagcctgcctctagctgccttggcgtttgtgcatcctggcaagccccacctacaccctctgccctaagatagcctagtcgtgcacgccgagctgctatattaaagtgttgggttgtagaccttgaagtgatacctcagtgcagaaatccactccggcaagacctcgtgcacttgcctgagcacacgtcagtcacttgtcacaatcacaactaaatgaatgcccccaccataagccaagttaccctgccaacctcaggatgttgcgactacactgtggcaacgttgccactcacagtacgccggtcaagactccctccattataaatcgtcgttcctctgcctataaatattgatgcccttgccgtggaacctcatagtccagccaccatctcacactcacccccacatccgaacaatgtgtgccttactcttcaaaccaaagaacaagccatcaccgtcaatttgagtcgtaggtgagcacgccatgatcttcgacctcttcctccctcgaagtcattcttaacctatataagttatgaccttatcattgaaaatatgcaaggaa

SEQ ID NO: 1711 - DNA, 839 bp, Zea Mays
tcatctgggcgagcggtttctgtcgctagggcgtgcaacttctcgacagctgcaagcgcagcggggcggtcgccctgcatggtgaggaccccagcaggggacgacatcttgaggaccaagtactcgtaatgggcaatggccatgaaccagtatagggtcggcctgccaatgatggcattgaaagggaggttaacctctgcaacgtcaaactggacgttcttagtgcggaagttttcctcagtcccgaatgtaatcgggagtgcgatgctcccaaggggatacaccggttgagggcccactccggagaatgggcgagagggtcccagtcgggatcctaggatctatagctgattgaacgcagcgtgactgatgacattgagcccagctccaccatcaatcaggacatgatgtagtctcatgttggcgatgacaggggcggtgatgagtggtagtatgccggcgcctgccatgttttcggggcagtcggatgccccgaaggatatagtggtgctccaccaccgctgatgtggggctgccttcgggacccctggggtcgccgaaaggacctcgcggcgcagggacttcacgttcctacaggaggtgagctcccagcttccgccatacatcacgtacagcttcttgcggcggtcgttgtcatcaccggagtcggagtctccagtgaggatgtccttgaggacttgctcgggggactgatacccgaggtcccgttctcccgtggccaggtcaccttcgtcgaccttctccttgccaggccagcgacgaggtggtgagccatccttggaggcctgctcgcgccgctcgctgatgcgcttcacgag

SEQ ID NO: 1712 - DNA, 396 bp, Zea Mays
cgaggccgtgacttggccgggctccagcgaccggaggcgaagggggcacgaggctatgggcgggttgggctccagcggcgggctgcagaatggtggagggaagagcgagggaagaaggcgactgggaagaagggataggcgcatgagggcaagtgcgtcgggcaccaccccttccctcccatcctcctttatccccctcctcaagctatgattgcggggaatggtagcgaaggagggagacatgggatgggggcgcgatcaccgcgcggtgatgagggcggctcgcgtgttgatgagggcggcgacatttttgggaaggaagggcgacgagcgtgttggagacggacgatggcagggagggggcgcgtcggggtgggggcaagcggggacatccac

SEQ ID NO: 1713 - DNA, 383 bp, Zea Mays
ctcgcctggacgaaccccacccccctttgcgggatctccctcaacaacgacgatgctgatggttgcacagaagctctgtgaccccacgtggagccgacattagccccacgaccaccaccatgacgaaattgggtggccaagcgggagcatacgagttaggtggcctactaatctacctgtggtgtggtgcaacagctgacatgacttgccctatgcccctattgcgctccctcgatcgttcggcttcgagcgcgatggataggatgaggctatggatctgtgatggagcggtgcagcattggcatgggaaaagggccgggcggggaggcggtggagagtgcgtcactatcatgaagcgatagttaattgtgaggacgaaggag

SEQ ID NO: 1714 - DNA, 610 bp, Zea Mays
tcatgcatatcgcgagaatctgtggctggggcgcggacacgacacgaggccaccagggcgatcgacgccgaccgactgcagccgtcacaccgcctgcagctaggcagagcaggctttgtccgttctgcgacgtatacgtacgagtacagctacagcaggtttagattatgttatctctcagataggggtggcggtacgcagcacgagacgggccggggtgcatgatgtggttgatccgtatgaacgacgagtggctttgtccgttgcatgatacgctcgatcggtctggtctctaccctctccagtctctacacctgaatcgcgctagctgtggcttcatatctctcttcttggatcttgatgccattacgataccaagtgggattgtgcgagcagaaagcgcaccgccacccccactacatacaacccacttttgccatgccaaacacgacgtttggctgcctacctttttttcttcttcttctccgtagagccatgctgctgaactttgctgtttgttgtgctgatcgtgcatgcaatcagcattccctcaaacgctcggagcccaacccctggctggagagatccaaacttcaacgatacagaatcg

SEQ ID NO: 1715 - DNA, 485 bp, Zea Mays
ggaagaggggcactggcgcaagcgcttagtggctttcaccgtggcggtccctccggcgatcaccggttatgcctaacacgactaaccgcaacatggtaagacgcctgggcacgtggcgcaaggccgcgaggtggcaatctccggcgaactcatccgaagcaaccgtgactagctcgggtatggtggtcggagtaaattagtggtcggaacatatccacagcgtgatatttacttaccccaagcgctatccaaccgatccgagcgtgaatcgccaacggcgagcacgaatccgagcgcacagctcgtcgacggtgatgtgatctgaacttgatcctatctggttactgtaccattggaattctattcagtcagcatgatagatcaactttgagtccaattttctcctaaatttacatggcaacttgctcatcggctaatagcaaagttgttgtctaatgatccatttataaaccaactgtagtcac

SEQ ID NO: 1716 - DNA, 491 bp, Zea Mays
gcaccgcgttggtagtcgagcgagcagaaggaggacacgcctaccctgtgcaacaccccgtttatttcatcagtgaagttctgggtccctcgaagaaaaagtatcctcaagtgcagaagttattatacgcggtacttctaactgcccgcaagctgcgtcactactttgatgaccacaaagtcatagtagtcaccggttttccgataggagatattctccacaataaggaagccattggccgaatagccaagtgggcctgtgaactgggatctcatgacattgaatttcgacctcgtactgccattaagtcccaagcattggttgacttcgtatcagaatggaccgaacaacaaataccagagaacccggaaactgcagaagtatggaggatgtattttgatggctcgctgaagctgcagggagcaggcgcaggaattctcttcatcgcgcctggaggtgaacacctcaaatatgccctccaactgttattt

SEQ ID NO: 1717 - DNA, 741 bp, Zea Mays
aatgtggctcaaaaatgcattgtcaggcgacttcgaaaggaaaattcagattgaacagcgccctgacgaagaacgcaggtacagtgtacccgtcgccggtgaactcgcgccaagatccaagttttgcctgggagattcgtgctcggtgaagaatggataacactggggatgggtgaaaagatctggggcgggatgaattgcgattgctagctggtccggccgtcctatccacttgccgcacggtcggccgagcttaccatcaccggagctcgccgtttcactcaaccgtgccacgccgcaaagcattctccacgtcgtaaggatcgtggaggatagtcagttacccctcctgcatcgttttctcctcgcgcgccacgatgcatagatcactgtgaaatatccaggtcgccgtgagctgatccccaatccaaatttgtgataagttcgaccgaggcctttaaattgaaggtgcccccagttttgtctttgtgttacgcgcccaacccactctcagccagctcgtttcattccccgtagcctgcagtcaccaggttttccccaaacacggttgtcaacgccgccgagtgtagctccgtcgtggccagcgtgattccggtgaaatcctactcctttgcgttttgttttagtactcttatggtctctggatgctcatggactcgggcggttgaacgttatcgctaccagactccgtgaacacggcgttgtcatccgggaacgccg

SEQ ID NO: 1718 - DNA, 504 bp, Zea Mays
cagaggggctcctttgcaatttttatcagccgaagcggtatcgccatttctggccatccgatcagaatcagacgcgccagatcataacgcgaaccggtacgagcccgcgagcgtaggatcccgatccaacggtctacaacatggtttcttttcgcccgcacatccgatgatcaccggccgagatcgacacggccgaatcggtacgctggctcacatcgtggacgttgataatgaatctaacggttgcacatcaatccggctgagcggctacggtcatccgatccccaccgtaccgcacgggatcaacggtcgtcggccttcttctacgttctaccacaccggttctctctctcttctttttttttctttctccagctaatccgccgcggccgagcgccatggacgcgacaacgaactattccgagctcgccattcgagccctatctaccgccaggacgcctctgctcctaccttacacggccacgcattcatcttcttccctac

SEQ ID NO: 1719 - DNA, 901 bp, Zea Mays
gcaatcgagttagtaggaaagtttttattacagggagatatgcattagtttacttccaaaataagagatatgcattagtttacttccagaataaattatttagttcctttttaagtggtcgcctcatactataaaggcataccatagtttgtattaggctccatcgaggaataaagtctccctgcagttgggcggggttgtctcggtcattgtggctcggcaagctgccagccgcggtgacgacgtccgccagcctagccatcgttcctacaccttgagatttgtccccggctctagcctcctctcacctctacggtaacccaagaggtccccgagaggaggccgcatcattgtaccatccccaactttagattgcaaggccatggagaagaaagcatttgctttatagggaacttggatggagaaggcagcccaaggtctcctcggatctgttttagcaagtgataaccatctcattctgagagcccaagataaattccatgagattagaaattcctaaacctccaagctcaatatgacgacaaactttgccccaaaacacctgacagtggccacccttagcatcttagcggcctctccaaagaaagcctcgacgaattttatcgaccgccttgagagcccaagtcggtagatccacagccaaatcgaatttattttcaccagacataaaatttaggattttccattgtgacaccgaaccagcaactaattagagcattaaattaaattagtgatattacagtatcatacttgattctatgttatcttctcacaactccaagatgttacttccctccaaatatattgtttcccaaacacctctatcaattccaatgttatcaatggccacatgagcctactaaccatggcacctaatgtc

SEQ ID NO: 1720 - DNA, 630 bp, Zea Mays
tgctttaataaagagcgggggtcgagtctcagagaattcctgatatgtagtttcacgcggtccttgaggaggagctctgcctccgtgctgttggaactgattgcccgccatttcgcgcaagaagcgtgtattatccgcagtggcattgaccagggcagcgatagcctcgaccaaagtcggtggtactggtggcgggttaggagtatcttcccgactgcgggaagtccccgcaccatcatgtgggcaagtccgtgatggcatctaaggcaaagaaatatttggaaaaaaatataacatgccagcacacaccatcatattacattaccaaaatgtaataattatacagactccagcgtacaacttgacttcattacttattttacataagtataacatctaaactatactattctagtcttcgtcgtccttggttcttcttttcctattgcaggagaccgttcatcagcaaggtttatggaaggagggggcctaaaaagatccaacttcccatcaggtccttcattagctattcctgaaggtccggctcccattgcagcagcgtcggaaggcacgtccgggtgcagtcgagcatacagtacatgtacttcttcatgtaaagtattatagtac

SEQ ID NO: 1721 - DNA, 607 bp, Zea Mays
gagcttgagagcttgtatgaacttgtgagtttgagtgagtgtgtgagcctaagttgggtctgagcctcttaacgccatgtgccctcccttttatagctcaaggggggcacgtacaaggatactgagccccgacatgtgggcccagggacaaatggaaggaagcaactaatgcctgtaacgctagggtgaactccgagcgccataatgtccgtagcgcatatagtgttaatatctcgtggctgcttcctcggtaacacacgagccatgatgagcatagtttatgccgcagcacgggcgtactgcctaccaacggaatggacaggcacgccacctacaagatggtttggtcgccgcccgtcagcggagtggacaaggcacatttaatgttgaggtggcatatcgcctgccattagagtggcagggcttattaaatgctgaggcggcacatcacctgccagtatgacaggcggcgcgccttatccacaataaatgcagaggacgtgcggcctagaggccttacgtcagactccgcccgctggcttacgtcacgggcagtgagccacgtggcagcattgggtctccgcctaagcggcgagcagaagcgtac

SEQ ID NO: 1722 - DNA, 822 bp, Zea Mays
gcctgaacccagcacgtgattccttcaatcgtttgcttcttctgagccctgactccacaatgattggagacggcccaccacaaccatcggaatccttggagatcccagaagtgacatcccccagggaggaatcaactggacattccttaggaaccacaaaagggatggaattcattccctgctcctacaaatttggggggatatctgacagcagaaaagtctttgaccaattgaaagcatccggctgaagaagattcgaaagaaaaaaaggtgcccacttcttagggatgtccaccgagtggtcagtcgacccagacggagcaaagtatttggcccagagccaagtgaactggacagctcttctcctctcttcaaacatctggaagacggggtcaggctgccattcctgatggagcatgaagttcatctccaaattctgagggttattattgttaggctcatcaacatgggcctgagggggcacgacctccaaatcatggacatgatccacctgaggcaccagtccatcgacctcctgaggcccaataaatggggcaacattgatgtcaattccatccccaagcagcgcatgaccattcaccgcaagatgaccattcggaaggggtgcaagctgaccagcaccaatggagctatctgacgacaagccagagtgttggttactgagttgtagttcttcctgctgaatgtgctgctcctctggcaaaaagggctgcggggcctgctgaatgggctgttcattcacaatccactggtcccactctccctggccaaagtcatcctgctgagccggcagcactccac

SEQ ID NO: 1723 - DNA, 551 bp, Zea Mays
tgaattgattatgatacctgcaaactgaaaactatttatcaatttccgttatacgttatgctcgctaaaaaagaccccggaagtcacggaaaatcaacctcgctcctcttgctagcaggacagtaatgatatggtggaattaatcatggcttgccacaatctagtatcttctgctgcttaatcgctttgaaatgttgtcggggctaggcgcttgtctaaattatatttcgtatcactcttttactgtataacaccgatcaattctctattcataataaaaattgatacaaaacaagaatattgtacccaactgtttgttgcaggctgtagcatctactagcatgtcattctaattcttaatgtcattgaccacttaaatgtggcatgatcaccagtctttcaactagtatgttttggataaaaactaagcagtatttttctggatatttaactggacaactggtcatgaaaatattttgatgatcatggtggcgtatgtatacatatagaacaaaaaaaatgcaagttgcaatatctttgaaaagttttcg

SEQ ID NO: 1724 - DNA, 768 bp, Zea Mays
taagtaccctatccgtggtcccgagctcaccaatcgccgccatgctcgggtaaagccaagagagagagagagagccgagggggaggattgaggagaaccaggattgaaattgggatttgagttacgccattgacgtaattaccaccgacgagaggggtgaagcactcgggctcgtcacgggtgatcgctggcgctcgccagggtcgtcggtggcatcgtggcggtggtttggcggccggtgaccttggaattcgtcgccggagcgcacgcttctccgcctgtccgccgtgcactgtggtcagcgaattccatgcctcggattgaggtatgatacccctactcttaatcaacaggaaagcaggatcatgttgcaaacttcggggaaacgtctgggggaccatagggctatagcgcgctggcgggtcatggccgccgctgcgggctgcgccaccgcgtcgggtcgtgaggcaaaggggtgatgttgactcgatggccgttgattcccatgtggacggctaagaatagatctcgtgcagctgaagcctaagtcgttgattcgtagatggtcggttagatttgatcacgacatgaatcactgttgttcgttgatttctgatcgagtgggtgatatcggatgaggcttaagtaaatagaggtcgtagatcttgtaacctgcggtcataaatcgataccggtttgggtcgtggtggatctaatcgggaccctagatttcagatcaaacgaccatagcgtcaccttacctctttg

SEQ ID NO: 1725 - DNA, 487 bp, Zea Mays
cgagattctataccccgacctcgggcgggtgcactacccagtgattcgcggtgctctgcgcatagtgtagcaattgttagatggcaaaataatgccttccatcgctggtatgcatggctccggtgagctgttgccacagtggcgctatcctttgtcgcgtgggtacccagggtagaagaaagggtaggggaaagatgcctggccgttcgatggtagacatgtgcatgtgattgggttgcgcagtattgtgcttggggccgttagatctggatcgtggggtctaagccacgcgtagactgatgctaacttagggggatcgcgggccatcgatcacggatcctgcggcccgtattgaatacgtttcacatacgatcagatctaatccgtgccctcgactgtggatccaatggtccaacgccacccgtaccccttcggccaggccattttgcataagagaccctggaccttttggaaatagaacccgccg

SEQ ID NO: 1726 - DNA, 1404 bp, Zea Mays
cgacctttgcaccgcctgttcttgcagtcgccgcctcttctgtgacttggcatcgtcgtctcggtcaccccggtcgtgatgtgatgtccaagctctctagcagcacctccgtttccggttgtaggggatcttttgagcacctctgtcatgcttgtcagttaggtcgccatgttaggctcccattccccatctcctcttctagagcagcaggcatttttgatctgatacactgtgatgtatggacatcccctgtaatcagcatttctggctataagtattatttacttattcttgatgaattctcgcattatctgtggacttttcctcttcgtcagaagtccgacacttttcccaccctgtctcacttcttcgcttgggtctccactcagtttagtcgcaccatccggagcatccagtgtgacaatgggcgtgagttctataacaatgtgtcctgtgacttcttcctctctcgtggcgtccacctctgcatgtcctgcccctacacgtctcctcagaacggccgagctgagcggatgattcgcacgacaaacgatgtagtgcgctctctccttttccaggcttcccttcccgcttcttactgggctgaggcccttggcactgccacctatctcctcaaccgtctccccaccaaggaggttgcccaccccaccccttactttgctctcttcggcgtccatccctcctacgaccatcttcgtgtcttcgggtgcgcttgctatcccaatctcgcttctactgctcctcataagctcgcccctcgctccactcgttgtgtcttcctcggctactctcccaatcataaggggtatggtgtcttgacctcgcctcccacagagtcctcatctcttgtcacgttgttttcgacgagtcggacttccctttttcctccacccccactgcctctctcaccgacctcgacgtgctcctcgacctcgaccctgtgtcccccactatcgtgcctcccttccccgctggttcgcccgcttcaccgcctcgcgtggccctgcctgcgccgcccgcccccgcactgccacgtgcggcctcgccgttcccggagtcgcctcacgcgaccctgcctgcgtcgcccactcccgcacagccacgtgcggcctcgacgttccctgagtcgcctcacgcgaccctgtctgccccgccctcccccacacagccacgtgcggcctcgacgtccccttcatctcctgcacagcctagtgcgacaccggcgcccgctccgccgtctcgctacaccgagcccatccagacataccagcgccgtggtcgacgcggtaccccggctcgttccggcgccgaggtcccgacctaccaccccgtcgtcgtccaccgtgatcctcgacacatccacccgatggtcacccaccgcgc

SEQ ID NO: 1727 - DNA, 284 bp, Zea Mays
agccaaataaattccatcttctctaccgcggcgcaaataaatggtaccatatcggccagcaaaagagagcggtagcaacttataaacgtgcctgctatggagaaagcaatcagctcttgtaatcagttagtggtattgtgtacatgtgtcaaattttgcgcgcgcggatggacgatccagattgaacaacagcgatgcggatggacgatccagattgaacaacagcgatggacgctccagattgaacgaaggcagaacggcaggctacccttagagccttaata

SEQ ID NO: 1728 - DNA, 777 bp, Zea Mays
tcagccgttgaaagacagggcatacccggcttatctgtatcgaggcctggccgactcaactcgggttactaacagaagaattccctctatggacttggtgagccgacttgagatgatccttagaggtaaagtgtcaaatgttggtgccccagtggcgttctcagcctggaacttgcctcctcccaaagccttcactctttttgtgtcgaatcctcctgttactgatggcagtttgggccttagagtgcggccctctgctgaagaagttagtgccttggttgcctcgttcggggagattcctgatgatgaatggcaggtccattttgaggtgcccctgaaccctagtgatgcagagataagcgttatgcttgatttgctggctgaggactcttctgacgctgctcctgctggggcattggtagtggcgcccctcccagaggctgatacaactttggatactcagaagcctgccagtactcgcccgaggcgcccttgccgagccaatcaacctgacccttctgctgatgagcagaaaaagaaaaagagacgcctccggcgagtatccagtttggatcgggacgttggtacctcggttcctactgctgaagaagtgcctgtgactgaatttactgacgctgaccccaatgggtgtacccaatctgttgctgatcccaatgggtgtgctgcctgtgttgccaatgtggacgacgaggaggaagaggatgaagttcctttgactcggaaaaacagtcggcagttcatcgctagcggtgaaag

SEQ ID NO: 1729 - DNA, 884 bp, Zea Mays
cgccgccattgcccgcggccagccgtcgtccccggccccggcccgtccactgtcgtcccttccgaccccggcgctcttgtcctcgccacgcccgcaccgaccatcgcggcactcgcgcccagcaagaagctaacgaagaagcaagcggtagccccgctcacgaccgtgtccccgaccactggactgcctgacagctcgcccgcctgtacgacctccagcaacattccaccgccagacctcgctcctctgcctggcagccccatcgtccacgggtgcgacgacattccacccactcgccaaaccgatcgccgcccgccagagctccatcctctagcagctcactctgtctccaccagaccctcgccccagtaccagctcacgctagcttccgcctcctgctgcgtcctccccatcccactccacaacacttagcatggctgttgctccttgttccaacacccttgtgcaacttccctccatcaccttcgatggcaccaacttctgggagtggtccaccatgctccgcgtgtgtctcaacagctagcgcatatggggtcaccttactggtttgtctcctcctgtcccggagcgtcctattgaacccatggtcagtgtcgatggtgttcctcctgttcaggccatggagggttatgcccaagatgttgagcaatacatggttgttttaaccgattacaatgtttggcttgctgataaggcttgagcgactaaggttcttcttggcagtatgaaggtggaatttgccatggatctctgctctgcccaccactcaggcgatgtgggagtgggtgtaggctctctaccagccgagcagcaccgctctctacatctccaccttggagctcgctagctctattcagcagcag

SEQ ID NO: 1730 - DNA, 343 bp, Zea Mays
gtttcctaagatcgacatggaaccctagtaagactataaatctagaactaatcatgtgggatcaacccactactgcaagcctaacaatgaagcaaactgagctgggtgtaaaatattctacacaggatagaaaggctagtgctttcaagacacattgacaaaatatattgatttgttagttgtaaaacatggaatagtatctaagacttcactggatcaaaacatctaaaggctagaaaagatgactacaactctagaactgaacatgtgcgatcaaaccactactgtcagcccaatgatggactgaatggagctgggtgtaacacatttcatgtaggacaaa

SEQ ID NO: 1731 - DNA, 582 bp, Zea Mays
ccggcagccagcactggttcgataatagatgctcgttctttgaagctacttttgattctagcaggttcatctttcacaacagaaatcctatgacgtttggtggtaaccttcacatgcttatgttttactttcttcccccaccttgtgttagctgggggtagttgggataaacaaacacgactgtatcaaacacacggttcaacagtcgcttcttctgggctcgaaggcgacagtcaatgctttgtcttccttattgttatagtttacaagaatttcgttacacttatactcaatagactctagccatttgtcacatgactctccgaattcactctcgaatttatatgtgtatttcaatctaacaagacctagctcctgctccgaaaagaactgtctttcttgagctctggcatcacccactcagcccttagtggccatatattaaacaccaagtgttcctgaatcagatcccttggactaatgtgggtacaaacggcgttgaaggtaatcaaggtagcctaggcttcaaagttcatatagtagatcagtctcttaatgccgaagctgcgcttgataagcctc

SEQ ID NO: 1732 - DNA, 944 bp, Zea Mays
agctttggtagcctctagggagactagcggaggaactggattgagtggatttgggctggagcggccggtctacgacggccatcgcgtctttgagtttgcaggacatcgtgcttggtttccaggcgattaccagcgctgggtcgccggtgaaaggatatgggcatgcgagggtgcaaggccgagggttggggcttcttatagaggagcttttgagatgcaggcgtgggcacagggtggagcgcgcgcccgagccgatcgacgctcatggcgtgcgctgcgcggtcagagcgcgccctggacaagtcgaacatgtggaggatggcgtatgcctgagttcaagcatttgtttagcttccgtagagtgcatatctcagcgagggttacgtgtaggatctcttccttgcaccaagatcttgcttttctatgtgagttctaagccaagatacatgtcgggctaggagctatggcagtgccaagtcatgtctgtcacggctcctgggtcgcgacaatggcgtgtgccaagcgtgtcaaacgggctagtttttgtgtcaactttctccaggtcgtgttcgaggtgttaggcgcaaacttgtccattggaccatttgagtttcagttaaggagctaggtgaacgcggtgaatttttgaattcggtttgggggactcagagaaaatcctcaattccccctagggttccttcggttggggatggatttgtggccgattaaggtccgttttggagaaacttctttactatcattgatagagacttttgtggactttaatctatttaattagcccataagatgataaggaatggtttgcctttggtttacatgttttcagttttagctcacaacacccgagtggtttctgaaatctatctattgtcatgagcatcatacgttcaaggtaagcaccatatgaacttagacactagcta

SEQ ID NO: 1733 - DNA, 470 bp, Zea Mays
tcaccacaggtccgctcataccctctgctcttttgtttcaacgtctttgtgtgcccctgatgctccccgaccccgccaattaagctaggaccccttagatcaccgggaacgcgttggtttggccgttgatcacacagtcaccgtggacagagcgtgttcgagctcagatagtgaaattggttgaggggaaacgcttattagggcttgaattaggtctgcgccgaagtagagcaccggtcgttgtgtgaatcggccgatgtaggctcaccggagcttggccctgcgttgttcgccgtcgtggacatcgggctgtgaagaaatagaactagggggatgtttttgtaaagtgtcagtgactctaggaatagtactgtgaccccgcttcaagttattcaaaacgtcgggggcctattcgcaaagtcaataccacgggcgcgggcgcgtgcgcttccgcctgaagatgggccgac

SEQ ID NO: 1734 - DNA, 394 bp, Zea Mays
caaatgtagacactaagcctaacaattgcattaggtgtcagttgatgtaggtatatttcaaagttcatcaaaacctctcctattatatcatacagagggaaccgaagtcctgctctgaagaagctattaaagacaacaacttcatcatccttcggctccagaatcacctcttcgttaccaaaacgaataggtttactctcggcctcccaaaatagcccaatttcttcatcataaccatatcgtctgctgtcgcagtagatttaccaaactcaatgtgactgggtttcactgggctcagaatagtgtaatcctcttcatcttcgttctcactcccttgaactgcaattttctcagcttcaacagtcaaagtaccttcggcaacaggcccctctgg

SEQ ID NO: 1735 - DNA, 445 bp, Zea Mays
gggagggtcgcactctatgacccggactaccatcttgaacaggagtgttggagacgaactcagaaaaggggctctgtggaggaagattccaggcagaataagataagggagcaccagcattcgaaattttgcctctcagcatcaaatcaatttggctcaacatgtcttcttcaggaatctgtctgttggtaattcgggtagtgtcattgaccccagtgtgcagataggccgggtaaactctatcttttagaggttgaatatttttgaagacaaaatcagcaacaacagctttagcagtcaagcctctatctttcaatgcacatatttcagcaagcaacactctggactcagcaagttctgaatctgtaggggcctctgtctaactgggcattcggacgtcaggctgcctccccgatcgaggagggagggacttgttgtggttctc

SEQ ID NO: 1736 - DNA, 445 bp, Zea Mays
ggggattggaggtcatcggtggcgagccctgttgatgctcggtcgccggcgggcttatccagctcgatggggaggaagatagggttagtgccgtggatctcgtagcaaacgaccacgattcaatacgaagtatatcttttcgcgcgatagatctaaaccgtaggtatgacatccgagggatagcgtagtctggcgggggtgatctgctgtgggcattgatctctgatcggatggatcacattgactacgagtctgggcggggtgtcgatctaatctacagcgtcaacgttggatcggacggctccgatgggccgatacccttttcggctgttagttttgcataagagcccctggaatattatagaatcaacccgcagtccatggtgactgtactctgtgtctagggaatcttgcgctgtggcccctgtgtatctgtttatttagc

SEQ ID NO: 1737 - DNA, 297 bp, Zea Mays
agtggattgaggcggggtacggggcgcgatgaatgtcgtcgccgccaggtatggaatggggatcggcgtggggaggagggtggggatcctcagcaaccttccatgctcatatcgcgtacagtcctcggccaccttcagcagatggaagcgggcgttaatggcggagcagaggggtaggagatccttgccatcttccatcgacggcgtggggaggaggaaggggcggatcagcgtggggaggatggctgagatcgcgtatgggtctgatggcagaaccgtgcgccatcctggactgta

SEQ ID NO: 1738 - DNA, 935 bp, Zea Mays
ggagcatcagaggcacacaaggacattgaaacgaaagagtagagggtatgagcggacctgagatgagctagccacggcgaggcgtctttcacggtggcagaaacagaattgggggaaatgggaaattggcgagctctggtgatcaattgagggcatggcttggtggcttggtgcttgactaccctacgggcccgtcggggtgctcaatttatagtgtgcttaagcggtggcctccaattttggattggcgcgctggcggtcggagaagaaaggagtcactggcgcacgagattagtggctgcaaccgtggcaacctcaccggcgatctctggataagtcagtacgagtcacggcggtgtggttaaagtgttaaggcacgtggcacaagaccatgaggtgtctaactccggcaagggttgattcaaggtgatcggggtagagcggacacggtggccagacaaacagtgccttaagcatccggggggagaagatcttttcaccgcggaacgttatccgggcgccggtgagcacgaatcacctcaccggcgtgaatccacgcgtggggtcgccggcggccggttcactgaaccaatagatttttctggtcactgtaccatcaaattcttcttcagtcagtctgacagaccatgtttggggcgaatttcctcccgattttgtatggtaaccagaccaatgctctgcagcaaagttgtagcctaatagaccagctcaaacttttctacattgtgcacccacaaaaagtcatagaaactcgcttaaaatcgagccctaagttcattcaatctcattgtcagtctaaattcagacttagggcagtctgacagcccaactttgagctcattttactccaaatttttcatgtgaccaaggcttaatccctatagaaaagttattctccttacatagctctacaa

SEQ ID NO: 1739 - DNA, 363 bp, Zea Mays
attttcctctcgtcgagcctgttctggatctcgtgttcttttttgcgagatcaccgaaccgcttctcctcgcgaaaagcaagtcacttgcatctgccatccccgactacctcgtcgacccttcgtctattcccccggtctacccttcgtctaagtctatcccttccatcaatctcacctcgcttcatctcgtcgcgcaacgctcgtgcgtgcaacctcctcctcgcttcgccacaccccacctctatttatatacgactccttccctctacacagataggaacttcttccctggatccggatctcgcgagcagcagttaccaggtacgcagctctctcatcctcccttcgtcctataccgacg

SEQ ID NO: 1740 - DNA, 495 bp, Zea Mays
aagtcttcctgttttggtgcttgggggtgatttgggtggtggatgtttggctgatgcgggtgcggaggcgggagtgggggtggtacgacttgtacctcctagtggtgttggtacgcatggttaggtggatgctgagcggggccatggttatatggttgtgggaggtggtgttgatatgtgtgcgcgacaactcttgggttgtcggctggttgcgcctgagacatccggtccctggtggccttcgtttccaggcaatcccttgttgggtgcgcgcagtcttcgccgtgaaacaggcagtaaaatctgcgcggctgttgtgcccgtcctcggccccgaccacgagtgccattgttgtggccctaggggggataatcttgacggcgagaggcctcgccggcggggtgctggttggcaatgttatgcacctgctgctgactacggctgtcccgatcggagtcttactacgaaggccttgtccatgttcggctggactgc

SEQ ID NO: 1741 - DNA, 511 bp, Zea Mays
ccggtttttgctgaagctgatcccaatgggtgtgacccgactgatgctgaacccaatgggtgtgaccttgatgatgttgaacccaatgggtgtaatccggccaaagttgatcccaatgggtgtaccgtccgtattattgatgaagatgaggaagaggaggaggaaattcccttgattcggaagaacagccggcgctacatagccagcgggagagtagtggtgttccttctctagctttgtctgctctcgttggtctgcaagaattgtctctggcaaaatttgatcaaactctcgaagacatggtcccagaagatctgttgtcagagccggcagatggtggaatgatggaagtttgcgctgatgtgcctgatgccgggttagagttatcccgagcagcatctcatgcctcgtcgaccttggagcgtggtcttaagagccgagaggctgatctggattgctccgttcccatggaagttgttgaaggtccttcagccttagaggtgcctaccac

SEQ ID NO: 1742 - DNA, 374 bp, Zea Mays
ctggacgtccttgatatgggccggaggcctcatcgcatcaatcgccttgatcttctctgggtttgcctcaatgccctagtgcggctaatgaccccgtaagcttctggacgtccttgatacgggccggaggcctcattgcatcaatcgccttgatcttctctaggtttgcctcaatgtcccggtgtgaaaccaggaaccccagcaacttccctgcagagacaccaaagacacacttgtccgggttcagcttcgtgcgggttgcccgcagcctgtcgaagaccagggttaagtcttccactagggtcgaccctctcttagtcttgaccacgatgtcatcgacgtatacctccaccttgtccctaatcaggtcccca

SEQ ID NO: 1743 - DNA, 586 bp, Zea Mays
gacgggccattttgagtctatagagcaaaaagtggtgggaaaatataattacaacaatgacaggtgtaggcgtagaagatatgtgggaaccatggaagtggaaactaaaataaaattagaactatgacaagtgaagacgtagatgatatgtgggaaccgttgaagtcttgctaacagaggttgtccgtagcggacgccccttccttccccctcccctatgttggaggctacatgacacctctaagcgatgtagtggttgcctcttcgatgccctctatcgtattgcaatcgtctctcccctctctccccctcaatcgagtgtgaccctgctctatcttctcgcgtcccacagctaaggcctccaagcttgttcgccttcgctgaaccacccactgctgctcgacacaaggaagaggccaagtgggagttgtagatgggtatgcgcgacgaaaggaagcaaatagaagcgggggtgtcgacgctcgccatggatttagcagcgagaacagaagcgtaggagagcgtgccatatccattatcggagcgaaagctcaacctactcgaacttggattcacttgaactcac

SEQ ID NO: 1744 - DNA, 295 bp, Zea Mays
cgccgctggtgccacgccctccattccacgcgattcccaaccggtcaacccgctgcgtcctgatggctacatgatttgatctcccgtctatgcgcctggggaagaagaaagcaaaactgtcgtgcgtggaacgtggatgcgtacaggagatgaacactacaacacaaaccccctatagcaacgcatctgcagcaacacatggttttatgtgttgtaagaaattagcggacaacgcttaatatgcgttgcaagcagcatccgtcaagttattacagtagtggcaacgcttaatata

SEQ ID NO: 1745 - DNA, 739 bp, Zea Mays
aatttggagaaaatttgactccaagttgacctgtcaggctgtcttaggtctgaaatcagactgacagtggcctagaactatgtttgagagccattttgagctagatctgttgctcgtttggtggttgttgctacaacaaaatttctgctggtatgaagggctgcaagtttactactggcgaattagcaagttcttatatagaaatttgtgttctgggtgttacaagttggactgtcaggagctctgaatcgcagttccgatggtacaatgtctcgatcaggtcgtcagctctatccctcgccgccgacgagccgcgcgcggattcgtgctttcgccgccgtgattcatgctcggatcggttggatagcgcttggggttgagtaaatatcatcgccgtggatatactccagccactaaactactccgaccaccgtaccgagctagtcacggatgcttcggatgtgttcgccggagacagccgcttcacggccttgcaccacgtgcctaggcacatttaccgcatcgccgtgactcgcttaagccatcggatcatcgcaggggagcccgccacggtattctccacgaatccactgcgccagtgacctcccattcctccgaccgccgcacgtctcaatccaaattcaccggccaccgctcttgcctgctataaatggagcccgtcgtgagctccgtagggtaatcacgcatctaagccgccaagtcttgtcttcaattgtcc

SEQ ID NO: 1746 - DNA, 446 bp, Zea Mays
ggtcgtcgcatgcaaataggaagtgttgcatggcctcaggatcacggagcccggtaaagtctaggtcacgacccgaatcgtcttcctccttagagtctaggcaccccaaggggaaggggagattagcatacatgctagtgtaggttcttgtgtcgaagctcgcttgaaagtggatgggggttgaatatagaaggttctcccatggcaagtgttggagccaacacctcctgctccataggaggagtgggcgaagccgatgcctcctgatccacaggtggaggagccggcgaagatggcatcactcgacccatgtgggggagccggcggggcctgcgcccatcgtgctacagggggagccagtggagtcggcgatgggggtgacgcatgttgatgtcgatgctttgggcgtgaggctaacgctcgtcaggtcactcacaagggagtct

SEQ ID NO: 1747 - DNA, 469 bp, Zea Mays
aattgatgtgatcttaggattggattggttaaccaagcataatggtgtcataagttgcgtagataagaccgttcttctcactgaccaccaagggaagtcagtttcatgtcaggctcatccacccgcccaagatccaatggtgtttaatctagcagcagaaagcatatctgtagtagaagaattcatgtatgtgtttccagaagaattgccaggaatgacgccagaaagagaagtagagttctacattgatctaattcctggcaccgcaccaatcgcaaaaagaccgtaccgcatggctcccaccgaattggcagaactaaaactccagatcgcagaacttcaacaaaaagggtacattcgtcccagctcatctccttggggagcaccagtcctgttcgtcaccaaaaaggatggaagtatgaggatgtgcattgactatcgatccttaaatgaagttacaatcaaaaac

SEQ ID NO: 1748 - DNA, 533 bp, Zea Mays
cctttggaagtatctatatcattgtcggcccggaatggttgggggacagcaccaacttgttggtggcgccagtctggaactgcgtcgcgggaggaaaacagagtacctcgacatccctctgaaggatagcatcaaggggtggcgcctcgagtggttcatcgtggagaatcactgcaaatcccttccccctcggtcggggaggcagccagatgtccatactccaagctgggtagaatctccgaccccttcagaggtaacagaggcaaaagtgttgcttgctgaggtctgcttgttgaaagacagaggtttgactgttgaagctgtggtcgctgatttcgtcttcaagaatattcagcctttgaaggacagggcatacccagcttatctgtacagtggtatcaatgactctacccaggtcacaaacaggagaattcccactgaagatttggtgagccgactggatatgattctgaggggtagagtgtcaaatgttggtgctcctattacctattatgcgtggaatctgccacctt

SEQ ID NO: 1749 - DNA, 392 bp, Zea Mays
ggcagggtcacacccattgggatcagcattagcaaggtcacacccattgggatcagcatcagcagggtcacacccgttgagatcaacatcagcatggtcacacccattgggatcagctccagtaaagagttccaccggtacttcttcagcagcaggagcagaagggccagcatcctggtccaaacacgacactcgccgaagccgtctctttttctttttcttcccctcggcaggtgcagttggatgactgacctggcggagacgtttcgggcgagtaccctcaggcctttgagtatccacggttttttcaggctctaggatagttgcaacagccattgtttcagcagggaccgagacagaagaattcccagccaacatgtccagcatagcac

SEQ ID NO: 1750 - DNA, 680 bp, Zea Mays
ctggactgcggttgtgaattccagagagcacagggtctactacgcaaatagttccaagactcaggactggaccacgggttattttctgataagtgtagggtctcttacgcaagatgtgctggccgaaggggtttcctggaattctggtcatccgatcacaactgaacggctaagatctgttctgataataatccgaaccggtacacgctcttgaccgccagatctcgatccaacgaccacgagttcagaactacgcgatccaatctaacgcgtgagatctcgatccaacggttcctatttggctacccccagatttaatccaaaccgcccaatcgttgatccgacggcaagcggctttcttccccgaccgaggccgagcagcaaaatactcgaaccacgcgcggaggcgcgcgcgccatccgcagcagcgctgccaccggcgtagaccgaactggcgtcccagcgctcaatcatcgcgcgaatcgggttaaaatgaagaggagactcgagcgaatacatgggtagggtacctgccaacgaaggaagcgacgacagagctcgctacggcaaatggcggcttcttcatggcggtcggacagtggcgcgcagccaggcggtttgaggtcacggccctcccgatgaagcccagcagtacctccccgaggtacccagtaacaacc

SEQ ID NO: 1751 - DNA, 587 bp, Zea Mays
ctttggctttgagtacgatatagctaactacatgtcatactgtcatgtgtcgcctgcatatagaaccttcatcgcatccctgcagactgtgtccatcccgaaagattggagatgtgcaaaacagaatccaaggtggaagaaggctatggaagaagaattacatgccctcatgaggaacaaaacatgggaacttgctctgctcccagaagggaagaaggttgtgggttgtaagtggatcttcactgtaaaacagacccctgagggcaagatagacaggtacaaagcaagactggttgcaaaaggatacagtcaaacatatgggattgactatgatgagacttttgcacccgtggcgaagatgggcactgttagaactttgatctcatgtgcagttaattttggatggccccttcaccaactagatgtgaaaaatgcatttcttcatggtgacttacaggaagaggtctatatggaaattccacctgggtttgcgaatgaacaaactgttgggaaagtgtgcaaacttaaaaagtcgctctatggcctgaagcagtcaccacgtgcatggttcgacaggtttagacgtg

SEQ ID NO: 1752 - DNA, 427 bp, Zea Mays
aaccatcaaaattaggaaaactcatattaggcaccaatgatcctgatccctgagaccaattacccactgattggttcagcaccgatccccaattgcaaggtgcatgggggttctaggattcgtacctccaaatgacgagaacagacgtgatccttccatgttcgccccggcttctgatgggaatgtcccactgaatgtagggagccttagggcaacgaaatctcaagaggtggaatctcctgcagcaccgctccaccaagccctccttgctcctccacgggttggttgatcatcgacctcttgctgagatactccacctgaccctgaatccttcagctcccccgcaatcaggttcatcttcgcttccacctccggcttccacttctgaatttccccttgctcaacaatcacacccttcatcgttgac

SEQ ID NO: 1753 - DNA, 328 bp, Zea Mays
ggccattgctgatggtacagcagaattaatatggcttcaagtattgctgcgagaacttggcatatcttcatctcgtgctgctgtcatgtggtgcaataatattggtgcgacatacttgtgtgctaatccagtatttcatcgacgatcaaaacatgtggaggtagactatcactttgtctgagaacgtgttgctacacatcaactagaggttcgtccaatctcgacaaaggaccaagttgcaaagtagggtaaactcagctttcagtcgctactagtgcctctacagcctaagtaatggtgcgttctatcattctatgtaacgagctgc

SEQ ID NO: 1754 - DNA, 578 bp, Zea Mays
catttgaagccactaccaccctttacagacacctcaccaagaatatccccactcctctacagttccatatccaagttagagctttgctcctttaaatccttcacgatgtgtggcagaattatccctccaatcttttgagagattgttcttctaacatcccacttgtccataataagttgcttgatcttgtccatcaagtcatctaaattcaaccccttgtacttattaacccaattgttgaaacactctgccaaattattggttacataatcaaccttgcaaatggtacagaattggcttcttgaccatatcctagtatgacattcctttatgtaattcattgctacaggtttagcctcatccattgctttccaatgtttctcaaagaaatatgggctccatgaataagctgctgcccaaagatggtcatcaaatatcttgccactatacctttttttgaagttcatcaccaaatgtagcatgcattccctatgttctgcagttgggaatacttccttcactcctgccatcaccccttgcccagcatctgtacatatagctaacccttctggtgttcc

SEQ ID NO: 1755 - DNA, 864 bp, Zea Mays
ggactttgctttttctgccataccttgccctgctgccatgccagtatctgaagtttgttgaccagctttgtctttaggcgcgacagccttcgtctcaatgagcacggcaggcccagcttcggcttcgacctggaccttagcaactttggcaacattcttaataggagcaagggtcaaggcctttgtggtctccataacagcgtccagcacgctggccatcctcctcctcttgggaaattcttaataggagcaggacctttttgcatcttcagcaaatttgcctttgccagtgggctcaaaatttctggcatttttactgtttcttccacctttggctcttcgaccgtatcatccttagcttcggctgacccgattgtaggcacctttggcaatacaatggactcttcaacgctctacacgatggaaacagcttgttttgcttcggcagttgaagaggtcccttcgctaaattcaggcactatggctggttcaatatatcgcggtcggtgggtcagaaccttcattttcttgcccttcggcacagcagtagtagccgaagcaacaatttttctcttcttcccttgccttcacaacgggtagtgataatcagggtatacgaagctgattgcatcgaataccctgttcaatcttttcttcccctggcccccgaaggctgcaaacaaggcatcatcttcggccttggaatatgtcccaagtagctcgtcgctggtagcttcaatgcatttcaaccagtcatcatttggttcatcaaacttctctctaaatctgaaggtatacttcaatcgaactaagccattttcactggattcggcagtagtctccttcggcatatcctagctctcc

SEQ ID NO: 1756 - DNA, 481 bp, Zea Mays
tcgtgttgtcggcatggttgaggactggcggaacacatgtccaagacatgggggatgcgcacatggtgcgatactcacgacggtttggtggttgagccacaaaaccaccccgcgctatagatagcaggttttgctgagtttgaccctcaaaacttggcggcggcaatcccggagggaaccgatggcgacacatggcgtcacaacgaagggagcttcaaggcgaagcaacttcatatggagcgtgtggccgttggattaaaagcctagaagttcgtctattttgtccctagcggattggataaactctatgtaaatgggctagtttaggaaatataaataaccccccataaatagagggggatggttagttcagcaccccttggttgtcattgcttagtctatcttgtttagaactcctaattattttcctctttaggtagttacctcttgtgccacgagatccgcaacgattttgtctatc

SEQ ID NO: 1757 - DNA, 517 bp, Zea Mays
aaattggatccacatgacatgaccatacgcctaggggctggcaaggaactgaagataacaaaagagacggttcgtctcattttgggtttgccatgtgctggggggcagggagtttactgattggtacggtgaagtggatgctgctgcaaaactcagacgtgatctcaaagttggtaaagaagaatttgatgttgtcaagcttcaggaaaagatagtgcttggcaatgatgatgagttatcaatcagatgtttttttctgattctattcaatcgacttctttttccatctgcttcatggggcattacaaacaatgaggtactaatgacttcaaacatggcccgaatggctgatattgactggtgtcaactagtttacatggaattgtgtgatgctgccacacgttggcacaaaaggaacaaaacaaacattacagcaacaatttatggatgttcactcattgttctagtaagtaattctttttgtttactgtgcatatatatgatatgcaaatatttg

SEQ ID NO: 1758 - DNA, 638 bp, Zea Mays
aaggaagtgccgtcaggctgccgctttgagttgcctgctgctgcgacgacgaagaaaacaacaaagcatcgtcaagctgcctctcggcttccccggcccaaccaccaccaggcttctacgttcagagagctccggctgcagctgtgcccgctgttcaccaccactcagtgccgtgagagcggatccaaaccaggagcacatcgcgactccatcggcaaggaaagtcttccgtcaaacacctctctagggcataccctagagagactggttccagaaatctcaagggcatacccttgagaaaaattgcgtcactcgatcctacacaatcttaagggcatactcttaagagagatcacacgcacgggcatatacgccgctgtggccaatcgaaaaggtccactccaaggtaagaaaagccccttatgtcgatatactattccttgtcttctttgccatcgtggtagaactatgttcttcgactcgtgttgttgatacaaaattaggaacaagtgctaaagtcgacatcatgccaaaaataattatactccacacacatgtacaaattatcatgaatatatgcggtaagttgtacgtggaaattgaaattctatgttaaataatgttcaaaaatatatttg

SEQ ID NO: 1759 - DNA, 664 bp, Zea Mays
ctccctccatctcgacgggtcagaacaaagaccgccgagaattccgaaggctgagcatgtggaacacgaagaccacatgttgttacccgctcgttattgtaatatggggcccacgtataaatggcccatgttgcagggtcccacttgtaagctgataagagggcagagttgttagtgtgtctgtgtgtgcttgtaattaatcacgctgtaatgacccaccataacccccaagggagaatattccagggataacataggtaaccgagggcacaatcgtctttgatagggtagagttgtccctcggttacctataaatacccccgtacagtccattgcgggggacggaaaaacagtgttgccctaatactctgtgttaaacggcatcaaactttttcctgttctcccactgtttgagcttggctgaccacgagttagcgagttctaacagggggtcatggtctgaattattggagctagagtccaagagctctagtttaggtgactaaaagttaggtgatgctatgatgacagaacgatgctataggtgccaaacttcccacgggtgtcgtaccaaacacactaggatatcaaaagtacttgacgaaagattgtttagggagcgaggagtgaaccctaacaccgtgaagtatgcctactaggtcac

SEQ ID NO: 1760 - DNA, 728 bp, Zea Mays
tcgcctgaacagtaaccgaggaggaaaaagcagtggcgcggcttaccggcgacggtagaggtccggcgaagggtcgggtgaggtccaggggtctctagcgatcacgtcgaggtgcgggtcgtcggctgtggtgaccgtaggtgggctggccgtgtgcgcaggcggtcgagctcgctggtggtgcgtgctccggcctgctcacggtggtagggtcaaatcaaagtgctcgaggagcttcatgggaggttagcgatgctgtgggtgcaaggaattggagaatagctcaccatgtgaccttgtccacacgcggtatggtcggctgatgtccggtgaggtcgcgcttgcttctccggtgaggcaatgtcctgactcaagcttgggaaatctttacagtctctcggggaagccgtccagtggctagggcatggctgggggtcgatgggaagggctggccacggcggtcgtgcttgggcagtgatggcgggcggtgcagagctcgccggagttggagtttctgctcgaggtgtgaggcgaagtgaagagtggactgctacgcaccaggggcacttataggcgccctcgggcatggctgggcacaggcgtgggggatacgaaccgaccgtgcgcggcgggcgcgcagagggcagccagtgcgcggccgagcgcttgagcacacgatcgaacacgtggacgtgtgtttcttcctaagttcaaacgcctgttggtcg

SEQ ID NO: 1761 - DNA, 874 bp, Zea Mays
aagatggcaggagagctaggtagcacacaattgtgaggcaatcctaaggttgtggctaggagatcgtgcatatggccatgcgaaacactattttgcagtgtagatttcaccattcacaaagtgaagtttaaaatagaaggtaggatagataaggttgcaagatatagcgtaaaaggaaccatagtcatacctgtttttcttgaacatgcttgcatgctttcgctatcaacgctatcttggattccataatgggctcgtcaagtcaaagaaacaacaactcaaaacaaccatgctagcgtcaagttcaactactattagtttcatgctgcccgctagccatatgtatagtgtttacatgtgtgtcctatcgtgacctttcctcaaaacatgtattgtgttgtgtgttccggcattgctacactactcacatgactcctcactcctggtatgtgtgtccatggatacatggatcatttggttctttatttgtttgtcatttcttgttgtatagtcaaaatggttcacgaaagatcacaggcttatattttcatgttcgcatcactcctacaggaatgacttttgttgtcagcatgtcaccgtcgattggtaaaggacatgtagtgatagtgcatcactattagttcaatcgcttgaatcagcaatgatgggttagcatggagtgatattacaactatcgttgggagatgaagtcagaaactgaaagtgatataggttatcacatctggcttttgaatgagagtgatatctgataacaaagtaaatcgtattacatagtaataagtgagtgtattacatagttaatatgagagaaaactatattttacactcacaaacgagtggtagtggtagaaag

SEQ ID NO: 1762 - DNA, 325 bp, Zea Mays
gttgataaggaaaaacatgccagaaaaccaatggcaccaagatctgaaatgtgggaacacttcatcaagattaaggatgaccaaggtgttgtgaagaaaggaaaatgcaagtactgcagtcgtgccattagagctgattcttatctgaatggcactactgcaatggggaggcattttaatatctgcaagcgcaatccccataagaacaataaggatccgatgcgaacaaatcttaaagtgagccaaggagaaggtgttagcacttggaggtatgatcttgaggcaataaggcaagcttttgttcaaatggtcatagaggatgaac

SEQ ID NO: 1763 - DNA, 523 bp, Zea Mays
gaggagtcccgccgcgtagagcgcctgctagaggcagccgctgcagcgctagggagtaccctgtagccggcatgcaagctacagggcaaggggagggggaagcgcgcggtgtccgttgcggacagtctaagggcctgggtggcagtcgtacccattcgaagcgttaacgaaccctctcacacgtgtgtgccttcaggtcactgtctgtggacccagcgcgccagcttcaccctctttaacaaactcgctcgtgcgcagcgaggggatcgaggtgggaatcctggagtcggttgtgttgatcatgcatacctctgtcgcctctgcctatataacctagtcgcgcctcccatcccatctcatcttcttgaccaccaccaacagcgagagcaccataaccgagcacgaacgtgagagagaaggagagttgagtcaccgtcgtcgccttgtgcccacagccgttcggggtccgcgatgtggccagggtgctttgctggattgtgtatgtggtgccgctgtggtcgaa

SEQ ID NO: 1764 - DNA, 893 bp, Zea Mays
tggtgacctacatataatgacaatgcgacgagctctcgagtccaaaaaagtgaaaatccatataggttggcgttgggtgaaagatatcagatacaaatacgtatgtgccacactactcagataaattgacgatatagagtagaagcttgtttggatcgtataaacattagcacaggacacaatttagacaaaacctcgcaatcaagccacagaagtagcacaaaggcagtacattttcgcatccgtgaaatgtctgaaatgtagcggcagcaaatccgtgcactggtagaccagaagcgtctgtctcctgcccagaaattgaagggcctgaccacgacttaatcagtgcatgcattcagacgtttgggtcacatcagcagcgacattgtatattcgcctacctagtcagtacaagcagcgcctacccatgctccccaagtttcacacttcattgcggcaccatatttttttcgcagcacatacatacatacacacatctggaatatgcaagtacaatgtataatgtgtttttaaaaacttttaaactagttcacctcgccttttaaatagtctggcattactcttgaccacgaaaggaaaaactgggatgtatatacatacaaatagtaagtgtgaactttaattagagccgaattgaagaacaaaaaactagccaggttctccaccatgcgatcatgacagccatgagcaacattgaggcagagttctcaggtcactatccacagcataaaagtgagcgaataaataaacggtaacagtattaaacatggtagatgtgagaagtatttctgtatctgtccaggaccgcaaaggaagaagatgaatagtaatgaagtagcagaaacgttggtggttgacaccagtattccagc

SEQ ID NO: 1765 - DNA, 478 bp, Zea Mays
tgcatcgccacgaactgagaagtcccaggcacatagaactgttgcggagggagtggaactgcaaattgctgctcagcgcttgacatcatgttgatagttccctgagaagaggaggaagtcactggctcccatctgagcttcccattaggattcctcctacacaccacatccttgtggtcttgactacagatggagcacctgccactccactgacactcagcacggcgatgcgcatcaccacaacaaaaacacaccagccccagcccgggcttaggaacagcctgatacctctgagtagttcctcccgaactacccgattcagaagatttgccatggtaggggtggtggcgctggtgctgagacttgcccctcttgtgggctggacctctagtgttgccccttctcgcgtcctggccatgaggctgatcaacacccgaagacttctatgactccatggtgtactggtgttgcatctcca

SEQ ID NO: 1766 - DNA, 668 bp, Zea Mays
gttccaaataacctagtgagtcctcagtttgtaatgcatgccaattggccaaaagtcatcaacttccttataaattatccattcatcgtaccactgcacctcttgaattaattcattcagatgtttggggtcccgctcctgtttctgttgggtgctacaaatactatattagcttcattgatgattttactaaattcacttggcttttatcttatgaaagatagaactgtagcccagcacatttttcgcctatttcaagcccatgttgaacgccttcttaatacaaaaataaaagtgtccaatctcactggggtggggaatataaaaaattgcacacccaatttttcacttccttagggatttctcattgtgtttcatgtcctcacacccatcagcaaaatggcagtgatgaacgcaaacatcgccatattgtagaaaccggtctagctctcctagcacattctagcatgcctcttcgtttttgggatgaagcctttttaacatctgcctatcttgtcaatcggcttcctacccgtgttattgacaacttgtcacctcttgaacgtctttttaacgtgcctcccaactatttgtagcatcccaaaaatcctaacccaggtttgaaaccctaatctaccctttcccctcctttcatcctctaattccaa

SEQ ID NO: 1767 - DNA, 530 bp, Zea Mays
gtagaagtccctgaaatcctggctgtcaaactgtttgccgttgtcgactgtgagctcggacgggactccgaatcggcaaacaatgttttgccagaagaacttctgggcagtcttcgacgttattgtggatacttcccttgcctcgatccacttggtaaaatactcgacggcgacaaaggtgaacttgaggttcccttgggctgtgggtagtggcccaacaatatccagcccccagcgttgaagtggccatgtgtgggcaatcagctttgtgtattgcgaaggttgcttgaacggggagataacttctggcaggcttcgcacgacctcgtgatttgattcgcggcgcaaattatagcgggccagtagaacccttgacggatcaccttggcagcaagggctctaggccctgagtgagagccacaagttccgctgtggacttcgcgcaggatctggatgccttcggtttcggtgacacatttaagcatgggttgactgacccccttcttgtaaagttggccctcaatgagtgc

SEQ ID NO: 1768 - DNA, 902 bp, Zea Mays
gcctgcaagagtaattaacttgtctactactgagttctcaccccctcctctcccatctcattccaaacttgagattatggccatttcgtcgaagaccgttgctgtgtccatgctgcttctcagtgctgtcttcttcgtgctgctctccgcgccagctcatgctaggaagctggggacgatgagggcgcctaccagcagcgtgcgtcgtcctccggcggctccatgcactccaaggagtattctgcaggaggtcgctactcagaccgaatctaccactactccaggtcacagccccagcattggccacaacagccctccgaattgaaatgctctctgcatctggaatcatctgtaccccgagcgagtatatatatcccatgcttatatatgtggtgtttgttcccttgaaatcgtatggtttgtttgaacttgaaaggcaacctgaatttttttgtttcttttctcttttagaatccaccaccagtaaatccagagcatgcatgcatgtggttcatatgctttattttttcccccacttttgtgtgaaagacttgctaaacatgaggaggccaggggcggtgtagccgtgtgtgtctcttctgtaaggtgttactcgatgctgtaaacttgaggaggtgtattgtcacctgatcttgtttaaagttttgatctacctttttgtgtgtatcccttcgattcaataaacatcagatttgtgccattcaaaccggaaaacaacaccttctgtttcgtgcatggcttttctgtatctatgccatgtcttggtcctttgtgcatggcatctgcttgcacgtacgttttagggcttccccagcgtgccatgttggtgtgctgcccctaacctccacctctgtacactactacagcacacctctgtacag

SEQ ID NO: 1769 - DNA, 705 bp, Zea Mays
ttgttttatatacgataattgctacatatctgttaacagttctagaatgcaagatcgatcaaattactgacctcacgattatgcaaaataattcgagctgatctcattctcaggaaaactcatgaagtccatgaactgcggaggagtttagggttaggggctgggggttttggtggggaggaatttgttcttgacaatggcaccgctcattgtggtggtgggaattgatgatgggggaggtatgtttcattctagttagcgagggactagcagtgatgacagatgcagtggcaggagccgctagagacagaggaggcaggcacagtgggggtgctagagccaggaggaaaactatgggagaagcgaaaggagtcgtacggcttggtgctcatggtgtgcgacaccatgacacgcagatgacaggaaggcggcaggcggggtgcttcatttggcccattgaatctggtgtacaggtatcattgcagtagcaatatggaaaagaaaacaggtcactggatgtccgtcataaaggtccaaatctgacgtactttgggcacaacaatctgtctcagaatttgcttttggaggtgaatcaatctggttcattagtttatctaatgcattgggtgacgtttgatactggccatgggtttacaaaaatattccacaatcagaatccagaagtgtctagtttttgctacaaat

SEQ ID NO: 1770 - DNA, 570 bp, Zea Mays
cgagcgagcacgagcacagaacacaagaaggatcggggggcagtctgaactctgcagagtccagtgcgttcacagtccggtctctttcgttgttccatttcttttgttgagaaaatcggtcttgcactctagctctgcacagagagacacggtattggggacagagctagtagggagtgagcacatgtataaccttttttggtacaaagagaggagcaaccaaccacttcatgctccacgcggccgggctcaccaccggcctccttccatagcgggagagcgttgcttaaattattaaatgctttgcgttgaccccttcggtcccatttgtactcacatggttggcacagagattcaaatgcctcccacctcccacgttgttgcacagtgttttgcccatcagaatatttcatgacacttcctaagacagatcacgcggcgtgcatgtttttgtcaaaaacttatcccaattcccatcccaaccatgtggcatgctcgctcccattatacccacatagttggcacggagattcaccgactcccacgtcccacgttatcgcacaatgattt

SEQ ID NO: 1771 - DNA, 361 bp, Zea Mays
tgcttagcagcgatggttgtttatgctgatagtgaaggatattcgttataaatagactagaatgcgtgtgtttgaggttgtctacatatttgctgcctttcataatataccaatttaatttcagtgtagcaagttgaattggggactacatggcctccatgatgcatggtaccatctctagaactggatgggcattagggcagtgagtgcggtactgtgatcccaaagcttaaaacagtaatttctatgtctatttaatttatgtaaactgtttctatagaaactgtttctatgttccaaatggatagtttctattgaatgacgttttattcaatcatgtttcttttctcacttgtctacc

SEQ ID NO: 1772 - DNA, 961 bp, Zea Mays
gaaaatatgtggtgtgttgtttgatgcgaagactagattacaaaatgcggattatgttttagggatgcatcgataggcgtctaggtgaaaagtgtacttgttttatgcatgtgatcgatgattgggatagtcggggcgaatgaggagtatgattaatcctgttaaagtcacttgtgcggttgatgtcttgtgcgtaatatggggacacgtgtgtgcgcgtgtgccgtggtgcattatagtgatggtggcgtaaggtaattgattgaggtgtgagggtatatgccgtaatatggttatactcacaacgaagaaagatgtatgtctggtgtaacacaacgtttagattgctgtcgtgtaaccgtgtgaaggatgctcctgatggtcatgtgactaaagggtgttgtagtggcaaggcgagaagtaagtctaatatttttaaaacgattagttgatagcacctatcggcttcgtcatgatttttgtcgtatggtgaatcgatgccttgtcgtcgtagtctcggggaattttcggaaatgttctgatgccttactgatggggttgaatgtacttgtgatgtattacaatagttgtgtgtcgtgcatgtatccaaaaatggtaaaatgtggtgtatgttggtaattagaaaatagtcacgtcattagccaactcgtgttcagcaggagtcgattgcgttaagtgattgctatatacatattgtgtctcggagtgctataataatgagttagcagacttgttagatggttttgggttaagttcgtggtcacgatgaattgcttgttgtagtctaaatgcgtgtggttatggtcacgggtaaaaattagtagtgctcatgtggtgtctaagttaaaatgcaaattattgggtgaaacgcatttccatattgattatcgtagagaatgcgttgttaattaagtatggtacttctagtgctcgaaatgac

SEQ ID NO: 1773 - DNA, 505 bp, Zea Mays
catgctacgggggataccgtaccgtggtattcattcagaaaagaagcaatcaaagactagatagactgtcgtggcccgcttctctctacacgattttgcaatggacaataacggatgtggtggcatgcatgcacatggatgacatgtgggaccatagtgcctaccttcgtcgagtcaaacgggtgaataaaatggaacgttaacagattgggcagggcagcagctagcaccgacggtaattttagcactgtccttgatcggatagcgcctgaaactttacaatttggcatgagtagtggtgattgctgattggatctactgctgtcgtacgctatgggcgctgtgtatgcattcgtattaaattccccgccattgcagccgaatttgaattggtacgtgtatggtgccgattgcagcttctgcagtgcaggctgttgtttggtccgcctgctggctgttgcagaggtgaggtttgcgggcttcctaaaataagctctgctcttgc

SEQ ID NO: 1774 - DNA, 586 bp, Zea Mays
ccaacaccttctcctaagggaacctcctgactcccctaggaatgttgcgccgtcctttcgacgaccagcaccatgctcaccgcctttgtagccgctgtaatatataagtacagcagctcccctggctctggagctaccagtatcagtagggacacaaggtgctgcttcaactcttggaaggctcgctctacctcttcggtccaagagaatggactggactttcgtaagagcttgaagaagggtagcgccctctcagccagccttgagatgaagcggctaagggcgaccagtgaccccgtgagcttctggacgtccttgatctgggccagaggcctcattgcctcaattgccctaatcttgtccgggtttgcttcaatgccccggtgcgaaaccaggaatcccagcaacttccctgtggagacaccaaagacgcacttctccgggttcagcttcgtacgtgttgcccgtagcttgtcaaagaccagggtcaagtcttccaccagagtcgaccctctcttagtcttgaccatgatgtcatcgacatatatctctatcttgtccctaattaggtccccaaaggtcttac

SEQ ID NO: 1775 - DNA, 467 bp, Zea Mays
gttcgagcctcaaaccccggtatgaagcacttgtgctgttcattagggcgtccgcatcgtgtagctgtttttgcgggtgatttgggggcttgggtgccgttcggccatgctcgccggtgatgctccgtcgggcgggtgtggcggcgccgccgtcctggccagtcgtgtgggggagatgttggtgcaccgtccgatcgtgcacgtgtggctgagattagttggtagataccgcttcgcccgatcgcgatctgggacgttgatctcccatcgggcggtcagcgggcatcgcgcgactcattaaaagtggaccgttggatcgggatccgaccactggcattgggtaccgctttgggcattatgataatctaatccgggccgctgtggtttgatcggacggtccttattgaaccataccccttcgccgtagtgtttttgcaaaagcgcccttgcacttttataaaactaac

SEQ ID NO: 1776 - DNA, 540 bp, Zea Mays
cgttacctcttcaaggttggtcaatacatatagcattatatgctaccactcttcatgtctcaggctcttgtggtttaaccacttgcgcttccaagttgccctcaaaaaatgctgaggttcgattcattgtcgccatcattgtaacgaggggtggattatgcacgctcggtagtttgtcaaaatagtaagttgttgtgacgtttgacacctcctacagtatgtatgcctctagaatggaagccttgattttgcatttatttttacatttctttcagatagtctttagacatctattgattggatagcaccaacgtccctgcatgccccccattcgtgcctcatacgggagatgaagaatcaaatgctgcatcagattgaaaaagccgggtggaaacatcttctccagcttgcacagtaacatgggtgccattctttccaagtttgcaatcatggtccgagataactcttttgcacaaagatggcagaagaaataggtcaactctgcaagcactagccagacatgcttagggacataacctc

SEQ ID NO: 1777 - DNA, 349 bp, Zea Mays
gtgaagaagaagaaggtcaactttgcttttacaatgctctgttgtggtggttgtcacatttctggcaaccagcgctacggatggaatcataaatcagacacagggactgccttgtagggccacattggactacaccaatgtcttccagtctcagctgattctgtgttaggcttgaggattatctaggtggctagttgcttctactacttatccacttaggacgccaaagggaatgaggcagtgtggtttggagacattgtagcttcaaatcactctcatatagccatgtcatcttgcacgcacgtctgtataggagtttgtccatgcaaaattgtgattttctttttat

SEQ ID NO: 1778 - DNA, 429 bp, Zea Mays
gtggcagccgacaggaaacattgtcacaaccgcaaccagagtctattaatgattcagagccaatacaaatagatgatgatgagcctcgactagaggatgtggactttggaactaagagaaagcttacttctgttgtttggaaagatttcaaaaaagtcaaagtccgtgatgatgtcaaggcttaatgtctacattgccacaagcaacttggtgggaagagcactaatgggacaaaacatctccatgaccatttgaaaatatgcacactaagaaggatcaagctcatgggacagaacaaaacacttgcacagtcatatttaaggttaaattcacaggaatgagggaaaatatctgtggaaaattacacatttgatcctgaagttgctaggagagagcttgcttccatgattgcattacatgaatatccct

SEQ ID NO: 1779 - DNA, 734 bp, Zea Mays
tttaaaaaacctttctccgcccgagcagagctcaggctcacacttcctccctgtgcactctctgtctctagctctgctctttctccctcgcgtcgtctagctccggcgagctcctctagcctgtgctcggctcctccctctccttccctagtgagctgcccctggttctctcctctctgtctctctccctctgttatttctctcctgtgaagctcatcatccaccttttgaatttgaatcaaatcctatgaattcttgcggaatctaagtgtgcccaaggatgttatgtcctctcgagatgttcccctgcaggtattgagcaccctagggagggtttcgcatccaaaatagccatttcacaccgttctaaaaactcgcacgccatgtgctcgatgaaatgcataaaccagtcaaacaaactcaaattgaacccaaccttttccagcacactccagctactaccagtacctctcatgccaaatttcatgcctatacgatattccaggcacctgttacaccacctctttatctttagagtgatctgtttcgagccgagtgtcaaaaatgtttttcctctgccaaacttcaaaccaatcactcacttcactcattttcatacatatatacctatccatggagtatcagctcaattcccagtcatttcatacatcgtttcgaatttcaaactctctatggcacaattcatcgttcaaacatcggtctcgcgccgtttg

SEQ ID NO: 1780 - DNA, 357 bp, Zea Mays
cccagctcgggcatagggacagcccgaaacctctgagtacgtcctcccgaagtacccaattcagaggatttgccacggtaggggtggtggcgctggtgctaagagttgcccctcttgtgggctagacttccagtgttgcccctcctcgcgtcctggccacgaggctgatcaacacccgaagacttctgtgactccatggtgtactggtgttgcatctccacacccaatgcctgctccattgtagtacggaaatccaccaacggaaaggctcccagggcatgcctaatagaaggtttcaggccctgacagaactggctcaccttctccaactcattgtaagccacatgaggaacaaag

SEQ ID NO: 1781 - DNA, 807 bp, Zea Mays
gttaagcgccccttcatcttcgctgcaactggcggtcaaaaaggcgaaccaccgcccaagaagcgtacaaccgccccattgcgtgccccctcagcttcgctgcaaccggcggtccaacacgggggcccaggcccacatgtcatgcaaccggtgcaccggttattgggtgcaggaaaaccgcaccaccgcttgcgccaatgccacgccttctcggggctgtagcggaagtctgaaaagttaagtttttcagaaccagtgcagcgactcgaggcgccccgcgcatggcccaacagtgacattaagtacgatggtcacgagccagtcaagccgtgggaataggcggagcagacggcatgaccataggtgggctggcagtaactgcatcaacaggcgcacaggccaatcggactctagccccacctacagactcacatcctcctctaaggtgggcccgggggccactgtcggtaccctgaatcaggggtaccctctcctacagtacgaaggcgctgcacccatacgacacctcctggtcacacggagagcagcacccgaccccaccacatgggcaggcctaagggcaccacgtggcgaggatggatgatacgtcccaggaagcaccgttgggtccggacctccacagaggagcaccggacccctgtgagcacgagcccggagctctcgaggaggcatgctgagtccccccaagtgaggtccgggctttagtagggtcccgggatggaatggaccccggcacaagcaagggtccagtgccgacacgtgtctaggccttgccttgcgctcccc

SEQ ID NO: 1782 - DNA, 559 bp, Zea Mays
gtgaagatgtcggagttcggcgcctggtcgcgacctgagctcggcgtcggtcggccctacctccatcggcagtgacaagtccccctccctctcccatgcagctagtgccagtgcgctgcctcctagggccggcgttgggtgtgttgatggatgtaggcagcaacgtaaggaaggtgatgatcttgtgaccattgatttcccaatcgacggccaggactagaagctagataaccttttgccggttaaatccatgtcgcagaaattagatcggacgatccataggcaatcaaacttcattgaatctgtgacgtagatcttggaatgaacggctctaggtgcgtaccgattcaaacccttcgcgatttaatctggtgtgtccggtgttgatcggacggccctgggatcccgataccccttcgtcgttacaaattcacaaaagagactccgtagttttttagaatgaacccgcagtccacactgtggggaagcctgagtcttagggtaattgtgattatggcccctgtgtttttctgttattggcgcccagtccagagctcgg

SEQ ID NO: 1783 - DNA, 495 bp, Zea Mays
cttggaaacatttcaggattatccactcagggatacaaagcgtgctatatttgtcaagagaatacaaatagttgttatctaaaaaatagtagaaaaattgtatacctgggacatcgtaggtggacacgcagaaatcatccataccgaaagaatgttgatgcattttatgggagtattgaaaataaaaaggctccatcacgcaggcctggacatgtggtttatgagagtgtgaaggacattgaaaataagttcgggaaacacaatttagcattgtctggaatttggaagaaaaaatccatattttggaggttaccttattggcgcgatctaagtgtgcgtcattgtcttgatcttatgcatattgagaagaatgtgtgtgaagctttgattggtacaatttttaacataaaagggaaaactaaggacaacaccaacacccagtgtgaccttgatgagctgaacattgaaaagccccaggaatggtatactctgacc

SEQ ID NO: 1784 - DNA, 423 bp, Zea Mays
gcatatcatgctatatgtattgaccaaccttgaagaggtgatgccatacatggaacaatttcttcatgaattctggcgtcgatcaagggacccaactccacaggaatatgatactcttcttagaaagggtgcgagaaatggattgcccgatttcatttcctggttcaaacgtaaggtatgtgcttagtttgtcaaagagattcgtctatgaactcaatttagcgtcttttaacttgcgaatacttgcagggccaaatagatccgtctatgagtgtcgagttgagacaagtagccaacgactttgcttatagggtcaagaaatattctgggtgtgacgtcaatggatatcgttttcgcacaacaaactacgaccaaaatcggcccaatcagaaaacaacgtgttatggagtctttacgcctggc

SEQ ID NO: 1785 - DNA, 647 bp, Zea Mays
ccattattttactccggccaccgtactgagcagaccacggctggttcggatgagttcgccagagacagttgcttcacggccttgcgccacgtgccttggcacatccaccgcatcgccgtgactcgcattagccgcccattcatcgccggagaacttgccacggtaataggtcacgaatccaccgcaccagtaacccctgtcttctccgaccgccgcacgtcttcgtccaaatcctcggccaccgctcatgtctgctataaattgagcccgctgtgaactccatagggtaattacccatccatagcacccacgcttgccttcaattgtccaccaacgaccgcgaatcgctcatttcccccaaacctgctctctgccgccgtggtttagccctcgccgtggccggcttgctccaggttagttcaagctctttggtcagttgttctagtctccttaagacctcctaatgttgttcgacccctctgattgaactagaccgccctggatcgtcgagaacgcccatgttcattcattgtccgcactgtctccgtggacaggatgatttagagtctcattagtgaaattgagtgaggggaaacaatcgatgggtattgaattcggtctctgccaaagtagagcgccagtcccca

SEQ ID NO: 1786 - DNA, 611 bp, Zea Mays
ggctattggagtatgaaattcagactaacagtggtactgggccatctttggagctctacagatcaagaacttcaaggaatttgccccaagtcgatatagcaaagttgtagatcttttctagtagaacaactttgctatagatgtttgggcttggtaccatagaagatttggagaaatctagacctgaacttgctctgtcaggtcggctgatggtgactcccatggtacagtgcctgaacaagatcagaacaccaacgcatctcaccgccgacgatcccccgccgcgattcgtgccctcgccggtgtgattcgcgattggatcaactggataacacttgaagtcgtgtaaagatcatcaccgtggataagttccggccagtaaagtattccggccaccatacagagctcgccgcggtggaaccggataagcacaccggtgaccgccgcattccggccttgtgccgcgtgtctaggcatttccaccgcatcgtcgtgacctgctctcgctctccgttgatcaccagagtgactgccacggtaataggacactaatccagtgcgccagtaagctccccctcctctaaccgccgcgcgtcttcgctaaattcatc

SEQ ID NO: 1787 - DNA, 464 bp, Zea Mays
tataagtaagcgggataaattctgtccttcaagggttgaatgttcttgaagacaaagtcagcaaccacagcttcagcagtcaggcccctatcctttagcaagcagatctcagcaagtagcactttggcctcggttatctctgaaaaggtgggagactctacccatctgggggtacgaacatctggttgcctccctgaccgagggggagagatttgcaatgattttccacgatgaaccactcaagacgccatcctttaatgttgtccttgaggtggatatcgagatactccactttcctcccctggcgaagctctaaacttgtgccaccgacaagttgatgttgcccatcagccatcccgggtcgacagtgataaagatacttccagagtccgaaatgggggagaattccaagaaaagcctcgcacagatgtacgaaaatggcaacttgcagaatagagttaggg

SEQ ID NO: 1788 - DNA, 474 bp, Zea Mays
ccgacatgcgggccctactgggcagaaacaccacacgtgtgtccacctcgaccaaaaccgccatgtgggtcgtgtttgtcaggttgttcatccccgtcgtatctcaacataaaacaaccttcccaccaactccgcgtaaaaaaacaaattgcaaggcacttcatgttaggatttgccctcgcgtccaacctggatccttgtgttagtacaccgccatatgagggtattcaatgtcagcaccagcaccgttggaagctggaaggaagatggaccggtgtctacgcaagccaaaagtccgagtcatgggctctgaatggtttgtctgatgggcttcaaccttgtaatagagtataccttaagtagtggacgaggacagtgggaagggggggaaattaccagtcattctacactctgaaccttcgttcatcttccaccccaattctctacttctccacttattgttcttcttcgttc

SEQ ID NO: 1789 - DNA, 297 bp, Zea Mays
gtcgtcgtgcctaaggttggtgacttgtcgccgatgccctctgtgtggcccgtgtttaaccgtcgatgtcctccatcccggcagcgtcggtctccatgaggtcccacgaacacgacacgaactcggtggacaggcctatgaagatgcccgtagactcagtgatctagaaaatcagatgtacgtatgtgcgtaccttggaggacgtaggtgagtcggagtagctggagagcgtcaggccaccgacggcgagtagatccaccaccgctatcgcttgaggggcctcggtacgactttttg

SEQ ID NO: 1790 - DNA, 409 bp, Zea Mays
gaaagtatttacaatatgctcgtggcaaggttgagcgcggtgtggtatctttggtaagaagttttgtgcagatgatgagggactgttagaggtgaactagaggtgcgtcttgtgagcaactattgccttctgatgtgaggaaaggactggaaaaggaagaagttggccaaaaatccctgaatagtgggaagccctgccacagaagtcggtaatggtaatggtagcgccgcgatatcgaacccaaccgatggccgtgatgtaatgtcacgtaattgtcaggtgagcctattcgggacagcaaggtggcaacgcctaggggaaaacgcatggggtaggaaatgcaatcgcggaatcatccagaatcgaatcgaaaaggggagagaagctgacctgtgcctgggcggtctcg

SEQ ID NO: 1791 - DNA, 1398 bp, Zea Mays
gcccgaggaagagacaatgatcacaatgtcatcaatgtatagaagaaggcatatagtgttactaccgtgctgatagatgaacagagaggtgtccaacttagcctcagtaaaacccagggagagcagatatgtggcaaacctactataccaagtatggggagctcgcttcagactatagagggacttgagtttgcagaccatattagggtgtgcagtcaacaaaaccgacaggctgactgcaatagacggtctcaatgagagtcccatagaggaaggtattctagacgtcgatctgatgaactggccaagaacgagagagttagtgagagaacttggacagtagcaggcttcacctggattgaacgtcttagtgtagtcaaaccatgacgttaaatgaagccatggagaaaccaaacgggccttgtactgatccatagagccatcagccttccacatatgtgtctagactcacttgctagtcatcacattgtgccgcctaggggacgggcaccgaatcccaagtgtgattggcaaggagggcctagtactcttcctccctagcgtgatgcaagtgagaattggcgagggcactatggacagaagacgacaaataggagaccgacgtggacgtggtgagggttgcagtgaagaggcggtgatacactgctggcttggtctgagattggggcggtgcacccacccgcacatgtagttgataggcatgcacatggttggcatagcgaggtgaggccggtgccggtgaggccccattggcactgctaagtacgaaggaggcgtcaccggagccgccaacggtttagcagaggtcggcaggggggcacacggtcctaccggttgtggtagggcaacctggagggagtccaggggcacatgagccatgaaaggcaccggtgccataggcaggagcggcgtggggaaacctgcaaggggaaacaaatggtggatgactagatggagatgcagagttaggatcacgaagaaaattcaactcgggaagggagtcgatggtgcactgggagggagtcgaaaaggggaaatccgtcttgacgaagatgacgcgacgggagatcaagagaggatgagtggtgaggtcaaggcataggtaccatttgtgattaggggagtaactgaggaagacgtagctggcggagtgaggggcaagcttgtggggagcggtggcagaaaggttggggtagcctttctagacttgaccatctgctatttcatttgttttggcccaccaatcattgaaggaaaaattttccagttgaggggtcaatcctgaaagcctactttctggaagaggatataccatacttgttgagcaaatacacatgagtaaatgatcaattgtttctccagcctggtcacaacatg

SEQ ID NO: 1792 - DNA, 494 bp, Zea Mays
ggcgagggcatcatatattacatcgtctcaaccttcgggatgatacccatctccctgtaattgaacaacattatcctcaattcctcaccctcaaaagatttcgcagatccccctcacctatgctcgcccagtcggcgaggacaacaattctcgtttaccaatccggtttactcaaagatggccatgctccatccccatacaacggcgcctaccacttcgcgaaaactcacccacaccgtgtttcgacaccacccttcgccgcctatacccagcactcgcactaggaagatcccgggcaccctccacacgcgacgaagactccgctgcagccacatctaacgcagcaaaataatccaagccttcatccgaggactcctccgtccaggaaaacgaactcccagattcaccatcagactcaaaacactcagatacagagccaaataaattatcatcggcaggcactacggttgaggccgccacaaaatctgtattgc

SEQ ID NO: 1793 - DNA, 458 bp, Zea Mays
tgtattggggttttttattggggtataaagtttatatatgcattcttccagtatatatcggttgatgctaatttttagttaaaattgtgcgtggggaggcttagctggtagtatactttgagttcgatgcacttgcatccgttcacaattctctttgtcatctgctactcttcatgttcttttctaaggtaagcttgtcattgcaaggttcctctttaacttccataaattacctccccgatggtattggttagtccagtcagctcattgaccaactgattcctctcttgtagttgttctagacttaagcgtgtgtacgtgttcttctaatgtttcattcttcttccttatctcttagcttcttagtgcaacttctaggtgtctgctccagggctcggaacttaattagtaaacttatcattgacacaactcattttcttgttcaagatgtcccttac

SEQ ID NO: 1794 - DNA, 764 bp, Zea Mays
gtggaatacaccagcatcaaagtccttgttgctctggtcaaaggcctcgaagtgcctacagccctcacgggccaaggcattcacagccccctcactggacatgaggcccgtcatgatggacgagagcgactccagctcctcctataaccacccgagaaattgggtccccacctcccctcccgacttgttgaagggagcagtttgcgcaccgaggtcacgatacgcatccacaaaaagtgtgtgcacccgatccaccctggcacgggtggcagactcgtcttttcgaggtaggcgtgcatgctcttctccccggctcgcttgcgtgtagcttgggcctccgcacgggcgctctctgcctttgttttcaccttagcggcgacttctttctcgtcatttagccgacgactgagatcttcattctctttctcaatcaccgtcagcttatcgagaaggttttagctcttgttctcggtcgtcgacttatccctgatagcttcggtatgttgcattcgaaggtgctcaatttttcccttgagtcttttcctctcgaaacgaagctgcaaggtcgcaacgtctaccagcgccccggacacaatgtggtcgacgaaaacaaccacctggcattacaattgaccaaggtaaaaaaaatcacataacgcagctgttgtacgacagccgccgacacgccttcggccatagacaccacgacgactttgtttccgccatcagcagtggtgcaaaattgcacccacgggtccaatgag

SEQ ID NO: 1795 - DNA, 612 bp, Zea Mays
gcgggattcacggcgtagtaggtggccgaggctgagatccggtgtggcggagtattcacccgagggtcgaacttgaagtcgggcgaggcggagcaatcacccgaaggcttgacccggggttgggcgaggcggagaggttgtgcccgtgggctgaatcctgcttcaggcgacgcagagagattgcgcccgaaggccagtctgctcggcttgtcgtattaggcgtcccattggagggtggcaggcagcatgcacacactgtagtgtagacataatcatgttgttgcgccagacatgatcgtcgtcttgtcagtcactatgctttgttgtcgcagtgtgggttggcacacgcattaaatgcacatgttcccttcatgttttcgggcggccttgtcttatctgcctgagattggttcgggcgagactgatggagcggcggcgacctcgggcaaggcagaatcctgctcaagctgggagactctcggggagatgtctcggtttttataggtagctcggttgtcacccctcgagagtttcgtccttatctctctaagtgcatttgttagggggataatttgggtatccctaattattacccctgacacttaccacagg

SEQ ID NO: 1796 - DNA, 345 bp, Zea Mays
gggtttttcactttggggattggtcagaggagtgctatgccaggaagaccagctttgagttcagagtgaaggtcagagtggaggggattccgattcactgctggggagaagatgtggctgctagggctttgggcaggagctgtgctattcactatgtccaggagcgctcgaggcgcagggagcgcacgaggtcctttgatctttgggcttggtgctcggacccttgtgatattcccaaggaggtctatttaaccgtcacaaagcctgatagagagctccctcctcctagtgcccctctgcctctggttggggctcatcatgacttaccaactgatctgaaggaag

SEQ ID NO: 1797 - DNA, 962 bp, Zea Mays
taggatagggaagctcgtggcccacgcgaagagctcgacgcgcagaggaaagaatcagagagagagaagatccaagggcacgcagggaagactccagagcgtgcagcgaaaagagagctcgcggcctgcgcgagggggaagaagaagagcgcgcataaaagaaacagcagggtggcggcttgagggagaggctcagggagagggagagctcgacagagcaccaggaaaagggaggtgaagacgccgggaagagagaggaatccagggcggtggagagctcggctgcttgcagcgagtagaagaagggtgcgcaggggagcttcagggaggaacgagcagggagatgggtgccgctcgacagagagatgagcgcgcggcaagtaccggcaagcagcaggggagagagtagagggagggagagggatacatggctaccatgggagatggtcgggcgagcgcgcgtgagaggagcaggggctggaagaagcagacgcgcgtagatcaaggagatgatagagaacgatgcgcggtagagaaaaatcaagggagggcggcgggaagataagaagagaagatttttcctttggggataacgacggctggagagaagatcccacggagaagaaaagattaggggaagagagagagcgcgactgagagattttccccccttttttaaaccaaaaaaatcaccgatattttggattccaattttcttagcgatgtatacgatatagacagtaagggtgacatggttttgatttggcgaatgcgttggaatcagatgagtttgcgccgttatttatatccaaagttttggatcggggcgagaaacgacggcccgaatatgacggatttcgtcttcgataatttgctctatgggattcgactaaaattagccgaaaccatatctgatttattaaccttgcgcacaatttcctttggacgatgcgcgatcctaa

SEQ ID NO: 1798 - DNA, 823 bp, Zea Mays
aagatgatccatagctgattgatggtgtatcagttgtagcagatgacagatccatgagtagtgcttatgcattcacaagacgcatctatggtgattttggagcggttgacataactgtatcacgtcttgtttgcagttgaggcaaccatagaagttcacatatctgatgtagaaggcagttaatctgtatgtgggctgttttactagtggataatgtgaagaaatccagctctttaagggtgccattagtgagcgacatgccttatggagatatgttgttgctgtagtaataaattcttagatggatgtgaagctaaaggtaggatctacagggcattcctaacgcaatgacaatacgaaacattgttgtagcctcaaaaaaccaatcatggatggacctctcaacatataaaggtcgagttttgcctccatattggtgaaggtgacttggtcaacgtcgtctttcatgacaaacttctagaatttaaccaagtttgttgttcttgttcacacaagcaagtttgtgtctgcatgcatttcatccatctctggttggtgttaataaccaagcttgttcgttctttatgaaactatcatgtttgctagctgtgtttagatgttagcctagttgtgttagtttaaggatctatttggaacaattgtgtttcagtagtgcagtcttctttgacttcacctagatagtgtttgattctagagttaaattcaaaccaaaatagcacggagttgctccaatctaggaatatttgagagcacctagagggggtaaataggtgatcctgtaaaaatcaacactaaatgacac

SEQ ID NO: 1799 - DNA, 513 bp, Zea Mays
gcgaagttggggctaacgagtgggccctgggtgtcagggttcccattccccaggccgagcacgcgcggcgacgctccaggcgcaggcccacgagctcggtggcgtggccacgagcacgatgcggggcattagggtttggtcgatcgatcgggcggttacggccagggagatcagaggaggggaagatggtgcaagggaaggagagggggaagtgggtgctcacccacggggtcgccgccaaggacgaagctcgggtcggtggagatcgaatccggtgaaggggcggtgaatggcgaggcgcagtcggtagcggagctccaagcgcgaggtggcacgatgaggcacaacgtagctgagggcctcgacaaggtgcacgggtgcgatggcgtcgagctcaaggatggacctctagtggtggtgcatgggcgcgatggggagagagagagtgagggggtgttgagtgaggcaagagagtgcgcagagagggagaaaaaggggtgaggcgcctctaag

SEQ ID NO: 1800 - DNA, 403 bp, Zea Mays
atctaaactttattaaatacttaatgctgaatgaaaaatgtgataagttattgacattcgttaacgctatgagcaattcttttttgtctttaaattctccagttattttctcgaatattatttttttgctatgatatcttgagagtgcacaggacccaaatttatattcaatatgattgtaaggaatatatggatgccaataatgtgctgtaacgttgcgctgctagcctgctactttgagatgaacttccgctcatgtgtatgttcatgagttcatgaccatgaccaatctgggttttcataatgatgtttttgaagcacatgaaagtcaataacaccagtgtctaagaaatttccatgcatttttgtttcaggcactaggaacttaaacttgaattgaaat

SEQ ID NO: 1801 - DNA, 449 bp, Zea Mays
atacatcgattgtgtttgtggcatgtgcaaaacaggtatatgcccccacttgaatgaattgtatgcaagatttgaggaaatgtatttcaaaacaaggttccaatctataatacatcatccattgaatgaaatggagttcgaggctgcctggcaaatgatgctaaatgatttccagctacacgagaacaacacgcttgtcagataatacgtaaagattgggtacctgcatttttcaaaggagactattgtggtcttatggtctctacacaacgaagcgagagcatgaacaagctggtgaagagtgcccacgtggatgcaaacacaccgcttcatcaatttgcaaagcaaatgatgaagctcctgcatagtaggaagatgaaagaggccaaagaggcactaggatgcatggtatgtgaaaaaaatgaaaaacatatgttttatgctattaa

SEQ ID NO: 1802 - DNA, 1683 bp, Zea Mays
gcttccctcgctgcttccagtatgcagcctgctctcgaagacggagttccagcttgtcctggcacagaacccgaacctgcacttctgcaccagacagcgtgcgaaactcttccaggtggtcgagcaacataataatgaatttgcaattggaaattaagtggggcggcgccctgttacgccttgaccaaacctttgccgcagaccgcgtgcgtttgaggcagccagcgaggtgcccggcagcgtcaaggatagcaggatcaggttgccattccaggagcactgatggaagaaaggaggggcactgaagccaggcgttctcaaacctgaacaaggttgattttgggactgcggtcgacatggtaacaaggatcggcttgtgatccgaggtaggtctaagccgagaggtgagggtggtcgaggggaaagctgaggcgtggttagagttggtgaaggctcggtctagtctagcaagcgtggggaagcggcgcttgttcgaccacgtgaacagactatcgagaagggggagctcacgcaggcttagcctgtcaatgcaactattgaagagatcacagagggaccgactgacagcacctttgtttttttcagacgcattgcgaatgaggttgaaatcaccaaggatcaaccaaggcccatcaatgtgcgagtggatctcctgaaggatttgtaggaagtccggagcgtcacggtgatcggagggagcatagacattggtaatgtgtatgacaacattgacagccaggagagtaaagcaacaagtaagagcatggcgcctaataatgtaagaatttagctgtagactattttcgttccaggccgtgaggatgccgccacgggtgccggcagccgggatgtgcagaaaattggaagcaagagacgaagggaggaaagaggcagccttgaacacagtaacgtcgctgagttttgtttcctggagacaggcaatagctggggaggaggagacaatggcatcacgaacaagaacacatttatccgagtcgccaagaccacgaacattccacgacattacaacaaggttcttaccacaactagccatgaccacacaaacataacaccaagggacaaggattagcaagccacccagaagagtctagcctaagcagcagaagacagaaaacaggctcacagagccgaccaacaacagagagacgaacaacacaacaggacgagcagatagcggcgacagacacaaacgcacggacgccgacctccaaagtgcgcttggaacaaaggctgaagatcttcatcccatggccggcggcaccactcccacggcgtcagccgcagagcaacccaggccagcagcgcgcaccagcttgcgcagggcagcgactgagattggggccttggtcttgttgagcagtcccatcttctgaacttctttcttgacagcagcagaacatggctggagggaattctgaatttcctttcgctgaacagccttgtcagtcatgttgacgaagttggatgaggccttctgagcgagccgggtgctatgacgttccggctgcacaaccttctcagcacgggcgcgacgcctagcaccagcacgaggggtcccggtggaggcgacaggcaacagcggcggtggcgcacaagggggagcaggagcactggggcgagcaggcaagttgggcgcgcggg

SEQ ID NO: 1803 - DNA, 457 bp, Zea Mays
gcaccgttgtgaacactttcatcccaaattcacgaagcacatgtgtgatcactataaattgaaggctctctctgctccaccttcttgttacgaacccaacacaccactcctcactcccgatcatgaaccatagctcgtgaagtacagattcccccccaaatcggccagaacgttgtcgtgcggcatcgcgctatggccagccattctcaggtacgttcacatccctctgaaccatgtttttgcatcctctagtgctagtgaagctcacagtcttagtcaattgaacactaccacaccatatcttagggaacgccgcgttgtcacccgggaacaccgtcgtggacatggctcatatcgatcggccgttcctggttgtctctatccaaatttgcgcaagcaccgtagtcccagtaggtcactgattcgttccgagtccttgaattgaatatgaccgact

SEQ ID NO: 1804 - DNA, 417 bp, Zea Mays
gtcaggtgtgtagtgtaggtgtcgtttctgttaattgaagccagttttcagtgttgtcctcaccattttgtttggaccttgtaactattgatccctgcacccttggtcttgggcaattgtgtcaagttgatagtgctatggtcgggggacatgtttggctaactgacttgatttggtgccattgaagatgtggagcaagatgaggggtaaaactgtgggttcagtcgggctaaagtaattgggttcagagttagaaatatctgtaaaagatcctatcccactaccatctccaggtgattctggacaaactgcagataagggtaactcgatcttggaaaagggaggtaccataggatatttttcaccgagcagaagatgaggttgaaccatttgaaccctatccaagtggtgactcag

SEQ ID NO: 1805 - DNA, 613 bp, Zea Mays
ctcgagcggacttccgcctcacccgagcctagtcctaacctcgatatccgcaacggaaaggcacccaacgttaccatatacttcagagttgacgtattacttaggagcgttttgccatactcattactgtgtcaaccactacggcatgtgcaaccctcttgtcaggggggctcgggtatgtgactgagccctcggctctcagcagaaatcaagcgggcacaagtcaaatagaaagtacaagaccatgctccgggccataccatctacaggggcacgacaacacctcctcaccgtacacggccaactccagtactccaggcaaccctccttgaggctataaataggacagcctaaggcttcagggaggcaaggtgatcacttcacagttttctccgccaccacgatattggcacctgcctcaatcaacccagggacttgggatccttccctctcctgctcagcttatattcactactgcaagcacttaggtgcaagtaatataagtctcatccccctgtgctagaagtagggccttctcttgcccgaaccaagataaagacttgtgtcatcttgtatcacccatctgggttagggacacacaacattatttcac

SEQ ID NO: 1806 - DNA, 290 bp, Zea Mays
ttggtgcatgagtgtgggtaactccgacggacctgcgtcgtcgcggctgtacgccgccgcacggtcaggctggaggtaggaggagagctgtgaaccgttgatccagttatagacggtcgcaattaacataacataacaattcggctgatgcatctgtggccgtagatcccggatccaacagctgtgggagcataccggttcacggtctgtttctgaccttagatatcagatccaatggccagatcgagctcgtgtttatgccgccacgaaattttgcagatgagtccctg

SEQ ID NO: 1807 - DNA, 824 bp, Zea Mays
agaagagtattaacacctagtcacctaccatatcaaagaagtgaactatgaaaatagttgcataatggatctaacaatgttcaattgatatcataaatattacttttttctttttataaaattgatcaaaattaggacagagggaaatagtttaatgtctaacgatgggagtaaatatctctacagaaaaatgtaactgctagaactcaaaacagtaaggcaagaaaaatcaagcctttacacatgtagtatagttgcaggatgaagcggagaaaagataataacagtataacaccaaggtagcactgctgaggcaatacatcagatgcaggtattacctgtagcctgaatggcttcactccaaggataacaaggcgttcaaagagagattgtgctaaccctgcacgggctgcttttttgcacatgatgactggacccagttgacaatgatcaccgacaaggacaacctgtaattgtaagagtataaataaaggataataaataaaacaacaaatttacatttttacctgcttgacaccaagcactaaaggaataagacattccggctctgtagcctgtgtggactcatcaataagaacctgacaataaagtttaccactgcctaaggatatattacacaacaggaatcatagttaatctaagcaggtgagaataattacttgtcggaaacggaagtttgaaagacgaggatctccagcaccaacacaggtgcaacaaatgacatcggcactctgcagtatctctctttcagtggcacgctttagtgccttgtatttcttctcatcactgctggacaattcacc

SEQ ID NO: 1808 - DNA, 610 bp, Zea Mays
cttactgcagtggatgcaatgtgtggtattttcatgctccttccagaacaacatgcaattgttctcgcaagcatcaatcttttggtagttcatgccaagaccagctacgagcttcttgcaatggtacaagttcttcggcatgttatgattcggtgggctgatatcaataatcagtttcacaatatcgttgaaacaattgttggagaaggtgtactttgacttcatcgccataagacgtgttaccacctgcagtatgctcacactggttccttcatgcactttagcctctgaggcttcaagaagcttgtagaactctctcacatcctctggaaaagcttgattattctatagttctgggtactcatttctaatatcttccaacatctctttcattcggtctacatcctggtccccatccgactcaatagtatggtccacctctccatgatcatgccataccagatagttcggcataaagccatgtttgaaaacatgatacaagatctccacttttttcaaccgaaccaagttctgacattttatacatgggcacttcgctaaacgagcatcaccagcaaatgcaagtgccacgaattcatctgcaactctc

SEQ ID NO: 1809 - DNA, 1348 bp, Zea Mays
tttcagctcttaccgagctttgtaatggctaagtgccttatgttgattgccttatttcagtcatgtagtgggggactcctccctccccattttttctcttctctttttcttcagcacacttggggttggcatgggaatgaattttcggtgtatgcactccagggccctgttttatattctaactatctcctcatcgtgctcttattcggtgggggcgatatttgagttttggcggcaagcctctcgtggtgctggggtgacctcgccaagcagcctgtctatgtgccttgaaaggaatgataacattgaattgggaagaagcggggaatgaccatagtgctataagggcatctttctgctctgagttcgccgtgttgttgtttgcgtggggacgtattcctgggttgtttggtccccccattccttccatatgtgaagcaatcccctgatctccctatttgtcacagcggatctgtctgggggcgccccatctttttttctactcctccccgcgcattctgtctgccacaaaaggggatggtgaaccgtaccatgcttccctcaatggtcgagttcatggcgctcggtgagctccaaatgggtgatcttgaatgaggccctagtgccttttgcaaactccaggcgtgggtccattgggggttgtcctcatactcctaggtctcaactcatatagttgacaaccccactcatccgggtccaacggcttgatgcctctctttgcgataaataatgattcatacatttcttgagactcgaacacaatctagacgtgcccttggcgctcgtgtgctgggtcctagccgctaggtgcccaccacctgaccacccctcgctctgtggtttcaggagcgactatgaacccttcgcgagctgaccttcgaactccgaatttgtggctctggtccgaccttgtcatggttgttagtcggcgcaggcctatcagtcccttctctatataagaaaaaataacgagaatggacaaggcaggatgagccatcttactcgagagtagtcgcgcaacggttgatcgtgccagcgtcatgcggccatcgtcagtttgcctgggttaggtctaggatcgcctcatcacaggcctagtggccatctctggtacccggccggggcctgctcgcaaaggccagcgatacgttagcccaaacgttaaccgcttaacggggtgtgtcttcgatccatgcacgctggtgggttggcctttttttattcggaggcgttgctcggtccaagcttctcgttcacctttcaagatcctatgtgtctcttcctcttcttgtccccaccgccctctgtcaccgcttctcgcccgcca

SEQ ID NO: 1810 - DNA, 579 bp, Zea Mays
gggggatccatattcccagtgtaccggtcggaggtccccaacctgccgatgtgggccccagagctcctcctgcggcccccagtttctcggacaagggcaaggggcctgcaagcagctcctccgctccggatgccgccgggaggtcggagggagtaaggtgacaccgactgcgtcgcgccgatgggtcttttgttacgaatctaccccttgattcggactccccctagaagcgtcagaagacagctggtgggactaaggaggccgaacctcgggtctaggacgggcagaggggcgtgagccctccgccaccaccaccttcggatctgacaccaccgctaccgccaccagcgtcagaccgaccaccgtcaccgcgggggcagcggcagcaacaacagcaggagcagcagcagcaacgacagtgggcgccccgcttctagggtcactggaaggttcagggccccaagtaagtttagactcttccaatgtttttgcgagcgtagcttctatgccgataggtcttgacccatcctttgcccgtcagggcctcctcctcttcggcttccaaggatgctcctcccc

SEQ ID NO: 1811 - DNA, 297 bp, Zea Mays
tccgcctcgacgcgaccttccgcatcttcgtccagggggacctcagcgtcagtgagtactgccgcaagatgaagaccatggcagactcacttggcgatctgggctgtcccgtggaggaccgcgcccttgtcctcaacgtcctccgcggcctcagcgatcgctacacccacctccgatcgttgatcatgcgccagcgccccttccccaccttcctccaggtccgcgacgaccttgccctggaggagatcactctgggtgctcaggctgcatcgatctccggcccggggtcctcgtctt

SEQ ID NO: 1812 - DNA, 1455 bp, Zea Mays
tgataattggtgatttttgtgcttccccttttttgctttgctcaacagttttaacctaccaccttgcttattaaacaggagacatatttttactgatttccgtgtatttcttctatacagctatttgcagaagttgatgtgaagctagtcttcaaggaaatttcatctaaatatttacgaaagcgcattgtagaggtattgcttgcacttgtcacctaaaatcccccctttcttatgtgatcaatagcaggatgcttacttctttctattatatcaacttgctagggttttttctgctaaaaaaacttgttacttgttagagatctagctttatgtccatacttctgaactgcactgttgtggtcattgcaatcatgataatatctatcttgaatcatcatggattttcagtgactgcatttattcggcatacatatatatggttacgtctgtgtaaaaacaatgaaagatcatatgtactttctagttcttactacaaaggatctgactttcttcctatatgcgcattgtgttttcaaatgtccctttgaactctttctgtagaatgtaacattgttgtccagcaactggaagccaatgcgacaggtattaactgccactggccatccaaaagtaaagtgaaaacaaaattgtagttgccatatttaggagaaaattctgctatgccgaaacatgatattaaagaaactaataaggtcagttcagaataggggtcctctcacagtctagcattgtgtatgtgcgccaatgcctgctatacatggctttgttcttctattgtgactgattattgatttttctagtgagctacatcattctgtctggtaatcacagttccttgggactttcatgtgatttaatatggaattttttgtatggaatatcaatgcctcaaatttcagggaggaaagcgaagtgatggacggagtccttgggaactttggcccatcaattctcaacgtggcttacctccaagagctcatggtagtgctctgttcacgaggggagaaacacaggtaaggtaatacacctcatttgagagtatgttgtatttgtcatctctgattgtcatagtatggcatgtctcgtggttttatttgtcacatatgctgttgttggtgtcttgctgatctgttcgatacctgatgatgtttacagaaatttgcgtgtgtgttctatttatatccatcccacttttatttgtaaaaatcctactttattacatcaaacattaactgttgcaaaacttaatttggtgtgttttattgtggagttcatttctaaataatacataacgcaaccattaactgtactttagagcattatactttctgctggtttatttatagtctgtttcagctagagtcaaatgcatattaggtttgctaccctatatatttttttcacttattccttttgttcgaccatacagtc

SEQ ID NO: 1813 - DNA, 405 bp, Zea Mays
tagaggccttctcagagcactattctattattgagagggatactgccgaggcagccatgcaagatacagcatgacgggcactttcgtagtattgctcgttgttcagcggggtagctgatggcctcgacctaaagtaccaccctcgtcgtttgaccgacagtgctggagatgtgattgccttgccagttagtgagggcaatcctaggctgaacagcatggtcaatctggctgccgtgctcaacacagagttggaccacacccttgacgagttgggcaaggttcgggcggaggttgcggaattgcgtgctgagtgtgcagcacgccactatctggatggtggttctcccgcccccgtcgggattcagcacccttaccgttcaccgcctcgtggtcgcttcgactatg

SEQ ID NO: 1814 - DNA, 504 bp, Zea Mays
gaaagatcgggtcatgctgacttgtagttcaatatggccagcagctccagcagggtgagaaagatcgtcatcaggttctaaaggatttctcaaagttgcttgatgatcaggtaatgctattaaatagaaatatgtgcaaagtcattagttcaaactccctgatctgctttaacttgcaggctttaggacagcagtggctacctgtcaaaaaaaaagaatgccgtctttgtatggacatctaagcattaaatagcttttgatttgctcaaaacagccttgtgttcggcttcagtgttggctcaacccaacttcgctaaaccattcgatcaccattgaaacagatgcatcgggcagcggtgctgttgcaggatcaccatccattagcttacattagcaaacctctcggtgttaagaacatgggattatcagccttgctattttattggcagtagatcattggagatcctaccttcagcatggtccatttattatttacactgatca

SEQ ID NO: 1815 - DNA, 353 bp, Zea Mays
tgggagaaaaggtcatcgtagtggttatcgagagtgtggaggtatccggccatgtagacaatggtggggtcatcctcggtggggtctctccctgacagggcctgaagtcttttccttcaggtgggggtatttttgttgctaggtgggaagtaatgaagggggtttcaaagatctctcttctgtagttttggcatagttgtttaagggcttttcgggcaacactttggcaagtgtctgggaagcggtgcccgatgaaggtgacttggaagggagggtggtttgggtagcttcggctttctcctaggtagaccgccatagagcacttctctattccattttcgcggtattccttc

SEQ ID NO: 1816 - DNA, 560 bp, Zea Mays
ggcgcaagcagtcctccaaggatgcctcgccaccggcctggcaagaagggggccgacgaagaagccgcgactatggagggacaagaccttggctaacaattgcccgagggagaccttaaagacgttttcatcagagattctgactccggcgacgacaacgaccaccgcaagaagctgtatgtaatgtacggcggaagctgggagctcatctcccacaggagtgtcaagtctctgcgacgggaggttcttttggtggtccctggggtccccaaagctgctccacaccaacggtggaggggcaccaccatctccttcggggcatccgactgccccgacaacatggcgggggccagcgtactgccactcgtcaccgcccctgttgtcgccaacatgcggttgcaccacgtgttgattgacggaggggctgacctcaatgtcatcaaccatgcagcattcaagcagctgcagatcccggggtcccggctggggccctctcgcccattctccggggtgggcccacaacctgtatatcccctcaggagcataacgctcccggttac

SEQ ID NO: 1817 - DNA, 726 bp, Zea Mays
gacggggtggaggatggctggcttggctggtctacggtggttgtggcttgcgcagccgctggtacggggttctctgggcaaacgccggcgaactcgtgctcgggctgggtcagggacgcgtgggggtgtacggtcgagaccaaggtgggctttatagccactggcgcgggcgtgggtgcggggttgacatggcacggggctgcgcgcgggctgagcgccaagggtgtgctctggcgttgccagggcgcatcgaacatgtggccgtgttcatctgcccaagttcttgcgcctgcagagatcacaaacgttcgaatctcgccaaaggtcttgtgcaagatttcttcctggcacctagggctagctagttcgtgtaagttccaagggaagatctgccctagcttagaagatatgggggcgccaagtcttttctgcctgcaatgttcaccaacgacaaaaaggatgccaaaccgtgtcaaacgaccctagtttggtttcaaatttttaggggcgtgccttgggtaatttggccactttttgttatttggaccaagtggttttggcgccagcacaaaggtgaacacatctgatctttaggctagggttggttttgggacttagagaaatttttgatggctctagtgtgctctccacttagtgaattgttttggggttgttgttgggcctttttgtaaaacttcctttgctacattttgtagctttattaat

SEQ ID NO: 1818 - DNA, 411 bp, Zea Mays
ggagaacccactcggacaccctcgggggctgggtaagcgccagcaccatccttgagggccaagttctctgcaacagccacctctaaggctgaaggagcctcagtcactttcgtgggagcaatgcaatccagaccagcctcttggcccttaagaccacgctccaaggtcgatgaggcgcgggacgccgcccgggataactccagcccagcatcaggcacatcagtgcaaacatccatcatgccaccatctgctggctccgacaacagatcttctgggaccatgtctacaagagtttggtcaaagttcgccaaagacaattcttgcagaccaatgagggcacataaagctggagaaggaacaccactgctttccccgctggctaggtaacgccggctgttcttctgaattaga

SEQ ID NO: 1819 - DNA, 282 bp, Zea Mays
catccacgacacgagccatctgcagcaacatcacactcattcagcaaacccacatgtacccacattcaaccacacgaaacaaaaaacaagccttacctgctctctcgcccgatcagaccgctccctaaccgcctcccggccatgaggaccccacatccgatcgaagagtgcccccacggcatcctttaccacagggtcttcgacctaaaaaatttcgcgctcaaagttttcatcggactggtcgaagacctcatagtgtttgcaccccgcgcgggacagcgc

SEQ ID NO: 1820 - DNA, 841 bp, Zea Mays
ctcgccaccggcgaccttgcactcggattcgcgccagcgccgcgatttgcgcctagttaaacacggataacgatccccgggtaaaagatcttgtcgtggatgaacttggaggcactgtgcgctctgtcactcatccactcgcgccggcgacgtggccgagcggccgtcaccagcatgtacgccattcaccatggttgtgccacgtcttaggatatttatcgcgtcgtcgcgagccgtagtgactgcccagtgactgccatagctcattgctctgtgatcgccacagtagatcaccgcggtgactcatctcctctctctggccgccagcacgccaatccaaattcacgagccaccgcccccgaatcctataaattgagcgcgccatcggctctgccatgtagtcaagcactcaacgcacccacccgtgcctccgattatccaccagagagccccaatttgggatttcccccaaatcggtccagaacaccgcgtgtgtgagctcaccacggtcagcgctccacaggtccgatcatgttctccttgctcttgttgtagcattcctatgtgctcttgaagctcatcggcccaaccaattgcactgaaccgaagtagatcgacgggaacactttgaattgtccctggattgcgcggtcaccatggacagagtgattaggcgttagagtcttgcaattaagtgaggggaaatagtcgtcaggggttgaattgggtgtcaagcagaggaaagggctggtcgttgcctattccggccagtacaagctcgccagagctcgacctgtcgccgtccaccgtcggggatcacgtgttgtaaataatagaaagg

SEQ ID NO: 1821 - DNA, 322 bp, Zea Mays
acaaattgctcaagaaggtggacaagttccagtggaccacagaagcacaggaagctcttgatgcactaaagaagttcttgaccacgccaccagtgttaaaaccgccacgccaagccatgccagatcagtcggtagaagatctgttgttgtacatctcctgcatgactcacgtggtgagcaccgcgttagtagtcgagcgggcagaggaagggcacgcatatccagtacagcatccggtttatttcatcagtgaagttctgggaccctccaaaaagaactatcctcaagttcaaaaactattgtacgcagtacttctaactgc

SEQ ID NO: 1822 - DNA, 827 bp, Zea Mays
tctcagtggttccatggatctcttcagccactgccaaggcaagactgcatacgatatgggtggtggcagaaaatgttcctgaggagttacgtaatttccaggctatttgcgagctaggctcggcattgggtgctgttgaggaggtggatctaaaagctttagaaatgcaaaattgcgtgaggttcaaggtgcatgtcaaaagcatctctttgatcccctctgtgcttgaagttggggtaaaaccttacctgtttgacatttttttcaaaattgatggcgttgaagaggaaggttggaatgaagagagtggtaacttgggaaagagagcttctgtggatacccagcatagggggtggtgggtaaagggaaaaaatgggaaaaggataaggaaagagacagatgaggagaaacatgtgttcttacaaactaaagacagtcaggctgggacagattttgacaaaactgtcctttccccaaaagatgataaaggaaaaacaaggtctagtgtgcccgagggactggtggagggctcagattatgatgatgataaagtgaatcttgaagatagtgaagaagacttgctcagttctcaagaattggaagctctagcaaaaagtgttggggttgatataagcacaccacaagaagaggtggatgataaaagagaggatgcagttactaagaagtataatcaagcggagaatgaaaagaaagggaagcaaaaagtaggtgagcaggctgaaggtccaagaaggagtcccagactggaaacctctgaagagatgaatgtgactgagaaagctatttctagagctgcagccaaagat

SEQ ID NO: 1823 - DNA, 565 bp, Zea Mays
tacatgattatcatactgattatcactaattacccacgaaaaatccccagaaactgtcaatactactgctgttcgcccacctgcaaatctgtttttttggacagcaacatacccggattcaaacagcgatatctaccaaaatataactccgaatcgagcgcataagtacttgttggaaaggtacgacaaagctctacatgattatcatactgattatcaccgattacctacgaaaaatccccagaaactgtcaatactactgttgttcgcccacctgcaaatctgtttttttggacagcaacatacccggattcaaacagcgatatctactaaaatataactccgaatcgagtgcataagtactcgttggaaaggtatgacaaagctctatatgattctcccactgatcccactaattacccacgaaaaattctcaaaaatcactagaactactgctgttcgcccacccactaaatttttggacagcacctctaccaattcgcatacgtaacatctattcaatggaattgcagcacaaataaacaagagataatcacaaaaatca

SEQ ID NO: 1824 - DNA, 1431 bp, Zea Mays
gatcagaatgatcatattgttcagtgtggctcggatcttgatgctgcctgaagagtcatgtcgactgatgacattcagagacaggtgacataaataatcttgggcctcatcctctttctgcagctgctccaacactgagtcagacaattccatgctcaaatcttcagtggagagaacgtgtaattgggctgcgtttcgtttggcacacttggcaagatgccctggctcaaacctttcaccacaggcataacagagaccatgcaacctgcggtattcccgaacctgtcgctctttggacaagtcagaaggaagattcactggaattgcatcagggcgagcagtagaggcagatggtttggactgaaagaagcctttcgtcccccgggctctagctttgtccaggttggtctggtgcagttcagctaggatcatggctcggttcactgaagatggtagagctgtctgcactaacccttgtagctcaaatttaaggcctctgatgtactgctccacaaagaagacttcatcaatctctgaattgtgtatagccactctataacggacctcttcaaattctttggtgtactccaataaggagtgctgttgccgtaggccgagcagctgtcgcatggcttgggggtaagactcagctccaaatttgttcatgactgattcagtgaagccctcccaagactcaataccatgcttgattttgtggacttggtaccaacgggcagcattctctttcatgtgtaacgaggcagaaacgacccaaatgtcctgtgggattctgtatatactaaagtaagtgagacagtgatcaatccataccaccgggtcacgacccacaaactcgggaaactgcatcttgggaagcgaaggtggtggtgggtcatgccgaagaccagttcttcctcttcttggtcgctgggggcgtcttggggaatttgaaaggtgaagactttctgtcctgggggtaaaagaagcatcttgatggtgcatccgacggtgatggggatgatggtcaccctgtgatccctgatcagagtcaagctgtgctgccagtcgctcgagccgcatctgcgctaccaccttgccggtctcttcaatctgccgagacatcaacaacctctctctggcggcttcttgtgcaactccagcggcaagatcagcttgtgccatgagttgctgctgaactccatccatcgttaacatccgttgttccaaagaatccaacttttgaaaaacccgatcccatcgcgtctcctccctctgcgaatccgatgccatagcgtgaaggatcagctgagtttggagcgagggtttacctggtggagccgtggcggatgatcgagggtggtctcgtcgtggccgtgacgagacgtggttgaagacgctgctgccgcggcgaaagcttgcaacttgagtcgg

SEQ ID NO: 1825 - DNA, 471 bp, Zea Mays
gtgacaagcgcatgccgacgggggggcatcgctgtagctgcttgcggctggggcactgttccgcgccaccgaaactgacgtggcggcccggtcggcatcaacgaacccaaccacctgataacgcgactgcttgctttgctctgttttgtgtccgtgcgagctcatcgtttccactgcgacatggctgggctgggcaggttctctagccatctgggatcggtgcaggcagcagcggcgtgggttcggttcacgcctgggtaccgcaacagtgcgttcagtacggacatgtggtggtgcctacggcctgtctgtcctgtggtttgctctaagctccggatgtgggtgtgagcagacctgttgcttaacggcactcactcgtccaacgccttgacctcactctcttcgcgctgtgtgtcactcactgtgtgtgagtgagagagagcggcaaggcaactaggcaagcaagtaaac

SEQ ID NO: 1826 - DNA, 1047 bp, Zea Mays
ctaagtctgaatttcagtgtaatgggttcatctttggggccttgtaacttccaaacaaaagggattctgccctaggtcaccacatcaatattgtagacctatggaaggagaataactttgctatagaaatcatgccttgctaccgtgaagaattctgagacaaatgagcctgaagttggactgtcacattgcttgaaatctgaaattcagattaacagtggaatggcatggagttagggctcgaattcaagcatgatccagcaagaatttggctaggggtgctataacaaagatgaagatggtttaatggtttacaactttgatgcagggccttggatgtgttgccatagaaaatttagagataatctaccctaaacatcatctgtcaggcactcttaagatgactctcatggtacagtagccgatcggatcaggttcagtgaacctcaccgccgatgaccgtcgcactgtgattcacgtcgattgtcgggattcgtgcgctatggattgtggataactgtgggcaggtaaagatcttggcgcctggatcagcttgagttcggtcgcgactaagcccgccgtacccccttgctcatcggtggatcgggatgagtcctcgccgtcgttgatcgatcactgccgtgcgccgcgtgtccagacactttaccacgtcacgattagttacgttaggggatccggtgatcgccggaggaagcgccacggtgaaagccacccatcccgagcaccagtatccatgtttccctccggccgccagcacaacctcgtgaaattggacaccaccgacaatgggaactataaattgacaccttcgcctgctccgctaggtaactgcgcagccggtgaagcaatccgcaccttgaatcctcccctagaattcaccaatttcggatttccccaagctgctcaagaactccgcatgtcttgacttcgccgcggtccgctcaattcttgtccgattttgccatttatgttcttgtttcagcacccatgcttaccctggatactcaccaacccacccaattgaac

SEQ ID NO: 1827 - DNA, 403 bp, Zea Mays
gtagcatgcaagcatggatgactggaaaagcaaagagtggatgatgtttgtcaggtatcgtaattaggggtacctagattacgcccctaaaacacgcttaaccctaagaccaacgtcagatacattcctcgaggtcaagagagtgtaaaccatgcatcgcccgaggcccctcttggcggtcacccataactctgcttcgcccgagcctgccctcgcataaggtaagtactagggagaatcctcgtcctagccgaggtcccctctccccagaactgccatctccgcctcgcccgggcccatcccgggcaaggaatacaaccctgaggcaggtctcagtcaaaggctgcaggagacataagcattcaatacgcatacttaccccacgcagcgtcgcgggtggaca

SEQ ID NO: 1828 - DNA, 290 bp, Zea Mays
gaggaagaaaacggttggtccgttggatctcaatccatcggctaagattagatcgggagaaaggtgatggtgaccgtagattccggattgggcggttctgacgtcgtagcacatgatctcgtgttcattagatccgggccgtcgatcggatgatgggtggccacgatgtgattccgatattttaaatccaagccgttaattgtggatcaggtggcgcggatccgtgccagtctaacccttcactcgatgtaatctgggtcgtccagatctaatccaacggccgaaaaccc

SEQ ID NO: 1829 - DNA, 707 bp, Zea Mays
cgggagggcgtacaagatgatgtgggtgcggtggccgagcgcttccagcaggatcccgctgatgatgagtagctaggtctgtagggagaaagcaagggtcccgctgggaagcggcttgtaatatattttgattttgtaagatacttttaagtactacttatcaagcaatattacaacttatctgcatgctacttttcctttgctgtgtgcgtcgttaccaacttcttccctggtacttggccccctgggatgtgggctctacgtgtcgaggctagatgccagtattattaagaaggaattggtgacatggcccccaggaggtaatctcgactgggacccggacttgcacacagccttggctaggaagttttagtagtgcacccataggacccactaactggtatcttttatcctttgatttacgcaacaggaccggcaggacttggcctaggaagccaagccatgtggtcggaccccctgaatcatagttctagatactaggacacccatcacagagtggtggagtgtgtaggcttacggtacgggaccaggctaagcggcttcatgactctggaccaccccaggggacgtgcgtccattctctagaactggactccaggtttctggacccacagggctatagttccaaatactaggatacccatcgcagaatggtggatcgtgcaggcttagggtgcggaaccaag

SEQ ID NO: 1830 - DNA, 298 bp, Zea Mays
ctccacaatggaaacatgctttgcttccgccttgcactggagctgcttgactgttctagttggtggctggggcggggaggtgaggtgcctgctgattctgcctctggaactaacttcctcctgactaattattctagcgattctattgctgaagctggggtactgcctctgaaactgctgctgaggcgggtgctgattctgcttgaactgctgaggctagttgcctgagaaacgggggcgattgctgcctccaggctgaggtccagcaatcttgcgattgtgatcctccatctccttg

SEQ ID NO: 1831 - DNA, 622 bp, Zea Mays
ccagcggtagcctccttcggcatttcccatccgtttgcaagtggcaacactctgtaagcaatatgctcttggaccaagtctcttgtgccgatgtaagtacacactgtattgaaagctaccaggcatgcttgcacgtcgtttccaattgcaatgactggtctcctaatgccgaagcgagaccatatagagcgctgaataaccccttttatatcttccctctaactcaggtcaaccttcacataaaaccattcttgcatccaacaacctagccacttttttccgaaatgttggcacaggataactggccttagcgcggggtacgaagctgtagcagccaaaattgttatggtattgctctttcccagtcgccttcgtctgatatgataactcgtggatactgcagaaacacctagcatctggctctaacccttggcttctcatggcccatataaaaacccctactttgataatagcttcgggggtaagttgatgaagataaatttcaaaagcttttagaatatcgaccaacatcttatccagggggaaccgaattccagctttcatgaagcttctgaaaattaccacttcgtcagcttcgggaagaggaacattattctcccct

SEQ ID NO: 1832 - DNA, 344 bp, Zea Mays
gtcgccggccgtgaggtcgacctgctcgctgccgcggaactttcaacataacggacgtggcgtcccaatgatgacgacccaccaccagagctcgacgaccatagggatccggggcactggacaggaggtaggagcgaaggcgatcgaggttgtgtgggtggatggtgatggtggacatggggacgaacacggataccctcgtcccggcgtcgatgtagaggcgtgtgtggagataagagagtgtatttaaaaatatatcgggggaggttgaagggtcgttttgaaagctaatacacgacggaaagttgtttgaaaatttatcttgcttgcacggttgcttcaag

SEQ ID NO: 1833 - DNA, 430 bp, Zea Mays
ctaaaccgaagttttctatgactcagtgaacactgtcatcaggacggcgggttgttttcaggtaaaccgaggggctcctttgcaagacatgcgaccgaagaggtatgcagtgttttcagtcgttagatccgcaaccatcggtccagattagatcgcccatacatcgaaccggtacgctatacgaatcgtcggatcaaagatcgacgtccactatttaatgaaggcgcgatctaatcctactcgcaagatcacgatccaacggtcacaatagcatgcggcgaagggatacgcctaactctaatcgcggccgttgagggtgaaatcgacgatccactgtccctcttcctcgcctgccagcgaccgacgacggcgccgccctagtgcaagaaatcgcgccggcgagcatccccaatccggtcatcccgagcac

SEQ ID NO: 1834 - DNA, 425 bp, Zea Mays
cctcaagaagctgatatgaagggtggaggtgtaaatggccccaaagggctcaaaccagtcgttataattccacttagcttctttgggataccagatgtgtccaatgccaactttcccattgcaccagtgttacaccggatgcgttcggtgagtactaatatttccacagtttgttttaagcttcacaaatatattccaataaattggcgatcgagacaaatggagatgggagggactataatcacaaaaaatctgggttgatcgggttgacacttgacagtagtgtaggcatctcattggaatgctgaattccgaatctagctcatgaccccaagatatctagattgatgatgccgaggcaaaaagaaatatatgggaaatagaaatacaatggtgttttctaaacttggcgttgtatcatcccg

SEQ ID NO: 1835 - DNA, 1120 bp, Zea Mays
acaaagtggaagcctgtatatcaaagaacaactttgcaaaagggaggtaggtatgttactgcttggaacaggaagtaatagtgacctaaacttgctctgtcagacggtttttgggtgggattcagaatgaacagtaaactgcataagatctcggttcacggaaccttgacgtcggtgatctctacgccggtgatctcctcatcgtgattcacaccggagttaagatacgcgcctggataagagtggatagctgtccacggtgaaaatatcaggggagggggatggatgtggtctctggcgcgagctcatccatttcagccagttgctctcgtggtcggccgggacgccatcactgaagtttgatgttcctcgcggccacgccacgtaacagagggtgttaccacgtagctgggagtcttggcgtgaagccagttactacctgaagccattgctccactacgcgccacggtgaacacgctccagtgaagatcttttctgtcaccaccgtgagcacttccgtcccaaattcgcgaagcaagaaatccatccctttaaattgaggacactccctgctttgcctctctgttacgcgcacaaccacccctcactgccctagttcattcaccacagcccccagtcaccggtttttcccgagaaaggtcggtagcgccgtcgtgagaagttccaccgtggtcagtcctgtctgaggtaatcccagcccaactgctatctgttttagtttcctttaggtgtcgtggtgctcactggcttgggaatttgaactctactgcagcagagcgtcgagaacatcgcctcaccgttgcagagcaccgccgcagaccgcctacgcgtcgacccgctgctctgtctgacccccctcgtcctcttgccctttgttacggtgtcctggtgagtcactgatgctcgccatgccttcaatttgaactctaccgtgttgtcgtgttcggaacaggctcgtcggaatcttggttccgtcattaccgagctcagaggggtttctggtgtgtgatcgtttaagcagtacatggggtagcgtcgtcttggctcagcaatggtgggatgacgctcggttttgctagtcttcgccaccgtcggtgag

SEQ ID NO: 1836 - DNA, 894 bp, Zea Mays
gtgtccgacggtggtggcggcaatgtttcgtttcagttgaattgcttccttgatgttctgggacagcgtacacaggttgattgccagcagttctatgccagtcgtggcttgccttatgatggtccagttatcccacccgcaccacagcctgcaccttcaccggtaaggaagaagcacaagaatctgaagtacatactgatcggggccattggtggaggcctcctgctgatagccgttgttgcagccattgtgttctgctttgtgtgttctgggagtacagggaggaggaatcatcagagagaaagtggggcatcaccaagtgcaccatcgggagtgtcagctaccggcacagctgcagctactggtggcacgcagccttctgcattgtctgcaaacacggtgaaagtcggcgattcgtttgcttacgaccaacttgtcaatgccacctcgggatttggggaaaataggctcatcaagcacggtcactcaggtgatctataccatggtgtgctccaagacgggactgccgtggtggtgaagaggatcacttcgcgtgtgcctcggaaggatgcttatctggcagagttagatttgtttgcaaaaggagtgcatgaaacgctggttcctttgttggggcactgccttgataaagaagaagaaaaggttcttgtgtataggtttgtccgaaatggtgacttgtcaaatgcactgcacagaaagtcaagggaggaaaatgaaggcttgcaatctttggactggattaagaggttgaagattgcaacaggggtagctgaggctctttgctatctgcatcatgagtgttctccaccaatggttcacaggtactaactcatatagttttgtggatgttatatttgtttgctgtgtatctgt

SEQ ID NO: 1837 - DNA, 557 bp, Zea Mays
aagtgatagttaacagtttgaatgcccttgaaaatgaaaactttattgatgatgtattctcccattatagagtacaatgttgccccgatagctttcgaggtcttgctaagggtaaaactttctaagatgctctatgttccatgaattccccacttccgtaccatctctttgagtaagtcgatatgatcctggccgagtgacctccgatacaatgaatggcccttcccatagtggtgacaacttatgccgtccttcccccgttagaattcggcgaaggaccaagtccccactacaaaggatcgatgtcgtatagctttatcatgatagcgcctcaaggtctgctggtatctggctgactgaattactgtgttcaatcgctcttcctccagcacatcaatatcctctagcctagtagcttctgcttcagctatgctttcgaagaccagccttggcgccccgaacttgaggtcggcgggtagcaccgcttccgaaccatagaccatgaagaacggggtatttccatgcagggctcgactaggttgagttctcaagctcca

SEQ ID NO: 1838 - DNA, 501 bp, Zea Mays
ctcattttctgcaaagtatagggggctcggggtaagtatttctagacacggagaacagttgcgtatggatggcgggttgatttcgctaaagtacgagggctcttaagcaaaacgccaaggccgaaggggtatggacagatctaagccgtccgatcatacacctacgctccagattaaaacgcagtaccaccgaaacggtatgcagcgcgcgccatcagatggaagatctacggctacattcatctgaatcccgctcaacgcatccaactgttcgatcgaacaccagcgctctagatttaaataacgttgatcgatcatctaccgcacgatcccgatctaacggctcctacccgaagtggcgaacgggtacgcgcgatctaatctagtccgtcccttaaggatccgacggcgcacgttctctgccccaacagggcatccacgcacggcggagcaaactcccccacggcggtgcgccatggccggtgatgctaaacccccctg

SEQ ID NO: 1839 - DNA, 368 bp, Zea Mays
ctcattttgcacaagcaaccatctagggaccagctggttcttcagggggaggtattatcatggatggggatggtggcgactaagcacaggagtttaattctagaaacacaattttgaaatgtagttggtgggtcgtattggaccgtattgtgattgtggtggccgactggtatataagttaggcttgtaatagttctgagacacgaaaaggaagaaaacaatactgcttgtacctttcttctccttctgaattcctctcctgttcttcgctccctgttcttcgcgctcaactccggtgaccaccgaatttcctacctctggttgtgacactccctactgctactaccgacgcgcgcctgctcctcttg

SEQ ID NO: 1840 - DNA, 616 bp, Zea Mays
catgcaatcaaccgtctctatcttcataagatctacaagaagacagcttatgaacttctcactggtaacaaacctaaagttgattattttagagtatttggttgtaaatgttttattcttaacaagagagtcaagagctcaaagtttgctcctagagtggacgagggtttcttgcttggttatgcatcaaatgcgcatggatatcgcgttttcaacaataccaccggtcttgttgaaatagcgatagacgtgacatttgatgagtctaatggctcgcaagggcacgtttctaatggcactgcaggaaatgaagaaccaccttgtgaggctataaagagacttgcaataggtgaggtaagacctcaagagaaggatgatgatgaaggaactttatggatgaccaatgaggtttttgatgtgggtgcaaaggtggtgagtgacaaatcctccacccaagcaaacccatcaatctcgagtcatctaaatcttgaagaaaatcatcaaccccaaaggatgccaacggtggtagaagatgaacatgaaagtattgatggtgaagtggctcttgatcaagtagatgatgaggaggaacaaattcaaagacaaccatcagtgc

SEQ ID NO: 1841 - DNA, 314 bp, Zea Mays
ccgaaatgcgcaggctatggaggagatgccatggcagccggactgattgttttccacaagcgagcatggatgctcccaccacatgacatgaaggaaaaagatctctactctacctgcatcgcggtcccatcccaattcccatcactactgaagcaacagtgatgcatgcatgcatgctgctcgatcgaaagggaccgccatcatcgatcctagtgctactgctaagtaactgacgacatgtgacacgtacgtatctgctcgtccggcctctcacatgtagaagctgtactgcagatcggctttcagggtttggg

SEQ ID NO: 1842 - DNA, 511 bp, Zea Mays
cgagcatccacatgaaatttggagcagtagccctttgaaatcaggcggattggcgtactgttcaccagagatcagaaaaatcttgccggggataagatcgccaccgcggttggggatgggtctgcagccacggtaaagatcatccgtgacgtggcgctaaaacgttgcggtggcacttcccggttaatcagcggtcaccggactttcgtcgtggctctgccgtgtggtgagctcgacagctcgggtacagctcagtgaatctcatccatctctggccatcagcctataaattgagcccgggcacagcttcttcaccgcaccgcacaccccatcgcttgagtaatcggctcaattccaccggagaactcagaccgtccacaaatccccctcctccctgtctttagcgccaccgtgaagaatccctccgtggccagcactcctcgggtcagcacatgccaaattgcttcttgttctagtttgactctggccttctattgctctcggagccggc

SEQ ID NO: 1843 - DNA, 747 bp, Zea Mays
gtggcggcttcgaccgtggctgctgatgatgattcgtttggctctgtgtctaagtgttttgagtctgatgattctgggagttcgattgcatggacagaggagttttcagatgaggatttggattattttgcggcattggatgtggctgcagcagagccttcgccgcgcgcggagggtccgaggaactcccgggacgaatctctagatcgtcagtgcgagtactgggtataggcggcagagggcggtggtgaagcggagagtgagtgaattgtcgcgaagtggtaggcgttatcgtagcgaggtggagagaggtcgtcttcgcgtggatgggactggtaagcgagaattgttgtcctcgccgattggggtgagtgtaggtgagggggagctgcgaaatctgtttgagggtgaggaactgatgataatgctgttcaactacagggagatgggtatcatcccgaaggttgagccagtgtaatatgtgatgccctcgttgtgtgtatgtaaccataattttgtgtgatgaagctgtgcgctttcgttgatcaggccgctcccgtaggcgacttctgtacggagtcttttggaaaagactttgattttgcgtacctattattccggctgcacccgtaggcgacttttgcgcggagacttttgaaaaagacttcgattttgcgcgcctattattccggctgcgcccgtaggcgacttttgcgtggagtcttttggaaaagacttcgatttttc

SEQ ID NO: 1844 - DNA, 621 bp, Zea Mays
atgaaaggtcactagatgtgattccctcttcctaaagaaggtattcgcaatcaataagtcataggctaatgcaaagttcaaaacatcctcccctcttagttcctactaccgtacttgaacccctcgtgcactcgctcgcaacctacattagtcacacccacatggtcattgaggtctcctcctatgaagagtacctcactgataggcacgatactaaccacgctatccaaatcttcctaaaaatgcatcttggtgctctcactaagacctacctgaggggcataggcactgaccacattcaaagccgcatctccaactatcatccagactaggataattcggtcacattgtctcctaacatcaatgactccatccttaatgcatcttgttgatcaagataccgataccattcctatctaaacttgcgcttgtgtactaaagcttgaagctagtatcctccaccttcttcgtcttctagtccttccatttagtctcctgaacacatagaatatttacacgctccctaattgctacatccactagctctgttagggaccctacgttccacacaaaatctaattggtttgaatagtttccttacccttcacacccgttgtgaga

SEQ ID NO: 1845 - DNA, 279 bp, Zea Mays
tagattttcatcatccttgcggaacggcaaagctcgaagcatcactatgatccttcgtgcaccgctcatgacggaccagcggaagatccacttcctcatcctcctctgcctcttccacgacatatctagccgacttaccagcaccaccaccctccaccttatcgaccaaatcaacgtccaccccttcatcaccaacagtcggctcagctcaagcaaacaccgattgcatatctgaagtgcgtcagagttttctcctcttctgtttgccctccgagacat

SEQ ID NO: 1846 - DNA, 900 bp, Zea Mays
cgaacatgcacaataagtgcgcgacatcaccctaagggtacgaagtctttactataagacacatccgagcaaaagccgcctaagggtgcagccggacatgcacaataagtgtgcgacatcaccctaagggtacaaagtatttactataagacacatccgagcaaaagccgcctaagggtgcaacgagacattcacaataagtgcgcgatatcaccctaagggtacgaagtttttactataagacacgtccgagcaaaagccgcctaagggtgcagccggacacgcacaataagtgtgcgacatcaccccaagggtgcaaactctttactataagacacgtccgagcaaaagccacctaagggtgcagccgaacacgcacaataagtgcgcgacatgaccccaagggtgtgaagtctgtactatcagacacgactaaacaaaatgctgcctaagggcgcaactaggtacgcgccagaagcgttcgacgtcgcccgcgggaagcgagggccccatcacacctaagtgccacgccaacacgatgagacaatcttacagcaagcgcagcacgcgatgtcctcatagtttacatgcacaaaacaaaggacccgtcagccacattgcacaataatacaaattacattttgttgccctccctctctattgcgaaatgggggagggcagcgttttcactcactatcgcaacacgagagcgaggccggcaaacatgctacatcggctcagccttcggaataagacccgcctcccggaaattaaacaacatcatcttcaactcttcgccttcaaacagattccgaaaaccccctccccaatacatatcccagacgtcgaggatagtaaatcacgttggctgccccgatctaatcgaagacaggattgttc

SEQ ID NO: 1847 - DNA, 1376 bp, Zea Mays
tttcctcagtatctggctgcgcctactcctgcaccgactactcctatgtcgtctcagtttggagctccgcgtctgcctcacccaacggctcagtggggttcttctgttaatttcactccaggagcttcctcttctgcaggtatttccggagcttatgtgctacccgctgcaaatggcagagagcaaaaagacgtggtgacaggtacgatttcagttgattcgtttgtggcccatgctctttttgactctggcgctagctattcgtttgtttcggagaattttgtgtcgcgggctggtctttcagtgcagaggttgggtcacccaattttggttagttctgctaatggctccattagtagctgttcagtttgtcaggggtgttccgtcattcttgctgatgaggtcttttcgaccaatcttgttgtgatttccttgggggcattcgatgttatcttgggtatggattggttatctcagtatcgcgcagttatatcctatttttggaagatagtgttattgcaggcgccatcgggtagggaggtggtattcttgggaagttccccaaagttcacgttatctttgttggcgcaattgcttccggatcgccggtcaaggaagtcaggaatctttttctccatggtggtggagggtgaggctgccttgcgggtgcaggacatctgggtggtgtgtgactttgccgacgtttttctggcagagcttccaggcattcctccggagcgcgatgcagcttttgagatcaagatgattccgggtatgcagcctattcataaggccccgtatcggatggccccaaaggagcaggttgaattaaagcggcaattggatgatttgctggctaagggtttcattaggcctagcaggtctccatgggcttccacagtattgtttgttgagaagaaggataaaagcaagaggctatgtgtagattatcgcgctttgaatcaagtgacaatcaagaataaatatccgctaccccgtattgaggttctctttgaacagttgaggggtgcccaggtgttctccaaaattgatttgaactctggttatcatcaattgaggattcgtgaggaggatattgagaagaccgctttttgcaccaggtatgggcattatgagttcatagtcatgtcttttggcttaactaatgcccctgctgcttttatggaagcaatgaataggatgttgcatgagttcttggacgactttgtggtcgtgttcttggatgatattctaatttattcaaagaccgaggctgagcatgagcagcatctctgtctcattctgggtgcccttaggaagaatcagttctatggcaagttgaagaagtgtgccttttggctgtccgaagtggcttt

SEQ ID NO: 1848 - DNA, 500 bp, Zea Mays
taaaaatgttcggcatacatacacgctatagctgatggcatgcttgtcggtttcgattttagaattgctggttgacacgcgcctggctctgctggaatacgctttcaacctgaattagcctcggggcctgtttgatcggttgttcctcggctctcttcttcttcttcttctttttcctccggttatgtgatcggctggagtagtttttcgccgtagccgctgcaagtgggtggctgtacgtgggcaccagttattgccgtaatgtcttgcaagacgaccacagcagcagacgtgcaccagacaccagtgcgccttttattttaccatcgttgcatggactacgcgacagaaatgcgcagagcagagagctcggatggaagcagatgctcgatttactacaacgcagcgacgaagcaggaaggcctctctcgcccacgccgcctcatgagagatcgtctagagaacaacatggacgcgacgcaggccacgcaccccctcgc

SEQ ID NO: 1849 - DNA, 800 bp, Zea Mays
gcgtgtacgtgcggcgtggggatggacgcgctcaaacgcacgatcgagaattgctcggagccttttacgatttcctgcatgtactctgtacctaaaataaaaggaggaatagaacacagaaaacgcagtcgtcttatcgcaactccaaattgcctgtgtctgaaattgtgccagtgcatgtgtgaagtttgtgtgtgcgtccgagagggtgagctagtgcttcttctccggcacaggtgaacgccggttgaagtccaacaagtggtaccagagccaaagagcgatccaccatgtcggctccaacaggagagcgttccctgactctgcctcgtcgtcgacaatggcgatcgccaccgcgtcgacgcaggaacggtggcgacgacgagcaagtggtggaaaggatcgtggagaggatctcgtcggctggacccgccacgtaccccatgctgaccaagacaaactacaacgactgggcgcttctcatgaagatcaagctgcaggcgtggtgcctctggcgtgccattgatccgggcgacgacgtcagcgagccagaggacaggcaggcgctggacgcgctgtgtagcgccgtcccgccggagatggtgcccacactcgccagcaagccaccagcgaggctggcgtgggaggccattcgcgtcatgcggatcggtgatgatcgcgtgcgaaagacgagcgcacaacgcgttcgccgccagtacgaggaactggcgctgcgcgaaggtgaaggtgtcgaggatttcgccctccgcctcacgaacatcgtcagccaacttgcaaca

SEQ ID NO: 1850 - DNA, 906 bp, Zea Mays
agcccagaatgaatttcccttatcaactcttggccttcgtctctagaaacacattttagcagaggtgaacaaacaccttccttgtataactccccttctatgattttatacggccatgtccttgcttgcatcctcttgatgtatgcttcgtcatcaactggatgacttccccgaaggaaagttatgatctctgttctccagtctttgctgtgtgtaggggacactgttaagatagctctttccatcaaatcgaccaaaggtgcctttagtactccgaagaacacttcggggggcaaagggagcccatgagcggcagacttggccaacatgttagcatgcttgttatccagtcttgggacattttttactgagaaaccctcgaaggaagattccatccttcggaccatgttgaagtacttctcttagccaggatttttttactttgcttgacttatccacctggcctatgatgacttgggagtctgatttcaatactgcccttcttacacccattgctttcagcttccttagtcccaggagtacagcttcgtattctgctatattgtttgtacactgaaactgcagcttggcagcatatgaagttcttactttggatggtgaaatgataatagctgtagcaccagctccaaaggatccccatgaaccatcacaaaaaactgtccagacagcttcgtctgatgtggtagctttgtcctgcaagccaggagtccaatcaacaatgaaatctgccaatgcttgggattggatggatgatctgtggacgaagtcaataacaaactcattgagctctgctgcccattttccaattcggcctaaagcctctctatttcttatgatatccttgagtggttgagatgatggtacaataatgtcgtgggattgaaa

SEQ ID NO: 1851 - DNA, 729 bp, Zea Mays
aataaagggtactgcataaaggggtactgccataataaaccttctccccctttttggcaacaagaaccaaaaagagagagagagaccagtccaaggatcaccggttgggaggaggatgatgaggagcaaagaggtggcgcgccaggtgagaggcaaagtgttcttccccagagtgatccgcgggaggagcactgccagaaggatcctggggcggagggtgagaggatgattggcccggatccccgtgatacggaggcgggacaaactgctcacgatcatcaaaataagcttcttcttcttcttcgacgtcatctgttgtcataaaaggcacctcgtatgcctgctggtaccactcgttgatctccggaggaggaggatgaagaggtacatcaggagagcggggggcgaagggactacccaatgaggaagcttgacgacgtaggttgtcgtcagtctcccgctgacgtcgagccacctcacggacatccgcagcaatgttccggcacatggagaagaatgacgcaaacccgtgggccaagcgggcacccatccctcggccacgacctcgaccacgaccacgaccacgtggcgtgggagatccacggccaggggaaggacgcgaggcaccggcagcagcagcagcaggaccagcagacggacccgcagatgtatgagcacgagagctggagggggctttcctgaggcgccctgctggattgttgggatcaa

SEQ ID NO: 1852 - DNA, 533 bp, Zea Mays
agggagagccagagagggacatacctgccaagccggagcccagagccagagacgagggtcaagtgcatgacgatgcgtgacgagccgaccaccgacaatgacgtgattagggttagggatttctggattggggagggaccgagggagagccgaagaggggcaagccgcacggaaggagagtaggagacccgctgatgttgccggtgtctggcggttgcgacgacgaggcggtgacgacgcgggggcggatcgtggatgagcgaatcgagtggtgagaggtcgagaggagcagagcaggagaagccgtgtgggagtgggacactggaagtctaggacgagatgggaggaggctgagccttatgccccgcaccccgacaccggtccagccccgtgcctgccgttttctggcgggccaggccgggacgcctggcggcgctgccggcagcccatgcatgacctggtttattgggccagcccggaccgggtatgaacccagccgggtcatgccgtgcttgggccgggccaaaaaattg

SEQ ID NO: 1853 - DNA, 618 bp, Zea Mays
aaacactgaatgctttgtatatgtggttagtgtgctcggatattttgttagaaaacactttttagtactgaatgtcgttattgttttcccattgttagaatacaacagtatctacaattgcagaagtaaatgtagtgtgatggttttgaaatttcttcgtatttcgcggggcatagaggtcgctctaagatgagtaattgcaaacgtgcttgtgttggattaagtaggcgcgagcgcaccgtgccgatttaagtcattaccgacttaaaccgactgctccgttagtagggtatagtggtcaccccgagttaagtaagcgtgagcatgtcacaccgccttaagccgttgccgacttaagccgattgctccgttagtagggtatagtggtcaccccgagttaagtaagcgtgagcatgtcacaccgccttaagccgttgccgacttaaaccgattgctccgttagtagggtatagtggtcaccccgagttaagtaagcgtgagcatgtcacaccgccttaagccgttgccgacttaatttgattgctccgttagtagggtatagtgatcaccctgagttaagtaagcatgcaggttgacagtaaacaatttgagtgcctt

SEQ ID NO: 1854 - DNA, 429 bp, Zea Mays
gcgccatcgcatcgccgtgactccctctaaactccccgtcgaccaccggaattactgccacggcggtgaacacgtgttcactgcaccagcattcttcctcacttccgaccgccgtgtgtcttgtccaaaattcgcggccaccgctcgctccgcctataaattgagccctcccctagctgtgtaacatcatcacccacccagccaccaacaatcgttagcaaccgtgcctccgagagcttgaattttggtttctccccaatccgggtttccgccaccgcaaaactcacctcaccgcggccagcccctttccggtcagctcatccttctctctctctcgtttgagctttctcgcaactccacgatgcttgccgacccacgtaattgcgctaggagctctctggtcgccgggaacacgacgatctagccgcc

SEQ ID NO: 1855 - DNA, 642 bp, Zea Mays
ggtggtcacagccgcacacagcatagagcaccgccgtattgaagtagtctcgtcctaggaacagggctccggcagcagcttcaagtgggtagcgctattccatacggcaaggcgtgggctcacgccgtggtcacaggaacgataggatggatgtgccagggagagtctcgggtggcatgctattactactaaataaagcgggacgcaaacgctgtcgtccgtgcgtccacgtcggctgaaaaacaaggtgcgcacgatgtttgatcaacggactccatttctgctctgtctatttgcgtttagagccttccagagtctccacacgaacacaccgctaaagccttccagaaattaccgctacccgaatatctcatctctgtccgcctgctctcaaacgctctgcggtctctagcgacggcaacggcgacaccggatgccaacggccgtccatcgtcgctcctcgtgcactacgttcgcctcgacattttctacaggttcgtccaacactttatggccttttcttcttcctcagtagcgcaaagcggtatctaggttttttccagtctctctatcttcgcggccgtcaatgtcgatcttgcccttgctcttcttcttgacccagacaacaacgagtcagcttgt

SEQ ID NO: 1856 - DNA, 383 bp, Zea Mays
cgccccctgcacgtacgtacgtgcgcgcacagcaggaccggaggacaccttgcagctggcaccggaaatctgagatccctgccgggccggccatgcatttgcatgcatgcatgctcacctgcaagctttgctttgctgcgcttcactgttggtagttaacgcctttgccccagcagcctcaggccggaggcggtcctccgatcctcctccatgttggtcctgcttattaccagtaccagctgcacccaggttgatgagtacgtagctacctaatgttaggttgtcttcaacagctttcatatcttatctcccgctctacctcatgtttcagatttcactccgtaaatattactgtctacaacgggaaacagagtgttttccac

SEQ ID NO: 1857 - DNA, 579 bp, Zea Mays
tcaagatggaaggtcggtcagtgaatacgtgcacaaattcacggagttggcccgctacgcgccggatgacatcagcaccgaagtcaagaagatggcccgctttttgaaggggctcagaacagaactcaagaccatcctagccagccaggatttcctcagcttctcgcacctctcaaacaaagccatgcaagtggaaagggcaaaggaagaagaaaaaggccatctcaagaggaaattccaagtcctccgagctcagcagcaagaccggcaccagaaaactcgatcctttgggtttccacccaagggaccaagattcattagaccagctggacccactccgtcacggtttagtcagccgagtcagagctcctttcatgccccctcggtggcaagcaaccaaccaccagcgaatgcgtgttggcactgcggagaccccagtcacttcaagaacgactgccccctagttgaaggcatcaggacctgcttactccaactcggtgaatggccccaagaatacctcagcacccgcccccaaggcgccctcctccatcagccagcagaacaagaccccgtatcaag

SEQ ID NO: 1858 - DNA, 381 bp, Zea Mays
gattcgaacggcggcgaatcgcaaaaaattgggagggagaggtcgagtgcgaacgcctcctcctcgccgccaccgccaccgccgccgccaccaccacaaccggcgtctcgtcggctataaaaccctaccccttctagtcttcccgtcgccaccagccgcctcgctgaaaccctaaacctctctccccgttaggtctcccccagcgccccgacgatggcggaggacgcaccgcctgcagcccctgtgatgacgccggaggaagtgcaggctgagaccgagctgcggatgcgcgacataggccagcgctttggtgctatcccagaggaccccgacgagctgctccggttactcgaagtgagcgttgtcccagcgaacctttgc

SEQ ID NO: 1859 - DNA, 412 bp, Zea Mays
cccgggcatatagaactgctgctgagggggtggtacagaaaatgactgctcagtgattgacatcacgctgacagtgccctgcgaagaggaagaagtcactagctcccatttgagcttcccattgggattcctcctacacaccacatccttgtgatcctggttgcatatagagcacctgccactccactgacactcggcacggcgatgcgcttcaccacaacgaaaacacaccaaccccagcccgggcttaggaacagtccgatacctctgagtactccctcctgaagtaccccgaatcaaaggattttccatgataggggtggtgacgctggtgttgcgactttcccctcttgtgggctggacccctagtgttggccctcctcgcgtcctggccatgagactgatcaacacc

SEQ ID NO: 1860 - DNA, 1005 bp, Zea Mays
agagcagccacctcatctgtaacatctgaatatggtgcaggtggagcacagtcctgctattaacaatcctctttgggactgtgcaacttaactgcttcttgcacagtcctgctattaacaatcctctttaggattactgcaaagagtcttggagcaagatctgcaatttttttaccttgtaaccacttgtctttccagaatttggtatgggtctcatccccaacttcagtgaacacaacctcatcaaagaaagctcgagccttttttggaacttgaatgggagaccaaaccagggccttgagcggtcggttttgagcagccaaagccatctcattcggagggcctaacatagttctgataaactggagatgcccagcccaccaagctgaagggggcggcaaaccttcccccatgccacgaggcagtggccaccttttgcctcttttcgacctctccaaagaaatccttttctaattctatcaatggcatctaaaccccattgggggatgtccactgccatcgccaaataaacagtcatgctggtgaggacgtgttgaacttggactcttcttcctgctcttgttaacaagcctgccttccaatttgggagttgatcagcaattctgtcaaccaaagcctggaactgctgcctagataacttgtgtaaggatagaggaagtcccaaatagcgacatggaaaggaagatatttcacaaggcagcagcatctgaacttccaacatgtcctcctcagaacatctgataggataaacattagatttttgagcattattatgccgcccagaggcatcctcaaatagctgaagaatgtcaagtgtgagggacaagtctgctgcttttgggtgtaagaaaagagctacatcatcagcatacatagagatccgatgaagctttttcctgctggataactgctgaagcaatccctcctctgccttggagaacagaaacacaaggacatccgtagcaagaataaacaacaatggag

SEQ ID NO: 1861 - DNA, 392 bp, Zea Mays
gtgttgagcgtgtcccctgtaacgttgtgtcccttcccttttatagtttaagggaggtacatataaggatgctgagccccgacatgtgagcccaggagcataatgaatacattatgtgaataataaatactgacagcacaccaaaatctttactagacgctgtgttgctccctctgtcctagtaacgcatgagtaattagcgggagtcatgatgactgcagtccatgcagcattgataggcagtaacccttttcttggaaacgcacgagtaatggtgagtcattgccctctctatggtaacatgtgagttactgcacggcccacgcatcgtggactgggcacgccgcctgtcactggaatggacagacgcacgtcttatccgtaataaatgc

SEQ ID NO: 1862 - DNA, 1359 bp, Zea Mays
taaggaccacctccaaaggatcgtccgagcaaggcttaaccggcgagataacatcctgcgacaaacaatccacctgacaactaacccccaaatcctctgctagatccaacgccaaaactggagggtgaccaggcgcctccagctctgcaaccgaaacttcctggagagccagggcatcaactgatcccaaatccatagccataatcatctccaaatctggagggtccagctcctcaaccgaaacaaccgggagagccggggcatcaactgatcccacctccaccaaatcctgatcaacagcctgaacagacatgaggctgtaatccaccttaccagaacgactgcgctgacccagtcgcaaataaattggaacttgaacagaagtcgcagggcacccccactgctccacatgatgctcatgatcactatcttcgtcgataaagcctgaagggggtggcgaaggaggatccacactgaaagctaaaattccatcagaatgaataaccaccacagaaacagggaacgccaacgtgcaaggagcccagctcccatcctctccaaagacaatcggctctttagcaaggagatccaccaccaccggcagcagctcaggtgaccggcaccagactttcagtatgagaacagacatgtcttcctcctcgactgagccaggaaataatccatgaatcaaacagaaagcaccaagcacagcctcaacagcctcaatcccctagagatgtgcaggaattccacgtagctcaacgctaacgggcacgtggctgaccacttccaaaagtgaaagcctgacgagaccaccttcgaatatgcaacctgagcggagggacatgaagagattgccccccaaccacccgatcagccacgtcaaatgaggggaagaagacgaggaaagaattaggcgcatcacgacgtatgcggagcgaccctgcttcaaggcaaaactcgaggcgatcgcatcacgcacctccacggcgcagccagaatcctccctgcctacaacactgacgatcagtggccgacagagttcctcctaaggctgatcaattcttccacgacgcccgacaaagctcaccgccctagctaggccgaaggcaggcgaaggaggcaactgcccccccagcgctcgacttcctcttcctctgaccatggcaacttctcttcttcgcacctccaccagtcgcagtaggtctagacccgccagccacaaccacacccagaccgcagacagtcttctccgaagacttcatagccacaagctgccacaccaaagtgcgtccagggatgggaggggctatccgccggcgcgggcacacgcccacacggtgccccgacaactggcag

SEQ ID NO: 1863 - DNA, 280 bp, Zea Mays
atttggtccgcccacctagtacattcaccatattttggttaaaataatttaacaccgcaacgacaaatgagtagggttacaacgagattgttcaacattacgtttgtttgggttgaaccaatcaatgtatgtttctcgctactgctagactgagatgagcatgtgcatcaccaccttgaagcaagaagacttggcgccacctagtgcctcgttacaccattcctaagcaagcttgcttctctttccagaaccgaagcaaccgaaaaggaaaccccagttc

SEQ ID NO: 1864 - DNA, 610 bp, Zea Mays
agcttttcgtcctcatcctcgtccggggtaacactaaaatgcacgattgatcaacctttgcaatgatggaacaaccactcagtccggggtttgtttgttaatttgtttctggtgggagatattgttcatttcgatgggtaacgtagtgaggggttagctgtgggcgttgggttagctggggaatggatgccttgtagagatttgtgtgtgggtgtatgtgtagctttgtattgagctcagtgttatgtgactcttcaccattcactagccagagcttttgtggaatgatctgattttatacaattagagtgcggctaacgtactggttatctgctcattgttgattttcaaatggaattctgttatatactttttatactagttgctggtaagctgtatattagagattagagcaaatagtagtactgggctactggcatatagggcagtttgaattgttgcccgtggaagcctggcccaattttggtggttgaccgtggacaaggataccatttggatggcagccgagatttggcttgccctggttcctgtgcccatgcagccgttaattttctagttcaatcctggccgattcctccgctaaattttg

SEQ ID NO: 1865 - DNA, 447 bp, Zea Mays
cctccgccacctcgaattgagggaatgccacataacaatgtgagcacaggatggccggaggtagactcggccatccttcaacatcaccgggagccacatagaaccaaaaatcccaccaattaccccacttgttcctagcgcaggggactatctccacaacctcagccaaagtcttcctcccctatcttcctcttctgccaatgcaggtaataattcttggcgaaggcctccacagatggctgcccgtcgtaggaagaaactgcccagacgtacttcgcaagcaccaccactgcgttcggcgtcaactggtgaacttgcacatcaaacattcgcaacacctccaccatgaattgttgcgtcaggaggcgaagaccggcagcaaaaaaggcctcaaaaaccatcaactcaccctcaggctcggggacctcctctgcgcccagggcccgc

SEQ ID NO: 1866 - DNA, 636 bp, Zea Mays
aaaggaacagattttcgtagaagcttgaagaaaggcagtgccctctcagccaaccttgaaatgaagcggctaagggcagccagagatcccgcaagcttctggatgtccttgacacgggcgggaggcctcattatctcgatagccttgatcttttctgggttagcttcaatgccccggtatgaaaccaggaaacccagcagcttccctgcggagacgccgaagatgcatttctccgggttcagtttggtgtgggttgcccacagcttgtcgaaaaccagggtcagatcctccactacggtcaacccccttctagtcttgaccacgatgtcatcgatgtaaacctccaccttgtcccggatcagatccccgaaggtcttactcattgcccgaacaaatgttggcagggcgtttttcagaccataaggcatcacaacataacagtatagcccatctaccgttacaaaagcgatgtgcttcctgtcctccctggacatccagatttgatgaaaaccggagtaggcatccaggaaagacaaaaagtcgcaccctgaggtagagtccacgatctgatctatacgtggaagtggatatgggtccttggggcatgccttattcaggctggtgtagtcgatgcac

SEQ ID NO: 1867 - DNA, 377 bp, Zea Mays
ctcggataagtggattacgctcggccatgaaaagatctttgtcacagatgagctcgggacactgtggccgctctgtcgtccatccacttgcgccgacgacgtggccaagcgaccgtcgtcgaggtatacgtcgcctgccgtgatcgcgacatgccctgaccctttaaccacgtcgtagtgagtcgccttagcccacccgttcatcatcggtggtcttgccacggtaaagtccacgaatcgcttgcgccagtagcttcttccctccccgaccgccaacacaatctcttcaaattgaatgccaccaccctcgaatcctataaattgagcgtgccatcggctccactatgtagtcaagcacccaacgcacccacccgtgc

SEQ ID NO: 1868 - DNA, 657 bp, Zea Mays
cggattacgaatacatgagctctgtccacggtgcggcgcgatacagtgatggatatttgatgcaccggcgagcaatcccggttgtacggggtgcaatcccgccaccgtgaggccatgggcaccgcgcgagcatcacaatgaatcttcctggtaccccctggcagcccgacgtcttctacctctcggcttcccaccgctccttctctcccctcgattttccccgagctggtgttctcaatgcatggcggcggtggttttctggtgatgggcaggggcggcggccgtatataaagccacaggtggaagttgtgcgcggagcggtcgacttccaccggcgagaatcacggtcgaattccgttatcgccacgcgtggagctcgaacatgcagccatggcgtagggacgacaggatcaaaggatagggcgagatcccgatgatttcggcgcgcacaggggaatgagagaggagaaggctgccaggttgttgaggagttaaagccgagatccacacgttttcctcgcaggttgttgggcatccaagtccgagcggacagcatctacgggtgtggcggatagcagctggaggatagggatgacaaggtggtcccacgcattcgcgagctgtgcacaccatcgaggcaacacagacactgccaga

SEQ ID NO: 1869 - DNA, 536 bp, Zea Mays
gtggaattcgctgaccacggtgagggctctaccacggcgacggaaaacaaaattgggagctgggaaattggagagtggtagtggctaatcggaggcaggagtgggtgctcaggcttggtgatgacctaatgcagcagaccatgccgtcaatttatagcggcgctaagcggtggccagtgaatttggtttggcgcggtggcggccggagagtgaggagagtactgtcgcgagagctcagtggcatctaccgtgacggcctcaccagcgatgaaccagtagtagagagtggtttacggtgactcactgccacggggtaaggcatcgaggcacgtagcctggccggataacggcgaacgccggtgatgccagtgcgactaaccacggcgggacacggcgaccggtgagaacagtggccggagtttatccacacgacgatctttaccaccctgagccatatccggtactttgctgagctcgaatcgcaacggtgatgagaatcccggtgcaagatcaccggcggcgagggggaatgaatt

SEQ ID NO: 1870 - DNA, 885 bp, Zea Mays
gtcctcgattggtcatcattggcagaaaacattacgagccactagagaattctttaggggcaccttggaagacccactattatccaagttccttccatcccttcgacctgtactcagccacacatctccatgtaacaatgttagggaacatgttgtgtctagattacttggtctctgcatagccaccatagttctcacttcatccttcaaaccatccacgaaactggcggtaatcatagccgaagtgagttgtccctcatgagcaaataaatgatggagtaagtcatcaaactgctcaacatacttagtaacaaatcatgtttgggtagaattgccgaatcgagatcccatgttgatctcttctaaatctattgatcaggttagaacaaaactcctcctcaggtggtgctcctgtaactgcaaccaaaatagtgcagatccttcaaagtgcattactgccattctaatccacatctctcgggccaccagataaaattcaaaatgtctcacaacgagtcttccacaactttggattgctcccataaaaaaccagaaaacccatgttgggaaccaaagatccagacccttgtgaccaccctccttgcgtgagatgcgaagttatgccctccctccatgctcggtcatcggggcaaattaggatgccgaagctggttcgaaccacctgcgaactccatgatcgggggttgtgggagaggcgactccagtttgcctccaccattggtttcaccaaacccgtctgccccatcacatgcttcttctcaaacttctccacttgaatctagattccccgcatagtgtctgccatctccttcatctttgactctacctccagcttccacttctgtagatctcccttctccgaca

SEQ ID NO: 1871 - DNA, 568 bp, Zea Mays
atatatgtgaagtagtaatagtgatcagcaaaacagtaaaggagctgagtttggacgcaagcaataaacatcttcaataggtgcttatataactttttttctttttgcaaatgtgaaagaaggtacgtacaggactgcaagctgagaggcgcaggtagcgcagaggaaggatctcactggccgcggcatttccgcaaacaccttgggctcgctgcccagtacacgccagttacacggcacaccggcacctgctacgtggctctgacaggcacggccaaagcaccctaggaaaatcacggcgtctccgtgaccactgttcgcgctctccccttccagcgatgtgttatgtaccttgcaggctcgcagtcgtggggtcgtctgttccgcctctcgagagagcgtagataggtgtagcgcgcgtgagttgtggacatggcgcgtgctgcaggagccagccagagaggaaacccagagaaacgagccgggcaacgggctggcggcggagcggaggtcccgagagctctctcctgcgatgcaacgatctgggccgcacgcgctagatcggacg

SEQ ID NO: 1872 - DNA, 413 bp, Zea Mays
ccacaaccgtccgattgtttatgcggtggttaagattttaaaacaggcacgatctaatcctaaccgcacacatctgatccgatggacaccacacacccatagttgaaacggtgcgtggatctaatcccagcccttaatctcccgatcaacggctgaggcgcatcttccacctcccgatccccatagttgaaacagtgcttgaccgtgacggcgccaacgcggacgcgcagtcccagtcgttcttgcgttctatatttggtgtggtgcaacacgcaaaggaaacataggaaacgcagtatggtggtattacttactaacacctaggactgtgacggccaaccactatgcgagacagctccgccgaaagactagaaccccacgacgtaattccctgatcgcttgttcctcccccg

SEQ ID NO: 1873 - DNA, 497 bp, Zea Mays
ggtttatggtgactcactgcgatgtggtaaagcgtcgaggcacgtagcctggctggataacggcgaacgctggtgatgccaacgcgatcgtccgcggcgggacacgatggccggagtgaacaggagctcaagttcatccacatgacgatctttaccaccctgagccacatacggtactttgctgagcccgaatcgcaacaaagacgagaatcccggcgcaagatcaccggcggtgagtcgggttaatctgcgatctctttcagtcactgtacaatggaatccctattcagtgcgcctgacagcctaatttgcagggcctagatctcaaatctttacataacaacttgctattctgcctgtaacaaagttgttgcccgatgatccagctacaatcttgctatagcaaccatagccaaacactcactagatcatggttgaattctagtccaaagattgctcaatctcactgttagtctgaattcagacctagggcagtc

SEQ ID NO: 1874 - DNA, 400 bp, Zea Mays
tctaacattaaggaccggtgggaagcagcgtcatccccactcccaaaaacccaaaagcgtgagttcaacgacattgtggtatacactctatggaacctatggaaggagagaaaccagaggatcttcaaaaatagctctctaaaccctatccgggtagccttgaggatcaaagaggatgttttaagttttaggggggctatatctaccttataattgggttgttgcagccccttagcaactacctgctctatgtgggtctgctggaaatgttcctcccaccgtgtgtgttaggcgatgttgtatccagtcctcggaccttgtttcttgttttctaaactctttccccattaatggatatgcagagttcctgcatttcattcaaaacaatatcgaaacatga

SEQ ID NO: 1875 - DNA, 899 bp, Zea Mays
tggaagtcaaaataacaacaaaaaaaactcaagtaaaggagaggattcaagtagacgggaatcatggtacaatttggtaaaaaacgaatccacactagaattcaataagaaagctagttttgcacattagtagttagcctcgcaggtcaagcacgcaaggaaaaagtaatgttagtgcgataagggaaataaaaggtgatgataagtggcatgcattgggaattttgtaatcatctactttagtgaaactgatatgcaacaaattaaccatacacatcttttaattgaataaacggctagtgcttaaccacctggacaaccatactttcatagggtgcctccaataaaataatgaataactgaggatgggaatatggttttttccttttccctttctgctccactttctattactcccaccccctaacgtgctccatccataaactctagtaatgtccattgagatgttactagaaaaatcaagttcacactaccaagaaaaaataaacccgaaaactacaatgagatgacacatcacttatgttagtggtgtacaggagacagataaaatgcatggcacatgtttctggcagatccacttatcagaaggaaaggtgttcccagttgcaaggggcagaacaggttcgaattcgtatccttgttttcaaataaaagatatatgagatgtgagaaacataaccttttatttttctgaaggatacattatcaaacttgtacagtgtcatatttttccatttttctttgaaaaaaaggaaatacttcatggttcttgcaaaaatgcttctttggcattttgcatatgcagggtactgagcacttgctcttaaccactcaagttgaatattacaaaatcaaactacaggtattaactagcaaat

SEQ ID NO: 1876 - DNA, 541 bp, Zea Mays
aaaacgcaaacacactcacgcacacacatctgttctaaaaaaaaaagaaaaccctcgcacgactgctcctaggctctggccgtggccgtttttgtctcccctccttccgttagtatgacagataggcccgcctgggcttcttctccgcaactctctcttccaattgctgctgtcaggaaacggatgccgccagccaccatccgttcgcctgctcgcctcccctaccctcacccgttcaattgctgcaagcactaccgtgacgccgccccatgtctgttctcctcccgtcccactaattaggacgtttcttctcccctccttatctccattaacaagcagttttctccattaatggtgtttgaagtcttccttctctcaatccacatcaattcggcggcgattccctccatcctcgccccctcgcctgcctgtcgtagatacgtccggccgtccctctctctccccactgctgcgacgtcttctcttcccctccccaatacacagccgccaagcccactcacctccattaatggcgtgccca

SEQ ID NO: 1877 - DNA, 720 bp, Zea Mays
gagaacgatgcccagggcgacgcaaacaaaacaaaactcacactttaaaggtacagtgaagtgatttggttgtgaccgtatctaagtgttggggaaattgaatgatctccggtctctgagacccaccggtccgagagcgcgctaaggaataaccctaatcgttgggacccattattcaactggaagaggtggatgcgtcaaccctgaaagaactcacgcccagtcgaaccctgcggcgctgagcttaaggtcgagcgtggcggaacatgataggagtgtgcgtaccggggggaaaccacttgagtgaatcttgtgcctagtcccaggctgacatgacgtgaatacccgaccgtattaaccacaccttgcaccgagccacagcgtgtcggttcgcttcccactcatgacctacgaaccccttaggccccgaaggcaagagtaaatatgagacatccatgcggccccagggccacgagtacgcctagtttttaccccgggtaggaacattggttttacctttgtctcacgacttattcctgaggaagccaccgttagttgatccctcttgtggcttataaatgggaggggttggtcctcaggcatggaggacggacggaagaaacacaaaaacgatgttggacggagttgagttcacttggacacacaccacaaggacgaaccccaggcggaccgacgaacacgagcaggagcgcctgttgg

SEQ ID NO: 1878 - DNA, 820 bp, Zea Mays
gtgactgagggggcctgaaaggagctctgactctgctaactgaaacgtgatggagtgggttctattggcttattgaagcttggtcccttgggtggaaacccaaaggatcgagttctctggtgccggtcttgctgctgagctcggaggacttggaatttcctcttgaggtgacctttttcttcttcccttgccctttccacttgtatggctttgtttgagaggtgcgagaagctgaggaaatcctggctggcaaggatggtcttgagttctggtcttagccctttcaaaaagcggaccatcttcttggcttctgtgctgacgtcgtcaagcgcgtagcgagccaattctgtgaatttgtgcacatactcactgacagatcttccaccttgagttagttcccgaaattcatcttccttgagctgaacgatcccttggggcacatgatgttctcggaaagcagtttcgtattctgcctaggtagcatctctgacggtagcgctgaatgtatcccaccaggatagggccatcccggaaagttgatgagcagccaaatgaacacgctgattctcagggcatccgatggcttctaacttcctttttatcgtgcgcagccagtcatcagcatcgaggggattgctggatccagcgaatgtgggaggcttgagccttagaaaatctcccatcctgtcctgtggtcttccaccatttgggcgctgattctccagacttctagtgaggacttcaatgagtcgggtttggttggctagaacttgggctaaatctaatggcagctccggaggtgcgaggaggtgggtctcac

SEQ ID NO: 1879 - DNA, 555 bp, Zea Mays
gaattcgctgaccacggcgagggctctaccacggtggcggaaacagaattgggggaaaagagaaattgggaggctctgatggataatccgaggcaaggatcggtgcgttggatgcataattacctagcggagccgtgggtgcgctcaatttataggctccgggggcggcggcgcatgaatttgggttggcacagtggcggtcggagatgaaaggggtcacttgcgctcgggattagtggctttcactgtggcggctctccggcgatcaccgggcatgtatgacgcgattcactacgacgtggtacaacgctttagtacgtggcgcggctacaatcgccggcgaactccgacgaggacacctctgtccactacgcggcaagtgtcacggtgaacagtccggcgataagtctctctcccttcccccgagttgagatctttccttgcccacggttatccgcaagtcacggcgcacgaattgcgatgatcgatgtcaatcacggcggagggtcactggcggtgagatgcgctgtatctgagatatttctgctactgtac

SEQ ID NO: 1880 - DNA, 935 bp, Zea Mays
ctggcggcgatttccgcacgacgggtgggctttatcgtctgaccgagggctcagctaacctactgcccggttctcgcgcctatattaatcttcttgacctcgccctccccttgcgcgcttgaatcctccgtgcgattgtccgctcgccattgccactgagcgaggagagagaacctgcgctacaatcgccatatccaccataaacgcactcggttcgagagctacgggtgcggcggtgggaacacctgggtacctcggcatcaaggatcctcggcgcccccatcacgtggcggaccctcgggccgtgcgcgccagcccgtcctcacctccgcggcggtaagtgtgtcgctcttgtaataagtgtaagctctgcggatacttgtgccggcactagggaggtagtgatcgcggggtgtgctcacgtcgggcggtaatggcgcgtcgcgtcgctggtggggtcttcgccgtgagggtgagcacgccgcgatgttttctgtttcagtgcccgtgctgtgcggaggtagaagaaacaccgcggccgtaggatgcaaaatgaacggtgtagattagatcaatgtgtaacccttcgctgaatcggatccttgccatcagatcttattgggcggtctggatttgaactaatgtaccggtttgacacgggccgttgatccaatatcaaacggctaggattagatctagacgaaataaatcctgagcgacggattagatatgggtggccacgatttgatttggcgtaccctttcgtctcaatgaatcgtggtcgtgtgtcgtggatcggatggatccagggagatctcgacttctttaaatctctgcccttgatttcagatccaagggttcctgctgcgtaccggttcggggtggtgctcgatttaatctgagccttccatctcaaatccagcggccaatcttca

SEQ ID NO: 1881 - DNA, 641 bp, Zea Mays
cttcgcctgcctgcttccactacaccgacctctgccccacatgttcttgccgcagccgcctcttctgtgacttggcatcgtcatctcggtcacatcggtcgtgatgtgatgtccaagctctccagcagcacctctggttcaggttgtaggggatcttttgagcacctctgtcatgcttgtcagttaagtcaccatgttaggcttcccttccccatctcctcttctagagcagcaggcatttttgatctgatacactgtgatgtatggacatcccctataatcagcattactggctataagtattatttactcattctcgatgacttctcgcattatctgtggacttttcctttacgtcaaaagtccgacacttatcccaccttgtctcacttctttgcttgggtctccacacagtttagtcgcaccatccggagcatccagtgcgacaacgggcgcgagttctataacaatgcatcccgtgacttcttcctctcttgcggcgtccatctctacatgtcttgcccctacatgtctccccagaatggccgggctgggcgtatgattcgcacgacggacgatgtcgtgcgctctctacattttcaggcttcccttcccgctcgttactgggctgaggccctcgc

SEQ ID NO: 1882 - DNA, 636 bp, Zea Mays
aaggtttttgtggtctccatgacagcgtctagcacgctggccatcctccttctcttgagagttgcggcgggagctttctgcattttcggcaattctgcctttgcttgtgggctcagaatttctggcattttcactgtcttttccacttgtggctcttcggccaagtcatctttggcttcagttggcccgattgtaggcaccttcggcactactgtagacccttcagcgctctgagtggcgggagcagcttgtcttgcttcggcagtagaggaggtcccctcaccaaattcaggcactacggccgtttcaatataccgaggccggtgtgtcaaaaccttcattttcttgcccttcggcacagcggtggctactgaagcagcagttttcctcttctttcctttccttgcgtcaaaaaccctatttaatcttttcttgccctgacccctgaaggctgcggacaaggcatcaacttcggccttggaatatgtcccaagcagctcgtcgctggtagcttcaatacatttcaaccagtcatcatttggttcgtcaaacttctctctaaatctaaaggtatatttcaatcgaactaggacaccttcactggattcagcagtagtctccttcggcatatcctag

SEQ ID NO: 1883 - DNA, 565 bp, Zea Mays
gctcattcctttattacatcaattgtattcacactttacaaattacatgaggctaaaaagcctgggaaattcttttctaaaaagtcatgcgtttccccatgtagcctcatcttctgaatgctggttccactgtatcttgtaaaacttgagagtttttcttcgggtagttctgtctttttgatccaagactcgaacaggatgctcgaaatatgtcaagtctggttctaggccaacatccattacttcaatggttcgatcgggaacccgaagacacttcttcaattgagacatgtggaacacattatgtactgcagacaaggtttcgggtaactgaagtcggtatgccactggtccatatctttcaaggataggaaaaggaccagtataccggggtgcaagcttcccttttaccccgaaacgtgacatacccttcattggtgaaactttcaggtagacataatctccaactggaaagtacaagggtatccggtgtgtgtctgcgtaactcttctgacgagcttgagctttcttcaaattatgaattattcgttgaaccttctcttct

SEQ ID NO: 1884 - DNA, 595 bp, Zea Mays
aagaaatgagctgtcttggttagcctgtccacaatgacccaaatggaatcgtggtgtcgggaggtgttgggcaatcccacaataaagtccatgcaaatgtcctcccatttccaagatggtatggggagtggttgtaaggtacctgctacctttaaatgactggctttgattctttggcaagtgtcgcactcagatatgtacttagcaatctctctcttcatcctggtccaccaatataaggatctgaggtcatgatacattttgttacttccagggtgcatggaaaattttgagagatgagcctcgtccaaaattttcttcctgagttctggattcttgggaacaaccagtcggtcttcgaaccataaaatacccttgttgtcctaacgaaagcatttatacttatccaccttctgattgagcatttccttaatgatttgaacccccttgtcactaatatgtgccatgattatctgctcttgtaaggtcggctcaactgagatataatccaaggtacctggggaaaccacttccatgtttagcttgcgcaactcgtcgcacaaagcggtgaccttagagtctacggttcgatagt

SEQ ID NO: 1885 - DNA, 897 bp, Zea Mays
gcgaagggctacccagatctaatcctacgcgttcatgaggaaaccaacgggctggcacgtcatctcccaccttcagcccacaagacggcggcgccaccaatttggccatgacgtcccgccgttgaacgtcgcactggtgccctggtgcaccatccgcaaccccgggtggttcaacacgaagctactacgacgacgatcatgagtaggtgggttttatcggcgatcggaccccgccgaacccccgcgaccgaacgcagcgacaccacccagcctcggaactccggcgaggaattcatcgatccttgcccacccattccgtccttcgacagcaagaccaccatccgcacagctcggtggagtccttaggcccgactctaaggaagaactggcagcctggttgaggtccatcggtgatggcctccggcaacataccgcacatcgacgatgggcctcctaccctactcacgtcgctagttttcccccggatagcctacggtgttgcagatagatagcgagtatgggcagggggtttagcataccgcaaattggagccgagctgatcataactcgtcgaaccgcgtcatggatagccctgtggcgatgtgatggttctactcgactccggttgcggcggcgtcgtgacttccctccctatctggccacgggcgtttcaccggcaagcgcatgaagcttccggactcgtcgcagacctccaaacctcagttgtggatagggacgacgctgatggcgctcccagctctcaactctctctctcggcggggcaccctgctcccaaggtatccgcggtggcttttagttggcgcggacggaggtggggtatcgggacccgatcgatagggatgaaaccaggttggtgcgaggtacgcgaaatccatg

SEQ ID NO: 1886 - DNA, 647 bp, Zea Mays
atcggtctgaaccaacctgtcgctcttgatttggtctactactagctgatgatcacgaagatgatgcgtgcggcttctgctgaatcttttctttttcagattacgctgcacgctgataacgagaaacagagtgtgtgtgagtgtgtgagagagagagctgcagtaccagtagatacagctaccagtacccggctaccagcagcagacggccggcaagacaagaaatgatacgacgtggagacgatcgatggtggtgtaaaacggacaccgatgagctcgctgaacagggattggttacattacattacagttcttcagtgcagcgcctcgggaaggcacgcgggcttgcagttgcagtgcactgcagcccggccccgtctcgtcgtcttcttccgttggatcgtcgacatgattggcgctctgaaccaaccgcggaaatcctgtacccctactacctagtacggtcgttgtaggactagctgctctagtgccgcctgtccgccgatcggccagcgctagctagctgctcgtcgatccattcgatcgggcgcgtatgactaattaaaatcttcttgtttttttaattaaattctattcaccaatcaatatctattagttcttgcttgtctctagcagcttctatgacg

SEQ ID NO: 1887 - DNA, 792 bp, Zea Mays
gttcgggtatctgataaccgaaaattcggttacccgaccttaggagtcggttttcgggttctacccgaataataaccagcagcccatactcataaactgtgaacacaaatataacaagccaataagcaacaagggcataagggataaggcataagggccaataagcaccaggcagccacgccacagagacagaggcacagtcgcactcgcacagacacacagttcacgacttcacgccacactactcactacactagacatttagagttcaagacataggggccattcggccagcatggagcagcccagcaacaagccaacaacaactcggccagttaagcagcaggagtgcaggaccagcaccacgcgtcgccagtcgccaccgcccaccaggcaccaggcaccagcccagctgtacagctcaagtccaagactaaaaagacaacagattaggatgcaactcagtaactcaccagctgtacagctcaagtccatttactcattttgtcacaaaaacaactcagtaactcacctatttaggaattaggatgcagtggaccagtggttgatgttgatggtattgtcctgctagacttgtttccttgtgactgggaaatagattcatccaacttgcgtttaccttttgcattgtcggcatattcttcaattaactctgaatggaagaacaatgtgaaatatcatttaaactaagtctcgactctcaaggagggatgcaacaagccaacaagtgaaataaaaaatgattacctgtttctaactctgctaatctct

SEQ ID NO: 1888 - DNA, 1246 bp, Zea Mays
cctgggcagaattcgaaacagccttccgtgagcaccatgtaccccaggggatagttcaactcaaggaggatgaattccaggagctaactcagggcgagagaacagtcagtgagtatgtgcacaagttcacagagttggcccgttacgcgcctgacgacgtcagcaccgagtccaagaagatggcccgttttctgaaaggactaagactcgagcttaagaccatcctcgccagccaagacttcctcaacttttctcacctctccaacaaagctatccaagtggaaagggcaaaagaggaagaaaaagggcacctcaagaggaaattccaagttctccgagctcaacagcaagaacgtcaccagagggctcgaccatttgggcttccacccaggggaccaagcttcaataaaccatccggacccactccatcgcgctacagtcagcagagtcagagctcccttcaggcaccctccgttgcaagcaaccaaccgccagcaaatgcctgttggcactgcagagaccccagtcacttcaagaataactgccctcagttgaaggcacccggaccgacctactccaactcggtgaatggccccaagattccctcggcacctacctccaaggcacctccttccatcagccagcagagcaggactcagtaccagggcagagccagagtcaaccacgtcaacgctcaagaagcccaacaagccccgggagtagtgctcggtgagttccttgttgaatttactcccgctactgtgctttttgattcgggagcatcccattcatttatagccactaagtttgtggaaaagcatggcatcccctctgcacccctagctatccctttggtcacccgaaccccggaatcagacctcctatgccaactcaggtgctcccaagtcagaattcttttaagtggggtagtgttcctggcggacttaaccgtcttgccatcccaagggattgatgtcatcctaggaatgaattggctaactaagcacaagggtatcatcagctgcgcaagtaagaccgtccttctcaccgatcaccaaggaaaagcagtttcctgtcaagcccagccgcccgccaacgatccaatgatgtttaatctggcggcagaaaacatgtccataatcgaagagtttgaggatgtatttccggaagagttgcctggaatgccacccgaaagaggagtggagttctatatagatctcattcctggcactgcgcccatcgcaaa

SEQ ID NO: 1889 - DNA, 944 bp, Zea Mays
gggcggtctgtcactacaacacctttcgtaaagttcttgatgtctaggcggaatggatggtcaggagggagaaattgtcgatgtttttcgaaggacgaatatttgccacccttcttcaaccaaatgaacctaagatctttcttgcaaactgggcatgagaacttactgtgaacacaccaggcgcagaacagcccgctcagcaacttcttcagctctttttgcttcttctgaagcgtcatgagattccttctcatttcttttgatggcttcatcagcgatttcttgtccacccttcagccaaacttcagaataaaaattcccacctagggtagtaactccggctgaagggtttctaatatcatcagctaagaaggcgaagtctggctgagctacagccttagcatgatcacagccaaccttctccaagatggacgtagccccacaggcaccggcgaaggcacaaaagtcccctctgtcgctaagaacttccgaagccatcaagcatcctcgcagcaactccaaagaaaatgagaatgcctagtgtgctagatgctgttatggagtctatgaaaacatcaactccttcttctgtcgaagcgcctagcacgaagggtaaagtttcaaagaaatctgatgaggctggcatagtgcagactatttcggaagctggaccctcagaagttcctaccgaagctagaccttcggaaagcgctccgatagtcctagggaaagagggtgcttctaagaaatccaaatctcctgctcctgaagcacctgctaaagagctggaatttattgtgtgacatgcttcggggaagcggttatcagaagagcaagttgccgaagcgcaacattatgccaaggatctaaagtaccccgagggtccttggtgtatggtggcgatgacgaagaagacttcctttattatctgtcggacaacaaag

SEQ ID NO: 1890 - DNA, 780 bp, Zea Mays
taagagtctgaaggatagcaactagagcaggatcaaccgctggaggagcagcgagaacagcactggaacttccggcctcatgatcatgtgagccgggaggcggaggcggagggggaaccccaaagtcgtcatcatcatcatcatggactgttgtgccctgagtctcgaactgatgaaaagcggtatcctcggcctgagtgtcaaacactagagaaggagccggcacaggatcctcaggggctggacggtaggacccaaagaggaggcgagaggcctcaagagtgccctggaactgtggtggccaaatcagctgagcgaagatgtgacagagatagtgagcatatggcagctgtcgatgagcacgtagaccatccagtacggtgtcctcgatctcacaaatgaggaagtcaacaacatcaaactctgagtgagagaccagggcaccaaggagccagagctggatatgagtggcagcctccctgtaacccatccgtggcagaagcgtctgtctcatgagctgatataaaaacttggctgctgtagtggaaactgccggagaacgtcgcgacccatcggagaagggcggtcggaacaaagccgcgacgtgagttgtaccaggagcaactctgccgtgagggcgacgaggaggattagaggtgccgtagcacaagctgtgaagacgagtcgatgactcattgaatccaaacaactggcgaatctggctggcatgaattgtaacatcctctcgctcaaagcggaatctcatccactggtgatcag

SEQ ID NO: 1891 - DNA, 372 bp, Zea Mays
cgatgactgggttggccagccatatcgggtgatgtacctcttcgatgaagccggcgtctagtagttttcggacctcctctcggatgaagtcctgtcgctcaacaaactgtctgcgaggcttctggcttactggcctggcgtcggggttaatcttcaggcagtgctcgatcacctccctagggatcccagtcatctgcgacggctcccatgcgaacacgtcggcatttgcctggaggaaagcgacgagagcgagttcctatttctcacctagatcacccgcaatgcgagtggtctgggcggaatctgcagtaagccagatggctttgacggggacaccctccattctggacggttgtacctttggcgccttga

SEQ ID NO: 1892 - DNA, 1533 bp, Zea Mays
ggcgccccatatgggctgtcatagttacattccaacaccctccctcagtctaatcgggagtgtcatgaacgcaaagactggacctaaaatcagtaaataattgtacaggtaaccctttggtcataatgtcagcgaactgaagcgatgatggaacacggagcacccggacctgtcccaaagcaaccttctcacgtacgaagtgaatgtcaatctcaatatgctttgtgcgacgatgatggacagggttggcagtcatatagatagcactgacgttgtcacagaagacgattgtcgccgaagagatgggtgcatgaagctcctggagcagctgacgaagccaacaagtctcagccacagcgtgcgcaacagcacgatactcagcctccgcactcaaacgagaaaccatagtctgccgtttggaggaccatgagactaagttgtcgccgaggaagacacagtaccctgaggtagggtgccgagagtctagacagcccgcccaatcagcgtcggagtaggcagacaaacccgtaatgctgccggtgccgatgtgaagtccagtggagagggtacccttaacataccgcaggacccgcttgagcagcgccagatgaggctcgcgcgggtcgtgcatgaagaggcacacctgctgaacggcataggcgagatccggccgagtcagcgtgagatactgtagagctccagcgaggatgcgatattgagtggcatcggccactggggcaccatccgtagcggacagcttggcatgagtgtcaacatgagtcgccgtagggtgacactcagccatgtcggcgcgttggagcagatccgcagcatactgacgctgggagaggaagaggtcgtccttggaacgcgtgacagagatcccaaggaagtggtgtaggtccccgagatctgtcatggtgaactcgaagtgaaggagctcggtgaggcgaagaagaagccgggtcgacgaggctgtcagtatgatgtcgtccacgtagagcattaggtaggcaatgtcagcgccctctttgtaaacaaaaagagacgtgtcggaggctgacacagtgaagccagaccgctatacgaagccggagaagcgctggtgccaagcccgaggcgcctgcttgagtccatacaaggaattttgcaggaggcacacgtggtcggggcagccgggtcgacgaaaccgggcggttgctcacagtagacagtctcggtcaggtggccgtggagaaaagcgttcttcacgtccagctgatggatcggccaggagcgagaagcggcgatgctgaggacgacccggatggtggcccgcttgacaaccgggttgaacgtctcgtcgtagtcgatgtcgtgccgctgcgagaacccacgaacgacccacctagatttatggcgagctagggaaccgtcagcacgatacttgtgcttgtagacccacttgcaggagatgacgttggtacgaggcgggcgaggaacgagacgccaggtgccattgtcaacaagcgccttgtactcatcagtcatcgc

SEQ ID NO: 1893 - DNA, 516 bp, Zea Mays
ggaaatccttacctccttacctccctgcttctcagtaacttcctcaaaatgcaaccaaaccttggaggtcggtcccctcctcctggagcgcttaccagaggcaagcgcagatgtgctagcatcggccgtcgccgttgggctggtggatccggtgcgtgtatctgccatgcccgttgttccagcagctgcaccggtgccatcaacctcaatggcagcagctgaactgctaccaaggaggaaacatcgggcatcatcttgctcattctgagcttcaagcagccgttcctcagcctctgcggctttgacaaactcgtcatccatggaatcatcatccatggacattggaacacccacgcagtcggcgtctccggctccctcacggcaagcgctgacctaagatcttcatccaaaaacaatgtatacaaatgagagggacaccactacaccagatctacctagtacggttcagtgaatcgaattaataccaccttacctgcgctaccggagcaccagatc

SEQ ID NO: 1894 - DNA, 546 bp, Zea Mays
cctgggtctccatagcgaatcatcttgtagggcggggacacaactatggcagggacttgggctttgggtggatttattccatcgagctaagcttcgagggctgcaatcctagcatgtgcttcttcaagttctccatgtacccttgagagatcaagggtagcgctgtctaggttagtgttaagaccttccaccacacctacaagggtgctgaggcaatcttatccagcttcacctggaacaacactggtctagctttctccatgaagacatagatgaagatgtctgtacctcgtgttgtgcagctgctgtcgataagtatggctgagggaccacagagctcttctagtagcattgttgaccgaagcaacgtaggtagatagtggcgtcagagactcatgggctgatagaatcctgaaacctctatctccggcatccgtcaccctaatatgcacgtgagtgatgttgtagcaagttcgaggaggctcatacactctccttgtgtcatatagaggtcggacgtaggttcctagcacatgcagtatgttg

SEQ ID NO: 1895 - DNA, 276 bp, Zea Mays
agtcggggcagccagcccaatccgcatcggaatacgcggtgagggactggacagggccgactccaaggtggaggccggaggagagagtgcccttcaaatagcgcaggatccgcttgagcagcgccaggtggggctcgcgcgagtcgtgcatgaagagacacccctgctgaacggcgtaggccaagtctgggcgggtcagggtgatgtactggagagcgtcggcgatgctcctgtacatggatggatcagcaatgggggcaccatcagtggcggaga

SEQ ID NO: 1896 - DNA, 509 bp, Zea Mays
cttcgatggattcgcaactctccaaatctccttggtgtcaatcatggaggtctagagaaatgggtttacaacaggctagcataaataccacgttcaaccaagatgacatgcaagtacaagatcattggttgttaccactagacatgcaacatagtggaagaagagcacggcgacatagtggaagtaattgtacatcattgcataccagcaacaacaacatgtaagtgtgctcctcatgtttgttgttgatcaacatcttagcaatagttgcaatatctccatggaatccatatcattcgaatgaaacgttgtgacgccacatgcgcagtgagagtaaaggcagtgatatcttgggcacctgtaactacagggagagaggtaatggctagaatgtttctctcttcaatcacgtcaactcctttatatatagaccccctagtaaagtgcttttaccctaaaagcctagcgatgttctcatatatcatacttacttattgggtatatcaata

SEQ ID NO: 1897 - DNA, 345 bp, Zea Mays
gaagaagtgtactatttgtggtgagcgtagattcgttgaggttgaaaatgacgatggtttgaccgtgactacgaagattgcacgtaagcagcttcgttacgtgcctcttatacctcggttgaaacgtttgttcatctccaagaatacagccagacacatgaggtggcacaaagaaggggtacgtgagaatccaaatgtcatggtgcacccagctgatacatatgcatggaaggcactagatgcttttgattccagctttgctaatgaagtgcggaatgtccgcttcggtttggcaacagatggtttctcgccattcaatctaactgcaacgttctactcatgttg

SEQ ID NO: 1898 - DNA, 385 bp, Zea Mays
agcttgaggagtttatacgtttaaagcaaggaggagacttagtgatgcaacgccaaattcaatcatctctcccagtatggtatagagcaagtggacacggatctgaagaaaaagaagtgcttcatgagaggtctaaatgatcgactacagcgaaagatggccacttgcttggacctcacttatagtagggtcgtgagcacagcgctttcggtggaagccaagaatgcgggacagggaaaaacaaagagatatgggggtgatggatcttttcaaggatccgagaagtggtcgaggttggtgattcgtcctgttaacccaaatcgctcttttcctcatccacccgcctatcctttcaagcaaccagtttttatccgtcctacttctg

SEQ ID NO: 1899 - DNA, 441 bp, Zea Mays
gctggcgctctgctcggtcgtagggaaggcgatcggtagccgtaggatctcaaacggatgggtggccaggattgtggatgggagcggtctgaccagatcttatctacagcgttgatcgactacttcacggctaggattagatcctcagaaaacgtttcggtcggctggcggtggtcgtctgatcgtggatggacggtggagatcgaattgaagcatacctcttcactctgtcgaatgcgcaccgttggatggcgatctgatggccaggacaggataccggttcatttatgagtctagactaatctgcgccatgtgctttagatccaacggccaggtttgacctataccccttcgccgagcctacttcgcaaataagtccctcggcttcattataatgaacccgcagtcctgctgttggcgctctaagtcttaagaaaattt

SEQ ID NO: 1900 - DNA, 544 bp, Zea Mays
tgaatttatgcacgtactcactgacagatcttccgccttgagttaattcccggaattcatcttccttgagctgaacgatcccttggggcacaagatgttctcagaaagcagcttcaaattctgcccaggtagcatctctgacggcagtgctgaaggtatcccaccaggatagggccatcccggaaagttgatgagcagccagatggacacgctggttctcagggcatccgatggcttctaacttcctttttttatcgtgcgcagccagtcatcagcgtcgagcggattgctggatccagcgaatgtgggaggcttgagtcttagaaaatctcccatcctgtcttgaggtcttccaccattcgggcgctgattctccagacttctagtaaggacttcaatgagtcgggtttggttgggtagaacttgggctaaatctaatggcaactccggaggtgtggggaggtgggtctcactcccttctccaccggcttctccttcagctcctaggggaaaccttgctcccatcccggaggcagtaggcgtg

SEQ ID NO: 1901 - DNA, 1226 bp, Zea Mays
cctcatcttgagcttgcccaccaagcatgagttgctgaataatttcacattgaacagtccaggagtcaccagcaaagccctcagcctccgaaaaaacaataaattgggggacctcatcaagtgaagtgacacgaacacgaagcaaagttctagagatattactctgatcctcctcccagagaattagtcttccaaacgacccaatggcggcctgcaagtactctgaagaacgataatccaatggaaaccccagaagcataagccagcactcatggttgaaaagaagagctcggtgattccaagcgtcattatgacggaccgcggtgaaagtagcatccaaatattgctgggggccaagcagaaccaaattatcccgctccagaacactacgaaactgcactatcacctgccccaagtgcgagcgctgaatggctcgaacaccgaccctacgatgctcaacaagatactccctgaccacatctctgaccgcagggaacaagacctcgtgctcaggcaaaggatgaatattgataatcgcccagtcctcatgcattggcgataaacgctgcgagactgacctgaccatgatcccacgatgctggaccaccgaggcgctgaagcctggtgggaggaacggctccgggtctacgcgccggtacgcccattgatagattctcagagggtcaccggagagccaaagagcaaaaggagcggtttggggttttggtgaagtgacacccagcgagagctccaaggacgtttcgggcgcctgttcgtatatttttaataagaccgccctggcaaattcaccgaagcaggtaaaggtgggaggggtcccacccgtcagggacccgggggaagggcggaaccaggacccgaagtccaagaggtgagacgacccctccaaaaggcaattactttcgaaggaagggaacgaggagaggggaaatccaaaatccgatttcttacgattgcagaacaattccaaatgccccctggctttacaaaactggcagagaaacgctgacgaaaccgaaccagacaaatccgccctcccaagggtgggggggggccgaaaggccaggcccaggcctgagaggcccattacgcaaaatgggccaccaatgaagcctacgaatcctggggagcccagcagttgaatttgaaattgaaaaggagcaatcatcacggccctgacgcccgcgtccaatcatgcttccgttaag

SEQ ID NO: 1902 - DNA, 452 bp, Zea Mays
gcaaaattgaacttattgcaatatgacttataaatctagagtagtctggtgatagaccctggggctccatagtgaatcctcttgcggcgcggggacacagctgtggtagggacttgggattcgggtggatgtcttccgccgagctgagcctcgagggctacaatcttggcatgtacttcttcaagttctccatgtacccttcagagatctagggtagcattgtctagatcagtgttaagacctgccaccacacctacaagggtgttgaggcgatcttctccaacttcacctggaaaaacacttgtttggctttctccacgaggatgtagaggaagatgcctatgctccatgttgtgcagctactaccgataggtgtggctgagggaccacagagctcttctacaaccattgctgaccgaagcagcgtaggtagatagcggcgtcagagactc

SEQ ID NO: 1903 - DNA, 446 bp, Zea Mays
aggaggggtgcatgggggagagaggagaaacatccgaacatcccccatggccgtcccgtgcggaccgccccacagattgcgataaggcaacgacagtttccccatggcgggccctgtgccctgcaaatttctcaagacaaaggctgcgacggttactcatcgccccgctataatcacatcaacgcacacgaactagcagcaaaggagcaaacctaacaggctaacagcaaggaatttgagattcgagaaaaatacggtgaaagaggatggtcgtacctatggggaaacaggaagatgaagtttgtggatcgcgcacgtgaagagggggcacggagggccgtctttccccaccatcgttgtgaacgcgtcgtctctcccgacgtcaggaacacgcgtgtaaagaggaagaggaggctgctgcagcagctaccacttctgatttcgcg

SEQ ID NO: 1904 - DNA, 296 bp, Zea Mays
gtccacagcagtatacactaacattttagtgttttgacaatgcatcatcatcaatgactgtgataggatccttgaccatgtcgtggttgtgaagtgtgtcgggatatgagattgggggttgggtcaaaacctatgatttcgataaggtgccgtggtggctaggatgtagatcggcggcacaataatgatgggacataacacgtggggcagcctttgaagcctaacaaagataattgccttgcttgctttcatttggttacatagttctagagtacttttttccccaagcgaactag

SEQ ID NO: 1905 - DNA, 745 bp, Zea Mays
ccaccgcctacgtcaagcctcggtggtcgatccgggaggaagcacagcgcacatgtatgctctctacggcctcgtctgggaggaatcgagctccgacccacctagattcctcgccggtgtgggagcttcaccgcatcgccgccgtgtgccgtgggcagcctccctggcatcgttcctgcacccggtatgctctcccaccttgtatgcgttagatcaagaacgcgtaggtctctctggtttcgggtgtagggcgtcggcgtgccgggatggtgttcaccggcgggagctccgccgtgtagacctgtgcgtcgccatgactgggtgcgggtctgcgggataaggttggggcgatcctgtccgttggatccgtggtgggcacactcgattagatctgagtgatctcctggcatcgggcatagtgggtcgttcatttgttgatgagcgccttagattaaacgaggggttagaactgatttgagccatgcgatcggatcgaacgggatcggatcacgatcgtgcggttataatttgagtaccggttcacagtatgttatgggccatcgatcgttcatcgggcggttctaatgtctcggtaggattaggtctaatcaagaccgtaggatatcgatctaccggccagtgttcaaccgtaccccttcatggtgccattttgctaaagagcccctccacttgccagaattagaacccgccatcctgcgtggggtgaatatgagtcttgggaaaa

SEQ ID NO: 1906 - DNA, 406 bp, Zea Mays
aaatggatatggagaaaggagagctacgtacggcctaaactccctagcgtgcaagcccacatcttgtttttttatatttctttattatttaaccggatgtctatgtcaccataacatcatggatgatgtcaccctggctcaatgacatgtgggaccattgggtggagcttcgttctccctccagtccgtgcgtagcgatctcgcgtttttgttattttctgttttcggtgattcaccaaactggtacgccttccttccgcgataaccgcgcgtagtaaccaacccagccgcgagctagctgacgtaacctccatccccgattgctactcctcgtacacggggatataaacacatgccgcccctcatctctgggccatatcagccagctactcgaagaccttatgcc

SEQ ID NO: 1907 - DNA, 921 bp, Zea Mays
cggatgtagtatttaacaaggaaaatttccagaaatgttggaactttcagaactaagtactgcaaagagatagtgaaataacacattaccatgcagaagcattatgacatgctgatatccataattccatataaattctggagcatccacatttgagcacagtgtctagtcatcacatctcgtttacttgtactttgggtgtgttaacttgaacaagaatattttaccatctttatttgtttgcatttattctttgtaagttgtgttctatgatgctaggtaggtattggagaaggtgtttcaccatcagctgctacagatttaattgctaggtaagatcatatcctagtttggttcctttcttgacatttattgttgggacttcccttagtacaacatgtgtcaattttgttttctacataatggtgtatattgtggttctaatttctagcacaatatggcagcttctatattggtatttccccccatgcccctcttttaatattcagagtatgattttttttccatagctacttgtgcaaaatcatggtggtggctgcatttgtcaatcacactaattttttattataattcaagctgtttcgtatgacatacattttgaaattttgccagagtagttcaaaacttcaggctttcgttggcactcacatgcaggtccattccttggcaagaacgatcaagagcagttgctgttgtttttggtgggttgagctttggcagtgtcttagggtatgttgtattaagatatatggtcatttttatcgaaattaattaaatattccttaattgaaaaaatatacatggtccccactattttcatgatcctttgagcaacaatttacatacttccatgtatgtgctagcatgtaaaatgctgaattcaactaaattggattttcc

SEQ ID NO: 1908 - DNA, 414 bp, Zea Mays
gtgggtgttgtgtgacaataatgagagttcaatgtgcatcacacatctttatgatgcatcaacatgcatgctcatccatgtgaaacaactgtataggtgggaagtagagaaggtcatggtcatgctacaatgatggattttgttatctcatccttggcaactatgatgtatctagagcaataaaggtggactctctcagcttcgtcgattatgcaatagcctaaggtttaatgacaatggtagcactaagatagcaatgtgtattgttcatgtataatggcattcataggtacttgatgtgtcttgtttaggtgtttatgacaaatgtcaccaatgtttggcacaaaaattggtcacatacttctgacccatcacatgcaatcacacaccatagcttggcttcttctagtagca

SEQ ID NO: 1909 - DNA, 1003 bp, Zea Mays
gcaaaattctatcgaccactgctggtgggaccaggctgctggtcgtccgctccgactacctcgccaccaatggcggaggtcacccgcggactcgggaattccgttgctaccgcccggatatccctccatgggagtataaacgatagccccgcgaccctccccccctcatcttcctagtaggacggtcgtcataactgcgaggaacgacgtgagcagagaggggaggaaacgagataccgaacgcgccgccgccgtggaacttcgcgtgcggggccgctcgagacaaaagggttagcttgggatcttcatggacggtctggggaagtggtcgtcgtcacggcgggggagatacgcggccgataaacccggaatttcacaccggagcccggattcgtggtcatgccgccgtgtgctgcagctagctttcctctccgccctccgacgatggtaagcacctccctctgtttcgcaaaaatcctctcttcgtttagcgtcggtcggatcgggggttcgagcactagggcctaggatagaggggtccgttcatgggcgccgccacggcagatttgtgcgccgccgtgccctgtggctggggggagaagaaactcgtgagccatcggatctgtgatgaagggtggggagatcttgaccgtgggatctcgatcgtgggccaaagaatgatgcggtagatggcggctcggaaattcgatctggaccactgatctgttaacagacggatcctgttggatctcatttcataaaatcgtgaccgtaggattaggatcttacggctgtactggttcagatggacttgatttaatctcatacgtccaaccctgatccaacggtccaggatggcccataccccttcggtcgtagatagttgctaaagagccctctgacttcttttaaataaacccgccgtccattgatggcgtaagattattacggttaggtccagatttttacggaatagaccccgaagacttaagaaataatatcc

SEQ ID NO: 1910 - DNA, 1159 bp, Zea Mays
catcttacatattatcagccccagctgaagccattcaggtcaaaatgtctgtaagcttgatttgtgtcatcgacattgtgggtgttcagatcaagtttgttcactgaacacggatgctcaaaatctactagcttgctttctctggggtattcaactgcctgtcttgcacacttttgttcttccagatatagcttctctgcatctactttgcttccggatgccgaactggtggtactacatctaccattcttttgaggtgcagtatactcatgcgccatctctgtgtcactttcatacccaaactctgctttatggtatccttcctcattctgcaaatgagccatcctatgttcgcttaggcttctgttgagggcaaactgtgtctcatgttcatgagatctttttctgcaaaataatgaactatcatcatatgcttttagtactccatggtgctgtagtttgtgctccttgatgaatccttcagcaacagacaaataactatttgttgaactttcaacaaactcaatttgtatgggctctaatctatgcacacttgaactttcttttacatctgtaattgcattactgaagcattcatttgatacttgtgaaactaactctgatatttttatttttgcatcttccaggtttgcagggcccaaattctgttttccaagtgtctcttgtgcctgctccaaaactgcctgaagatatttcccttgggcttcaattcgtagttgtagatgcctttgcacctgttgccagtttaaatttcagatcagaatcactgcaggacaactccatttatagacactacaagtgggactttgctggaccattaaaatcagtagtggacattggactccaatatttggtgtccgaagccgtagaaaataattcaagatgcttcccctcacaatcatggccctgaaccctgcacttctacaagctgtctaatgatcagcacaaaagaggctgaggtggttccgtggttggccccgggaaaccctatttgtagcagacgggcaggagaaagaagcctagaggcgagagaaaccagatgagaatggttttgcttttcaagcatgcagcttcaagattactaattgattcaatggtcaccatctgtgtcagacagaatgcacaagtgcacttaggc

SEQ ID NO: 1911 - DNA, 506 bp, Zea Mays
tggtgcgtaaccaccagtccagctccaggtcgtcgttcgtctcgtcgtgcatttctccgcgaggatcggcatgtcggtattagattgcccagggccgaccgcatgaagccctcgccgaacaggagctcctacaacaccggcaggcacaaggatggtgttagcagcaggtgaagggagcggagaagtagataggggaatcactggaagaagaagataggaacggcgacggctaccgcgaccgtagtgttctattctcttaattctttgatatccggttatgttgtcacgattaccttttaaggcttacaaacaggcttggcccagcacgaattacatgacccaatcgggcccaatgacacgggtgttttctcgcctttcatgacggggtcgcgcctggccgtcgtcttctccatgttcctgcgtggttgacatcgatgcttgcttggcttgcttctcttcccgacctgctgcctcctcttgaagtgctggtttgacattccccctcc

SEQ ID NO: 1912 - DNA, 677 bp, Zea Mays
ctagactctcgccctagtcagtatagtgctgatcgtagcattgcattgaggactattttacaacaggtacatgtgtcgtacgacggagggggtcctgtcattttatagttcaagggtaggaccttacagaggggacatgttccctattggtaagagtgtgatatgttttcctcggttgacgtcgtctttatggttgtgcgtatccgtacccccggcatcgcgtaccactttgtctgtccagtatacgggtccatgtagtgagttcgatgttgatgtccttgtagtggtgtttgtgggtcccacggggtagagtcgtggtatgtttcagggtagtgcgtggggcaaccccgccttttgtcatgaacctcgtgtcaccctacaacatgcataagcgtacacccggtatggtgtattgtcttgtccttcccagtatgcgggttactatggagactccggtgcttaggtcgccatggttggtcctgcaaggcagagacagaatacaccagagacatgatgtagtggcatacagtcatgttgacagggattcccggcgcccttttgctatgccgcactgagagcacctagagggggtgaataggtgattctgcaaaaatcaactctaaacaagacaaacttggtttataatgagtgttagtcaaagctaaaaccaagttgtt

SEQ ID NO: 1913 - DNA, 480 bp, Zea Mays
ggattagaccgtcgcccttctgtgtgtctgaacgccgtggatcgttgatttgtggatctagggctcagaatcgaagcaggatacccttcgcgtaatcgaatccaagccaattgtttgcaattgaacggttgcgggttgatctcggtcatattaaatctaatccgttgatgggggatctgagggtatgcgtagcgtaccgattcagtgtggtggctgatctaatctgggtcgtccagtgaggatccgatggccagatttctcccgtaccccttcggtctcgcgacttttacataagaaaccccctggtttccagtattcaacccgccgtcctgtgcggaggtggctgagtctcagacacttttgcgctcttgcccctgtagtttatgatatttatgcgcccagtctagagaattagaaaatccagtaaaagtaattagaaaatgatttttaatgagaaaataaatgctagaaacttgaata

SEQ ID NO: 1914 - DNA, 573 bp, Zea Mays
gtccttagattcacataggaggtggcaccagtcacgtggtttaggagaacacgaagatagtagtgctcccctcgaccggatgagtagagactattctaccgacttgtccacccgtatctcgtttcctctgttgtcatactttgcccttacaactctgccaagtgtaccactcagggaagtcacgatataggatgctgcaagcctcctcgtgtagcctattcgcctcaaaatatgctgtgagcatcgacctatcaacacctggacggttgacgactcgctcgaccatttgccgcgcgtgaaacgccaccatgtgcatgtttggaagatggagttgcagctgcatcacagatggagatatctgactaagctcaaagccgtatatcctccataaggcttctagaggagtcacccaccttgcatctttgtactgcttgatctcatctacatcatcatatgccttgctcgcatctctcataacaacaaacgcacaatcatagccttggtatatgtatttgaataggtatttaatcgccttgatgctcccacatgcctcaacattgatgtgatagttga

SEQ ID NO: 1915 - DNA, 506 bp, Zea Mays
gcagatgacgcttctttctagttcggatgccgaggggagtatgaggcggtatagtcgagaggagagggcataccttttgaggcggagtgcggaacggtgctcggtgtgttttttcctcggaggggacatggtcatttattgcgacgagacgttctgcctgccaaccgaccgttcgtggcacgtgtgctcgtgggatccgaaacgactgtcgtccggctgcttttcaaatcgcaccttggtggctctgtccgtcctataaagctgaccgagagggagggcttcagaccattacctttgcagtctcaatcctttgccttcaaacaccgttttcaccttttgccaagagagctcttcgtcttcttttcacccctcggtttgttttgatggcagaaaagatcaccgtccttcctccccgcgactcatggtctatgtcttccatcaccgatgcggatctggaagcgctggttgacgctggcctgatccggcaccgaaccactggctcgcgg

SEQ ID NO: 1916 - DNA, 752 bp, Zea Mays
ggacgctggataatttccttgatgtcttctcttttaatcagatcatttttaacataaaaccactcctccatccaggccccaagccatcttttccagtatgttggcaccaggtaacttgcattagagcgggcaatgaacatgtagcaaccgaagttgttctggtattgttctttgccaatagccttcgtctcgtataaaagctcgtgcatactgcagaagcacttcgcgctcggctccagcccctggcttcttacagcccagacaaacatccccatcctaattatagctttgggggtaatctgataaagaaaaatctgaaaatctttaatacctcaaccacaaatttgctcagtgggaaccggagacctgctttcaggaagcttcggtaaataacaacttcgttttcctcaggagcagaggcagtgttgtctcctccaactctgacaatagacatgtcgcgaaaatatctccccctcatggcgtcaatatgactttgtttgatagtcggttttccgaagatagtatgacttggtcgccagggctaatcctcagaatcttcatccccactctccacatcatagttatcactgtcatcggaatcttcggacaaaccctccatgatctccttagtaattttctctgtattcgtttttgccatggactcataaaacccagcgatgaaaggatccgcaactttcttctcttcatacagcttcttctcctcggttattttcttctcttcagtcatcttc

SEQ ID NO: 1917 - DNA, 505 bp, Zea Mays
cttttttctccggcggacagcagcatcgacatcgtcgtcccccgggtagccggcatacggcaaacggttcaactcaaaaacgcggttcaacctaacatttgaaccgcggatatcccaactcctcagagtctccgtcttcggcacatactttcctacaatctccgtggcctcggcctccacttcacgcacaaacgcggctgggttccgaccgcgtaaatccaccacaaaggcaggacttcgcaccaactggtcgcctagggttggcatccgacgtgggcacacttcgcccagtacccagtcgtgcgccaagggccacactccataggcgataaattcctcaaccaagtcgtgcctgctactcaagcgggcagcatatcgaagggccccttcgtcctcgtcttcctccaccaccttgaatcgaggaaaagtcacatagcagtgtgagcacagaatgcccggagggaggccaggcaggtcttcgacgtcactaggggccacatagaac

SEQ ID NO: 1918 - DNA, 532 bp, Zea Mays
tttacagctccccaatgaacatcagttggagcagacataaattggcaaacccgattaacactgaaggagatgtcagggcgagtcaataaaagatattgcaaggcacccacagcacttcgatatttagtcgcatcatctgaagaaagcttttcaccaccatcaagagataatttttcagtgggaagcataggagtgggcacaccgttagaagacagcatgttggtgcgactcaatagatcacgaatatatttgcgctgtagcaacacaataccatcagatgtgtgatggacctcaatgccaagaaaatagctaagctgtccaagatcttttactgcaaaatcatcccggagttgaacgagaagattgtcagtggccactgttgatgaactgagaataataatatcatcaacgtagataagaatgtagatctgaataccatcttgattaaagatgaataaagatacgtcggccttggaagcagtaaatcccaattgtatcaatttggagctaagacgggaaaaccacgcacgag

SEQ ID NO: 1919 - DNA, 348 bp, Zea Mays
gttgaggtccggccgatttccctgcttctagcgaagtccgtttcaacagaaaagaaaatcccaccagtcatcggctctgggcgctattggtcgttcacctcctgccgcaaccacctaaccgcgtcgcacgccgccatggccgcgtggaatccgcaagctcgggcagactccaccgacgtcgcgcggactattctgtgacaccgcagctcacgcccatatatgtggccgcttgcgcctggattctccaaacggtaaaaccagcaaaacaccattgacgaacctagagggagatcagggagcgcagagagaagcaggagatggccgccaccgatgcctcacagccggggg

SEQ ID NO: 1920 - DNA, 780 bp, Zea Mays
aggtcgcgtcagcggtggagggtgatcccgcatagggagagaacgcacggaggtggggcggttgcgcacggggaggccgacgcatggagtgaacgcgggggcagctcgcgtgggggatgtggggaggcagcggctgcagacggacaagcgagagctaggttcctcagaagatgatgtcatggagctgtctgtggatctgcggtgcgcgcgggggtggggacggttgaggtcgccgaccggtggggtggtggagtccgcctgtgggggaggaggaggctattgtgccgcgcgttgaagagaaggggggggatggaggccgctggagtcggaggatgttgttctgccgtggtggaggttgcgcgaccgaggagaggcgctggcaatggatactgggccacatgttgaagaggaggggcgctgggccgcacgtcgaattgctgggatgcacgaacgctaggacataggcgctgctatgggatttgtttgattagtaccataccggccaatgagagagacagaacgtggcttataagcgttgttgtggattatctgttgctcactctaacttctccagctctagtgccacactgaggtacgtctttttgcgcggggctgcttgggtgattttggagggtgtgtacggccggtgggggcccacatgtaggaggcgtgtacgaccgatgggggcagatagatgacagaacaggtcccacggttcagaggcagaacgacgccacactgaggtacgtctttttgtgcggggttgcttgggtgattttg

SEQ ID NO: 1921 - DNA, 1661 bp, Zea Mays
gccgggcaactgggcaagtttaaccttccagcgaattatgccacacacgttaatgacccaaaaaaatgtagcacgattctcttaggcagaaagggtaacaaaaaattgaaacgcaaatgactgcctttcattaaagatggaacatagttatcgaaacaagatcatggatcatacacaccaggagcacatctcctgcttaacgacggtaaaaaaatgatacatgcagaacatcagtaatggtgtgatccaaaacctatcccccccccctgtttttcatagattactttgttagtctttctcagtgtttttgtgggttactaatatcatctacaatcttaatgtggacagttacgccattggtttacactaccatcaaacattgacagaaaccagtacaagactttcaagaccagcatcagtagcctcaataaacaaatggatgatattctacagaaaggttccgaactaggacttcaagcaatcaaccaggaagcccagagtgggagctctgaattttcatggggggtgatgcccgatgatggtactctgggtgacattcacaatgagaaaaataaattgattgacgtattgacagagaggaagagtccaaacaaagtcgtgataattgttggggatagtggaatcggaaaaactacactggcaaggaaaattcatgacgatcatcgcaccagaaatgcattcaccattgttttatgggtgagtgttttcagtgacttggatgatattggattactctctgcgattgtgaaggctgctggcggaaatcccagtggagaagaaaacagggtacaacttgaggccatgttggcagccattctcaaaggaaagagattctttatggtgcttgataacgttcgcagcgatcaaatttatgagaattccctagaggctcacttgcatgtgtgtggtcatggaagccggattttgatcaccactcgtgatgggagtatttcgacacagatgacggatgcttacatctaccgcgttaagaaactgacctttgaggattgttggtccttgctttgccgggcttcttgtctaaatgagagcctacatggcgacattttaaggaatatcggaatagcgattatccaaaaatgtaacaagcttccaatggctgtcaagattataggggctgtcctaagaacaaaagaaccgacctgcaaggcctggcagaaagtgtatgaaagcgaaggatggtccttctccttcggggagcttcgagactatgtccatggcttaactggggccatgtatttgggctaccatgatttgcccttgcatctgaagcagtgctttatttatttgtcactgttccctgaaggctttgtcatcagacagcagtttgccagtcaactgtggatttcggagggtttaattgatgcaagagactactgcagtcttgaaaagactgcagagcgttattacagggagttgttatcaaggagccttctgcagcctgaaattgggaacgacgatatgacaagatgcacagtgcatgatcaaattcgatcctttttgcagttctttgtcgatgataaaatttttactggcgatctgaagacgcccagggaaggactgcgacatgtgtggattagaagcaacctactaagaactactgtgggaaaaatattaggagt

SEQ ID NO: 1922 - DNA, 467 bp, Zea Mays
ctctagctgaccttgatgcccatgtagtagtggagtggtctgagatcgctcatgtttaaaagcttcgccatctcgcccttgaacttgacaactttctgcctggtttgctcccactacaacgaggacatccacatagactccatcgatcagcaaatcatcgctggtgcctcgcacgtacacaacatgctcctccttgctgcacctgaatccaagcgacaacaatgagctgttgaacttggcgttctatgccctaggcgcttggtgaagcccatacagtgccttgtgcaaacttgtacaccttgccttctttgcctcggttgaggaatcccagtggctgctcgacgtagacttcctccaccaagtccccattcaagaacgcagacttcacgtcgaggtggtgcaccgtccacccataatgtgtggcgatggcgaggacgaaccacaccgactccaggcgtgcaaccgac

SEQ ID NO: 1923 - DNA, 739 bp, Zea Mays
gccgttcgccgtggtctcacacccgttctgctgtcaccgtcgagccctcgccgtgtcagttgcctcggtgagcttcgcctcgtcacccgcgaccccggacacccctcggattgctccctccccctctgtttctctcgatccacgctcactggttctctctctgccccgccgcagcttcgccgccgtcgatccgtgtcctcgccgtgccccggacgccgttcgtgagtcctcgagccttctctcaaggtaactgatctaaccccacccctaatttctcctggtatgcccttagtcgcacacgattgctcgccagagtatcccccggttcgtcgaggactccacctccaccgtctggtcgcctcagccccattcctgttatcccgatcctgccataggattcgccgagtccaccccaacctttttggctagccagaccgacccctagcgccctaggagccccagtctacctcatctccagcacttgtgccgccgcgagagcgtatggcaccgccccggtcggtcagagaaggtaaagctccctagcgcccatcctaatcgcacaattctgatctgacgacccggattcatggataacggttcacgcggtttgtggaaccagagtcgtcgatctgcgatccagtggtcagcgcgccccacgtcctcggcattaccgctgactcgtgggcctcgcttgtcagcgcctcaaccccaccgagcccacctgtcaggtgctcgtttc

SEQ ID NO: 1924 - DNA, 429 bp, Zea Mays
cgggagagctagcttgaactctctcccattaatggagactctccatcactcccctagcgtgtcgtggtgtcacttaagacactatttggtggtgatgtgacttatcatggctggtgtgggtcagaagtgtctgcctcatttttatactaagcgggtacatgtgtgcgcctacctgacgcgtgacagagggttgtggaactagggtccaaaatgcattggtccctattgtgggtcttcatgtcttcgctttgcagagttgctttgtgggagttgctcggtttgtccgcctcgcatagttactcgacaggagtcagtcggtcttatctgactcgtagatttgctcagcgggaattggtcggtcttgtcagccttgaagagttactcggcaggagttggtcagtccgcccgcctcgctcagttgctcggcgg

SEQ ID NO: 1925 - DNA, 589 bp, Zea Mays
gtcttactcaagttacaaccatatgtgcagcattcggttgtgtttcgctcttgccctaagctttcttttcggtattttggccctttcaagatagtgaagtgtattggatctctagcttatgagctggagttgcctgtgggggctgcaatacacccagttttccatgtttcgcagttgaagcactttacacccaattatcagccagtcttctctgaattaccaacaacattgaatctggagcaaggagccctgaggctggtgaagatcttggaccgacggcttgtgaagaagggaaatcatgccatttcccaggtgctggttcagtggacaacagaaaaagatgaagctacttcttgggaagactggaacgtgttggttaagatgtttcctgagctaactgcatgagggcatgcacaatctgaagagggggcaggtgtggtgatctatagtgacacccgagtcggtaagtgcttagtattagttctgagctgtatccagctgtgtcctgtttgtaatctagctggagtttgtaggcctatggccagtaggatataaatggaacaatatgtaagcgttagggatatgaaat

SEQ ID NO: 1926 - DNA, 558 bp, Zea Mays
tacgaagctgcatgcccccagcttaagcactactgtagtagagagcacaacacaaagtggagcctgcatgcagtagcagcttgctgtgcatgggctgcatgagcatctgcatgcatcggccacttcctgttcttgccactgtcgccgtaggcacatctctgcctgccgccgcgctgcaaaatggtaccaccgtccaactccacccacctacccacccacccaccgtctgtctacaggcggcatggggcttgcaggtgtggatgttgttctgtttaccgatggcatggcagaggcaggccaggcgctgaaagcggtgaggaccggaggagtaggggagggtggtggtaaattcagaaagctgccgagtggcgtcagtggcggcgcggactttcacgcgcggactcgcatccgcatccatccatccctgaccctgacccccccccccccccacccaaactctgaaacgaaatgaaagaatgggggcggatgcagaagcaggaggcaggagcagcttctttctcctccatcgtcgattccaacggctcctaggcatgtagc

SEQ ID NO: 1927 - DNA, 405 bp, Zea Mays
catccacaagagggagaggaggtagaagcttcggtggaagatttagctcccaactgagaagattgttttgcatattctgtggagaagataaggggcatacaacaaggacatgccaagtcacgatacagaagcaaaaataaatggctgaagccgaagcacgacagaatcagccgaagcaggtcctgcatactgttttgtgctattctccatacatcctcgagtatgtgggcaaccaacaacccacatcatcagttgctttgacaagccactcacaagctgcatgggccccgctaccaccaccaccactcatggctccaacctcgtctcacaaccaacagccagaagggcaccgccaggtacaacaacaatgtgatgcacacgaagagtctgaagcttggacagtca

SEQ ID NO: 1928 - DNA, 956 bp, Zea Mays
gaccatggacggtggagtggttgcttcggcaaacttgtgccggccattaaaccctataatccttgctcgaatctgctctacacctaattctacccttggcgctccactggggatcaccaattacgcccgaacgccatcctagagctcggtccacgtgcacccgcgaacttgaggctttcccgccgcgttctcgaggatcaagcgtggtatagttcaatcggcggagccgatgagcatcacaagcgcacaagcgtgcagaaacacggacaagaaaggcgaggatggacctgtaggtggctagcctcggcgcgacgtctcacggcggcgcagacaaccgatttggggggaaaacgaaattctccggctatgatggctaataggaggcgaggagcagtgctctgtgtttgtaacaaactagcggaacaggtcgaggcatcaatttatagagggcgaccgtgagtaggacgaatttgaatggagaagtgcttgcggtgataagggaatgagtcaccggagttcactaacgtggcattcactgggcaaagacttacgaccgtcactggctatcctccacaaccgcgatgacatggtgaaacgacttgaggcgtgttggggccgaagtaaacgacagcacaatggcggcagtcgcgcggccaggttgccggtcaagtgggtaaggccactgagccgtaacagtgccccaagttcatccccgcccgagatctttcaccgccggtcgttatcctcacactagagcgcacgaatcacaacgccggcgaggatcgcggcacggagatcaccgatagcgatagatacactgaacccatgatcttgttcagctcactgtaccatcgcgattacatacagcttgttctgatagagcatgtttaggagcgtttttcttcgatttctatgtgataaactaccgaccgaattacgtcaaagttattaaccta

SEQ ID NO: 1929 - DNA, 663 bp, Zea Mays
gccgagtctccataaattccatgtatgttgcattcctttgctgattctggggaatacgaggcccaccctaattgttttgatgatgagcaatctcatgcaaaaccctagcattatcagtagtggcattcactagggcaacaatggcatctgccagtgtaggtggaactggtggtggtggagggttgatatcagcttctgcatcaccacgagatgtgccagccccatccgacccacgagtacgcataggcatatggagtaaaacaaactcatgaataacatccataaccatgaaatatattacatggggcaggtacatggagttttattcattacaataccaaaattgacatagcttattatcctatgcctacaatagaggtcacgacaccatacacatgtcacattaaccctctatatcactagctatctcagaacattactacctcctggggactcaccacctggtacaaacatagaagctggttctaggtctaggtctgcgtcgggctcacccccatcagctagcaccacaccaccctctgcttctgcggctcctggcacatcattggggtgcagttggtagtaaagttggtgaacttcttcatgcagctcattagagtaatcatccagatcattgtaggctagtaccagatccggaaaatg

SEQ ID NO: 1930 - DNA, 680 bp, Zea Mays
aacaaaagggagagaagactgcctgggccggattcctattcttatggtccaagacctatctaccctcatgccagcccagcaccaacccacgcagcacctcatccggtcactgacaatcagtcctagccactagaccctttccgttcacgcacacgcctccgcgctgacgagtgggccttactgctcgggtccatcgtcgacctcgtgttatggggcgtagctgtgcaacagaagaatccaccgtatatctcgcgggaccgtttctggctccagctgggactccgagcgccaccagaatatataacccaaaatcatctactctttctcccagaacttttcaatcgctcaccccgtcaccatccttcctttgatctagcgttgatttttttttgctccactttccttgggcgtctactgccttgtctggtgtagaaaaaaaacaatagattttgttctgttgttctgctacgggttttgtcccctcctctctcactcggcgagctgcgttgttcacttgggattccacagcttggtttcggatgcttgattaggatggatcggttttggtttgagatggccccctttcgaggcaatgaatttggtgcgggtggatggcttcctgtcaggatgagttcttgaagccgaggtaaatctttgacttgcctagtttccaattccaa

SEQ ID NO: 1931 - DNA, 614 bp, Zea Mays
gcattggaggagctctcgtagtaccacgtggcaccatggctgtgggccattacacccttcccctagcgctcacgagtcttgctaacatcttctttcaggaagccaatagatggactatgcaagctggaagatgacgtgaggggtatgacgtaagatgaagctgtactaaacacgaccctgaacctcaccttgagcccacattgcgggacccaccaggtaccacagtgtcgacaccaaacaagctacaaagatccttgggaaaagacagggcggagcgccgtgttaggagtacgacggcacacgctcgcacgaacgacgctaggagagataaagtaacccaggggttacaagccaagtgccccaaggagaatacgagtcccaactgtagagtccacccttgaactataaaagggttggacaaccttctttctataaaagggctggtcaaccttctttctacacacaagcacacaagctgttaaacgcctcaagcaatactacgatcaacactacactgaactagagcctcggcctgaatcagtataacccttgtgcctcagttccacagctcgaatccccacgattcaccattcagagtgagttcatgtttgcat

SEQ ID NO: 1932 - DNA, 644 bp, Zea Mays
cggtgggcgcaatcgaagctctgtacaccggcaattcctcatcgaacttcaaccggggccgcatcacgtggccgtgggtcgtctgcgcaacaaagacctggtgagctaccctattttgtctgcccttctctgagcatcgcgtagcacttttccgattaggaattagtgcactgcagcgcgggtgaggggaggaactccggccatgggccgccgcgctcctggcagcgccgccgtagaccgtcgggttggggaagaagatcctccagtcgctgatatggtagtggacggctgggattagtcctcgtgtatcctttcgcattgattcgatctggtctgtcgatctggtttggacggacagggttggatgtagggtaataaaatcctcaccgttaaagtctgattcaacggttagattcatgtgccggttcattaaaatttggatctaatctagagcgtagattttagatcgcgcggtctagatctagccataccctttcgctgtgcaaaacttacaaaggagaccccagggttgtacctattcaacccgctgtcctcatttcctattctctgagtctcgataaacttgcgccagaaccccctgacttttctggaaatgaggcccagtccagagcgttgaaaaccag

SEQ ID NO: 1933 - DNA, 703 bp, Zea Mays
ggacatatttagcacgaagactacgtgttgttatcagcgcgttattgtaatagggaccgtgtaaaaccgccccgtgtcatagggtcccacttgtaagcatctgtgtggctagagttgatagtgtgtctttctgtgggtgtacataatcacattgtaatgacccgcaataacccctgggagtggaatatttcagggataacgtaggtaaccaggggcataatcgtatttgatagggtggaaccgtcccttggttacctataaatacctccgtacaacaccattgcgggggacgaaaaaaacattgttgctctaatacattgtgttagcaagcatcaaattgttttcattctcccactgtttgagctagcttgaccatgtgtcagccagttccaacagttaactgggtgaattttgagatcaattcagttttatatctcattctttagttggacccgtgcagactggttgaacctgttttgacaccagttgaaccggttttaaccagtttgtttctagtttttgttgaaaatatttccgcttgcctcttcacccccctctaggcaaccttcatcaactttcagctaaagtaacatgcaaggaagcaatgaagctatggagctttagcctcgacagattgaccggtgaatagtaatgaagaagagaagaagttttggatccgaagcgctagcgcacaaagcagaaa

SEQ ID NO: 1934 - DNA, 866 bp, Zea Mays
ttaggggaaaccctgctctaatcccggaggcggtaggcgtggttttatccgaagccatctgccagggggagagagtcactattatgcacatgccaattgttttcaaccaagttattttattcattacaccaatacattacaagcatacagctactacaagtcgtgctacacgtgagcgttccctaaggtacttccgaattctttttctaaagtgtccccaaattccttgagaaggtcatcaaggctagctagggacatatcctcgacgtcgaacaaattctctatcctggcgggagttggtgctggaggggccttcttcctccgctcagcttggcctccttggttcttggtcttcttttggattttcttcgtgggggcgagcttcttcagcttcttatcataatccatctttagggttcggtaggcttcacgagtgttcgcctcctcgccttctgctatatcaagacactcttagagggatgccttctccttcttaagttccttgacctgctgctctaagctttccacccgggattttaggtgggtgcagtgggagaaaaggtcatcatagtggttatcgagagtgtggaggtatccggccatgtagacgatggtggggtcatcctcggtagggtctctccctgatagggcctgaagtcttttcctccaggtgggtgtatttttgttgctaggtgggaagtaacgaaggggggtttcaaagatctctctgctgtagttttggcacaactgtttaagggcttttcgggtaacactttggcaagtgtctgggaagcggtgcccgatgaaggtgacttggaagggagggtggtttgggtaacttcggctttctcccaggtagactgcca

SEQ ID NO: 1935 - DNA, 739 bp, Zea Mays
gcgggttgtcctggtgggcggcatcgtgagtgcatgagagggagaagggtgcttggtcgccggaaccgtgtgggcgaacaagccgtcgtggaggagagagatgcaagaagagagaaaatagagcagggcttcggctacgcgattgctggtaagggcacctctagtgaactcatatcttcttccacttcgcgtaacacctttcggatttagggatgaatgcctgttgggcgggatggctgttcaccggcgtgtttgccgccggtcaggccaggactccgtcgtgcctagcgttaggtagaagaagggcgctcagccgtcgatcggatacttaacgaccaagattctgagaaacgtaccgctttgatggggtgggatccagaccgtagatctcgcggttggcggttgtgattataaacgttatacccttcgtgtgcggaccgtcgatcctggatcgttcggtcgtgcggctggcagcgttgtttaaaatctccaccatcgatcgcccatctcacgatcaccagtgagtaccggttcgcaagggtactcgatctaatctgggtcgtgcgagtttgatcggacggttcaggatgcttagtaccccttcgccgtgcacttctttcaaaagagtccctgcacttttgttaaaccaacccgccatcctcccaagtcaaaaccaatttacagccgagccctggatctttataaactagccactgcgctctgtagaatttgtaccagc

SEQ ID NO: 1936 - DNA, 637 bp, Zea Mays
cgcactgcagcagctaatgcattgtcaaagctgggatccagtcgggcccgggctccacctgggatcttcgtccaagaaataacacaaccaagcatcatcacaaatcagatggaagaatgcaacaccctgagccagccagaggcagattccaatgactagagagagccaatcgtcagatacatcaaaaatgaagaggagccggatgacaaggctgcggcagagcgcattgcaaggcagtcaacccactacaccatcatagggggcttgctgtacagaagaggagcagtgggagtcctcatgaaatgcatccactcagccaccgggagacaactattagatgaaattcatgctgggcagtgtggcgtgcatgccgcatcaagaactctggtgggaaaggctttcagatctagtttctactggccaactgcaaagggtgatgctgccgagtttgtccagaagtgcgaggcgtgccaattcttgtcaaaacagcagcacttgcctgcgcagcatctgcagaccattcctgtaacctggccgtttgcatgctggggactggacatgatcggacctttcaagaaagattagggaggttatactcatatactggttgcaattgacaaatttacgaagtggatag

SEQ ID NO: 1937 - DNA, 530 bp, Zea Mays
ctccggctcaaccaaaagaagtaacaaactccactaattaatgaccaaccaaaatagctaaagatctccatatttatagcctttcggctcaaccaaaaggagtaacaaactccactaattaaggactaactaaaatagctaaaaatctcctttccctcctaaccgctgctggaggccgtgccctgcgtgcttgtcgtgcacgcagcagcacgttcttgggctcggcgcacgtcacgggccctacggcgtctgatgtacacttatttgaacattacaacaacatacacgcttggctcaccagcttgaattaagcccaagctaccactgccaagtcaagtgtcaacttcacttctaggacgcacagctcttgcattcttccacaaaacaagactgcctgaacctctagtagtagactggtagtagtatattgtacatacaacctcacaaaaaaaccgtctcctctccggtcggacacttgtttctgaatgcaagcgtcagccattccagtatcctcgccaggtttgggtccc

SEQ ID NO: 1938 - DNA, 538 bp, Zea Mays
ccggaaggcaggcaggccgtggcgctaaggtcaaattcgaacaagtcggtcgtctactggtgcagcattgaaggtcatgaggacaccttgtacgtggagaacgggatccagttctacctgcagacctcaatctgaggcaccgtggactttgtgtttggcaatgcccaggccatgttccagagctacccgctgctggtgcgccgcccaccgaaaggcaagcacaatgtgctgacggcccaaggctgcaacaatgcaagctgtgagtccggcttctcgttccacatgtgcaccgtggaagcggcgtcgggcatggacctcgatgacatggagacctacctcgactgcccctacaggaacttctcccacgtcgcctttatcaagtcgtatctcagtcgcgtggtcagccccaacggctgggtcacgtggaacaagaacaaggtcgtcgagaataccacacggaccatcttatacctagaatacggcaacgacggcacctgtgccaacacagccagccacgtcaagtggtcgagcttccgtg

SEQ ID NO: 1939 - DNA, 541 bp, Zea Mays
gtagctgacgaagcaagctctttctatttgttaatggtatgatggcatgttcttgtagtgtggcccttgtcctcactgcaaaacaaacagaatgacttacttggaggcgcaccaaatctgccactaaagcttcggctcccctccctctcggagcagatggtcggaatgtgttttgcgaagatggctgctgagagcttgcctgttgtcctgactaaccctgttattgtgtcactctttcctcaccctgtgatgggttatggatacttaggacatgtcttggatggaatcttcttccgaagcccctggcgacttcagtgtacctatggaactcttccctcctttgacggaaatcattatcggcccttatgtactcatccatcttttacaatagcttttcaagggaatgaggaggcttccttgcaaaatactaggcggttggtcctggcctgagccgcttaaccattgctttgatgacgatgtcatcctgaacggccggagcctgagctcgaagcctgaggaaccttcggacaaatgattgaag

SEQ ID NO: 1940 - DNA, 610 bp, Zea Mays
ctcaaatcgctctaaatatttatattgtgttgagcttttggactcacgtcgagcgattaaattgtatagtgggtactcggacacaccgatcagacaacgttattaatcgaccgagttatggcattggctgagccctggctgcgccctggcaacacgacacagtatttgtgtcgtacgaacttggctgcgtcatttgattgctatgtcgcactcttgcttaatcggaccactctcgttgagtcagaccgccatcgctgagtcgcgtatttttcgcatgccctgtaggcactgcctgtctgccgtgattatcgagccacaaatgcacctgttgtgcacgttgcgtggacttatcgtgtaccccaattaccgaaccataattgtgcctgttgcgcttattacgaaggcttgctgtgttgtcgtagccctgatggccgcacacgcgttgacaccagacgctagagcttgtactcgcgtggattgtggtgggttgttcaagtcccctaaagtcacattatgcgcaaccttcataaacaattttgtttggccctatattttatttgactgtgttgtgtggcattatataaatatatcgccaagtggccataacaac

SEQ ID NO: 1941 - DNA, 575 bp, Zea Mays
agtacgaggagcatcgggtgccatgttgtcgggtctggctgactctggaggctcaccctctgtagctgggttggcgttcccttgattctgagactatcgggttcagggcagaagacaccaccgaggctgcagcacttaagaccctaaccaccttctgcggatatcatcccctggagatggtgatgcatccactaggactcttccccgctgagaagagggatgaccccatgtggtgcaacagagtgagccacgtaaaggacgtgtgagctatgcatcccaaccatgttgggaggatcaccgttcagtgtacgagcacatcgtaccgcctacaagccctgcaaagcgacgccatggcacacctcaccaaccttgctcagaccactaagctcaccctcgatagtcaagaggacttcatggtcgacttgtcttcaaaattggtggaaaaggacctacaggtggaacagttaagccagcgcatcatgaccttagatcagcaggtggaaatccaggataacactatcgatatcctggagatctagctccatgatgtgcaggaggagcttgaggaagccaac

SEQ ID NO: 1942 - DNA, 392 bp, Zea Mays
ggtgaagggcgaacccacaacagcgacacgacgacgacgagaaattcacccgttctcgatgcaccgcgacccccgccaaggccaccaacacactctcgatgcccaatgcagcacccaaactccacactgaagccccaacaatggcgtcaagagttcactgatggcggtcgccctcagctcactcctctgctcgcggcgagactctcctggcggcgctccgttggcttcgtgtgctcgggtgggggtgcacgcggtcaggctttccctccccctatttgtaggcaaggagcaatgaccataacgaccatgctagggtcagcggcgcgcgtggcggccgttgcgcaagcttcgcgccggtagttgcacggggagctgacaacgagggcccagag

SEQ ID NO: 1943 - DNA, 706 bp, Zea Mays
cacctcctgggatagaggttcccttagggcatgtatgtcgtctccgtcgagccttgtatggtctcaaacaagctcctcgtgcttggtttgagagatttgtttctatcatcaaggcttgtggtttctattctagtgatcatgatcctgcattgttcattcatgtttcttcacgatgacgcacgttgctattactatatgttgatgacatgttgattataggcgatgatccagaccatattactcatgtaaaggcgtatctgagtacagaatttcaaatgtctaacttgggggcactcagttattttttgggcattgagattttgcagactcaaaatggtatttatctttctcaggccaagtacatacaagaccttcttgatcgtttctggtcttagtgatactcgcattgttgccacgcctatggatcttcacttatctcttcgtctgactgatgggacacctttggaggatccatctcgatatagacatcttgttggtagcttagtttaccttactgtcaccaggccagatattgctcatgcgatttagatcttgagtcagtttttgtctctgctcctacatcagttcattatgggcacttacttcgtgtgcttagatatttacgggggacaaaaacacaatgtttattttatgactcaaattccccacttcagcttcatgcttactctgatgctacctgggtcag

SEQ ID NO: 1944 - DNA, 524 bp, Zea Mays
tatgttcgttaaattgcttgggtcagattcaaacgaatccagtatattttatgttcctgctgggagatcgttactagtctgtgtatttgtgtgacagggctgtcatatataaccagctatttattttgtgatgccaactgttgaatacactactttccctgtttctttttaacgcttgaatcaaacctctcactccacatcatgcttcaaaagacgtttgcctaggcgctaggcctcacctctttcgtgtagtttccacgtaagcagccttggtgaatattttcgcctgcctaatcacgtaggtacaactgttgtctgcctagcatagcactttcaagaacaccatgtttagcatgggagaagataatactcttctgtgtattttgagaggatattgtccttttttgcatgggtagtgctgtcactccacacatttgttaaatagaaaaatcatcataagttgcatatattattttctgtttcaaatgcaactctgttagttttttgtgtgatttttagttttt

SEQ ID NO: 1945 - DNA, 920 bp, Zea Mays
aaatccaattatctcgcagtcctaggagttcggccgctttcctccgctttccgtttcgccgccaccgtcttccgccgccctacctcgccgtcgccgacgacatgcccgaaaccgtactccgctctatctctctcagactctcccgccccctcgcatcacttcttactgacctggtgttctactccctcgcaggcggcggaggccaacctccgtaggcaactggagcaaaccctcgccgctgaaccctccagcccgctccaccactacaaccttgtaggtttcgttgtccactgcattgagcccgtggtcgcgcccgcgcttctccgttgcgcctaatcacctgctggttggtcctgccgtcctgctcgtgcagggcgtcttcctatgggaccgcgccgaggcagagcaggagggtgatggggaagaggcgcggaagctccgcgcggaagcgtcggagcattttctcgcggcggccaagctgaatcccaacgatggcgtccccttccgcttccttggccaccactatgcgcgcggcggtgacaatcaacgagcggtcaagtgctatcaccgtgccgtgaccctcaaccctgacgactctgaggctggtgtatgtgtgggaatatgtatattcatatgcccaatgtattcgtcggtttgcttgtgctggattctaatgtgttttcccctttatttctgggatatggcgcaggacacactctgtggcttgctagatgttgaagggaaggagagcttggagcttgctgtctgcaaggaggcagctggcaagtcaccgcgtgcgttctgggcttttcggagacttggctatttacaggtaacttgtatagcaatttcttgaatggactatttgttgaagcaagaatgccaatagtatgtgtcattaacagaggtcctgattggat

SEQ ID NO: 1946 - DNA, 696 bp, Zea Mays
cggcttttggaccttcacgcttttctgctagccgccggtgctgactctgaggttcacctctcctatctgcctggacttctcactcttttgactaccagcagcagatatgttgaggaatgggtctgatttttctacgctactgtatggatcgaccctgatcaccactggatgagattccgttttgagcgagaggatgtcactattcatgccagccagattcgccagctatttggatttcaagagtcatcgactcgtcttcatagcttatgctatggcacctctgaccctcctcgtcgccctcacggcggtgttgctcctggtacagctcacgtcacggctctgttccaaccgcccttctcagatgggtcgcgacgctctccgacagacttcaccatagcagcaaagtttttatatcagcttatgagacggacacttctgccatggatggggtacagggaggctgccactcatatccagctctggctccttggtgccctggtctctcactcagagtttgatgttgtggatttccttatttatgagatcgaggataccatactggatggtttgcgtgctcgtcgacagctgccttatgctcactatctgtgtcacatttttgctcagctgattcggcctccacagttccagggcacacttgaggcctcacgtctcctctttgggtcctaccgtccagcg

SEQ ID NO: 1947 - DNA, 776 bp, Zea Mays
aaagaggaagcagtggccgatgatgtagtagtcgcaagtgccttgttgttgtagagggccgtggctgccgggtccggtctccccatgagttcctccagaatgaggtcatcacggaccttctagaaagacgggaaagggacagagcgggtgatgatcgtgcgaaggttctcataccgcgggtttaggccacgaagaagtgtgagaacgaggatccgatcgttgtacggagtgttgagatcagccagggcatcagcaaagcctttcatcttgcgacattattctccgacggtgagatcgccttggacgaagttttggaattgggcgtcgaggtgaagagcccgcgtctcctggtttccgaggaactgattttccagggcaatctaggcttgacgggcagtaccgccacgctcacggatgatgtcttgaagttcgacggagatggttccagtcacctaggagaggacaatactgtccatgcgatctcaggcagggtcctcggggaagacggtgttgctgaggacatgatcagcaagggagaagcgcttgagagtgagcagtatttgatcacgccatcgagagacgtcggtggaggtgacttcgagaacaattgtcacaagggaccagatgttctggatgcctgccgcttgcatgtggaggtcggcgataacagcggcttcatattcgctgctggtggagaagatgagtgggccgtcgggcttgggcggcagcagccttggcttccaagacagcagcagcggcgcgctcctccaggatag

SEQ ID NO: 1948 - DNA, 589 bp, Zea Mays
atcgcaaacgtgcttgtgttggattaagtaggcgtgagtgtgccgtgcgaatttaagtcattaccaacttaaaccgactgctccgttagtagggtatagtggtcaccccgagttaagtaagcgtgagcatgtcgcaccgccttaagtcattgttgacttaagccgattgctccgttagtagggtatagtggtcaccccgagttaagcaagcgtaagcatgtcgcaccgccttaagtcattgccgacttaagtcgattgctccgttagtagggtatagtggtcaccccgaggtaagtaagtgtgagcatgtcagatcgccttaagtcattgccgacttaagtcgattgctccgttagtaaggtatagtggtcaccccgagttaagtaagcatgcaggttgacagtgaacaattcaagtgcctttgaagtctttttattgatgatatatttcccagtttacagagtacattgtcgtcccaatagcttttgagatatagctaggggtaaaacttcctgagatgttctatgttccatgagttcccaatttccgtgccatccatttgagtgagacgatatgatctaggccgagt

SEQ ID NO: 1949 - DNA, 634 bp, Zea Mays
atcactcgtctcatctcatccccttcgcttcaatcaggtcgggaaacggtgatgtggtctgtccaatgccatccactgcaatgctgatctccacgccggcacataccgccccgtagtgttcgcccacgatgaaaagctcccttcaactagtggtttctgcaagtatcaggtttccaggttaggtcaggtcgcccagactttgcaggagtgaggtgagttcataagggctcaaggcggggatgccactaccgcatgttgcgattgcacgacggtggcgtgcatacgactgcggaaggaaacgcgactgggttgatcagatcaaatagcagcaaagctaactgccttacaccattacctaccactaccaaccgcctaccggttggcctccggtctttatctcctctcgttcttcgtcaccagtcaccactcatcagttccacgcgtcggtggaaagctagctgacgactttgttgttcggttgtactctcaagagtcgacgacgacgcatttccaaaatactttagaagttcaatcgtccaaagtttccaagttcagtcacacaaaatacattcgaagttcaaccgactaccaagctagctaaaaaggtagagtgttagtatattacggtccgtcc

SEQ ID NO: 1950 - DNA, 350 bp, Zea Mays
ctcgaatcaactgccccctcaaccatcctcgaccatctgctgctcctccaccgtccacacgcggtgtgctgctaagacgcaaacatgtcagcgacggcatggcttcgccggtgctcactgccgtcgccgacagctacgactgccacccctactctatcttcgccgtctcataggactccgctgtggccaccgacccgcctccgatcccaacctcctccaatatgtaaccgcatctccctaccatcccttctccccatgttcgatctgttggatgtaaacgacgattcttaagaatcttcctcggcctcgacaacggtggcaagacctgcctgccctccccccatcccccg

SEQ ID NO: 1951 - DNA, 962 bp, Zea Mays
gttgatagggtatagtaggcaccctatgttttgtaagcgtgagcatgttgcatcgacttaaggcatttccgacttaaggtgattgcttcgttagtagggtatagtaggcacccttagttttgtaagtgtgagcatgtaacactgacttaaggcatcttcgacttaagctgattgctccattagtatggtatagtaggcacccttagtcttgtaagtgtgagcatgtagcaccgacttaaggcgtctccgacttaagtcgattgctctgttagtagggtatagtaggcaccattagtcttgtaagcgtgagcgtgtagcaccgactaaaagtgtttccaacttaagttgatcgctcattgagagtttgtttgtatgtggacgaacgcagaagctttattgataatgaggtcactagtttacaaattgtagtctaccatctagagtttatggtgctactatgggtagaacttcctgaggtgctcgacattccatgagttccctactggagtaccatccatctgaattaaccgatatgaccttggtcgagttacttctgcgatcatgaagggcccttcccatggcggtgacagtttgtgccttccttctcctaactgtatgcgatgaagcactaggtttcctactacaaatgcccggtgtcgctacaaccttatcatggtagctcctcagggtttgctggtatctagctgaccgaatgaaaacatttagacgttcctcctgtagcacatcgatttcctctagccgggttgcttctgcctctgcaatgttttcaaagactaatctgggtgctccgaaggtcaggtctgctggtaacactgcctttgatccatataccataaataaaggagtattcccatgcaaggctcggctgggctgagttcgcaaactccagactacattaggctgttctctgatccaatttcctgcgagtttttcgtttttgt

SEQ ID NO: 1952 - DNA, 449 bp, Zea Mays
ggggttagggagaggaaatctggtacattctgcaagcaaatcaagagtaaataagttgtaaggatgcaagccgaaccctaaaaagagggggaataaaactgcacaggaagcacacgttcgtatgttggagaagaacggttaaaatggagtatcagacaaaagaaatctagtgattcctatgaatgaagtcatcatttcagtagatcccaatgcaagtatgctagatccatatacaagcagcccaaatcgatagaatctgaagcatattttatcaatgagaagatataggaatggaaagcgcagggaacaggagacaacgttgagttgtaatacaaacgtaggtgagcaagtgctattttaccggaggaatggagatatctttccctgcagaacacatgcccttgtgacatttccttctctaatgcgcgcctttgcatgcgtgtttttac

SEQ ID NO: 1953 - DNA, 536 bp, Zea Mays
cccgcaacgtggtgtttgaagaaggcgcaacctgggattggaactcgtccgaaaaccgtgacccggaaggctcctgcgacgatggagaccaggacacgtttgtggttgaagagtgggaggatcccactgctgcttcgccgacaagccatgcctcccctctgtacacgcggggcgaaggcgcttctccatcaccgtcgggttctacttccctggttctagccctagtgccaggatcacagggatctccatcggcaccgcagtcggtcgagtcatcctcgactagctccacggcgacatcttcaaccacctcatgcctgcacacttagcacgtcaaaggagggcctgagccatgacagggcccactgccaccgaggggtgtgatccccgtcgagttcgtgtcacccagctccggtgcgctataggtactggacgcgaatgacaactctgaggacgcgcacagattccgggtcgtcgataacctcttgtatgacgacgacgagcttgtagcagatggcgatctgctgctggcagttgat

SEQ ID NO: 1954 - DNA, 648 bp, Zea Mays
ggaagagatagaaattagaaaggatagagtccgggcaggcagccatctccgtcttctccgcgctctccatcctcggcgggcgggtgggaggggcgagtcgacgaccagcacgcgcgcgcgtccagcgcaaccgcgtcacggaaccctagcgtcgcctcgttcgctgcccaactctcctccagactccagtgcacaggtctccatcacggggaattctcatatagcaagtcgtcgtcctcgtcctcgtcctcgtcctctcctccggtgggtggatcggccatcgcgccgggccgggcgggcatacctacgtacacactccccggttcccgtccccgtccccgtcccgcattcgattggttccttcgtcttcgtctgccggtaaggaattcaattcccggatgggttttctacgatcgagtgcgcttcggtcttcgtctgcttgttttgttatactctgcttgctctgaggtctcagctagtccctcagctaccgcacccaaatccaaatcctgcctgctgggatggatggactgccgtccaagcaacaaaatttgttgcggatctgttccttcggaggtgggacttttttttgtcccggcttcaccgattcttctcgctgctggggcgggactgcggctttctggatct

SEQ ID NO: 1955 - DNA, 467 bp, Zea Mays
gaagttatccatggccggagattgctagccggaccgccgtggctataaatagcactatgaactacggcgagggatgcacacctccactcagtgagatgatccaagcccaaattcgcagcctctgcccccctcctcccaaattgattgcgcacggtgaaactacagtctcttacggccatatagcccaaatctccacccccaatttcacccagagccgccgtgacaccattttcccccttttctctgtcaccagcaagccaaagttctccgcgccccgtggctagcccactctggtaaggctctgcgcctctcgaatgtcgttttagtagcttagtgtgcctaggaagctcatcgtggcaaccgtttggtcaattcggccatgattgagcgggaacgcgagcttgatgtcacggtctccgccgtgcacatgggcagaccattctcaaagtgttcaagccgaaattaac

SEQ ID NO: 1956 - DNA, 504 bp, Zea Mays
ggagtagggtaaccggcggagttaagcacttcccacaagatggaaggaaagccatcgcgagaaaggaagtcggaactgaaacgagtgtctcctccactgatgggggtgggtgaattcatctgcggaagggaatcaaaggtaaagattatggtggaaggaaaaagaaaaagagagagcccggatggttttatagaaagtgggttagctcaagttttgaattcctctttgtgtttatgatgcatgcatgctgaaagtaacgttgcctctccaacaatagggtgctcttagggcatccttaaaaatataagtactggcccacgtggcctaattaatgagccacctatttctccctctatgcctaaggcctttcgtcctaggtctagcggtctagtcctaacgatccatagcagtttctaggcaagttttagatttttgaaaatggtattcatggtttattgtccttctctgtggtggaatttgctccgataccaactgtggcagaac

SEQ ID NO: 1957 - DNA, 750 bp, Zea Mays
atgaagtgccagtagaggtcctttctgaggttgatcccaatggtgacgtccatgttgaagttgaacccaatgggtgtaaccatgctaaagttgatcccaatgggtgtaaccatgctgaagttgatcccaatgggtgtaaccgtgctgaagttgatcccaatgggtgtaaccgtgttgaaattgatcccaatgggtgtgaccgtgcaccggctgttgtccgtattttttatgaggacgaagaagaggaagaagaagtcccgctgattcgtaagaatagccaacattatagaggtagtaagggggatattgatattccttctccagctctgtccgctcttgtcagtcttcaagaactgtcaataacggattttgatcaggcccttgaagatgtcgttcctaaggatatgctatcggagccgactgctgacgacatgatggatgtttgttctaaaattccagacatgggattagaggtatcccgagtagtgtctcgtgcatcatcgactttggaaggcagtctttgatgtcaagacgttggtcaggattgcccgactcacatggaggtgactgaggatccttcagccttagaggtggctgttgcagaaaacccagcccccgagggtggtgctggcagttacctagccctcgagggtgtcgccagtagtgatccgactctggtgggtagtgcgagctgcgacccaacccccgagggtgttgccgatagtgatctggctctggtgggtggcgtga

SEQ ID NO: 1958 - DNA, 485 bp, Zea Mays
ggtgcatggcttgacgagggaagatcaacaggaacaatctcgagagcactacccggggtgacctcagccccaccagcaaacagtaggttcctagcgtctggctcgccgacctctaaggcgacttggccagttaaggccgtagaagcacgtgctgccatcaccccctcagaccggattggggatgacccgatgtgtacatccatggaagcattagagagagagcatgcctgaacatcctcgggggctggattacaactagcactacccacaggggctcgatcgctaccagcaacaccctcgggggctgggtagctgccagtgccaccctcgggggctgggtcctctacaacagccacttctaaggctgaaggcccctcagccacctccatgggagtcgggtaactcggatcagtgtctttgcatggaagactgccctccaaggtcgacgatgcgcgggacaccacccgggttacctcttgcccggc

SEQ ID NO: 1959 - DNA, 371 bp, Zea Mays
gcaatatttctctcccctaattgatggttataatgttgcttagggtttgggcaaaagttacacacactttgcacacttgttcactctctttcccctcttacctagggttttggaagatagggtttaggagagtgcctaggggtcttctcccctcttatccaaggtggtgagtgagtaaggattagggtaatgcttctcatgccattggcaactttattagcatttgatctccaagttcttatgtggtgccctaagtcttgaccccttgtgaacacagcttctagtgccaaagtgggttttagccagggtaacacctggggtgttacatccttggtcgaagagaagagtaccaagtttgagctacgcttttg

SEQ ID NO: 1960 - DNA, 430 bp, Zea Mays
tcaaggctagctagggacatatcctcgatgtcggacaagttctctatcctggggggaggtggtgctggaggggctttcttcttttgctccgtctggcatccttggctcttggtcttcttttggactttcttcatgggggcgagcttctttagcttcttatcataatccatcttcagggttcggtaggcttcacgagtgttggcctcctcgccttctgctatatcaagacactcttagagggatgccttctcctttttaagttccttgacctgctgctctaagctttccacccgggagtttaggtgggtgcagtgggaggaaaggtcgtcgtagtggttatcgagagtgtggaggtatctggccatgtagacgatggtggggtcatcctcagtaggatctctccctgacagggcctgaagtcttttcctcc

SEQ ID NO: 1961 - DNA, 290 bp, Zea Mays
aagatcacaggcccccagggtgtaatcaccatatatgcagaccaacatgttgccagaaacatagaaagagacttcgttcccggccagcgcaatgtgcattgcctcacatctgaccacgaagaccctgatagcattcacccaatcaaagaaaaaaggatcaacgcctagctatagagcaacaaataggtcaaaaagtccccctagacacaaccaccccaatcaaactttataacacccttcgacacatactattttgtgtgaatgcccgaaggcttaaaaatgtcggctcc

SEQ ID NO: 1962 - DNA, 342 bp, Zea Mays
atgacaaaagtaggcggaggagatggaagatttggtaggggcctaggggtatctcactgacgacgacgaccagaacggggcccgccatgacgtgggatggcgcagacgcagatctagaattccaacgaggtgcactccgatgtccggtcactcttcagtcttcacgcttgcaaacactacgcagcccctctataaaactcagtgaacctcctaggatgctaaccaaggcttgtacaatggcgatggagcgtttaggttgcggtggttcgttgctcttctctctcagttcacggcggcacgagctctcggcatccgaaatcacgcactctaaggccatctcca

SEQ ID NO: 1963 - DNA, 654 bp, Zea Mays
tctcgagcttcgggaaaccaatactctttgatagagtaccaataaccttcgctccggtatgatcccggacacagcccaacttttcgtcatcaacaccaccgaagagaagtgcccccggccgatatctgtaagatatggcatactcttttagctcttttttttcaaccttcgtcagctcttgtccaactaagttttgaaagttaaaaatttcatcttccgaagtgtcttcggctatttctttcttcttctcaggctctggggccgtagcctctttagtggctgcagcagtttcttctgccgccatgtctagcagtatcttatcaatatttgcaattgtgctttctaactgaatatcttcggctgtggcagcttcggtagctgtatcctccgaaggtacagcttcggtagctgtgtgctctcaacagctggtgccttcggagctgaagcttgtggtggtgtcccttcaatgacttccgtcactgtaatgattctttgtttcttcggcctagctgccttctttgtttttgcaggctccttttccttctgaaaaagcttcattagatgtggccccagtggactcagcttgacaggcaaagatttagtcattacctttaacatttcctccacgtcggtggtagagggtgttgcagtagt

SEQ ID NO: 1964 - DNA, 406 bp, Zea Mays
cccactcgcgtgcgatctccagctccccatgtttttctccctgccgtgcgtttgaaaagagaccacctggctgggccccacacgccatttctatctcctctctccagtaactgcttcgctccatttcttccgccgctagatgcatccacaacttcagcaactaacgctccttcaagccccgtagcaactcccccactacacgcagtccactccgcgcacaccatgctgaccctcctcgtcggagctccggcgtagatgtgcctcaccggaacaccttgcgcatcatgcttgccgatgttgtcttgactggtaaggtccgcgtcccctccctgctgagtctttgtgcgtgtagccttcgcgtcgtcgtctgctgcgcacgcgtgctgtcgctccaccctgcttgctc

SEQ ID NO: 1965 - DNA, 757 bp, Zea Mays
cgcggcacaaccgtccccaatcccacgaccccccggtcagcggactctccctctacccacgacctccactctcgcatgctccctctgcacgacctctactttacctgtgtcatgctggagtccatagtggcatcagccaggcagaagacccccgacgcactgctctgcttcgatctcctctccgagctctcctctgccattgacgaggcccccaaggtccaccccactccctcctgacctcattccctgaagcgcagatctctcccgttagggcaatgcgcgcgcctgcatcgctgcacgtctgctgttgtttgttcctgtgcgggttccctccccatggttgcctttcatatttgtagtgtagctgctaaaccgttctgtaattgggtggagcaaaggcttccttttcattggatttaatccatgttctcagtgataatcttgatatcaccgttctgcaacccttccttttttgtagttctcaagtgggtatcaccaagactgcgcgcgtgccggagaacgaggacgactgaaatcacatagaggtaatactctttgtagttctatttttatgttgagaactaattagatagccttgtagtaccggagagcccatgatagctatgtgtcgaatgttatgcacaagtttaaataagttttgtagcaatatgtttctgtcatgtgatttaggactacagtcatagactcatagttaacatctttgtcctattgttcagtttaaacatatcctatacga

SEQ ID NO: 1966 - DNA, 341 bp, Zea Mays
tggatttccttttctctttcttttttttacagaaaatcgcagatattttgaattaggatttatagcgataaataaagggtcgacgatacgggctacacatctcattctccgaatcacgaaacggaaaatccaaggattaaggattctggctaaattttgtttagatagcttgcgtgactattctgggcaaaatgtaaatgaaccaatttaaaatcagtttggcttcagtatttagtctgtgcttaactcgtctaacctgataaatctcatccactaatcaagcacccgatttctctgccgaagacaacgcgcgattcagattattttgccccgaacatttt

SEQ ID NO: 1967 - DNA, 496 bp, Zea Mays
catcgatcaacaccaacaccaaggagaggacaaagtgagcgatcatgtcgttctcgtacactcttcaaacgtccttcactcgagcagatgaactcttggacgacactcgctttaacgccctgctctcctagtgctcgtgcatgtaagaactagaatgggatgttcaggagcaaagaagcgaatcgggtaacaatgacatgatgaaacttatataggtaagcggagaatcaggtgcacgcgagtaattaaccgagcggatgcgagagatcaaaagacgaaaggaattacgacaggagatcaagagacgagaaacttccataactctaaaatcacaagagataggaaaatcatgtaactccatattaactccacaaccccaagagactctaaactcccataactctagaatcccaagagactctcataactccaatttgaactacctgagtggcaaaacattactgcatcgtgacgcaccacgccatgccatacgaac

SEQ ID NO: 1968 - DNA, 446 bp, Zea Mays
aggaacccaccgggtcgaccggcctttagctctgcgcgctggcgtcccactgccgtgtggggcccgcttgtctgggtcttcttccagccgagtcaagggtggccagagatccggtatccgcgcaagccgcgcaagcgcagcaacttcgtccgcgattttggcgcgtcgtgggatttggccgggtcctcggcctcgcgttcggagtataaaaggaacgtccgccgctctctgaccgcaggaccgccaggttgtagccatcgtcgtttgctcgtcgggttacagagagggtagagatagagtagagctggggagtccatcgatcggatcgcggacacaccttcgcctaagctaggtcttcgcctccgtgaatcgtgggcacgcgctgcgcctggccgtatcctcgcggtgcgaaggcagtgacgggtgcggctagacctactcgccgg

SEQ ID NO: 1969 - DNA, 370 bp, Zea Mays
cgtgataaacagatccgtcaaagttcaacttgaaccatccacgaggcggcggtgaccacttcaccaagatgacgcgacccggctgatacggccgcgccgacgcggacagctccgtcgcacggcagcatacgctcggaggagtagacgacggcgtcaggacagaacacaccatcgtctcgatctattgaagaactctggatgacgctgggtcagcgtctcagcgagagtgcctggcaatgtcgtgtgggtggctagctagcctttatatataggctggggaacgcaagcaggagagcgacggctcatttttggtttatccggtagatggtgttgcccacgcgatggacgctataatcgctgcctgctggcc

SEQ ID NO: 1970 - DNA, 461 bp, Zea Mays
actgacacttggagtgccatgtagggacttgcgtgttccatgacgaggttttccaaactccggatggctagcaacgatagcaacgtggtctacacccccaacatagccatccgtttcgggagtctggattccatcgtcaacaatgaaggggaaatgactagagccccagagactctagtcccttcgacgactgacttacccaacgttggcagaggtctcggcgacctctggctctgtcctcctcaggaggagcgcgggcttcagggctcagcacgacccactcgtaccgatgtcataggggtattggaccccatccgagattcattcctggacatcctcctattaggatcggaggatggactctcctcttcgcatagcgaggcaagttgcaaccccgtccaagagtgcctcgcagccaacacgacgagagatcactttccctacgcaggaagcttaggggg

SEQ ID NO: 1971 - DNA, 481 bp, Zea Mays
tgccactggatcagccacaagtgccactggatcagccacaagtgccctcctctgttggctccgtggtaccctcctctgtcgtgccttcctctgttggctccgtggtaccctcctctgtcgttccttcctctgctgcttctatcgtgccctcctctgttgctatgatagagccctccgaccttgctttggtgctgccctccattactgcctcgtcaaggttatattcatctaaaatatactttattttttcaagtttctaaaattcacatgattatttactattttcatgttttgtgtagggaaaagaaaaggaagagaggaaaagaggttgcgcgtacaactgacgacaatccaacgactaatacaatgaccaaggttatgaagaaggcaaaaatcaagaaaaggctcgttgcggacttgtaactgaatgtgctcggtttagctgaatttggatgtaactgaatatgctcggtttgcttgt

SEQ ID NO: 1972 - DNA, 552 bp, Zea Mays
cgatgatgagtagctagatctacagaaagaaagcaagggtcccgctgggaagtggctttgtaatagtttttttgttttgtaagatacttttgggaagtgtttatctaatagtgacataacttatctatatgctatttgtctttgttgcgtgcgtcgttaccaacttctcccccttacttggcccccctaggatgcaggctcgatgtgtcgaggctggatgctagcgtacttaagagaaaattggtgacctagcccccttgggatgcaggctcgacgtgtcgaggctggatgccagtatacttaagaaagaatcggtgacctggcccccaagaggtggtctcgactgggacctggacctgcacatagccttggctaggtagttttagtagtgcacccatgggacccgctagctagtatcgtctatcctttgattaatgccacaggacctgcaggacttagactgggaagccaatccatgtgtccgggccccttggattgtagctccaaatactagggcacctgtcgcagagtggtggagcatgtaggcttagg

SEQ ID NO: 1973 - DNA, 460 bp, Zea Mays
cggtgggcccgcgaagaccatccaggtcggcgtggactcctcccagaccacccgcatcgcaggggatctgggagaaaaataggaactcgcgctcgtcgccttcctccaagcaaatgtcgacgtctttgcttgggagccatcgcaaatgccggggatccccagggaggtgatcgagcaccagctaaatgtttacccggacacgaagccagtaagccagaagccacgaagacagtccgtggaacggcgggagttcatccgagaggaagtccagaagctgttgcacgctagatttattgaagaggttcatcccccagtgtggctggccaacccagtcgtcgtgcccgaaggccaacgggaagcttcggatgtgcatcgactacaccagcctgaataaggcatgccctaaggacccgtatccactgccgcgtatagatcagattgtggactctacttcggggtg

SEQ ID NO: 1974 - DNA, 302 bp, Zea Mays
caaataatgcttagctgccatgcccttgaccaaattacctgacgtccaggtacggtccagcagccttgcacctcactcacactcactcacgcgctcgccgctacgtacgtgtatgtaaaacaccgccctcgtcacgcgaatgacaggcacgccacgttagcggcgcaacgagacgacgtcgcgtcatcagaagtggccagtgcgaccacacgccaacgggaaaagtggaaccgacaaaagccaacaagaacggacacacacagttcacacgcacgtacgcgcgcgcgggacgacggccggcg

SEQ ID NO: 1975 - DNA, 347 bp, Zea Mays
gccgatattaacattggaacataacactgatattcggctggttgatagtagtgctacggatgtggaagctagaaaggtaataacattgctacaatatatgatgaaatacgtgaatataaaaactgacttaatatctttgatttgtagaaactggagtttcatatggaaggtgtaaacttagcaagaccagataaggccaagcctaagggaagaacaatcaaaagtagtgagtaacaagttcttaaattgggtgcgaaaggagctaagaagatgagcaggaagtgctagaaatgtggcatagctgatggtcacaacagccgtacgtgtttaactgtggaggataatag

SEQ ID NO: 1976 - DNA, 898 bp, Zea Mays
gcttggaaagctttgtataacttccctgcgcctgctgctatactatcaccagtatggtctctaatgacaaacccccatgctcctactttcagctctggtagaaaagctccatcacaattaattttgaggaaaccttcaggtggtggagtccatcgttcttgcatctgtacagcagctgtatttcttggtttcgtacctttcacaattttctcccatcctgtcatgctcattaccgagtgaactaattcatcagttgagttccttttgtcaccattgatcactttgtttcttacattccaccaagcccagagtaaataaataatcaccaaacgaactgtctctggtaatttaataatttcatggaccatgttctgagccgttgcttcttttaacagatttaatctgaaatcttctaaaccaagagtcctccaacattttttaacatctttgcattttaggaacaaatgaccaccatcctcgtcaaaccgactacacattggacaacgtgtatctagttgcatacctttccttttcaaatttgaacgcaaaggatgactgttatgagctaatctccataaaaaatgaaccaccttcggttggcaattcagtttccagaggcgagaccaaaattgttgtacattcctacttgctccatttgtagattcacccaattgtctctgatccatcaattcttccttatcttttatagtgtgataagctgatttcactgtgaaaaggccctttgtatcagggtgccatgccacgtgatcctcctgatccatctgaattggaatggcaagaattagatttgcatcaatgtcccagaaaactgcctcaacaagatctctatcccaaagaccagtattaggatcaatcaagtctgccacctttgttaaga

SEQ ID NO: 1977 - DNA, 597 bp, Zea Mays
tgattacatttcttttcctcccactgaatacatttatttcctaccactgacaggtgttttcaacttgatcaaataccgatatagcatacctccagtcaatcaatcacgttccaacggatacagaaattcaaaattttcaatgacaaaaacttaggcccaatcagcataacatatggcctgtgatcccagccgaatcaagactgccagaagaaacttcatccctcccatctcaaaataaatcaacttttagagttgtcctaaatcaaattatttcagggtttgaccaaatttatataaaaatcacgggcatagtatcactaggtacatcatgaaatgtactgccataatctacttaattggtgtaataaatgtttcttctttcctacaaagttggtccaagttgattatagaagttgatttattttgagacgaaggtagtgtctgaaaactaaaagttgtgtaaaatacttctagtaagcaaagcagatcctcaggcaatattcagtggaaaaaagttcgaagtctttaccagcataaaatgcatttcttgtatttggcatagtatatgatcagggtttagattaaaagctaaaagat

SEQ ID NO: 1978 - DNA, 609 bp, Zea Mays
gggcggggctaatttcgcctgcgggggcctagggcggccggtccgcggcacggtggcgggcttccgcgacggcgaagccgccggtgagttttccggccgagatagagtggggaaggtggcgtgtcgtgaacgtggaagtgtggcggaactcttggcactatttgattgaatggaaggtcgccagggagggagagggaagcttaccggagcggtggagggaagcacggcagcgctgctagctcgattgagctcggggaggtgtggaggaggaggccggggctgctgtggagtgctcgggctcggctgtcccttttataggcgcccgggagggggagagggatggaggggacggcgagctccgacgagcttccatgatggcgggcatggagcaaacggcgacgagacggctcgggcaggctgaggatgaggggacggctcgggcacagtggcggggttgtcgcggaggggctggcgagcattaatggcgaggcgacgaggcgaggggtgctcggcggcgatcgcgccggggagggatgggcgagggagaaggagctgacaggtggggtcgggctgccagtgagagagggccgcgcgagagagagaggggcg

SEQ ID NO: 1979 - DNA, 1333 bp, Zea Mays
catccctcctcatttttaggtcgaggttgtttctactgccacttgactaacattaaaccttcctcagctcttcagagaaagatttttcttttgagcgtctttgtggtaagacgcctgaccattcaagtctttgtttgtttgcttgtgtctgctatgtgtcgctcccacctcgttagcgcactaagtcaattgttgagtcggttgagtgtgttatatcgggtatagtgttgagcataagggatatcattgttgggatccagttgctcgtcagatgaggatcttttgggatgttgtctttgatgaggttcgtcctttttatccatgtccttcttctgatgcttcatcaacatccttggttgatcccctttcttttttgttcttcctggatgctcctactcctaccgtatgtctcacgcttagagcaccccttggtggagtccttccaacttctgttgtgccttctttagtggtacctccctttgtgtgtccttcataatctccttccttggtttctgactacaataggaagcctctggtgacacatgtctacactcgtcgggtcatagattcttctggtacaccatctttctctgttgagctaccctcttttgttgtgtcatcttttgctgttgagtcatcttccctctgatgattcaccttcatttgatgagacaactcctattgaactagcttcttctgctaattcttcaccgcagctgacccttagacagaatcatcattttgttagcaacctgaccaatactttcctttaggttttgctgctactcttcttcctgagccaaccatttatcatgatgttattcttcattagaaatgacaacatgcaatggctaaagagattgcagctctttagcgtaccggcacgtggaaacttgttccttgtccaccacatgtctgccatatcacaagtgggtctataaagattaagacctgctctgatggctcttttgagcgttataaggctcacctagctacccgtggcttccaacaggaacatggtcatgacaccgatgggacttttacgcctattgctcacatgaccattgtttgcactcttcttgctcgtgagtggttcatctctcaacttgatatcaagaatgcctttctcaatggtgagccacgtgaagaggtccacatgcagccaccataggatgatatgaatgatcttcgctatgtgccttcaaagctttagttcattgatttcttcaagaagaagaagaccacaacttagcataggttttatctctccaaatttggtatgtttgatccaccttgaatttgaggggggtgttagatgtctatgcatatgtct

SEQ ID NO: 1980 - DNA, 327 bp, Zea Mays
gaagacttctatagcgggataacgatgaagaagaaatatcgtgcggcagctgattcagatcaggaaagcattcacgataaggatgaatgtgagaagaccctagaaagttagggaacgacgaccactataggaaaaaatggattttccccctcttttttagaaaaataaacatgaattctggtatttagatttaaaaaggcagtacatgatttaaccaaacaatatcgatacaatatttagataagatttgatttagcgaatacttggaatcagatgaatttgtacccggcatttatatccaaagttttggatcgggcaagaaacgac

SEQ ID NO: 1981 - DNA, 867 bp, Zea Mays
caattttcagaaagctcaagggtctctgcgcaagataacctagactcagggaacagtggccaatggactgcgggtttgttaataaattgtccagggactcttatgcaaagcgcgcaagcgaaggggtatcgagagatcttggccgcccgatccgcaatggtcggcccagattagaagttttatacgctgaaccagtatgcaatctgagccacaggatacgtgttctacgacttagattagttcctagcgtgcatcacacttctacctttggatccaaatcgagcggtccagacgcgcgatcgatctagaccgtgagttagcaaatcaacggctgttgatcgtcttcttccccacggcggcgccatccatcggccgaatccatgccggtgagcgtgccctgcccggctattccgagcgccatacaccgattcacatggcccccgtgaaattgacgactccccgcaccttttcctcccatcaatttctgccaccacccagcgcagaccccaccatggtgcggtccaactcacggcggaggaatcgctacggtgagcaattaccggcgccccgatttccaaacccgagtctaattagtaacgtgtgatcagtggggttatgcgagaacgatcccgggattcttaccgaaatctgacgctggaattgccccgcccacggcgaatcgcgtccgcgacacttcaggaactccgacgaccgattcacgagttccccgaacagtggtccgagcggaatggtttgcgcacgtctacctctatgcgctgcgaggctccgaagacaatttgcggacccaacagcgctgccgcggaacggcggcaatctcctccctgacgtccgccgcgcgtggtggtg

SEQ ID NO: 1982 - DNA, 505 bp, Zea Mays
cctacatacatttttgtacaaaagttacaagaatttctctaaaactacaccaaaatcatttagctttggtttttcactctacgccaatatcagtctgaaaagtttatcatataaaatgtttagcagtatgaagtaggaaaaaaacagaggggagagtaaggacgtttttcatacttcgtcaaggacagcatgagcttcgtttccagctagttctcggccacccttcatctagatttgggtaataaatttgatacccacgcttcgagcctcatttggaatattctcaagatcagccgggaaaatagtgaaggtgggcttgttaacattttcaaatgtttacacccggcttttgcaaatatagtagcagttcctcaggcggccactagggcgcaaaaatctccatgccccaccatcacttcgtcaaattcattgacttctttctcgacaaacttaagcacctttggagtatcgtccgcagaataattcgcttctccagacattgccc

SEQ ID NO: 1983 - DNA, 923 bp, Zea Mays
ttatgctagtccggctgcacccttgggcgacttttgcgcggagtgtcgcacgcgagggtggccagcgctgcccctcgcggtgacttcgatgtggtcgaatgccgaagaccgtcgatgcggtctttttcgacattgtcttaattttttgcgggggatttttacgtgtatattacatggctcctcctcattaaaaacctcaccccctgggaggaaaagagtgcgggccggaataaaactgtctggtgaattacaagggcgtgttagccccgaggattcaaaaaaaattacggagattgtcaatattccaggaatgctctaagtcttcgccggatggcgttgttagcctgtacgcgctgggggacgactttgtcttgacgatgaagggaccctcccactttggctctagcttgccccatgattctgtccgagctgtccggacaagtacgaggtccccttcattgaattctctcgggacgactgtgtggtcgcgccatgcttttgtttgagcttggtatttgttgagggcctgcagggcgaagacacggtctctgtcgatgagatccttggaagttggttcgtctacgtcggggacggctgaagtgcttgtccgtggtgacccatgtttgatttcctgcggggtcatggcctccgatccatatagcaggcggaaaggagtgaacccagtcgcccggcactcggtcgtgttcagcgcccagactgctttaggtagcaggtcggcccatttacccttcttgtcgtcgagaagcattttcttgatggccgtgaaaattttgccgttggcgcgctccacgatgccgttggattgtgggtgatatactgaggcgaaggcaagcttggtgccgattgagaagcagaagtctttgaagtcctggctgtcaaattgtatgtcgttgtcaactgtg

SEQ ID NO: 1984 - DNA, 326 bp, Zea Mays
tggcgggttagttttaggaaaccccagggtctcttttgcataatggcatggccgaaggggtatcctataatcagagccgttggattccccatcagtggcccatattagattacgtattataacgaaatggtaagcaacgtggatcacaggatcatggatcagtggtcctaagccctccatgccctgatcgagcgtcgatcgcacatctaccgatcaacggtcaagatcttaaatagcgtaagggtatgggatcgtcaatcgtggacgcccgtggatggatcaacggctcgaaacgaatcggtcacgatctaatctcatccgatgga

SEQ ID NO: 1985 - DNA, 391 bp, Zea Mays
tgcgtctaaaagtctttgatttgaatgtaggattagctgagaaatagtctttgtaaagaagcgtatggtgtagtagtctttcacgatctactacgtcatgtcccacaacagaaccaattcgacccggatgattaaccaaatcatcaacgattatgtgagcggctccaaaaaacagatcattgtcatcatccgaagaggagggatcaatcacctcgttcattacaaaatgattgaattcttcatctgagtccataccgttgcggcgacaactaaccacgacggtgatgtcccgtttgcagctttgccttaagatttttggagcaaatacgagccaagacagtagacgtcctgatctgtgcctggctttcagcttccacgtcgtgcctttcag

SEQ ID NO: 1986 - DNA, 361 bp, Zea Mays
aaggggcagaagtcaagcaaagtgatcggagcacagtttacaaatgtctagtttgttattttcaaaataaaagcttaccagatccaagatgtcatgcagacgctgaagtatgcgctttatcactgatatggtagcaagttcttggatctgatcccagtaagttggtcctactttgggggaccttcctggaaatatttcagataacatgcttgttgcctgtatgaggaaaaataatgtcaactcatgtatgtcgtgccaaaagcaatgaagcaatataactgcaaatggccatattgtacaacactctaattgggatcactgactgacagagaaaaattgtgcaaaaggaattcaagcacca

SEQ ID NO: 1987 - DNA, 696 bp, Zea Mays
cggcaatggtggatccaggatgaagctcttggccttggatgccgatgacgacgagccaacagcagggccatcggcagcagcacccccagtcggtagcatgttctagtccctgtttccagacacgaagagatcagagcaggaggagtggagactgtggagtgcggctgccggccgatacctgtctctccggcgagcgatggagtagggctccgctcgaccgctgcagacgttggcgacgacgcgtcgaggcgtggtgacgcaatgtttccggctggcggctgcccgctggtgcgtccgtgtgagtagagacgtagagctggaggctagagcaggctccaccgaccaccgctggcccgctgctgctgtccggctgttcagccaccgcccagcggccagcgcctaccagcccgtcccgcgcccagaggaggagagaggaccagagtccagactccagaggagagaggagcgaagccaattagccaaggtcccaagggtcaagggcggcggcagcacatccacggacacgggcatgcggcggccagctagggtatttggggttttggttgggccaagcacactgcacacatttgggccaagcacgtatttgggccaatcgctaacgggaatacaaacgggattattccgaataaaatacgggaaccgtaaattcggtcgggaaacagcttttcctgattc

SEQ ID NO: 1988 - DNA, 713 bp, Zea Mays
gagacgatagtgtttgcttgaatgtaagtgtaaaaataagtgggatagagtttcctgctaatctcatagtaatgggtactcagggaatagatgtcatcctagggttgaattggctagataagtaacaagcaattatcagttgtgataagaggacaattaagttggtgtccccactaggagaagaagtggtagctgagttcgtctcacctgagccaaggaaaggaggttgtcatcagatggctattgatagcaaggaggcagattcactcgagactatcaaggtcgtgtcaaagtttccggatgtgttcccgaaagatttaccaggtatgccacctgagcggaaagttgagtttgccatagagcttcttcctggaaccgcccccatttctaaaagagcttatagggtatctggaccaaagttggttaaactcaagaagcagatagatgagttgtcagagaaaggttacatcaggccaagcacctcgccttggggcgcccctgtcctgttcgtggagaagaaggatggcaccaggaggatgtgcatcgattatcaagctctgaatgaggtcacaatcaacaacaagtaccccttgcctagaatagaatttctgtttgaccagctgagaggagccagcgtgttctcaaagatagatctgaggtcaggttatcaccagctcaggattcgaccttcagacattccgaagacgacattt

SEQ ID NO: 1989 - DNA, 660 bp, Zea Mays
ggacgatctgacgcgcatgaatttcagatactacgctacgctcccggtaaatcccttctccttgcgcgcctgatcctcgaccggatccgggattcccgatgcggtaagtgtgttggatgcggctaagatttggtccatttccagcgcgtgcgagttactgcgccgcgatcgccatgcatggaaacgaatccctgccctgccgccgcgatccatctcgcttttactcgcctccgccgcgcccagcacttccagccagctagcgttttaatctgcttgtgtttctctacaattaaacgcatacgatccccgctctcccacgagattcgccgcggcaccctgcagctagcgtgcggggttctgccgcagcctccgccccagcagcatctcctccccccagttccgcaatcccctgccttgccactatcgtggaactaggcgtcccggctcactttggtgagttcccaaaccaaatgatgtgtagtgtatggtagtatggctggctcaacgtgagcattgagcactgtcaagaaaatttatgcttcgctttgtcaaccttatggaactttgttcagaagattctgtggatttaagaccggtcgttctttgcttttttaagatagaaaggtgtatttaattatacaaccactgcgccggagttga

SEQ ID NO: 1990 - DNA, 589 bp, Zea Mays
cgcacggacacccctgatcctgaacacacaaactggctaacacaccaaacatagccgaaaacgtaaacaagaactacgcttcttctattcaacatttcccacatgaacttcagtagccatggcaccatcagtactggcaccatctagctagccacctaaaagtagggggttggggtgtgaggtagggaaggacgaggacaagagtgacaaagagagtggggatgaaggagcatgcatcgtttgaaaaaaaacaccagactcttgcattacagccattgacaatgcttcgtaacccaactcagttatcattttcttttttgaaagaatactccagggaaaaccccagaattgtaatatagtgtggcaccacaaattcgaacccggatcagcacactcctagcccatggactttaccacagcattgtaagcaccttcgctacctcaattatcataacttcctccgatgcctcacctcctattttgcctggaagcatgtccatctagtccaggagcagggtcaaaccacagcgttgtgtctagtcaatgcctaggtactgctaggctcctattttttaagcactacaacgta

SEQ ID NO: 1991 - DNA, 346 bp, Zea Mays
cagcaggggacgacatcttgaggaccaaatacccgtaatgggcaatggccatgaaccggtacagggccggcctgccaatgatgccattgaaagggaggttaacctccacaatatcgaactggaggttctcagtgcagaggttttcctcagtcccgaatgtaaccgggagtgcgatgctcccaaggggatacaccggttgagggcccactctggagaatgggcgagagggtcccagtcgggatcctgggatctgcacctgcttgaacgcagcatgactgatgacgttgaggccagccccaccatcaatcaggacatggtgcggcttcatgttggcgatgacaggggc

SEQ ID NO: 1992 - DNA, 1151 bp, Zea Mays
tctcaggacacggagcgtgatcgccaggtgcaatagctcaggcgacctctatccactctccatcccgttgtcctccaccactaccccccaagtcttcctcaccagcgcctcttcacagctttggcatcaccgtcttggtcacatcagccacgacgcccttcgtcatttaactagttcatcctctatttcatgtaataaaggctctactgcccccgatatctgtcacgcatgtcaacttggtcgtcatgttcgccttcctttttccatttcccagtctcgtgctccacgtcactttgatctcgttcactgtgatctatggacttctccaatacccagtatttctggttacaaatactacctcgccatccttgacgactgctcccacttcctgtggacattccctctccgcctcaaatccgacacatttcccactattgctaattttttctcttttgttgccactcaatttggcaccaccataaaaagcttgcaatgtgataatggtcgtgagtttgacaactcccacacacgagctttcttcctctcccacggtgtccaccttcgtatgtcgtgtccctatacctcccagcagaatggtagagcagaacgtgtcctccgcactgttaacaacatcgtccgttccctactctttcaagctcaccttcctgctccttattgggttgaggctcttcacaccgccacatatcttctcaatctccaccccaccagcaccctaaattcctccactccccatcttgccctctttggtcgccccccatcttacgaccatctccgtgtctttggctgtaagtgctatcccaacatctctgccactgccgcccataaactcgctccacgctccaccatgtgtgtctttcttggttactcgtctgaacacaaaggctaccgttgtcttgatatctccaccaatcgtatcatcatctcccgccatgttgtgttcgacgaatcctcctttccgtttgccgagacccctcccagctcggctcttcccactaaccttgattttttggatttattttctgaacaggtcccggttccacccattggcgcattgccctcgtccactgctgggcagcgcaccagcgccataccacctggaccgctccagcaggctgcccaaccggccgcca

SEQ ID NO: 1993 - DNA, 437 bp, Zea Mays
gttatagttaatctccagatctagagctggttgtattcttgggctgaagaatgtcatattgctggcttgttatcctccctgaaacatcattattagtggcaccacattttttatttattttttccttgaacgacaggggcagagatgcatttcatgtcatttagaagaagaacaaaaggggtacaaggaaaaatcggagacctctccctgacccacactacattcacgccttgtatttcttaacaagcacgacaacagcataatcacctactcaagtcagggatactgggatgaacaacctaatggggagctcactaagagccaatactccaaccgaacaccaaaggccacactcatctgccaccgtttgctgtactacctgaacatttggtctgacctcttcaaacacacaagaatttctttgtttccaaatttcc

SEQ ID NO: 1994 - DNA, 338 bp, Zea Mays
ggagggaacttcacctcgcctgaagtcagcctcggctcgaagaaactctgcctcgcctgagctcagcttcggccgaccgcctcgacaacaactcctcccgaatcctataggaggccactctgaaaactatgctaaccctccctgtacgattgcatgccccatggaaggctcgaccaaggcctcaggaggaacctctgtctcgcccgtgccgagcctcgacctagataacatcgaccaaaggatgccaccaactcctccatgaaggctactgacgacgggatggctacagaacagatgtcaagtctcctttatgccatacagaaagaattactatgcac

SEQ ID NO: 1995 - DNA, 524 bp, Zea Mays
gaggaggttcgaccggtttaaagcatgccctgcacggccgccatggctctcgcaagctaaggtcggcgcatccgtagccagtatacccgccgcgcaacccaagccactgtcgcgcgccattaacgggtgaagtgtgtgcttgcgtcaaacattctctggtggtgttcgccgtcgccgggtcctgtgaggtcgtccatcgggatccccctgtgcgagcgtgaatcaggtggcgactagtgtgcgggtgtgccttcgacgccacgaagcttgctgctagaacagccgccacgggtcaaaccgtgaccccgactggttgtccacccaattggtagtcgtgtagcgtctctggtgccacccgcgcctgctggtgaccctccctggccgcgattggatcggccccgtcaagaatttctcgccgacgtgtgcgcctccgcggaagatcgggtgtgccgtggtctacccgtgtgtgtcatcctcaacggtgagttccgcgtcctgatgattcgtctcgtcattctctgcgc

SEQ ID NO: 1996 - DNA, 818 bp, Zea Mays
ttgggattcaaaatgtgaaggtgtaccttgagctctaatctcacacgtccgctaccggatcaacggtcagcgcaaccttcttcttcgtccaacccgagccacggcggcgttcagattcccgtggcggcgagcgccggtgagcatcgcgcccaacgccccagcgcacgattcctagctccgataggtaatacatgttctacggagcatattgaactgattacggtggagcttactggaggatatggtggcggtagcgatgctgccaacatggcactgcgggtctgcagcgtttgacgaagcctggcggcaaaatccggaccgaccgatgacccgtgcgcccgcccggatgttgatatgtgatccatgagccccgacggacctccatgacccaacaaagaggccgaagcgatggcgaggatgcacatcaacgacgacggtagaggtcgaggttcctttctgtcctctttccttttctctgcttaccaccctcgctcacgacgcgggtgttctccgtttgctcgattgaggggagcccaggttatataggtacaagtctaggccggatcctaaccatcccgagagattcacggcgaactttcccggggatctcggcacgggcgcgttacacgacaggtaggagatatagctgacagcctggtcccacaagacagccactaggtgttacatgtgtggcaaaggggagaaactgactgggcgggcccacattccagccggtcggcgtagtgcagtgaaggattgggccggccagaaggaagtaattggaccgagaagtttaagttttaggcctaggtgcggag

SEQ ID NO: 1997 - DNA, 501 bp, Zea Mays
caaactaccaactcaaacgctaactctgaaccttggaccaccgacttcctgcacatagatttccccaacaatatgccaacagtggcggagccagcccgtaaccggagcctggacaccattataaatttttaaattgtttctaaagtatatattcaatatagactagtaaatttgacttagtgctaaaaaatttaaccgtagcacggtaaatacctcaagatggtagagaacgaggcaaattcatctttctagtcttcatgccttgaaaccgtcgcaatatggtagagtcatcaagttctttgaatatttcccgctcgatatagcacaccatcaaatgattgaaccactcatcagctcaggtaatgctttgtatgcatgcttccaatcattaaatcccgttttattaaacacatcatatccaaatatttctgcccttcctggctctttaaaaaggaagcaatagaaacaaaatgctaaatctttggactcgctgtattctag

SEQ ID NO: 1998 - DNA, 443 bp, Zea Mays
aagggggaggatgaggatgaatgggatgcagtacaaaagcgtgttgcactgtaagtactcctctctcggtctggatggatagactctctggactgctgcctgcagcttgtcgcaggatgggcaacgcatacgcatgattatttggagccactaacgttgcacaatggtgggggcactgcgtgcaggtgcagtgcgggagtacgtagaggacagcaaagcatctcggcgacattcctggatttattacagctagctaaaggtcatgcagtgactgtgtgaggcagctttcacctagtactataactctctctctcgatccaagagggaaaatgcattcaagcaagggactgatagatcatagaacatatcctttttgtactacctttggacttcggcggttacaagaatgatcaccggaagtcgatattggagtccaacactcc

SEQ ID NO: 1999 - DNA, 339 bp, Zea Mays
gctcgccatggtccatggtcaaacaagggatccccaaagggttcaagcggtgcagccttccgataggttgccgtttctaggaagacaaaaagatgacacacgatgccaataacgaaagagagtggaaggacactttacctatagcgactgactggccacccgaaggctaatggaaagtctcacgaatcctaccaactgaacttggatcaaacgcaccctaaagcacaaaagtcaaagcgcatgagagcaaataacatctgaaccagaaatagtgcacaggataaggacctctagactactggggaccaccgatcagtggggcaataagggaactatctc

SEQ ID NO: 2000 - DNA, 481 bp, Zea Mays
atttaatggtaattatttggctatcggagttcataaggatcactagaatgcatttttacattatggatgaggcaacaactctatcggtaccccaaatatgtggtacccattcctactgggtcaaggctggacccctgtggctacccatagacatgggatgacgagtgatctatcatgactcagagcctgggcccgtcctatagggtcgatggcctccagacctatgttaccatgtgcctcgtcggtgggattgctcgacaactacagcctaggacctgacccccacgtgtgccaacgaaccttcgaccaagggaggtccgatgccgccatgtgtccgggccattacggatggaacccgaacctccacgagtaccatctggacccgtatgcatacgctctatctagagctaccacatctgcatatgctcccagccactgctctccacccaagcgggggtacgatgttgccacgtggcccatg

SEQ ID NO: 2001 - DNA, 722 bp, Zea Mays
ccggacttccgtagcaacttgaagaagggaagcgccctctcagtcagcctcgaaatgaagcgactaagggcggctaatgaccccgtaagcttctggacgtccttgatatgggccggcggcctcatcgcttcgatcgctttgatcttttctgggtttgcttcaatgccccggtacaaaaccaggaaccccagcaacttcccagcggagacaccaaagacgcatttgtccaagtttagcttcgtgcgggttgcccgcagcttgtcgtagaccagggttaagtcttccactagggtcgaccctctcttagtcttgaccatgatgtcatcgacgtagacttccactttgtccctaattaggtccccgaaagtcttactcatcgcccgcacaaatgttggcaaggcatttttcagaccgtaaggcataacaacatagcagtaaagcccgtccactgttacaaaagcggtatgcttcctatcttccctagacatctagatttgatggaaaccagagtaagcatctaagaatgacaataggtcacactcggaggtagaatccacgatttgatctatacgtggaagtggatatgggtccttgggacaggccttattcaggctggtgtagtcgatgcacatctgaagcttcccattcgccttgggaacgatgactgggttggccagccacactgggtgatgaacctcttcgattaagccagcgtctagcag

SEQ ID NO: 2002 - DNA, 898 bp, Zea Mays
ggaccgagtccgccgcatttaccagcgcgctgtgcccgcgtagtggccgcgacgcccgcccaaagcagcatgcgtggagccatctcctgtatttatacaccagagatgatcaatacaatacgagttgcatctctcatactctttcatggtatcattcgtctactgatccttccgtctctttcgctgcctatcccttcctctcctcgtctatcgtcatgtcagccagctcgagctcgtcgggcaccaatccgttcgccgctgctaccgcagtagcgatctcggttgccaccgctcaactaatcaacatcaagtcccacgttcccgtgatgcttgatctcggcgactccaacttcggcacatggcgcaccttcttcctcatcgcgttccgcaagttcagtgtcctcgaccacatcgacctgatgcttgacgacgccgagtggacgcagatcgatacttgcatcgtctcctggctctacaccacgctctcctccgacctcctctccgtcgtcatccagccgaccgacgatgcctacaccacctggaccgccatcaccgaccagttcctcgacaacgtcgtgtatcggactgtccaggctcgtcagcagttccacgggcttcaccagggggacatgacgatcacgacgtactgcggccagctcaaggtcctgactgacacgctccgcgacatcggtgctcccgtctctgaccccgacctcgtcgtcagcctcctcagcggcctcaacgacaagttcgccaactgcgtcacaaccatctccgccgcgcgccccaggatgacgtttcgccaagcccgatcgttcctcctgcaggaggaaatctggatgaacacacgggctcagaaggctgccaccaccgccccgctctcttcgtcgcgttccac

SEQ ID NO: 2003 - DNA, 433 bp, Zea Mays
ccacctcagcgcttgcaacctcgactgcgcctctccctgctggtgttgtacccatccctcttgtggtaaatcagcatgccatgtttacctgcgggaagcacaactttcgtgagccgacactcttcgcgaccacattgttgtctccaatggctgcccttgctgatacgaattggcgcgttgctatggaagtcgagtactcagctttgttgtccaatcacgccgtgtttcttggtgacaacccggtttcctggttccaaatgttagaacactatctcacattccagtgtcgaggctgagtaccgagctattgccaacaccgtcatagaggccatctggttacaccaactgttgtctgagctgcacactcccttgcgtaatacaaccttgatataatgtgataacataagtgttgtcaacatgtctttgaaccccg

SEQ ID NO: 2004 - DNA, 340 bp, Zea Mays
gcaccgggttgacctcagcctcgggccacgcgccgttcagatctccaaggtcttcgacatcctcggcacgcgccatctgcagcaacaacacactcattcagcaaaaccacacgtacccacactcaaccacacgaaacaaaagacaagctttacctgctctctcgcccggtcagaccgctccctaaccgcctcccggccatgaggaccccacatccgatcgaagagtgccctgcggaatcctttaccatagggtcttggaccttaaaaatttcacgctcaaagttttcatctgattggtcgaagacctcatagtgtttgcacccctcgcgggacaacgcat

SEQ ID NO: 2005 - DNA, 631 bp, Zea Mays
ccaaatctatgctcctgatttcattgcgcgaagaggtattcacattctaatctaagccgtccaggaagggatcgacgaccccctacccttcttcaaccccgtcgtcctaccgctctccctctcactcgccaatgcctggacggccagacaaccattggcagcgaaagtgcttcaccggcggataccacaccagtgccccgacgacgaaagctaaatgcgaaaaagtgtgatgcgtaatgggaaataaagcaagtcagggcggtaagagctcacccacatctgggcagcaacgacgccatccatggtgctcggccgctttggtggttctccatttttctcccggcaaggcgcgtctcttcttccaacacggcgcacacccagattgcccagtactgctgggttccatccacggctacggtcgctcccggctactatggtggcgctgccaaccaacggttcacgctggcgtctatctcctcggtggtggcgtgcactagctcctatgtgtggttatggccgaagggaaaccgtcggctgaattatatacccgttggagaggggtgtccgaggtgcttggtcaagcaaacctcatgctgatccggtattcacggagcggtcagcgacaaacgcg

SEQ ID NO: 2006 - DNA, 466 bp, Zea Mays
gcgagaagcatgaaacgcttgcgggcgggaagaatggtgaaagtaactagtggtggccaagactatgctgggggcggtcgcgatacgaagtggcgtacgtagcaatggcgccggcggccgcgccgccgtagggcaatttattgccggcgggcagagctgccgccgatcggatcggagtagtagagtgctgcagaagcaagccacgcccacctacaggcatacagctgctccactatacaccgcggtacacgacgacgcccctacatatatatatgcagatgtactagtagcggctttgaatacccttccctgttgcacgtctcccctaccggctttacccatcgccattcaatgcctcggctcacgtcacagcctgcacacccaacggcctcgcttcaacagttcaacgtgcgtcgtcttgctctctactctgtcctcatcccctagtatatatatcttctcaagg

SEQ ID NO: 2007 - DNA, 279 bp, Zea Mays
cttcatccaaaattgagcaccgccgcccgcgaacactataaattgaccccgccgtgagcttcgccatatctttacgcacccagccaccgctaatcggccccgatcatccacccgagcgctcgaatttcgcgttgcccccaaatccattctccgccgccgtagaatcgagttcaccgtcgccagcccaactccggtcagtacccgcccgttgcttcctcgtttgagcatgctcatacccccgtgatgcttaccaaagccttgaatcgaactagatcaccc

SEQ ID NO: 2008 - DNA, 499 bp, Zea Mays
aacaacaggcgattcacgaaggacttcatgtcccgttattgcaggtgaaccattgtgtgtgaaacggggagggggaatcttatgctggtaagagaagatggcgagcccgcggctggtgcaggtgagatggcccctccccgcgccctcgagttgtggtggtcggagtcagagaacgagcgatggtgtttgtccgtgtcggtgcgagcgtgctgctggggcgcgaccgacgccgatgagttcgagcgcacggtggagatcatcatgtatgttcaacgtcgtgtcatttgtctgcttgcctccacctccgtcgcggcctttgtggagtaagatgaccctccactctacctcccccaacttgttttttcctggtaacgaagaaatcttgctccagacgttgtccgaggaaaccccaagagtatcgtgtcgttcacctgcgaccttttggagagcagacatggcatccgctatttcgtctggtcctcaatcacaactgtgggat

SEQ ID NO: 2009 - DNA, 338 bp, Zea Mays
gcgcctcgcgacacgcccccacgcgtgctccgcctcgccgcatcccactgctccacgctgccatcgccacccacaaggcgtgtgacctcggccccgacaaccgcatcggcagtgcaagaccgagacacctctcgttggaaggttccatggtgagtgctgatctgatctgacgaaggaggtggaggacacggagatggcggcgtggaaggcgcctgcagcgtcatgtttcccgacgacgacgcggtgttagatcccttgacctaaagcaacccgccatcgcgcctccccaacacagcctgctcctctggcctgacctgacaacttcggaggcaatcttc

SEQ ID NO: 2010 - DNA, 630 bp, Zea Mays
cctgcgtgaagattcgcgccgccgccgttaggatttacgctcgctggtaaccggataatgcttcggtagaaagatcttcgccgccgtcaagctagaagccaccccggtcagccgcggtactcatcccctggctcaccgcccgcgggtaaagtgctcaccgtcgtcgtgacatcaccgttggccaccgcgtgtcctaaccgcgccatcgcatcgccgtgactccctctaaactccccgtcgaccaccggagttactgccacggcggtgaacacgtgttcactgcactagcattcttcctcacctccaaccgccgtgtgtctcgtccaaaattcgcggccaccgctcgctcctcctataaattgagccctcccctagctgcgtaacatcatcacccacccagccaccaacaatcgttagcaaccgtgcctccgagagcttgaattttggtttctccccaatccgggtttccgccactacaaaactcacctcaccgcggccagcccctttccggtctgctcatccttctctctccctcgtttgagctttctcacaactccatgatgcttgctgacccacgtaattgcgctaggaactctttggtcgccaggaacacgacgatctagccgccat

SEQ ID NO: 2011 - DNA, 402 bp, Zea Mays
atggctctggggtggtggcttggccgacaccggcaggttctccaccgcgaggatagaagcgccgccgcctgctaaccatcgtgagaagaagacaggggggagatcgtcgatctcggtttgaacggctgagatctgatctcagccctggcagctcgatcatgggaatcctcaccgtagatccttaatcctacggctcaggtacctgcgggagcttcggcctaatctcgaccgtagaatcctaatcgcgcggagctcgttggccgataccccttcggcctgtgtattttgcagataagcccctcgccttattagaattgaacccgccgtccactcacgtgggaatttaattaaatctaggtcctgagtttcatagtttagaccctgacctttcgcagaatagtg

SEQ ID NO: 2012 - DNA, 640 bp, Zea Mays
gtttatcaacacgtcattagccctgttgggggagggcctttgtggccgaaggtctctaaatcactaacttcgttaagaacaagtttcaggtaaaagcatttaccttcgtcactaggacgaagcagatgagaaaatgtcagaggggacaagatgattcatgcatgtggaagcgttaagcaggatgaagctgaaaaagatagcttcgaggtaaagtgctatggtttacaaagcaaagatggagtaaaggctacgaaggacgtgatctacaagataaatatgtggaaaagtacaatatttcccaatggcatgctcggtctccaccataccggtggtacccagcaaaaaggctagtaaagggccacaccttcatcaacctcaccgcaccgaaggtatccaccgactgtggcgacaccccacacacctcgggatccccttacgaatgcaaggttaaggcccgtgtcgaccagcgaccccaaccgagctccgtcctcgaccgtcacaaaagcaacatagactactgcttaccctttgaatctaaagggtggagtggcgccaggacctgcgtggtccaccgctaggctcaggtctgccaaggcccaactcgtcagccacgacacaagctcatggtgttcggggtagc

SEQ ID NO: 2013 - DNA, 372 bp, Zea Mays
gataactgcgagaggtaaaaagatcggaagggaggaggatttggtcccggatgtgagcttatcggccacactcgattgccaggcgacgtgtctgcggccgatgtcgacgggggacgctggcgatctcagtcgcgccatgccataggtcgttttaccacatcgtcgcgagccatggagagtaactagtgactgccgtaagaccttgccccagtacgcgccacagtgaactcactttagcaacaatatcccttcaccgtcgtgatccaaatctcgttcaaaattcgaagcaaccgtgaccggcttctataaattgagctcttcccttgctccgcccctttgtcacaaacccaacgcaaccccaaccacgtcctg

SEQ ID NO: 2014 - DNA, 837 bp, Zea Mays
ctgggctgagcacctaactccaggaaggtcaggggctaacctacaaaaattccccagacacaggcttcatcctccctggacggcgggttgattatgtaaaattctagggtctcttatgcataagtcgctcggcgaaggggtatgaagcgatacagaccgcccgatccaaccacaacggcccagattagattatcataatatccgaatcggtatcccccgctggcgatcggatcccgatccaacggtcttggtttacttcacctaaattgttataccctggataatctgcgccctccatcggccgatcgacgaccctgattcggtaggatgaaaggggaagcccaacctgatctcagccgtgcgcgaggaaatcaataacgcacgcgatgtcatcttcccagatctaatcttattcgttccctccccatccaacggctaccagcccatcctctatctcccaacatcagccgaaccccgacagcagagcaggagcgtcacagcggtgccatcgacgagcaacccagccaggagaatcctcccgcccagacccaaattgaaaggtgccacacgcagcaaagattatggtgaaacgagggagctagttcttacctgtaaccaagcaatacagagcccagatgacccgacggcgatctcacccttcaaatcgttccccgcacgattaccccacggttccgttgagcaagagcgaggtagacaagggttgaagggtccccggggtcccatttatacactgctagtaagtccgattgagccgaatttgtcggaccacgcgcatggtgtttgcggcaatactattgcggggatgacactggccac

SEQ ID NO: 2015 - DNA, 433 bp, Zea Mays
catgttcagttggaataggaagaacaggaggaataggattccaaaattattatgaaggaagaaatcgaactggaacatcatcccaaagagcacagtaaaaagtgctgaaagtgttgtaagaaaggcctcccaggtaaaccacgataaccagtaagccgattcatagagccccatggtagacatagcctgcaaatatatcaaaattcgggctcactttgagcataaagatatgcaggcagactgtggtgagtgaagtctgaacctgacgaagctttagttctttctctgccaccaatgcactgatttggaaaacaaatccgaacatagcaatggcaagaaaaaaagttggccctgcttgagcaatggtagagaaggtctccgtggctgggtgagcaaattctttaaatccaacagtccagctaaaatttgggtc

SEQ ID NO: 2016 - DNA, 396 bp, Zea Mays
ggcaaattgtacaagctgccacatatgacttgatcataggtttcatgttcttccacgcaaacaattgcttgattcttcgatatgtaatatgaaatcctgaatgacccccaactggactgtcgtgcaaggtagatataatctgaatctgaagagcttcgcaagtccccacccaaacacggcctttatatctgagaatgcctgattgcaaggtataaggtcctatgttatctatggtagtagccaagctagtaatgagttattgtgagaaggtgtcatttgcatagctatccaatacctaatccatccattgagatactattgaagtaacatgaaacaatgaggaatcaggatgtggtcttcgagatagggcatcaactgccccattgttagcgccct

SEQ ID NO: 2017 - DNA, 550 bp, Zea Mays
tagggctgactcaaattagtggcaaggaagatcgctacattttaggccatgtatctgcttgctgctaatgcaggggtcgccctagaggaatgacgttgttgggcaagctcataggtacccactcagtctggagtggaccagggttgtgaggtgcggtgttgccctcgagttgacgtgatatgttgtagcggacagccacggtggctatgtgtaggagggggcgaggggtagggtggctcaccaagacatgtatgtccgcattgtcccgcccacgcagaagccacgtcgccgctccagttccaaaggtgagcaaggaagtaaacagtcggaagggtagtgggcacgcgagcttctgagctggggctcagctcttttgtcttgagggggctcgtatgggccgttggggtgtttctcgcgcttgtaatgggctttgttgtctttattcgttgtaaagatgagcacgtggtgaataaagaaaaacaatagattattttcagttctagtttccattattatcattctatagtttgttgggttgattttaacactg

SEQ ID NO: 2018 - DNA, 476 bp, Zea Mays
gatgccttcagtttcggtgatgcatttaagcatgagttggctgaccccttcttgtataactggccctcaatgattgcgaagtcccggcttcggtgcttgaggcgcttggcctcgttgacgtcgcttggatgataatatccttgtaggaacagggttattggggctcgccaatcttcggtcatgatgaggttgactatgcgatggccctcggcgtcgttggttatttgtaggccctctggattgcggacggctggcgtgccgatgacatggtagaacacgtcggagggcaaggcttcgcctctggcagctgctttggccaatgcgtcggcctcctcgttccttgctcggtccacatgctgtaaggtaaagcccttaaattgtttctcaagactgcgaactgccgtgagatactgcatgagtgcggggtcttttgctgaatattctttctcaacctgatcggcaaccactttagaatc

SEQ ID NO: 2019 - DNA, 558 bp, Zea Mays
gccggaacagatccagtggttgccacgcagatataagtgctacaacaaatggcaaacacgatgaacgaaatgcaaactcagatgaggcaagaacgccaagaaatgtgtcaggaacggttggagatgcgttaagaaatgaggcaagaacggttggaacggcaacaacaaccaccactacctccaccacccagggataagcaccagtagtttatgagtcacaaaccatcgacattctctaactctgcggacccactacaagcagatgactagttaaaatctatggacaaaatgctcaacatagctcagtgctctgacagagagaaggtgctatatgcatcgggtcgccttaccggccccgctgtggattggtgggatgcatactgtgctgcccacactactgtcaacaccattacctaggcagaattctccactcaattcaggaattaccatattcctgctggacttatgaagattaaaagaaaggagtttctatcccttaaacagggaggtatgtttgtaagcgaatatagagacaaatttatccagctatctcgatat

SEQ ID NO: 2020 - DNA, 342 bp, Zea Mays
cgggagcctcctctccctcgcttccagccttgtttgcctccatatcctggtggtgcatctccaagtggtcgttggcttcctcaagctccttctgcacatcatggagctagatctccaagatatcgatagtgttatcctagatctccacctgctgctctaaggttgcgatgcgctggcttaactgttccacctgtaggtccttttccgccaattctgaagacaagtcgaccacgaagtcctcttgactgtcgagggtgagcttagtggtctgagcaaggttagtgaggtgtgccatggcattgctctacagggcctgaaggcggtacaatgcgctcatacact

SEQ ID NO: 2021 - DNA, 336 bp, Zea Mays
caacggcccacaaccctttttcccacatccacacaccgaagatcaacctttggcaactttttttgggatattacagtagcaatgcagggtaggtatggaaatgtaacatcctctaccgagtcaagcttcatcattccatgattgcttcatcaacaacatgtgaggaggtcctatccaaacccaattaccgacatactgatcaataatgagagtattgctaaaaaaccagtgagaaggtactattcacaacccaatactagcacaacaatcaataatgacagctatattataaaggtagccatgaatcaacataagaagaggccttatagaaattcg

SEQ ID NO: 2022 - DNA, 424 bp, Zea Mays
caaaaaaatgttgaccaaaagttgatcttcggtgcgtggatgtgggaaaatggttgtgggccgttggaagttcggagtccgcagatgtgaagatctcatttaaacgatatcatttgagtattcatttgtctgaatcagggcatggatgggggatttggttgtgagccgtcggtttcgcatcaagggcatcgtttcctcctcttctcaaaaaccatagccgcccctccccttccctcatttttgcagcagccgccccccttcttccccattgcagtcgctcctctcctacccaaggtgctgcacccacctccctctaaactctagtcgccccctagttcctcctttggtgtgctgcattctccattggtggattggtgggaggaagaagaaagaaagaaaaggagtccaaggtgatattgttttc

SEQ ID NO: 2023 - DNA, 595 bp, Zea Mays
ggaaaccctagaaattgagaaaagagaggaaaatactacgtaaatgagataaaataaatatataaataggaatatatttacctcccattaatatatgaattaatacattttgaccaaaggtgaatttcataaccaaattcaaatccaaatttgaactctaaaaacaaagaggaaaataaagtcagaaaagggaaaaagataaaagaaaagaaagaaatgcgctgggcccaatctcctatctggcccatccactttcctgcacgcgcgtggcccatctggcccattaccgcgcgcgcccccttttttttatctacgccgcgggccaaattcctggtgccgcactcacgctgaccgcgtggggcccatctgtcgggtcgtctccgtcttgctcacgtggtcggcttcggctctcctctccagatatcttctccacatttagcgctaacagacttctccaaaatccggccgggcatgccgggcttgcacggagatcctacccgggcaccagggtatatgatgggcaggctcctcgcgcatcctccccttggccacgacaaactacgaccctgtgcaacaccagggtagcctgtgtgct

SEQ ID NO: 2024 - DNA, 401 bp, Zea Mays
gttttctcagaagattagtcaatggtttagccaacaatccgtaattcttgacaaatttgcgatagtagccagtaagacccaaaaacccacgtaactcagtcacattagaaggtggcggccaatcctgcatggctgagattttagctgggtcagtagcaaccccattttttgaaatgatgtgacccaaataatgaagctggtgttgagcgaaggtacacttggagggcttgacaaaaaaattgtggtgtcgaagcacatcgaatacctgctgcagatggtgcacatgcaagtcaagagcggggctatataccagaatatcgtccaagaaaaccataacaaatttgcggagaaagggttccagaatatgattcatcacacactgaaaggtggctggtgcattc

SEQ ID NO: 2025 - DNA, 538 bp, Zea Mays
ctcactaccattatccacgagtaccttatgcagatcccatcctgctactcggcagtttatcaccatggcatcggcatggggtgcactatggagatcgatgtctcttatgtcgaaggtgaatggtatttgggaccactttgtttgaacgactggcccagtgagagctacatgattgactcttcgatagtggtctttcttctgctgttttgtgtcgatctcgaagctggatcctccggtaatcatgtgaatgacccctcgaaagggttaatcggtgaagtcctcttgtttcggtgctggtgctgctggtggcggtggtaacggttgatttggatgatgtggtggtggtgcaggcgatagagctaggatctcttggtgttgctagtatgtgttgtggttttgctggtgaggatggtaatgttcattgtagaattggtgctggttgtattgctggggatggtaggtgtgggcgataactctttggttgtcagtcggttggtttctggccatttgatcctttgtggctttggtttcagggcag

SEQ ID NO: 2026 - DNA, 482 bp, Zea Mays
tgcccccctcgctgtcatctcgtatgatagagagtccgtgtagacgaaatggcgacgtgcctcgaagatggaaagctccatgtcgtcattcctgacgcgcgacgcgtccttctccctcatcgggccgaagagctccgccctgaacaccgctaacctcgcggcgagctcgcatcggtgggccgggaacaactgtctacccacgacgaaggtcacgtctgcgccgtccctgtcccgtggcatgctcaccaggttccggagcacggtcggctcccgaacgacgatggcgctcacgtcgtggacgcggagacgacgatcaggacacacctacccgtgaagcggtcattgccgttgcgcaacaacgtcctgaattggttggatttaggtataaaggtttgctccgtgctttcctttttccacaccttgctatccttgctgaaggcggtgaagctgaacccgaccctcacgcgatcctacccctgccc

SEQ ID NO: 2027 - DNA, 637 bp, Zea Mays
tataatggacgttaagtgtcatggactgtgatggggttggggaattggaaagggaactgtgggtgcaggaacgccggccgggggcctcccacagccgggcaagaaggcttccttctaattcttgcttaccttgaaccgatacaatagtgtcccgcttatagagatgactgacttatctctttcctaacaaaccaactaaccaaatattatctaacccttatctcttccctaactaatctgatctaatccttatctctcgcctaccaaaccataaccacgcgaacagtaccgatgccctcattagagcctccctgacattaacactgtggtcctcttcttgttctctcacacttttacatgcactgggaatttgagaatgactgagactcagagagaatacttcattaacgtttataccgctttctttaaaatagccccacttctgtcatctctttccatcttatctccccttctctccaaatccctatgctcctcttctttgcctcttgtccattctcctgtacccaactactttgatatttctatccactgcttgtgacgtgctctgctctaggatgaggctaccaccactgtgtaggtccaaggaccatgagtcatgcagatcatagccatctgt

SEQ ID NO: 2028 - DNA, 588 bp, Zea Mays
gtttcttcggagtggtacttgaagactttatcgtctctagcacatctaatacattgaccatcctttttctcttcggagtcgcagtgaggtctttttgtgccttcggcactatcattcctgccgaagggtttgtaacttctactatctttgttttcacggcctctatttctttaacattattagccttcggcatcatagccgaatcttcattcttctgtgtaagagtaggtcctttggcttcagtagtcgtagaggtctcaccaccaaattcaggcactgaggccggttcgatgaagcgcggtcggtgagtaaggaccttcacctttttcctctttggtgagacctcacttagagcaactgaagcatcaccttttccagaagttgcgctttttctcttttgcctttcagcgggtagcggtagtcagggtacataaacccaatagcatcgaaaactctattcagcctcttcttcttccggctccgaaggtcgcagatagcgcgttatcttctgtctttgaatatggtccaagcagtttgtcgcttgtagcttcgatgcacttcagccaatcatcatctggctcaataaac

SEQ ID NO: 2029 - DNA, 418 bp, Zea Mays
gaatgatcgcattctgattaaggtatgcttatcaagaaacaagaatattactatcgtgacactatccagattaattggctactgtactgctctgttcatgttattttaagcaagccttttccgacgccacaatttgtctagaaatttcacacacaagttgcatattccatatacggaaggcttcatctctagtgacaacttatatcaagtttagaaaattgtgtttggagcagaataaaccatataatacgacatattcatccactagaacagaataggaaagccacacatcggacaggagtcaaaaagttttattatgtctttggcagatgttctgtttattcatgatatgtctaaatgtcttctgtcaagtctggatactagagcaaagcatgtccaggaagctccaatttctgcg

SEQ ID NO: 2030 - DNA, 346 bp, Zea Mays
ggacgagcctccagtacgtccatgcgtgtaacaagttcagcaactcgtcgatcaagctgctcataggatgtcgccgcagagtcctggtatttttttaaaagcttcagtcatcacgcgcatcatctccttcaattccagctgagagacacactcatcgtcgttaagcttaagccccttgtccttatccatttgattctttggtcctgtcattgttagcacaaaacagagacaaaaaggtaacaaacaatgtgaaccctacaactatctctcagggtggtggtggtagaatataaattataaagcgtcttaccccgctcttacaacgttcttaccagcactgcaggtg

SEQ ID NO: 2031 - DNA, 798 bp, Zea Mays
aaaaatttaggggtaattaaaaaaactaccttactcctcaagcgggagagaccggtcgtggagcaactcgccgtcgatcttcactactccccttgtagcctgcgcagtcccggttgtcggccgagcaagcccctcctggcctctgctgagcgccccctcggtccactacaggcgcgctcggacactgtagatgcccggcgcggcgtggtacaggaacaaaactctggtgaaaacgcgtgctcggacaagactctggtgaaaacgcatgctcccggtttatcttcatcgagctctataaggtgtctgaggaagtggaggtcgtggggaggaagcatgcagtagtggacgacgtggggactgaagaggggggagtcggttgcacgaactgtgtgggggtggggacggtagaggccgcacaaatggggatggcgcagggctggaggtcgccggcgggatagaagatggagcggcgttggtagagcggcggtggtagagcggcggtggcgctgggcactggaggccgcgatcgcaccgaaggcgaacaagagggcggcggtgcaaggcgagcatgcgggcggggcgcagccgcgcagggctggaggccgcgggtgtggatagggtttcacggagatgggcctcgcagaacacaaatcggcagatgggcctcacacggcgtatatggctgtcttaatttttttgcaaggtaaatttagtaccacattgcccaccaattggtgttgaaacctgcttatatgtgttcctgtgcatgtagcagtacgattgttatcacacggtgca

SEQ ID NO: 2032 - DNA, 443 bp, Zea Mays
tcaacggtgaaggtgaagatcacgcgggtcatgccgaggggctgagagcggcaaaagacgagtgttggaccttgatcgagggactagagaagttggggtgactagccatgatggctgacagttgggacacacactagagcgaggacatgtcacaacggatcatgtcaccaacacggtcaaggactgatgggacacgtgtctaggacgtgggggacgcgtatggagtatgctactcatagaggtttcggtggtgagcctcaaaaccacccatcaccccggatcgatgattttgtcgagtttgggcctccaaactcaacagtgtggttctggtgagaatcggaggtgacacgtggcgtcatcgtgaagagtgtgtcaaggcgaagcaactttgtgaagaaagcatgtgaccgttagatgaaaactcaagagttggtccattttgc

SEQ ID NO: 2033 - DNA, 328 bp, Zea Mays
cacatttagaatataattcaattgactaagtcccagaagattacctctttttatatcttctcccagcttttctgtttcacctcaaacagagctccaaatgacacgtttctacaaacatggttagagagcaaaaccaaagtgccatatgcgtagtagaaggtgtatgcaacatatttgaacactcaaacctgcatacttaaccttcttcacggttttgcttcttttagcctgtttgaggtcgatgttggactccaaaactccaagtctctaagacttgatctaggttgccatctatgagctccaacaccctgcaaaggtcacacagaac

SEQ ID NO: 2034 - DNA, 681 bp, Zea Mays
ccgcttcatcataattaccttcttcatcaaacaccgcatcatcgggaagacgtggacgaggaggtggtggtggcggtgcttgttgttgcgtctccaacatagcaagtatgtcgatgatctgggacaatcgtcgatctagcctctcgtaagtcttgccaaggttcatgtcaatgaaggcgtcatgcactgacttgtggaccatctcccccatttgctccttcaggagcttgttgtttgcctccagatcttggcggctaacacattcatcaaagtctgtagggatccttgcttcttcttcgtcgcctgccatcgaaacacaaaaaacaggaaacaaacggtgacagttatccctaataatttcactacatgctcctctcaggtggaacataggaacacactctaatgtatcttaccaagctcttacaagtgtctgacgaaatacaagcaaaggatggtacaatcggaggctggttcgtgatacttaccaagaggtagtgaaaccacgattgcaaggtcaaatctgtattgatcagaagatatagtatgtggagctgtaggcagacacaatatgtatgtgaatgtggaacaaaatcgagtgcagatgagcgaagttcaataaatatccaaagcacaagtcacaattgctggctaagagatgtatccgaggcgtagcacaacaag

SEQ ID NO: 2035 - DNA, 620 bp, Zea Mays
ctcccttactcttcgtgatattcttgtttcgccatccttgattcacaacttggtttccgttcgtcggcttacacgcgacaattccgtttcggttgaatttgacccctttggtttctccatcaaggatctacacagccggatgactctactccgaagtaatagcaccggcgatttgtaccccctgcgctccacatcgtcttcgccacctgatgtctcccttcaggtctccgtcgatcagtggcacgctcgtttgggtcaccctgaccagcctgctctccggcgtctcctcaataacgttgtctttgattataagcccacaaataatcatagttgtgcatcctgtcgcattggcaaacatgttcgtcttccgttttctgaatcaaacacagtctctccctttcctttctgtcttgtgcattgtgatgtgtggacgtcgcctgtgctgagtaattcaggttatcagtactacctcgtgcttctggatgactactctcactatacgtggacatttcccctgcgccgaaagtctgatgtgcttcacacactcgtgtcgtttcatgctttcgcccaggttcagttcggacgctcggtccttgcgttccagactgataatggcaagg

SEQ ID NO: 2036 - DNA, 669 bp, Zea Mays
accttgagttctttgatgcgtttgaaatcttcatcggatagaattttaccagtttcatcagatggttcttcagccttcttggcagttgctaacctcttcagagctcgaaggcttgcatcagcagaatttagctgtccaatataatcatttaacttcctcttctgcgctttagagccactgccttttgacttgtcttcctcttcgctgtcttcattctggtctaaagcttcatcctctgaaccatttatgctttctttcagttcaccgtcgtcaccttcgtcttcatcagatatatcagtacccacatccacatcagagtcatcgtctagttcatcactatcactgttggagtcatcttgatccgtaccatcttcatcatcagatgcgtcatcttcctctttggtatctccatcggcatcatgtttgtttgcaacagatgaaccctccatattttcttctgttccaggaggggcaggtgtcaagtccatctcatcatcggagtgaaaaccatcagactcatcgtccgaactttccccttctgaagaaatattttcatctagcaactcggcaccaggaacgttgctagcaacagtgacttctccaaatgctttgggccgagcctttggatccacaggacggccacgatctttcttgactaacaatgaagga

SEQ ID NO: 2037 - DNA, 443 bp, Zea Mays
cttgccaatgggcatactactaacctctatggatcaaagtgataaaggtatgtttcaagtacttagtcaattgatttaagtgctaatcaggtttgtctaagtgctagggggcatatgaagtcgagccaaaatgagcaaaagaaaattggcacgaaaaggaagaggctaggctggcagcaccggacagtccgataccacccaccggacagtctggtgtctgtccgaccgtactggccatgccagggcggcgacgcgaccaggggaggcgtggaacgacggaggagcaccgacagctggagatctggcgacgggagggtcaccagaggagggaagaagccgacggtggctagggacgacggacggagggggaaatccggcgacagtagatggtagacgccggcgactgggtgtggggtggtggggaagagagagagaaactggct

SEQ ID NO: 2038 - DNA, 681 bp, Zea Mays
ttgtggttgcccagtgtacgagttcattggcatgctataatatggctaggtttgtgactgcccatttgtagccgatgagttctttgtgctagcttagcattattctcatatgatggaaaattagcaacgatagattttcatatgcacatgtcagtttttaaaggattcttccatacccgccatatatgttttgtaattgatctcgctgctcatctacataatacctaagagattggattttgttggttttacatacattggggtgtgtgtagcctgtacaagagatgccatctcaaactccccttaccggacgatcttcttatggcgatcaaccttggaatgcactagatatttttttctttgcctcttcgcgctcttggtcttgcctccgcatcgtctctcttcttgttgtcttatctaatctttgaatcgttgttgatctttgacaggctctcaagagtcggcttcatgatgttgctcggggaaacttcgatgacatatttggaatcggccatttgtggttgattttggtagatctagaacacactttttcccagcggagtcgataaaaagtgtgttggctttgatttggggccaaacactagtatgaaccgcaaggcagtgctctctgtgggagcacagacggtccgtgatcttgtaccggacggtctgtgacctcac

SEQ ID NO: 2039 - DNA, 1515 bp, Zea Mays
gtctggaaaaaaatcctcccagtccgcagtgcagaaaacatgatctaatttcacaagagtaggcacctccctctgatttgaccaagtgaatcttctgccaatcaaaggaatctcttttagctccatagaattgacaaaccccctgaagcgacccatcattagcctattgatgttggaattattcttatcttcctcccggaggatcatattaaaatccccacataaaaaccatggccccacacattcatcacgaaccgatctcaattcatggataaactcctgcttaaaaatatcctggtgaggtccatacacacctgtgaaccaccaggaagaaccagactcatcctgaaactggactgatacagagaaattcttcacaaccgaagccacagagacaaaagacccatcacgccaagcaattagtattcctcctctagtcccctgggcgggactatacacaaaattactgaaaccagtcccaagaatagacaacatgtcaaagtccgagatagcacacaatttggtttcctgtagacaaacaatggaaggcttgatatcaaggaccagagatttaaccgagtccctcctggcacgatcatttagacccctcacattccaaataagaaaacagctattctccattggaaacaaatcagatcgcccccacctgagggacctcccaaccaaacaaagctgccaaagcagccacatgtgcactcgaaagcccggaatcaaataactttgcataagtgcaggcatcttcgagagagatattctccatgtcatcacaaaaacctagatgcctacagacttgtgcagccgcattggatccaagttctggagggaatttggccaccctcctacttctccgtggccgaaaatcacttggcatggtctttttcctgcttttggtccttcggtggggagggggtggtaacaagccatcagaaggcttagtaactgcggacttgaactcctccaaaggtgcctccaaaggtggaaccatttccaccacagattgcagtaaaaggtcttcctggaccacctgagcctgagataatcttcttctggaataaactttaaacacgggtggctttgttctccatctatcagcccgggaagactgacaatactcaaacctccgcaccctggcagagacaacagcaggagaaccaacagccaccaattgggagaacccgaaaccatgctgcccagcagtgactgcctcctccacattagcagaaacaccatcggtcagcaaataggagagcccagaaccatgctgcccatcagtgacagcctctaccaagtcagacataggggcccccaccaaaggattgtccaagcaagacccagccggcgagataacaacatgcgaagaccagtcctcctgacaactgacccccaaatcctcagccagatccaacgctaacactggagggtgaccaggcgcctccagctctgcaaccgaaacttccgggagagccagggcatcaactgatcccaaatctggag

SEQ ID NO: 2040 - DNA, 435 bp, Zea Mays
caggaaggtcgtcctagagaaggttcctctctatgatatggaaggtggttcgcgggtcggcggtaaagtgcactcgctgtggacagaggcgctgaaagatgcaccaggaggttttgggcccacctggtcagggctcatctttggcatcatcatccttgccttcggtggtgcaccccctcattcgcatattcttaggcattcaaggttgctcgaccaatgttcatcgtgcattgatcgtcaatgttcttggccaggagggttctgactgcgccgctgtgattctggaggcgctcgcctcaaagtatggccttgaggctgatgcgctccaaatccgacatgatgcgtccatctcgtacctggctttcttcccatctatggaacacgctgttcgtgccttggctgctggacaatccatttccataccctcccctccag

SEQ ID NO: 2041 - DNA, 606 bp, Zea Mays
ggagaactctgaaggtgcttttgaagaagaaaacacaagagaaaatatagtattcaagaaaaagcatgcatcatttaaaggagatagacagtcgcatcgagtcaggccacgaaagaagctgaaatgtgagtatttcctaccttcagtacaacactaaaattctaatagttatttcttttgagtattatgcattattccacatgtcttgcagccatgaaccatgaagttggtaacttaaccggagctgataatgaagaggggagggacacttgcatggcacatattcagaacaataatatggatacctacacgagagctgataatgaagaggggagggactcttgcagggcacatattcagaacaataatatggatgctgcaaaaaatggtatggtacaaatataatttgacatgttctgcattttccctcttttttgtttgggacacaacttattggtgaaagtatatataaatgtttcagctgatagaactgaagagaaaaggggtcatggcaaaaataaatgtaagaatcttgctaaacttaaaccaggacaaaagattaaactgatgttctacaacaaccgtgctcttggcacatcattcaca

SEQ ID NO: 2042 - DNA, 992 bp, Zea Mays
ggggcaattcgtggctccgtgggagcagcaggacttacagccgcggctttctccggggaaggactcgccgatggagtggtcggcgctgaaacgaagcaatgcagtaaggcgttacactccagtgctgattatggtctgacagcataatgtcacaaacgcataggaagttcagagctactaccagttggaacagctactggaccaagagcaaatgcagattgaggaggactagaagcctgtccttggtttgcaggagaatcagtggcggccggagaaggggacagagtggtgcctagatcgaagtaaagaagacgagttcatggcaaggattgcaattatgtacgctgccccccaccaacaagttttacagtcatcagtatactgtaccgtaccgcagaactggtgcaatgatgatgatgcaatgcaagtacggggcacggaaatgcccgtcacatttatgcagtgtagagcagataaatagacacgcagacatccgaagcagcgttttcagttagaaagtcgcagcaaagggcaaaagccaaggaggagatggagaaacgcccagccaccgacattgcagcttgcccatctctgactggaaattcagaaacataaatcccattccagttgtatcaaatccagagcatcctacgcgcaattgcagtttcgtggaggaaatttctcgatccagaaaccgaattcacaccccccgacaaatcacacgacacagctctcctctcaattgctcaagtgaagctgaggctggagagaaaaaaaaacgaaaagaagacgaggaacggagaaacaaacaaccggccggcctccgcgtcgctacgcctgaagccagtggagcggcgtaccgtacaggacagcacggccccaagaaggcggagcgagatatgtggcgagtaggtggagctgccctgacctgtggatccgagaacgggagcgagaagaagcgcgaggagagcgagatgccgcatcttgcctcc

SEQ ID NO: 2043 - DNA, 568 bp, Zea Mays
cggacggtccgggtacatatccggacagtccgcgcataagtcttttgaggaggattattacctgaatcctcacccgtcccagcaacacttcccatcacactatgcaatgcaccagcccattaattcaagatctagagcccaggaaagctttctggccccgcctagaaggccggaaagaaacgatcaaacctatgagccatatagggcaaatggaaatgcaccacgtagctcaaaccaatgggggcaaagacaacatactaacatccaaccaaccccacctatgtttgaccagagagccggtggtcttgcaccggctgccattgatatagtgagggaagaaatagttggggcgttccgagataagctcggagtaagcatggtccctggggggcaatcatatcggaaaccttatgacaaccgatttgatcaccacccatacccacagggaactaggatacccgaattcgcaaaattttcgggtgatcaaggaaaaaaacacgcgcgaacatataggccagttcttaacacaattgggagaattggccgacacagaggcatttcgcgtacg

SEQ ID NO: 2044 - DNA, 507 bp, Zea Mays
ggcaagggtagaagaggctgactcataatgagtcggcttcgagtttgtattacttcccctattatgaatgaaggatgaagtgactccacttaatcgctgttgtttgcttttcatttgtgcgcttgaaagttcgcccgtgcgcttgaaagtaatggcattttagaggcaatgcccgagtgaggattgcggtctttacttttacgagtcatgatctggcactttagaggtaatgcccgacctaatgagtccacttatacacatgttgacgtgccttcttgagttccaaaccctaactctcgcttttacctctaccacttcttcgctttctgaattcttgagcccgctcgttccgcccaagagattgcgatggcccccaagcggaagagacaaggtgtcgtcgctccgatcattccactcatcgatcccaacagccagcttccattcgctggtaatcacatgtccgtaatttctgaattagacctttttcatcttgtggagactggggtt

SEQ ID NO: 2045 - DNA, 318 bp, Zea Mays
gggtaagcgagtgtgacgcccgagctgacaggcatgaccaagtaaggtagcattactgctaggacaagggatggccgaggtgactgagagtctaaagaggatgtcgtgtctgggtggccgagacaatggtgccaagtggaggcaagggcgcagggtgtggtaacttgggcggaggaaggtgaggcaggaagcgaagatgatataaggccaagattgtttccataggagtcaggccagagtcctttgtagaccaagattgtttccaaaggagtcaggccagagtcctttgtaggccaagattgtttccacaagagtcag

SEQ ID NO: 2046 - DNA, 425 bp, Zea Mays
gaaaccgccgacttacacccatgcagcctcgtacgacgtcatcccgttgagtgccttggtgggcgagcggttgaggatgtagatcgctgccaccaccgcctctccccagaagtcagtcgacattcctatctgcttgaggagagcccaagccatctccacaaccgtctggttgtgccactcgatgatgccgttctgctacaggatgtacggtgcggagtagtggcgttgaatgccctcattcgcgtagtacgacgtgaactcaaccaccgtgaattcgccgccgttgtcggtgcgcagcacgcacaacttgtggccgcacttcgcctccgcagtgacctgcacacgcctgatggcgttcacaacctctcccttgctgccaaggaccatcacccacatgtagcgggagaggtcatcgacgagcaaca

SEQ ID NO: 2047 - DNA, 1121 bp, Zea Mays
gacgactttgtggtcgtgttcctggatgatattctgatttattcaaagaccgaggctgagcatgagcagcatctccgtctcgttctgggtgctctaaggaagaatcagttctatggcaagttgaagaagtgtgccttttggttgtccgaagtggctttcctggggcacgtgcttaatcaacagggcattgcggttgatcccaagaatgttgcggctgtggtggagtggaagagaccctctagtgtctctaaaatccgaagtttcttggggctcgctggatattatcggcgcttcgtaccaaatttctacagcattgctaagcctttgactagactcttggagaagggtgttcccttcgtctggtctggcgattgtgaggtcggttattagacattgaagagcaagttggtggacacccctatcctagctttgcctgagagcggtaagcatttcacagtttatacggatgctttgcgtattggtcttggctgtgtgttgatgcaggaaggcaatgtgattgcttatggctcaaggcagttgaggaagcatgaggggaattacgcaactcatgatcttgaattggccgcggtggtttttgctctaaagtcgtggaggcattacctttatggcgaggcttgtgacatttacaccgatcataaaagtctcaagtatatttttactcagaaggagctgattttgaggcagcgtcggtggctggaattgattaaagattatgatttgtccattcattatcacccgggaaggctaatgtagtggctgatgccctaagcaggtccggggttccaaaggtggccttgccgttgatcattgatctggaccgtttgggaattgctatatgttatgtcggtaccgctagcgaggagactcggatgcttattcaatcctctctcatggagagagtgtgtgcggctcagcagcaggatcgtctattacaggaagctcgaaagagggttggtgatggtaaaccacgtgagttcaccattgatgagaatgatttggttcgtttcagaggccgtctttgtgtgcctcagaaatcagaggtgaagatggatatcttgagagaagctcataaaacgccttacaccgtccatcctggcgaa

SEQ ID NO: 2048 - DNA, 1119 bp, Zea Mays
cccatatagcatccctgccacggggggaacgaggtagacccaccacaaaatccatggtgatatgctcccatttccactctggaatttctaatggcttcaggaaaccagcaggccgcttatgctcggccttcacgcgctgacatacttcataggcggccacatacttagaaacgtcaaccttcatccgcttccaccagaagttttgcttcaaatctcggtacattttggtttcgccaggatggacggtgtaaggcattttatgagcttctctcaagatatccatcttcacctctgatttctgaggcacacaaagacggcccctgaaacgaaccaaatcattctcatcaatggtgaactcccgtggtttaccatcaccaaccctctttcgagcttcctgcaatagacgatcttgctgctgagccgcacgcactctctccatgagagaggattgaataagcatccgagtctcctcgctagcggtaccgacataacacaaagcgattcccaaacggtccagatcagcgatcaacggcaaggccacctttggaaccccggacctgctaagggcatcagccactacattagccttcccagggtgataatgaatggacaaatcataatctttaatcaattctagccaccgacgctgcctcaaattcagctccttctgagtaaaaatatacttgagacttttatgatcggtgtaaatgtcacaagcctcgccataaaggtaatgcctccacgactttagagcaaaaaccactgcggccaattcaagatcatgagttgggtaattcccctcatgcttcctcaactgccttgagccataagcaatcacgctgccttcctgcatcaacacacagccaagaccaatacgcgaagcatccgtataaactatgaaacacttaccgctctcaggcaaagctaggatatgggcatccaccaacttgctcttcaatgtctgataactgacctcacaatcgccggaccagacgaagggaacacccttctctaagagtctagtcaagggcttagcaatgctggagaaatttggtatgaagcgccgataatatccagcgagccccaagaaacttcagatttcagagacactagagggtc

SEQ ID NO: 2049 - DNA, 499 bp, Zea Mays
gtcaatgcaacaaagttgtagagccattgtagaagaacaactttgctacatgtattaagtcttggtgccatgaggaatttggagataatatgatccaaagatgggttgtcaggcgatttgtaactgaaactggcacactgttcatcgaacttcagaaagatctcaccggcgataagaacgccatcgcggatggggatgggtctgcggccacggtaaagatcatccacgacgtggcgttaaaatgttgcggtggcactgcccggttaatcggcggtcaccggaccatcgccgtggctctgcccgcgcgggtgagctcgccagcgcggttacagctccgtgattctcatccaattccggccatcagcctataaattgagctcagatcctgcttcttcaccacatcacgcacacaagcacttgagcaatcgactcaatttcaccagaagaactcacactgtccacaaaaccattccgccctgctcttcgcgctgccatgaag

SEQ ID NO: 2050 - DNA, 430 bp, Zea Mays
tcaaattgagagccaccgcccccggagcctataaattgagtgcaccatcggcttcgttatgtattcaagcagctagcgcacccacccgtacctcagatcctcctctagagagctccaatttcgcatttcccccaactcactcaagaacaccgcccggattgacctcaccgtggtcagcgacctctaggtctgttcatgccccctgttatcttgtttcaacattcttgtgtgccctgatactccccgaccaacccaattgggctggagtccctaggattgccgagaacgcgtgtgaatatccgcgatacccgctgtcaccgtggacagagccggttagatcaccgtttgtgaaattaagtggggagaaacgatccttaggtcttgaatttggtctcggtcaaagtaaggcaccggtctttgcgtgatccag

SEQ ID NO: 2051 - DNA, 417 bp, Zea Mays
gtgtaggtcatttgacgggtgagcgagggggagaaggtggtttgccgcttgggtgatcacctgtcgatagccttctgcatcggggatgcacggtaggccattggcaatctgagccagtacccctccgaccttgcttggtgtatttagtgctcaagcaaagtcagggaataagttctgagtgagaagtggattctcacgttggatcatggtgtcctgctcggcttgtttctgctcgcgctcttgggcgtggcgacgatcacggcggcgggagttgtggcgctctcgaagcactcttccattgggggttcccctgcttcagaagcctcatcccgggagacgggttgacctagatcatgttccccggcttcatggtaacggcgcacattgtggcgcctattctggcgttggcgtgcatcg

SEQ ID NO: 2052 - DNA, 493 bp, Zea Mays
cgtgattcgtgcctagcacgtagtagatatccatggggaggtaaaaagatctcgcgggggcgcggatttggtcgcggcagaagcttatcaccgtgcctatagccgtgcgacgtggccggaccgccggtgtcaccgtggaaactttggtgacctcggttatgccacgtcgtggctcgttactatgcggtagtaaccgtggcacatttaggattaaaatctttgagccgttgcaccggtgaacgccacgactaagccaccagtgttctcacctctctccgaccgccagcgtgccatctcaaattaacgggccaccgcctcgggtcctataaattgagcgtgccatcggctccgctaggtagtcacgcacccaatacaccaacccgtgcctcagatcgtccaccagagctccccaatttgagatttcccccaaatcggtcaagaacaccgcgcgtgtgagctcgtcgtggccagctctcaacaggtccgatcatgc

SEQ ID NO: 2053 - DNA, 581 bp, Zea Mays
tatgcaggagagacactagagtatgagacatacttagcaatgtcatgttcataacaataacgagaaggaggtttcccaacatttactctaggaactcttctttgcgcaagaggtaattattcatgttcaggaatgggagaaatatggattggagggacattaccagctgggtctggagaggagtctgaagagagatatgggactgaagcttcaacacattcaggttgtggttgctccccctgcttcttcatccgctttcgatagtatactataggttgctccccttatttgtcattcacctttaccccaatggaacaatcatgttgctcccctatttctcattcaacttccctgcagtagaacatgggattgacccaacaatcactgcctcatcatcctttgtctcctcctgaatattaatagttggatcaccatgatccccactactttcatcattactcaatatctgtgtagctatccctttctctacttctagtggaatcatacctccaacaatcacccctcctgaagctccactagcctcatcaccactagcctcatcactaccttgaccactgtca

SEQ ID NO: 2054 - DNA, 528 bp, Zea Mays
aaaggattgggtgcttgctgttgttggggtggcctgatctcccatctgcctgattgctgctgaaatcccctgctctggttgctttaaacaatctggaacctttggggttgcatcgaagatctagtcattggtgcatttttctccttttcggctcggtgagccagaatacaatccctcttgagagatggctaggttgaccaactcattgtagctatttgctcgaatagtgttgagacgttcccaaagtcgtgttgagccctctctagaatctatcccttttcttttcatctgagttggcgtggtatccggcgtactagcataggtcgttgaaagcttaggcatactgcagcaccgagcgggttcattgagtcaatgcgaggagctcgttcagcttgcggtccatgaagtctgctaggatatgatgtcccctgatggctgccttgaattcatcccaagtcaatacatggtgagcgagaagcatggcgaggaagtggtcccaccatgtctttgcgggtccatggagttgtt

SEQ ID NO: 2055 - DNA, 541 bp, Zea Mays
ttcgacttttcttggcaccactccgtccaaaggccagatttgtccaccgttagttatgtacctgaaacacattaattcacgccgaagcaaaggcattctgaggaccttcggtagagtaggcctccaataattggtttccaggtcttcgcgcaaatagtctagcgttactcagtctaccatagaggctaagtatgtcgctgccgctagcttttgctcacatttgttatggatgatgtctactttacgggattttggcttggattttcatcaggtgcctctgctttgtgatagcacgagtgccataagtgttgccaagaatcatgtgccacattcgaggaccaagcacattgatgttcgctttcactttcttcataccattttgagaaaggcgacatcgatttgtgccaagttgatacccatcgtgagctgactgacattttcaccaaaacccttgatcagtctacttttgcacatttgtgaggggaattgggtgtttgcttcttttttgatcgagggctcccgtttggttttttctctcttc

SEQ ID NO: 2056 - DNA, 594 bp, Zea Mays
cgcggtgagggtgttcttgcggtgtttttgagcagattgggggaagttcaaaattcgagctctcggttgtaagattggaggcaatactgggtggtgtggtgcgtgatcaacctacggagcccatggtggcttcaatttatagggatcgaccgcgagcacaacgaatttgagcggcggatcgtgatcggtaagaacaaggtgagtcactggtggccgctcaacgtggcctttaccgtggcggtgcctccggcaaccaccgtatatgcatagcgcatttagtcgcgacgtggtaaagtgcccggacacgaggcgcacgacggtgatcgactaacggtggcgagctcatccgattccacagtggcgtgtgcggtacagtggccggatttgtttactggacggagttatccacggcgatgatatttgtgtgaccccaagtgctatccaaacaatccgagcacgaatcacaacggcagaagcgcgaatccgtgcgtggcggtcgtcggcggtgaggttcactgaacatgatctgatcggctactgtaccatgggattcctcattcggttggcctgacaacaatttgaagcttgattttc

SEQ ID NO: 2057 - DNA, 526 bp, Zea Mays
ggacctcaaccaaaggaaagtcgagtcacaactaaagccaaggtttcgcgatccagcaggatgtggatcagggccccatagcaataccccccgccaagagtgtggccagcaactccaagtccataatatcgcaaaccaacaacaaccagcgaaggccacccccagtgccaaaactacccttcacaacaaggccgcaccggcaacgcaccaagaggcagaggtagaggcccctagcagcaaaggaagttttactgcatcttccatgatgaagactcagagcacccaaccaaagattgctcggaaacaaaggaaaccaaagatcggatggccagagccgctccggcaaacaacgagagagccatcgctcacacctaccaaccaccccctccacaaccacacccataccaccgctcgcactatcaaaacgaacacccacactacccctagcaccaacagaactacaatgatgctttcccccagcggccacacctacaacaccaagaaagactagccctaccaccccctc

SEQ ID NO: 2058 - DNA, 508 bp, Zea Mays
gaaacttctgagaataactgggggaattctgctctgagttcatcttctctttcccaagtggcctcatcttccgaatgatgactccactgaactttgcacatgttaataactttactccgtgtaattctgcgagatgtttccaaaattctgatcgggtactccgaataagtcaaatcctcattaacattcagttcttccatgggtaattgttcttccggtactcttaagcacttcttaagttgtgatacatgaaatacgtcatgcacatccgataaactatcgggtagctctaactggtaggctacttcaccttttctttccaaaatcttgaatgggccgatatagcgaggtgatagttttcccttaaccttaaaccttttcattcctctcatcggtgaaactttaaggtatacgaagtctcctacttcgaacatcaactctcttcttctattatcagcatagcttttctgtcttgactgtgctgtcttcaaattttctctaataatct

SEQ ID NO: 2059 - DNA, 591 bp, Zea Mays
gccactaatccatggctattcctcgtcggagtacgggcgcagtcgcgaatccgcctcgcgccatgaaccgtgcggtcgtcgccataatcagaggtatgaatgtcgcttacgcattcgcctgggtcgcctctaggggtaggacagtttcgggtcaggtaattgtcaggggaagtgcgcattgaccgggtgccggtgaacttccgccacagggcgtggcggcgccgccgtcctggccagtcatgtggagaagatgtcggagcaccgtccgatcatgcaccagtggctgcgattagaagcttaaacaccggttcgggagattgaaatcgggctattgatcgacaatccaagggtttaatcaatctcgctgcgtggcacgttctctagcgtggatccttgatccaacggcttctgtggcgtaccgattcgatgtagaagaaacctaatccgagcgcttgattggtaatctgatggctcgcgattgtccataccccttcgccatggctatttttctaaagagccccttcacttttatacaatcaacccgccatccatatagggttaatctgagtctggggtatttttgtacgtctg

SEQ ID NO: 2060 - DNA, 533 bp, Zea Mays
ttcctccactggcatgttgctctctcagcgccagtacacgcttgagatattggagcgcgctggcatgacacattgcaagtcctgtgccacccctgttgacacgcaatccaagctgccttcgtctggcgatcctgtgaccgatcctaccctctaccgcagcttggttggtgccttgcagtacctaacattcactcgtcccgacatcacctacgtcgttcaacaagtccgccttcacatgcatgacccttgggaaccgcatctcactgctgtgaagcgcatacttcgctatcttcaggggacttctgattttgggctcttcattgatcgtgcctcttcgccgaccactctcacagtctacacggatgctgactgggccggttgccctgacactcgtcgttctacctccggttatgctgcctttcttggcaccacccttgtctcttggaacagcaagcgccagcagactgtgtcacgttccagtgccgaagctgaatactgtgctgttgctaacggtgtggcagaggcctcttggc

SEQ ID NO: 2061 - DNA, 462 bp, Zea Mays
gaattctcatcttttgcaaatttaaaactcaaagagcagtacacttaacccaacacccccttcctggttacgccatgtggcacaccttgaaccccccgtacatggagccacagctaggagggacgaccacgatagtaagcgcacctcttaggtcctagtgtgtcggctaccaaggtgacccctagtaggttcctgcaatgacacatttctggcacgcccaatgggaccactatgccaacctccacattggccctagatcagtgatcgatgtcgacacatctccgaccttcataaactctacaccaccaccatgacacgcttgggaaaagagaaggtcatcatctaggacgaagaatagtacccaccaggcaaggatgcacctccatagctcggtgacttcagccccaaagatgtgatactgttacaactaaaaagttgctcgcttgcttcacctggacatgc

SEQ ID NO: 2062 - DNA, 419 bp, Zea Mays
tggtacagtagtctgacaaagatagtcaaatacatcgcacctcgccgccggtgatccttgcgcgtggattcgcatcggccgtcacgattcgtgctcggtgcaaagtggataaccacgagggagtaaaagatctggcagggagatggattgggtcgcgagcagtagtttatcagaggggcttggggcagtgcgacgtggccgaacgaccgtggttgtcagaggtcgccggtgagctcgactgcgccacgccgtggtcctttaccacgtagtcgtaaccgttgcatgctcagaattactctcctcgcatctgtaggccgtcgagcgccgcggcatgcttgccagtgcaatgtcttgtcaccaccgccctccaaatcccttccaaattcggagtaaccgtggccaacctcccttgcttcgcc

SEQ ID NO: 2063 - DNA, 599 bp, Zea Mays
cggcgcgctcaccgcggtggagcgtcatgactggaggacccactccaacccacggtgcctgatccgcacggcaacctgacgccacacgacgagtagtaccaagtgatggacgcgaaggtgttaatacaagctgtcgaccccgacgaaggctccaaaagcagaggatggtggggtaggggagcaacctaagtccggcgatggttaccagccataccatggcgaagcttagcgcaagaaagtgccacatgtaaatgagaggtaaggcgggctagcttgagggtctctcacctcaaattaggcgacagagcgctgcaccagtggtagcagcgtttcacggtggcctcaatctcgcccacgcacctttccccccactatggtgatggctaccttggagttctgccctggcgtgcgcacgaagatagggaagatggcccgggtgaccccgccgcgtggatatatagcggagcgaacctcccccagtcgaccgatttcattggtggtgattgtaacaaccaagtcgcggtgaggaagagaaatcaacgactggtaagcgactcctctactgtcagtgccacagcgcgcggtcaagtggatgctgg

SEQ ID NO: 2064 - DNA, 735 bp, Zea Mays
cttttccctattttctcgaattacaggactgcgcgcagcatttcagagaaatgcagggtctaattcgaaagactcccaaggctcaggctacagctagggtggactgcgggttcaatatcataaacctgagggtctctcacgtaaaaagcctggccgaaggggtaccgcgcaacctgaaccgtctgatgtactacaacggccttgatttaaaacatctagttctaatctcactcgtccaacaccagatcagcgtctcaaattgcttcttccttctcccggcggtcagccatggtggctcgcgcagtacacagcagaggccattgccggcacacgcccatccggtatgctagcatccaaacttaagcgcgactcgatgaaaatgaaacaggaggggcaaactcggaaaggctatcataccggtagtagggacggaccccggtgctggtgccagcgtttgtccatagcttcgcgtggtcgcgaatacgaccgaggcttcgacaacgatcttcccagttatctagccgtcgtagctccatgcaatcctctggtgcatgcacgacttgatctgagggacctcctagctacactccgaggttaaccaatggcatagacaccacaacgcttcctcggtgacaaactctatttctttctctacctgctatatatctgttaattcgcgcagaccataagtatgatgtccaacgcgaggtcacggtggtgaataaatatacccag

SEQ ID NO: 2065 - DNA, 369 bp, Zea Mays
tcacaatgttgattgacatgctcgagcgtcagcattccgcacaccatgtcatccttggacatgcgttgcaggtagttgaaagagatgtggttgagtggatcatgacaccactaggagacaacattaacgtggtgggcggcaaggcacatcgagcgcgtggtgttgtggcgcagaatgtagaggcgatgttaccgtgttgcaccttgttgaggagcattgttgcggacccccaaatatggagctcgtcgtcattgatgtgccgaggctaatgatgcagttgcgcagggggagatgaagaagacctgtgtcgaggtaccatcattcaagacgcttgacatcgtcctctgttgctacaaggaacacttgtgt

SEQ ID NO: 2066 - DNA, 458 bp, Zea Mays
tcttcacagcttgtgttatggtacttctgatcctcctcggcgccctcacgacggagttgctccagctacagcccacgtcgtggctttgttccgaccgcccttctcagatgggtcgcgacgttctctggcagatttcactccagcggccaagtacctatttcagctcatgagacggacgctactgcctcggatgggtaatagagaggctaccactcatatctagctctggctacttggagccctgatctcgcattccgagtttgatgttgttgacttccttatatgtgagatcgaggacacggtattggatggtcttcgtgcccggcaacagctgccatatgctcactatctctgctacatcttcgcgcagctgatccagccaccatagttctagggcactcttgaggcctcaagcctccattttggctccgatcgtccagcccctgaggacccagcac

SEQ ID NO: 2067 - DNA, 879 bp, Zea Mays
ttattttttgcactcaactaatttataagtttgaatcgtatttagataactattttatttaagcaatgtctagtgatacactagcgaaaataaacagtcgagtgttcgacgtagggccggcactccaaaagcgtactcaactatccggcaccacaagctccattgcttacgaacccttccttcagttccagtcctttacctttttccctcggagctctctgactctctgagattttttttttgtcttcatttcaaattttgtggtttcctcccacattcccttcccccgctcccctccaggctccagccgctcgcttcgattcgcttcagctctgccttcccgtctcatggccacctaccagcccacgcccggtgacgccttcccagcccgctgctgactgcaccgattcacccacagttggccttcaggcaaccctagcgtcgccgatccgccgctccggcgagatgccggtgggccacatcgccgtctctcccgccgccgtctatggagaacagggatagcttcactcgccccccagcgccctcctacgcccacggaacccaaaccgctaagggcgtcgcggtccctaccggcggggacacggccgccaccaacctgacgtcgtcgtcagggttgtcctcgtctctcacgctctcccctccccacttcctgcaacagattcatgcagctgtcaagcggcagaggcctttcggtgagtggattcggctatggattcctacccttctctgatgttgtttccgtctagggttctagtttatgtttggcgcttatcctcggcgaatctaattatgttgatgcattttaccttctgtatatttctgatttactgggtagcgtataaaaaaatgtgatggttg

SEQ ID NO: 2068 - DNA, 562 bp, Zea Mays
atagttttgtgggtgtgtggccaagtgcccaagtgtatgcccaacattctcatgaaaattgggcctcatccttttcgtgtataatatagcgctttgaaattggagacagtcaaccgtgcttgcaattccagattttgcctactcacgcagaagttagtatcaatttatcgtagccgtaagtagctacaccagacatcattcaaataaatcagagttccaaagtgggggcagagatatgcctatacgatgtttcttcaaagaagggtgctgtctgtcagttgtcacttaccatgcgaggctgtatattctacagtctgttctgatgtccgtgctgtttcttcttatcaggttcctggatttcggcctgggaagaccattccagaaaacgttcttataaactaagtaggaccgcaacatgtacaggatgccacgattgagctatcttaaaacatacgcttcctcaagcactgtcctcgttaataaactcttagtcctatttagggatgcatctctgacgtctatcatgataagctgttggtttcaacgcgctcatggaaaccaa

SEQ ID NO: 2069 - DNA, 348 bp, Zea Mays
cggagggttgccggggaggaccgtcttgactgcccgagcgtggggagggcaccatcttccactgcggggcatcgactccgtgtgaattgctcgccggagcaatactcggccgcggatttgcagctcgccgtggaccgttcccaccactacacccttgccggtaagactacctccttgtcacccgccttgcccttctcaatgtgtagcaccgttctaatcgggggtttgggtgttgcgcaatgagatggccgtctccggccatggccgtcgccgtggggcaaggctccgttgctcggcgcggtgggtaaggtgccgatgcacgaccgtcgttggatcgatcaccggcgg

SEQ ID NO: 2070 - DNA, 603 bp, Zea Mays
gtttttcttcatgattaatgatctcaagttgtccatgattttcctgcgaagcaactgctttctgcagctaaaacttcttaccaacttaccatctttctagcaggagctaaacaaagcaaagaaaggtcctcctcttgggagttcattaaaactctatctccaggcatgctcttatacagatgatcacacattatctacaaatgctatcatttgctctcacctctcagtcttagctatttttttccttctctttaaggtaacacatcaaacccaaaggttctgctaacacatattccactataccgacctgataactctccttgtggcccgcatcgttcttcacctgttataaatcaggtattctattgtcaccaaaaagcttgtttattctgtgaatctgtgttaaacgtaattcgtcaaacttgcatgtttttttgccagaattattattttttcatatgtaccatcattcctccactttatttgtttacaatattctacaagttctgacataaacaagtcagtcaaccacatgaataatttgctaattgtttttgttctgttccagagggtatcttatgccgccttagaccaaggaatcac

SEQ ID NO: 2071 - DNA, 341 bp, Zea Mays
cgccgacaggcgaagcctggggataaaaccccgcattacctcccagaccgcgcatcctgaagccctacgtctcctccagacctaccgttccgctccctcatcgcgatattcacgcatcaaagagacaccgccaccgcctccgagaggaagaagacgtgccacgggggacctctggtctggtcgtcatctacatcgtcggtgtggtcagagacctccctcaggctcagggaaagacattagtggccgcgctactcgtgattgatcgccagctccgccccaatttcttgccgtcgatcgcgcgccgccctgattccgcaccgcgccgttgctggaagtttctg

SEQ ID NO: 2072 - DNA, 548 bp, Zea Mays
gtcatcatcatcatcgtcatcgtcaggcgtctccggcgacgactccctcgggagcccatcccttgcctgcctccgacgacacttctccaaggcttcccgagctagcatcctcttgcgagcttgggcctttttcgtgtccttcttctccttctccttctctgtggcaagcctccgcatggctcggtccgtcgcgtcctccaggaccggtggccggacgggtctataaatcctcaacccctggggacgaacaaaaatcccaacagtaagaatcaaaggcatagagaactcggcgcaaaacggaaggaggatcagacacttaccagagacacatacccacggtcgggacgcatcgcgagctggctaagggcgccggcatgcagcctccctaccgtatttgttacccgcttgaggaggtcctcggcggaaagggaggtcgaggacatccgcgagtcctccgaatcgacccccggcctcatctccgcgagcagcaaccgccgctcgaccaaagggagcaccctccgacgatggatagcggcgacgacccccgc

SEQ ID NO: 2073 - DNA, 487 bp, Zea Mays
gctcgacagctgctagtcgagctgtgtccgactccgatttctcgatgttcgatctatgtccaaaaattaatccgactccgtactctcaaacggaatgctcaatatgtcgtcctctgattaattctcactcgactcagccaaatatctcatgtccgaaccgaattcaaaatctcgtatcgacaacgattttaaaatgccacgattcaccttttccgactaaaaatccgaaagccgatcaaatctcaggacggtttattttcgatttacgcgtagggaattatcttcaagcgaaatctaattagactctcggccgaattaattgctcaatcgtccgttcgccgaaatcaatttcgctctgttctgtgtacagacaaattccgcgggaacatttattccggaaaaataatttagcgcgacccgagtacgtgttttgggccaagcccattccagcccggcccatttggcccactaaggaaaaccctaaccc

SEQ ID NO: 2074 - DNA, 478 bp, Zea Mays
caatccttgtcaaatccagtgaatccaagtggttaaatgtgtccctagtactctattgaatactcctgcaggttcctagctctttcggaagggtttcaccacctgaaatggccgtttcaccgaaaacctaatactccgcacgccacgtgctcggcgaaatgcccaaaccagccaaagttgctccgattgaacgcaaattttttaggcaccttcacaatacctccagtaacatattcaccaaatttcacgccaatccgatatcctaggcttcaattttacacaattccccatttctagcgatcgtttccgagccgagtgcccaaattccattttcttcgcctaaaatcaaatcaagcgcacacttcgctcatatttacccatataaacctattcgtgaagtatcagctcaattccacgtcatttcatgcctccttttccatttcaaacctcctatggtgctatttctcgttcaaacgcc

SEQ ID NO: 2075 - DNA, 779 bp, Zea Mays
agattctggaaggaatgtccgtcgacgaacagaagaggaggatgaagaaggtggcatcggcagttctgatgtatgtcttcttctaggactaataatttgttgtatattaaagtatggaattatggtttgtcaactactttactactatctccactctaaataggtacttctaggtttgttttgggtaaaaaaccccgatatgttaacttttaaccaagtttgtacaaaaataattaacatatatgacaccaaattgaaggacagacctggtagagtggcgagaagcctttccactgagccgtcctgggttcgacgcaccctctctacaaaatacagggggtaaggcttgtctcggttatttttgccctggaccccactcatgtgggagccaccataactgggtctgtcctttttatatatgacaccaaatcagtacattccgaacatatatttcataattgatcaaataataccagtttagtgcttaaatgttgctattttgttctaaaaatttggtcaaatctaacatagttcgaattaggacaaacctcgaagtatctatatggagggagtattatttattgttgaatctggtttatttgatgccttgtaggaagagaaagaaatgattagagatcagcaggaaaaggctcagctagaaagaaacatgagagaaagagatgcagctaacacaaggaaggtaattatccaattagctgatacttcttgacttgcgtctatttcatttggagaacaaatagattatagttgtagagttg

SEQ ID NO: 2076 - DNA, 684 bp, Zea Mays
gaaaagaaaatagaaaagaaaaaggagaatagaaaataaaacagaaaagaactaaaaatggagaagtaacctcctgggcagattttcctgcatgagtccattttcccctttcctctgttgaccctagttccccatatcgtcccataacctcatgcacgcaccgtcagcccaaccccgctccctggtcacgctgatgggcgggccccagtggtcggcctccgttcttcagcctcacactcacgcaccatgcatgacgcgcgggccccgtcctgtagatccctccgtcctctaccgtgtgggccatggcgtcagctcctccatctatctcggtcacaaactcgcaatagatccgtgccgagccaactgaacccaccgaatccaccgcgggagatctcaggttgagcaccggtcgggaccgtggctcttcggaccataaataccaaccctcggggcctccccctcgtctcatccgcctgcgcacacaaccagtgcatagcaccttaatccaccatcggcgccagctcagagagaagctgggagccgccaccgtagattcgcgcccccgtcgtcgcttttggctcgactcatggtcgaagatcttcgtcttggtgctctggtgctcgtggctccctcgaccagctcaattgattgatagggagggaggaattcttcgcaggagcccat

SEQ ID NO: 2077 - DNA, 700 bp, Zea Mays
ccgcgatacccctccccttgctcaccgcccgtggataaagctgctcaccgtcgttaagccttcgccgttgcccgccgcgtggctccgcctttacaccacgtcgccgtgactctctcggactgtcccatcgttgccggtgaggttgccacgacattagccacggattcacgtaagccagtgccttcttctacctccgaccgccgcgcgtccttctccaaattcctggccaccgtcgatgccctctataaattgatggcgcgggcagctacgctacctcatcgtgaaaccagagcccccactcccaccctcaatcgtcctccaaagctcaccaatttcaaacttcccccaaatcagccgaagaacaccgtgaaactaagttcaccgtggtcagccctccacaggtcagcccctgtcccctgcttcctcgtttgagtactctcatggctctgtgatgcttaccgaaccctcaatttgcatggagtagccttagatcgccgggaacaccttcatctgtccgccatgctctcggtcaccgtggccagagctcattagttggtcattcgtgcaattaagttaggggaaacgttctccaggtagtgaatttggtttaggccgaggctgagcacccgtcttggcctccttcggccggtctacatgctcgccggagcgcggccgtgctccacgccgtcgtggacttccc

SEQ ID NO: 2078 - DNA, 588 bp, Zea Mays
ggggggaaataggcggctgcaagggtccgagtcgtttgatctaaatcggatggagaggatcggacccaggggaaacaggcgggtgcggggttccgagacgttcgatctgaatcgaacggagcggatcggacccggggaaatcagacggttgcgggcggcgccactcctctctgcggcggtgaggtcaccggagttgaggttggcgcgagctagggtggcttcggggtcaccggagatgggcagagagggagagggcaccacggcaaactcaatggcggggaagaggccatgaatccacgggcagagaggggagaacggcggtgagaaggtctcgggcgggtcggagaaactccggtgagccattccggcaacggggaggggacttaaggcgcgctaaggccttggctaacttcagcagaggcaggggtgacacagggacctactccggggaactagaccgggctaaaccggttggccaccgcgcgagcatggcggaccgccgcagccgagtaccggcgaaggcaaaattggccgagcacagggcgcaataagggaaattgggcacggggacgggtgtctcacctcggg

SEQ ID NO: 2079 - DNA, 1110 bp, Zea Mays
ggaatcttgcatactcttatttttatatgtgcttacctttatatctcaatatatgtttaagacatttcagttaacgtgcccttgaccacccttgtttcttaatgatccatgagcggtcattctactttgcatatccttggtgatctcgttgtctccttgtaactccactcggtaatgaatctttacttcaacccttctgttggaaccttacctatcttacccttgattgttttatccactttgtcgtttcgcgagtcttgccttaactatatactttgttatgcttttaattattatcatatgcacccttgacacctctatatcatacattaatgtttgtctcatacctgccctttaagatcgcccctctttcatctcataccttctttctcttggtcgtatcctcttctttggctcgcgagtttgtaacctcatcctttgttatgcttttgtttcttattgcctttacccttctcatctctcaatcttaccttggcgattacgctatgttcgttatctaaaacctccaatctcccaccttagtttaagcatggtctcttacttatctcacccgtggttatatcctatactttacctcttgcaagacttatcttatctctattctttattgtacctagattcctggttttttatgcacatttacctcttcctttatatccttgcctattatcacctttgacccttgacctctctccatatttaccatgatgtttacctatttttcttagcctcacttattcccatttcaatccaagagtgttgttttccctatcctgctcttgttcgtttcctttccctttgtcgctttgcagccttgcctcaccttaacttcatccttggttgagcttttgtttgatatcatccttacctttgtaatctgtagatcttgccttgatacttatcttaggtctgcttgttgaaatcccctcttttcgatctcaatacgagagctatgttttagttatctcacccttggctatatcctcttctttactgcgtaagccttgacatacctccattctttgttgtacttataccactggctcttctgtgctttcgtcttttcccttatgcccttgtctattatcg

SEQ ID NO: 2080 - DNA, 411 bp, Zea Mays
tcgccgttgatcgccagctaagaccggcgatggttatcaccatggccgcgggtgtgactcaccgcggctataaattcaccacatccttgctcccttcgctcaaatcaaccgagctccaacctccgtctccaaattgcgaagctatagcaaccactcccatccccgattagccccccagccggagaatcgctgttttcccccaaatcggtctgccgcaccgcaagaaccgagctcgtcgtggccaacaccgttcaggtcagctcatgtcgccttctccctcgtttgagtgctctcatatacccgtgatgcccatcgacccactcaattgcaccgagtagccttagatcaccgggaacgcactcatctgtccgcaacatcctcggttaccgtggctagagcaagccatgtggt

SEQ ID NO: 2081 - DNA, 554 bp, Zea Mays
cgccggagcgtaataccctactccactgtgtcttgtattgaatctgtgagcttgagagcttgtatgaacttgtgagtctgagagtctgagttgggtctgccttgtaacgtcgtgtgcccttccttttatagctcaagggggcatgtacaaggatgctgagccccgacatgtgggcccaggagcaaaacgaagggaatacattatagaagtaactaatgcgagtatgcctgagcaatctcctggcgccatgatatccgtagtccatgcagtattgatatgttgcggttgcttccttggtaacgcgcgagtgatgatgaacatagtgcacgcagcagtatggatgtacgacctgccaatggaatagataggcacgccgccgcctgccagcggaatggacagggctcaataaatgccaaggcggcacatcgcctgccagtggaatggacagggctcattaaatgcggatgcgacacatcgcctgccagtggaatggacaggcggcgcgccttatcggcaatacgataaggtccagacacgtgtcggctccggacccc

SEQ ID NO: 2082 - DNA, 662 bp, Zea Mays
ctttcatggagctttgacaaggaaaaagtacatcaatggctgttcagtcagcttgaagaaggttcagaggtgcatgttgctgctgcgcttgtatagttgcaggttgtgtgaataacttggctctgccaatcttcccaacacttataaaatcttaccgatgaactaagttgatggcatatgccgtatgtaaggaccacagaccgatctagtattaagtgttgagggatcggtacgttgccacagtttttcactttaggtttttgacctgatgatagggttaaagctgttgcctgtttccattgaaaccatcttgggacttgagacccttatctggagacaaaattactgccttttttcagtgtagttgctgccactgcttcagcactatccatatgcgccaactcccaagcacgtacttgatgctttgtcttgtgtacgcagaatcagattgggcatctccacagcagcatccaggccagcaacaaacatgtaccaccccttctgcagatgtccaatgcaatcccttctctctcgtttgggaacgtagctgctgcacttgactcgcggatggatgagtcagaccagacaggaaattctggcgtctcagattctcttcccaatccttcacggcaaaacatgcgctcgaatcatttggttcagtc

SEQ ID NO: 2083 - DNA, 420 bp, Zea Mays
gtatttggggtattctttgggctgtataaagtttataacatgcttccggtatatagaggttgatgctaattcttagataacaaaattatagttgggaggcttagctggtagcatgctttttgtatgttgcacttgcacccgcccacaattctttctctcccctcttctttttgaacgatacacttgtacccgtccacaattctctctctcacctgcttctcttcatgcttcttttttggatctatcatttagcgcaagcgaacatctttaagggaaagtattattgcttatatctcttttttctaaacttctttagtgctttcctttgagtttgagtcctgcttgttgaaccacacaagatgagtaaactatgagccagcacatgttcaggaaactaatctccatcaacaacttcctctt

SEQ ID NO: 2084 - DNA, 395 bp, Zea Mays
tacgccggacctttgctgagataggcacgctagggcagctaaacaggcgcttagacatgggcagaagcgatcctccacgtgtttgacctcagctgagcacgctctgaccgtgccacgcacgccacgagctccgatcggctcaatcgtgcgctcaaccctgcacccatgcccaagcccttgcctataagaagccccatccctcggccttgccccacccgcacgccccatacccttttaccggcgattgaacgccagtaattgccagtacaccgagcgcggtgtcccccacaagcctgccgacgcgtcgaccaccgtagaccggccactccagcccaaccccatccaatctagctccccaaccagtttccctagaggctagcaaagcttcctagccg

SEQ ID NO: 2085 - DNA, 915 bp, Zea Mays
agaaaaaggtgtttgacaagagcgagaaactcgtaggcaaatggatcggggaactaccatatgtggtctagagcttgcgaacgcagccgaaccgagctttacacgaaaacaccctattcttcatggtatatgggtcggaggcaatattacaagcggacctgatctttggagcacccagattaacgttcgaaaacataactgaggcagaaagcaaccaggctagaggacatcgacatattagaagaagaacggctgaatgtggtcattcagtcggctagataccagcagaccctgaggcgctaccacgacaaagcagtgcggcatcgatcctttgcagcgggcgatttggttctccgccgagtactgacgggagagggacggcacaaactatcaccaccatgggagggacaattcatcgttgcagaggttacccgaccaggatcctaccgcctcactcaaatggatcacaccgaagtggggaatttgtggaatattgagcaccttaggaaattctatacatagcaatgcctcaaaactcttatggacaacttgtactttatatgcaaagggtctcattatcaataaagcttccatgttctaaggcatacaagttcttaatcaacaaatgacctagatcggacacaacttgaaatcggcgcagcatacctacacgacttagggtgatcactattccctactaacgaagcaatcgacttacgtcggaaatgccttaagtaagtgcgacatgctcatgcttacgcgacttagggtgatcactataccctactaactgagcaatcgacttaagtcggaaatgccttaagtcggtgcgacatgctcacgcttacacgacttagggtgatcactataccctactaacggagcaatcggcttaagtcggaaacgccttaagtc

SEQ ID NO: 2086 - DNA, 624 bp, Zea Mays
ctgattctggggaatacgaggcccaccctgattgttttgatggtgagcaatctcatgcaaaaccctagcattatcaacagtggcatttactagggcaacaatggactctgccattgtaggtggaagtggtggcggtggagggttgatatcagcttctgcaccaccacgcgatgtgccagccccatccgacccacgagtactcataggcatctggagtaaaacaaactcataaataaacatccataaccatgaaatatattacataaggcaggtacatggagttttattcattacaataccaaaattgacatagcttaatatcttatgcctacactagagatcacgacaccatacacatgtcacattaaccctctgtctcactagctatctcagaagcatcactacctcctggagactcaccacctggtataagcataggagcggctccttctactaagcatgcgtcaggctcacctccatcagctagcaccacaccacgttctgcttctgtggctcctggcgcatcattggggtgtagctgataataaagttggtgaacttcttcatgcaactcattagagtaatcctcgagatcattataggctagaaccaaatcctgaaaac

SEQ ID NO: 2087 - DNA, 522 bp, Zea Mays
aaaaataatctcgtcctcgagattttaagaagaactaaggaaaagatgggggaagtctatacgaagctcttcttctcgttcccaagtagcttcatcctcaccatggtgactctattgtaccttgcacatcttaatcaccttattccttgtaactcgagtcaaggtgtccaaaatcttgatagggtactcagcataggtcaggtcatcttgcacactgaggtcctctagtggtagctgctcctcaggtaccctgaggcacttctttagctgagacacatgaaatacatcatgtacatctgacagatgatcgggtaacttcagttgatatgcaacttctcccactcgctttaagatcaagaaaggtccaatgaagcgaggggacaactttcctttaactttaaatctcctcataccccggagtggtgacaccttcaaatagacatgatcaccctccttaaactccagtagtctccttctattatcagcatagctcttttgcctggattgtgccattctcaaatt

SEQ ID NO: 2088 - DNA, 457 bp, Zea Mays
ggaacctcttgccttgatcctagaggcaccgacacatcggctcctagggcaccctgctcatcggccacagaggcacctcttgccttggtccttaggcaccttgcgcgctggctcctagagacacgaggtgccttgcatggacaccccgcacatcgccccaagaggcacctcttgcctcggccctctaggcacctcctacactgtccctggggcacctcttgcactagcccttaaggcacctctctcattgacccctagggcacatcagacatcgaccttggggcacctcttgctctgaccttggggcactttgcatgccagccttcgggacacctcttacccccgaggcacaccacacaatagccctagggcacctctttcttggccttcggggcaccctgctcatcagcctctagggcacctcttgccccggtctagtccactatcgatggctttc

SEQ ID NO: 2089 - DNA, 351 bp, Zea Mays
tgtagagggaaccgaagccctgccctaaagaagctcttaaaaacaacgatttcatcctcccttggttgcggaaccacctcctccccagcaaaacggacaagcttgctctcggcttccccaaagtagcccaactttttcatcataaccatgtcgtctgctgtcacaatagatttcccaaattcaatgtggctaggtttcattaggctcagaatactattgtccttctcactttcatcttgacttcctccttcatccacaatctgttcagcttcagcattggaggtaccttcagcaatagcctcctctgacgcaacaagacccgatcacctcatcacttctgatattggcgct

SEQ ID NO: 2090 - DNA, 819 bp, Zea Mays
tctgcaaactgcacacgccaaaggggcaagaagcattaacggtcgtccgatcaagcgcggatggctcagattagatcagtcccaccgcgaaccggtacgcaatctcggccctcagatttggatctgacgacatagattttaaatactaagatctaactgcagccactggatatgagatctacggtcaggattgattgcgcgaaggggtaagtagtgatctaatcttacccgctattcctgagatcgatggcttctatcgcgtcgttccccatcacctgcctttcccggcgaacagacacggcggagctctcacatgcggtggcgccatggccggacacggcgaatcggcggcttaccaacctaaacagagcgaaagtacaccgagagaaaggggagagggaggcgaactcgccagagcggtcataccagcctttcatcgcaaggacgagtccgacgacgtgacggtgtgactccctggcccagttcgactccgacgagcaattcaacgctcctgggacgaagacaagcccgggtgactcttgcgtcggcttcaagggatcatggaggtgaacccgcacactcaacgaaggacgagtcgacggcgagcgactctaggcgcgcatcagactgagttctaccatggtggcggcacttttgagttctagggaacgagaggcggtcaagggtttcgggtgacgggaatgtggtctttaagacgtgtaggagcgcgactgtttcgcaactccaaggtccccagagagctcaccgcgtgaggtaggtgcggtccatgcggcgaggatctcgcgggctcggttacga

SEQ ID NO: 2091 - DNA, 448 bp, Zea Mays
ttttgccatttgaatttttcaaaatccctaaatcagcccctaaactaatgcacttgggaaaaattcagaaattcagaaatatgaatttcagcccctttccaaagatcaaccgcgttctctgtttttcaaaacttgaatcaaacaagtccaaatagcaaagtggcgccaaatttcctggaacacaccatgaacaagtttggaaacctctctccaccgtttgacacgatcttgacatggatttacctcgagactcgaccttgtgacactgccaccttagcgacgcaacaactctctgtacacaaccccaaaccgctcgacttccacacataaatgacaaagctctgtcgggagagcaaatcttgtgcagtgatcatgcccaaatacgcaaagatctcaaacctatgagtgtttgaactcgggtagaagcaaagagcaacgtgctcgacgc

SEQ ID NO: 2092 - DNA, 327 bp, Zea Mays
taaggcaccttttttccaccaaaaagatgctaataagtaggaatataaagaattcaaaacaatagatcaccttttaaactaaaaatgatgtttcccagatgtcaagggcattgtattcgcacgagagggtattagagtacaactagtggatgaagacgttattgggctagaaaatgaccttttgtaataccaggtttcctataatcccctctattcaaggcatacctagacggtgtttatgtccactcaagaaaaacaacacacgtcaatatgccacatcatttctcaaaataaaacaatgaccatggaaaatttagccaaattgag

SEQ ID NO: 2093 - DNA, 875 bp, Zea Mays
caaagagcgggtcgacagagggggtgtcacgacggcgttctacagagcaggtgcgtgttccggtgaaaggcttcggccgaacttcaattggtcggtactgagagcaataggaggctacaaacgagctagagcagggagcaattgggaagttactaacccgaagagcgctgagcacggtgaagttcttcatggcggagttaagaacatggagaaaggggatttgtggactgtgtgagttctccggtgaaattgaatcgagtgcttagtcgctgaggtgcgggatgtggtgaagaagcggagtccgggctcaatttatagggccgacggccggaatcggatgaggattgcagatttcagatcgcgctggcgagcttaccgcgcggcagaaccacggtgatggcacggtggctaccgtttaaccggggcttgccacctccccgctttaacgccacgtcgcaaaagtcttttaccgtggccgccgacgacccatcccgagccgcggtggcatccttatcgccagcgaggccttttctgtaattccgatgcacagtgctcagattcagtttaaaacttgtctgacagcccatcttcagatcaaaatttctccaaatttcacatggtaccatgcccaaacacctatagcaaagttgttcctctacaatggctctgcaactttgccatatcgacccagtgcaaactctttaaacttcttgatctacagagctccaaagtttgctttgatcaacggtttttagacttaacaataaggtcacgcaagtggtgttttttgaaaataggcccaaaacctagggtttaagttgcaaacccacatatttgtgaaccaaatgacctaagatgctttaacttcatagttt

SEQ ID NO: 2094 - DNA, 435 bp, Zea Mays
ctgggagtcattaatatcgaaagattcggtcgtgacctccgccttcgctggctatggcgagcttggggggatgaggaacatccgtggctacgccaggacactccctgtgatcgcacagacagatcgttcttttgcacctccacccaggtctcgttgcgcgatggtagaaaagcgaagttgtggcacgacagctggcttgatgggatggccccgaggaaccttgcgccacacctaacatgtcgccaggaaaaataaatcagctgctagtgaactactcagagacagatggataagctcggtgaggaacaaaattacaactacagagattgtggagttcgtctcgctctggactagaatccaggatgtgcacctactgccaggagttcccgacacaattacttggaagtggaccccagatggcgtttttgttagatt

SEQ ID NO: 2095 - DNA, 505 bp, Zea Mays
atgttgatgttccctgatgggtatgcaactaacctgagtaggggtgaacttatctactctacgagtcttagggatgaagagtcatgacttccacatatggattgaatggattcttccggcgatggttcaaggttatatccctgagcttatctggctagcgcttgcaaagttgagctatttcttcgttcatctttgtgcaaaagagttatctcggaccgtgattatagacttggaaagattggcacctgtgttactgtgtaagcttgagaagatatttccacccgacttcttcaatccggtgcagtatttgattcttcatctcccttatcagatatgaatgggggggcgtgcagggacgttggtgctatccaatcgagggatgtctaaatactattagaaagaaatgtagaaataaatgaaaaatcgaggcttccgttgcagaggcatacattctagaggaggtgtcaaacttcacaacaacttactatggtgacaaactgccaag

SEQ ID NO: 2096 - DNA, 331 bp, Zea Mays
ggcagatgccttgtccagagtgggaatggcgatggctatatccacagttacagagttgcaacctgtttggatccaagaggttactaattcctatgtaacggattcacaggctcaacaattgttacaaaagctcgcggtgcatagccccgatgaggcagggttctctttgcatcaaggagttattagaaagcagcaacaaatttggattgggcagaattcagctcttagaactaaagtcatttctgcttttcatgactcagtggttggtgggcattcgggcattaccgctacttatcaaagggttaaacgaatgttttggtggcaagggctg

SEQ ID NO: 2097 - DNA, 461 bp, Zea Mays
gcctgccaaagggataccctcagtagaatctaggtagaggtcatgagtgccacaatcatttgtaggatcacttaatgggatcatattgggggcagattgagcatcaggcacagttggcacgacctcggcaccacgatcatagttttcatctccagggcgagaggcaactaacaaacggcgtaccactacctccatgacttgcttttgtatcttcatagctgatttaacataattatcccactctcgctgacacttaattgggatgataagtctttgcacgttgggtggaggacctacgtttagcaccccatcaacgtcaatgtcatcaacatcatgccaaccaatcttctccttagccgtagcaacaacctcactaaaggaaggtctatcattgaatatcacagccacatgttgcatgtcaacgaactcagcatttccataacgatcttgttcaacgatgc

SEQ ID NO: 2098 - DNA, 561 bp, Zea Mays
ggcgaaggatgttgaagctgttaacaaagaaaagtcacctttggataggattgttggtgtgaaggctgaaccagacctcgattggacttatccggctacgagtaaccatgtatgagcgcaatgacaacaccgacggaggacttcaccccatggtagcgacggagtccttgaccacatccatcggagaagattgagtgaagagtcgtgcgagaagagggctcgcaataaccctcttcatgcgccccgaaggctcgacttctccctcaaacagaggagccaaagccccgacaaagtcaagggtctgaaatactggtgaaggcttcgagaaacattcgtggggtctaggcttcaccccgttgtgtctcaggcccacttgtaagccctttgaggggtagactttaaggtatgtttaggtcgttgtaccatactgcactataatgaccctattacaaggaatattctaggaatgtagcaggtaattcggggtataatggtacttgggaccaccttcccgcccggttacctataaataccccgttatctactgaaagcatctaggcc

SEQ ID NO: 2099 - DNA, 662 bp, Zea Mays
ccaatgtgtgtgaccagtgggggtgttacagttggtatcagaggaataggctgtaggtcctagcaagtggagtaataataaattgacacactacacatgtaggatgggatttctgccttgctattgatatgttatgttattgtatgtgctagtttgacattatctgaagagatgctatgccaatcttatttacttattattctcatccctgtggctgcagctatgccgctcatagggctcgtggtagtccgcaagttcctagtggggactcgatgagtccggcggcaatgttagccgcgatgcaggccatgcagcaggagttggcccttctgaggcaagccattcctgttgcccctacaggtgctgctcagggtgctggtggtggagaagtgcccggcggtgctgtccctgcgggtgttgttccaggtggtggggccgaggtgcctcttccagtcagtggtctttctctgatgcagtggatgggcatgaagttggattcttttgatggcagtggtactccggtcgaggcggcagattggttgacttacgtggaggataagatgaatgttttcgagattgtgtatggagatcgggttcgctttggcacacagctgctgaagggagaggctcaaatttggtggagaggtgtgcaggcagcgcac

SEQ ID NO: 2100 - DNA, 519 bp, Zea Mays
aaggacattgataaagttagaaaagggttcctttggcgttgtcgtaaaaatgtcatgggtggacattgtgttgtggcctggggaagagtgcgcatacctcgcgagcttggagggctgggtattttcagcatcactgagcggggtttggctttaaaaatacgttgggcttggctgcaaaaaactgagccatgtcggccctggtcatccctgtatcttcatatcccaaggaaaatccgagagtttctaaaatggccatgcattctgaggtcagaaatggggcctctaccctcttctggagtgatcgatggctaggagggcaaagggtagtggacattgctcctcatcttctagagaccattcctaagaagttggttaacaaaaggacagttcaggaggtgattagagataatttatggattaatgatattaatgggagtctatcagttggagcccttgcagactttctgcgcctttgggacatggtggcccaagttgatctttgccttgataaagaggaca

SEQ ID NO: 2101 - DNA, 322 bp, Zea Mays
ttttttggctctagtctgtacatgcatgtctgctttagtttgttgaaatccagcccagacttgtagcttgttttattgatgagaatctgatccacatttccctgtaaatttgcaggctttgcatctgtagatcacttctgctattactatctcaggttttgaacttagaagccctagcaactcggtggcaactggtaacaacagcctagaattgtgggttgttggagatgtttgtatttttaattcttgatcacgatgaggacatgtaaaaagttgacaaattagcattgttggtggtaactggtagcagcaactctgtttt

SEQ ID NO: 2102 - DNA, 565 bp, Zea Mays
tggacctgcagacgtctggccacggcgagctcactcacggcggcgcggagaactgaattgggggaaatgagaaattgaggggctctagtggatgatctgaggcaaggactggtgcgttggatgcgtaaatacctagcggaacacacaggggcagcaatttatagagttctacggtggtggcgtccaatttgaaggatttgtggtggctgccggaaagaggagaagtcactggcgcaagtgctattgtggcttttaccggggcagtggcttaggcgatgaacaagctacctagagcggtctattgcgatgtggtaaggcgtcgaggcacatagcctagccggataacggcgaactccgatgatgccagcgcgattaaccatggcgggacacgacggccggtccggccagagaccggattcaccccgcactagatattttcatcacgccccgacgttatctactcttaccgtggcacgaatctcccaggcgggcgcgaattgtggtggcggatcaccggcgtcgagtgcacggcaccggagatctttatggtcactgtaccatggcg

SEQ ID NO: 2103 - DNA, 515 bp, Zea Mays
gattgggccgactttggtcgtagtttgttgtgtgaaaatggtatccattgacgtcatacccagattatttcttgaccctataagcaaagtcgttggctacttgtctcaactcggcactcataaacggatctctttggccctgcaagtattcacaagttagaagacgcttaattgagttcatagacggatatctttgacaaactaagcatgtaccttacatttgaaccaggaaattaaatcgggcactccatttctcgcaccctttctaagaagagtatcatattcctgtggagttgggtcctttgatcgatgctagagttcatgaagaaattgttccatgtatggcgtcacctattcaaggttggtcaatacatatagcatgatatgccgccactcttcatgttgtgtggaaggagcaggtcgtcataataggggagccaagtcaagcctgacttatgtgttcacatatgctgctcaccatatcccacaaaaccaccttctgtattggccacgag

SEQ ID NO: 2104 - DNA, 616 bp, Zea Mays
cgtttgtcgtggcgaagatgaagggggcgcactaccgcggggtggtagcacgctctttgtgcggcggttcgccttcttgaccgttggtcgcggcgaagatgaaggggtgcactaccgcaaggcggtggcatgctccttgtgcgacggttcgccttcttcgcacttgaagacccgcgcaccagctgtatgacttgtgggaccaggcccccgtgtcataggatggataccccagtgtgcattgggggagacttctcgcgacgtttcgaggcgggagcaggggagtctgcctttaaaagggggggttcatccctcgagtagtagccatgccttgcttctctcccactcgcggtgtcctctcgcctccgagctctctgctcccctttgccttcaaggtctctgctttgcgttgccgtagtttgccatggccttgtaagttcatcccgagcgtgcccagactgagtgagtgctcgacatggtataccgcctgcttggatgggatgcgccggtgtttggcggaaggatttgcgccgacaccctccaccctggtgaacttgccgctggagagttcatgccttttgtcctccccagcgggttggtgctgccggtcttgtctttc

SEQ ID NO: 2105 - DNA, 620 bp, Zea Mays
gtgtggtcatggttgggagctcgagttgcgccgctggggaattgtggagatccacattcgctacttcgatcatcgtgagttctctcttgaatctacccctgtttcccctcgttcgtttgcgcccgaattagctcatcggtaggcatttggtcgccggcaatttctcatcggagatcgagggcgccgcagatccgcatcacgccgtgggcaatgatctacactgcgtaaccgccggtaaatcctggatgaccgtgttcgcctttccctcctctgtcgatcacgctatgcatcagcctgcatgcttcgttgtttcgctgggtgggcaatcaccggtgagggcaccgtcgttacccatgtcacgccgccggacggtgaacaaggagagtgggaaaagggggggtgatatcgggaccatccatctggtcatgggtgactcagattaaactctagcgtacctgttcggggccgcgttgtagccatcgaatctagatcgggcggctctgagcgcatagcagttcggtaagtaggaggttcatctgggcccttggtttctaatccggcgtctgagatccatccataccccttcgcggcacattttgcaaaagagcccctgagtaaat

SEQ ID NO: 2106 - DNA, 412 bp, Zea Mays
cgcgtgtacaacaggtggcgggcctcactggcccctatcgtatgcccctttttcgtcatgattcctaatttgacttctcttccccatggtagtgctatctgcctcaccgctcccatgttgtgtgtaaggaaggtgatctctaagaagaggaaggtggcacccgctttcgacatggacgacagggcaatcgtatcactagcaacctttcagtcgccgcctccgtctgaggtcgtcggggtcattgcttcaggtttgttttttccgttcccttcaagcagcccaggcgtgggcatcgaccgaggcggatgaggttcactttcttactcgctgtgggttcataagccacctccaccggcgtccaagctaccttgcacgggtcgctcttctcgccctacgctactatggccttcac

SEQ ID NO: 2107 - DNA, 474 bp, Zea Mays
ccgcccccggagcctataaattgagtgtgtcgtcgggtccgtaaggtagtcaagcacccaatccaccaagtcgtgcctccaattgctcaccaaagctccccaatttcggatttcccctaaattggtccgaaacaccgcgccttgtgacctcgccgtggtcagcgtgctccaggtccgctcatgccccctgctctttcgtttcagtatccttgtgtgtccctgatgctccccgacccagccgattaggctaggaccccttagatcgttgggaacacttcctactgtccactgtgcccgctgtcgccgtggacaggatgatatagagctcaaatccagcaattaagcgaggggaaatggttgttaagggttcaatttggtgtctgccgcacgagagcaccggtagttgagtaatccggtcggtgtaggctcgccggagctcggttctccgccgctccccgtcgtggacctcaggat

SEQ ID NO: 2108 - DNA, 367 bp, Zea Mays
gacggtccgcgtctggtggtcggacggttcgcgtgtgcgctgggtggcagcgttcgccaacacgacacgtggatctcggcccctagagggacagtgtcacggaggagagatcttagggtttgtcttggggtaggcaggccacccaagaggcctctaaacgacatagagaggtgaagattgagacgaagaaggctacgttactagatactcctaaggcaataaagtaaaaaagaattgataaatggattggtttgttcgattgatggtgtatacgaccagtgtgcagagacctatcgatgagctagtagcttgcgttattcctcttcaagatgttgaaatcccagtgggtatcgcgctacaactgagt

SEQ ID NO: 2109 - DNA, 531 bp, Zea Mays
gacaatacaaagttgcactagacaaaaaggaacaatgaggcagacacgttgagggatatacctagcacaattatgatagtatggacgtacatgtacatatgtatggggctcgtgtgcgcacatgcatatatgcatctgcatatggaatgcagcgagactgagggaagaagaacaggcggggggaaagaggaaaacaaaatctgcacattgtaaattgaagaccagggtggtacagaatgcataatctattgtccgaagagaatgcggcgaggttttctacttttgcttttccttggcagacatcagacagatcacacatgcctgcatttcagtcgccagaatcgtagaccagagaagaaccatctttgtaggttttatttagcccagaaactcatcaccgtccagctaaaaaaccaaggcaaactcagttgaagaattggtattctgctccaaaaaaggaaagttgtgtttcatttgctgctcagctatgtttccttcatcacttaggagcctttagttagctgctcaaac

SEQ ID NO: 2110 - DNA, 387 bp, Zea Mays
cgaaggggtatcgcaatatctgggccgttggatcgactacctacggatcagattagatattcataactgtgaaccggtacgcaactcaagccgttggatcaaagatctatgttctggattttattagggtgcgatcagatctagttcatccgatatctaatcaacggctcggatttaacctaacgaaaggcattcaacacttaatcagggtcgttcattctgatcggatggccatgattctacagcgctgaagggggggactccgattaaatcggagccacacattctccgatcaaaggtcagcacactctcttccctcccaagctctggtcatggcggcgctgcccaccgcggcggagaacgcgggcgtgacacccatcagcctcc

SEQ ID NO: 2111 - DNA, 1262 bp, Zea Mays
aacataaccaagaaacgagacacgttgtgtgcaaaagatgcatttgtccacgttaccaaataagcgggcagcacgcaacgcatcaaaaacagcactcaattgttcgaaatgctcttccatagtcttgctgtaaataaggatatcatcaaaatagacaacgacaaacaatcctatgaagggccttataacttcgttcatcaaacgcataaaggcgcttggagcattagtcaatccaaacgacataaccaaccattcatataacccaaacttcgttttaaaagttgttttccattcatcacccagtttcattcgaatctgatggtatccactatgcaaatcaatcttagtgaaaataatggcaccactaagctcatctagcatatcatcaaggcgtggtataggatatcgataacgaattgtgatgttattaatagtgtgacagttgacacacatacaccatgacccatctttctttggaacaagtaaaacaggaactgagcaaggactaagagattcacgaatgtaacctttatcaagcaacacctccacctggcgctggatctccttcgtctcatccggattcatacggtatggggcgcggtttggaagctgggcaccggggatgaggtcgatctggtgttcgatgccacgaagcgggggaagacccggtggcaagtccatggggaaaacatcagcgtactactgcaaaagattagaaacagtagggggaatatccaaaggcggggcatcattaagtgaaatgagcatactagaacatacaagtgcatagcagggcaagtgagtatcagtaggtcatcaaaatctccacgtgtagcaagtaaaacaggagcgtgcaacttgatttcagcattaacaggagtggatggcgtaggtgcatgttgctttgcagtttttgtagcccgagcaagatcatcttttataatttggtcaggggtcatgggatggataattattttctgacccttaaacatgaaagaataatgattcaaacgaccatgatgtaaactatcagtatcatattgccagggtctaccaagtaacaaagagcatgcttccataggaataacatcgcaatcagcataatcagaataagagcccaaggaaaagggaacacgtaccgaacgtgtaactttgattttgccaccatcattaaaccattgaatgtgatatgggtttgggtgcttacgagtgggcaaggataacttctctaccaaagttgtactcgccaaattgttgcagct

SEQ ID NO: 2112 - DNA, 396 bp, Zea Mays
agcaaactgaaaaagctagaaagttatacatttgagagaagtggcaatatatttggatgcaaatttgctaagcttgcatgtcatatgcacttttaattttgtacaacattcataatctgatatgtaactgcatttttcatgatttgattacaaagtttgcaaacatgctaaactattgatgcgcctgcttgtactcttttgatcagtaaataagattttaaaataatgtctaatgacagatgtaccagtagatattagaaaaacagtgctgggcttttcatgtgtcagcttcaagtttgataagccattttactggatggcttgttttaatattgtgtagtgtgaaattttttagaagggtattcatttttttgcgacctccctgctattaagggg

SEQ ID NO: 2113 - DNA, 502 bp, Zea Mays
tgatgccctatcgcggtaatattcaattggttgggccgacgagctatattaacattcaaggatactagaacatggcacaaaggggaaggaacgaacctgggaacagttggtcatggacgggtgcctcacggcgggaaaatgaccacgatggtgaaaatctcgaatttgtgagctctagtgggtaattggaagcgaggaagggtgcgctaggcacgtaaccagaaggtggatcagggagagcctttaatttatagtagctacgtgagtgcttcgcgaatttgggatgagaagatctcacggccgaaagggggtgagtcactggagcgcaactgtcttggcgctcggtgaggtaaggccccaggcagtaaatgggctgtccagagcgacctattgcgatgtggtaacgtctccaagcacgtggcatcctcgcggcgagtggcggatgccgacgaggacattccgatcggtcgtgaagcaagtggttacggtggccagctcacaa

SEQ ID NO: 2114 - DNA, 521 bp, Zea Mays
gaagatgttagccatagaatcaaaacaaggtggaggaagtggcaccaagcatatggcggtctatgtgacaagaggatactgtgagaaagtggactagggaaagtggtgaatgattattgagagcaaggctcgagtacatataggcaaggatggaataggaacagtccaatcagggagatccttgcctaatacaatcaactaaccatacagggaggaggcgttcaaggcaacaagcctgtgctgccatctattacattattgatggaccgaatgatgcgttcagctttaccgttctgggacgaggtgtaggggcaatgttagcagttcctgccgtgtactaggctaggatagcaatctgtgctattatggatagaaactaggctaattatggtaggagagatcctgattggtgtaggggatcaatctggatcaacccacactaggaaggcctgatactgattgatagagggtatcagcccacactaggaaggcctgatactgattgatagaggagatcaatc

SEQ ID NO: 2115 - DNA, 1809 bp, Zea Mays
ataaagcaggcaagaattagaagtgtagaataataccgcacacctattacaggtggggtgacttcattatatagcctgataggctatggttacagtagggttacaatgtacatgggccaatgggccaggcgccccacatgggctgtcatagatacattccaacaccctccctcagtctaatcgggagtgttacgaacgcaaagactggacctaaaatcagtaaatagttacaggtaaccctttggtcataatatcagcaaactgaagtgacgatggaacacggagcacccggacctgtcccaaagcaaccttctctcgtacgaagtggatgtcaatttcaatatgctttgtgcgacgatgatggacggggttggcagtcatatagacagcactgacgttgtcacagaagacgattgtcgccgaagagatgggtgcatgaagctcctagagtagctgacgaagccaacaagtctcagccacagcgtgcgcaacagcacgatactcagcctccgcgctcgaacgagaaactgtagtctgtcgtttggaggaccatgagactaagttgtcgccgaggaagacacagtaccctgaagtggagcgccgagagtctggacagcccgcccaatcagcgtcggagtaggcagacaaacccgtaatgctgctggtgccgatgtgaagtccagtggagagggtacccttgacataccacaggacccgcttgagcagggccaaatgaggctcgcgtggatcgtgcatgaataggcgcacctgctgaacggcataggcgagatccggccgagtcagcgtgagataccgtagagctccagcgagactgcggtatagggtggcatcagccaccggggcgccatccgtagcggacagcttggcttgagtgtcaacaggagtcgccgttggagcaggtccgcagcatactgacgctgggagaggaagaggtcgtccttggaacgcgtgacagagatcccaaggaagtggtgaaggtccccgagatctgtcatggcgaactcggagtgaagaagctcggtgaggcgacgaagaagctgggtcgtcgaggctgtcaagatgatgttgtcgacgtagagtagcaggtaggcgatgtcagcgccctttttgtagacaaaaagggacgtgtccgaagctgacgcagtgaagccggatcgctgtacgaagctggagaagcgctggtgccaagcctgaggcgcctgcttgagtccgtacaaggacttttgcaggaggcacacgtgatcgggggcggccgagtcgacgaagccgggcgactgctcacagtagacggtctcattcaggtggtcgtggagaaaggcgttcttcacgtccagctgatggatcggccaggagcgagaagcggcgatgctgaggatgactcggatggtaggcggcttgacaaccgggctgaacgtctcgtcgtagtcgatgtcgtgccgctgggagaacccacgaacgacccacttggctttatggcgagctagggagccgtcagcacgatacttgtgcttgaagacccacttgccggagatgacgttggcatgaggtgggcgaggaacgagacgccaggtgccattgtcaacaagggccttgtactcgtcagtcatcgccgcgcgccaattggcatcggcgagcgcgacgcgggtggagcctggcagtggcgacgccaagctggtggccgccgcggtgaatccataccgttgtatggggggtggcagggagcctgtccgggaacgagtctgccgcggagggggctccgcagactgaggtgccactgcctgcagcgct

SEQ ID NO: 2116 - DNA, 742 bp, Zea Mays
agaagtcattatgcgccctatctagtcccgcttcggcctccgaaggccgaaggtagaaatcgatgattctgtcgaagcatgccagagagccttcaacactgtttgctcctttattggcacaagggatttaattcaggagcatatagccttcagggtatggccgcttgaagaaagctgggaaataccgaaggagaccaccaccgactctagcaaagatggtctggttcgactgaagtataccttcaaattcagggagaagtttgatgaacccaacgacgactggctgaagtgtatcgaagctacaagtgatgaattgcttggagcttactccaaggccgaagataatgctctatccgcagccttcggaagacgggggaacaaaagactgaacagggtttttgatgccattggcttcatataccccgactaccgttatccgctgtggggacaggggaaaaagaggaaaactgctacttcagccaccccagttgagcctatgcctaagggcaaaaagttgaaggttcttacccaccggccgcgttacattgaaccgaccgtggtgcctgagtttggcgcagggtcctcttcagcgaccaaaacaatgcaaactgcttcgactgcacatggcgctgaagaaccagctgtaatgccgaagatgcatatagtagagccaaccgaagataaggctgaaaaggttgaagagccaaagattgacgagataacaaaaacaccaaagattctg

SEQ ID NO: 2117 - DNA, 735 bp, Zea Mays
atgctctttttgactctggcgatagctattcgtttgttttggaggattttgtgtcgcgggctggtctttcggtgcagaggttgggtaacccaattttggttggttctgctaatggctccattagtagctgttcagtttgtcaggggtgttccgtcattcttgctaatgaggtcttttcgaccaatctggttgtgatttccttgggggcattcgatgttatcttgggtatggattggttatcccagtatcgtgtagttatatcctgtttctggaagacagtgttattgcaggcaccgtcgggtagggaggtggtattcttgggaagttccccaaagttcatgttatccttgttggcgcaattgcttctagatcgtcggtcaaggaagtcaggaatctttttctccatggtggtggagggtgaggctgccttgcgagtgcaggacatccgtgtggtgtgcgactttgctgacatgttttcggcagagcttccaagcattcctctagagcgcgatgcagcttttgagattaagctgattccgggtacgcagcctattcataaggcctcgtatcggatggctccaaaggagcaggttgaattgaagcggcaattagatgatctgctggctaagggttttattaggcctagcaggtctccatgggcttctccagtattgtttgttgacaagaaggataaaagcaagcggctatgtgtggattatcgcgctttgaatcaag

SEQ ID NO: 2118 - DNA, 563 bp, Zea Mays
ctccgatccgcgggctcgatcgcactggccaatctgccgcgacgtcgcgcaactaaccgtgccaaggccattgaatgcacggccggggaggcattgaagacgagcgagcgcagctagctggaaccggcttggcttgtcgtacagcacgggggatccaccgatcgatcgaggatggcgcgagtggactcagtggatccgagaccgaccgatcagtgtggtggagctagatagtagtggcactgtagaaacgcgaccgcgatgcagaggtggagtgaatgctagctgctgcttcgcctggttggcttggctggctgatccggagagatgaggtagcagaagcatgtggcgtgccatcgagacgggcttggacgagacctgtggcataaatagatggccgtggagccgtgccggcgtacgcccaggcccgggcggcgccgtgtgttttgaccatgaggtggtgtgggtgtgggagggagaagaagatgaacgggggaggatacgttggttgggctcccggctggagttcgcagtagtttggtggtgttgggcgaacggcccatacc

SEQ ID NO: 2119 - DNA, 439 bp, Zea Mays
caggcggtggcaaggtcgataacagcgcacatacgctagtgtcctatgggaaggcgtgctatggcggggtagccacgatagtggtggtgtgcggcgggtgtggagtgcaataatagattgggcgtggggagggcaattcaaggctgcacagcgtgacatgatatggtgtgacgatgagagggtgtgcagccgcggggggcatgggacagcagcgtagtcacgatgtgcagtgtgagaagagaagcatgtggcgatgagatatgcgagcaaggcgggcgcggctcatcgaggcttgtggctgggctagttgggtttattccactaactttcgtcggctactgacacaacccatggaagttatttgtggctttcatggttttgtcagtaggtaacaaaaataattaattttcatcagtaatcgacacggtcgacaaaaatt

SEQ ID NO: 2120 - DNA, 569 bp, Zea Mays
cccgcggcagtgtaaccaccgcaagcgaggcaggctgggggtctaggagcgctagggtggtctgggtaggctagagaggttagggagaacctgacgagcgctatggcgaagcttaggtcgtgagaatgggaccgagagcgggcggacgacggagaagagatttcgggcggatcggtgagcactccggtgagcaatccgcgtcacagtgggggacaatctggtgcaccgaggccggcatgagcttcggtgagggggtaggggtgttctatgcgtgggtttgggcacgagggagagctgtactggccaggcgcgtgaaggtgtggcggctcaatgaggggcagctccgacgagccgaaattccccacggtgagatgaaattaacgcagaagaagggtggggaggttccttaccctaagaaggcgctcagggcagcttggcacaacgcggggaggctttggttggctggacgacgaggaatcggcggcggtgaacttcggtctgtgcagggagaggttaggcgtggaccgggcagaggggtcgatgaaaggggaatccaaggcaggttctcg

SEQ ID NO: 2121 - DNA, 279 bp, Zea Mays
aggttttactagttcggatgtgattgttccggaaaggaattttgctgttatccgatttcgttgggggttaaagttgggagatttggtggtacaagggactgcgagcggaagcgtggaattcttgctacgcaggtcgactgcatcccttcaggttgcagcagtgcgagccttttggacactttctgtagtaacaagcatggctaggggataattctgcttagattgcctctacttctcaagcgtgtaagactgtctaatccccagagcagtgctgaaata

SEQ ID NO: 2122 - DNA, 452 bp, Zea Mays
ataaatacatacacagagagatatgccacgagacgagacgatcaagaagtcaaatgacgtgaaaacgacgtttgacggataaatagtgtcataggatgtttgagattcgaattgaggcacgaattgatatggaatcgagtcgatacttcacgaataggtttatataggtgaatatgagtgaagtgtgtgcttggtttgaatttaggcgaagaaaaaggaatttgggcactcggctcggaaacgatcactctaaacaggaaatttggtggaatttaagcctggaatctcggattggcgtgaaatttggcaagtaggttcctggaagtgttgtgaaggtgcctgaaaaatttgggttcaattggagcatttttggctggtttgggcattttaccgaacacgtggtgggcgtgatattagggtttcggagaaatggccatatgaggagtgaaaac

SEQ ID NO: 2123 - DNA, 433 bp, Zea Mays
caactgatgatgagtgcgtctgcatggggcacgctgcgaaggtcgacgactgttgcatcgaaggttagtggtacatgagaccactttgtctgaatgacaggtcctgtgatggcgatatggttgacccttcagtagtgatcccttttttgtcgtttgttctcaaattccgagctggaccctctggtgatcatatgaatcattcccctgaagggtggatcggtgaagtcttcctgctttggtggtgggggagtggtaggtgttggtttggatgttgtgatgatggtggtggcagggctaacctttcttggtattgaaggtgttgttgatgtgggaagagattggggttttgctgctggggtaatataggtgctcgttttggtactgatgctggtggtattgttgcagttgataggtatgagcgacgactctttag

SEQ ID NO: 2124 - DNA, 1083 bp, Zea Mays
tgaatcaaggaaatttcctcctcttcctcatcttcatcaataatgcggacggtacacccattgggttcaactttggccggattacacccagtgggttcaacatcatcaaggtcacacccattgggttcagcatcagtcgggtcacacccattgggatcagcttcggcaaaaaccggcactggcacttcctcagcagcaggagcataagggccgacatcctgattcaagcatgacactcgacgaagatgtctctttttcttcttcttcccctcagcaggagaagttggaggattggttcggcgaggacgcttcgggcgaatactatcagacctctgagtatccaaagctttgccagactcggggatgggtgctacaaccagtgttttagcaggggctgcatcagaggaatcttcagccaacatgtctagcatggcacttatttctgcgtcactcggattcaaaggcacctcgaaatgaacctatttctcgtcgtcggggatttcgccaagtgaagcaaccaaagcctcaacctcttcgagagaaggtcgcactctaagacccaaaccgctatcaccagtaggaggatttgacacaaaactgatgaaggccttggaaggaggtagattccaggctgagtatgcaacaggagcaccgacattagacaccttcctctgagtatcatctcaagccggctcaccaaatccacagcaggaatccttctgttggtaacctgggttgaatcagcaaggcctcgatacagataagctggatatgctctgtcttttagtggctgaatgttcttgaaaacaaaatcggcaaccacagcctcggcagtcagacctctctccttcaacaatccaacctcggcaagcagagccccggcctcagctacctccaggtttgtgagggattcagtccagcttggagtgcgaacatctggctgtctccctaaccgagggggagggagttcccgtgattctccacgataaaccattccaggcgccatcctttaatgctctccttgagcgggatgttgaggtactcggttttcctcccacggcgcatctccaaactcgcaccccc

SEQ ID NO: 2125 - DNA, 829 bp, Zea Mays
cgagggaaccacggtggtcggcccccgtcattggccggacgacaatgggtgttggtagttttgtcgtgcgtccgcccagcgcccctatgtaaccgccatgtccgccatcgcaataattattgtctcttggttgtgtggcctcgaccatcctgggaaaggcttggctcaaacgatggttcctgaggagacaagttgaaccaaggcggggcgaacaccacaacacacatcgtggtactagtgggagtctccctagtgccctctgtgggcgaggagtggcccttcgatgagttggccatggggcattcctgggccaagttgtggatgcccatgcccattggggagctaagtccatcttccgaccttgagagggggaggtcacggaacgagccctggttcggatcgagcatccccatgatttccatgaagtcaggctgtagcgcgacttgccgcccatcacttcactgtgggatcgagccggaggccaccaaggccctcggtaatgtcgagtgaatcgttggtcaggggaactggggcttctgtggccttgaccatcattcccctgttgttgatgacgaagtcgaggtttccgaaacggatggtcactctattgtgtggttgatgcggggccaccgtaggcccttactgccgtcctaaggctccatggtggaaggggataggcttccggggccctgaccacttcaccttcgccgtcgagggataagtcgaagctaccaaaacatatcaccactttgggcaatcaactggcttcatggctagccatccagagctttgaagagctttaccaagaacgcgcaaggccctgccagac

SEQ ID NO: 2126 - DNA, 485 bp, Zea Mays
cctggtgggtcccgcaggtcagggcgggtcttcttctccccaaccgaagcagcgaccgcggcggacggggatcacaacaaaccgagcgattctctcgcttctagccggacttgcctcaacaaaccccaccgaacaacttcctctcaccccctttctcttggtgcgaccatgggactgtaggcgggcctcagtgcgcgctcgtttttccctcccgatacgagctaaacagagctgtggattccacagatttgccgccgtgatcctcgcgggcgtgggcgacttccctccattccgtgccagggtccgtggggcataaattggtgccctctgcgctcctctccacttgtccatctgcctcgcgacttctctctcgcctcggccgcctgcatactgtgctcgtcaggggggggggaaacacgggtccgccgctgtcggctacgcgaaccacgggcgctgggcaatctgtggagcgttccagtgctgcg

SEQ ID NO: 2127 - DNA, 619 bp, Zea Mays
cgatggtacagtgttcggatcagattgctagctcagttagctcgtcaccgacgatccacgcgtctggatgtgcgctgatcaccgtgattcgtgcttggaacgcagaggatatccacgggaaggtaaaagatctcacgggggaatggatttgatcgcggattgaagtttatcactgtgcctctagccgtcgcgacgtggccggaccgccagcatcgccgtggaagctccggtgaccccgattgcgccacgccgtagcttcttactgtgcggtagtaatcgtggcacccttaggagtattatccttgcgtcgttgcaccggtgaacgccacggtcacagccacctgtgttcttccctatctccggccgccagcacgctgtgatcaaattgagagccaccgcccccggagcctataaattaagtgcatcatcggcttcgttatgtattcaggcatctagtgcacccacccgtacctcagatccccgaccagagagctccaatttctcatttcccccaactcactcaagaacaccgatcggagtaacctcaccgtggtcagcgacctctaggtccgttcatgctccctgttatcttgtttcaacattcttgtgtgcccctgat

SEQ ID NO: 2128 - DNA, 604 bp, Zea Mays
gttatcacggtgcgtcacgcgggggtggtgtggcatcgaggatggggtgcggggtggtagcaccgaggacgggagacgaggggcaggggcgcgacctcgccatatcgacgtctcgcttggaacctaagagttggaacctaaaattttaggaaaaagaccaaaataagaaatgtcatattttcgacatcaaagcacatgtattacatacatctccactatataaaaagcaacattgtccacaaatttcactgtcatcgtgcttagggcgtatttaaatggtaaaaaggataaaattatttacggagcaagggcatgagcatagaagagtgtgtatgattggctggccggagtggttagggcgggggtcgacatcgcagtctccactagatcgattaatcacggcaccgcgcgcggcccggtccgtcccgagcacgtcgctctcccctcctgctctcctcttccgagacgcaacgcagcgacagagagagatccaatccacaaggaaacagaggaagcacacgagcaaggcgccaaaccaagaaaatatcgcttcgggtacgcggacgcactcacgcgcctgcagccggccgctgctggatatcgc

SEQ ID NO: 2129 - DNA, 690 bp, Zea Mays
aactggacctcagggtgtgccccatcatcagttggctcctcgccatgagggtagcagcagtgggagcaaactggcccggctcggctcttgctgggtgtggtggctcaactcatggtcgcaaggggaggcggctcgatcgcgggcatgcatgggaggcatatcgcgctaatcagctcaaggtcacgggcgggcgggctaggtcggggagacgcgcgaggcacgctaaggtggctcgctcagtcggctcggggcaaggcgggcgcactgggttggggtcacgcacgaggcatgctgggtcgggtccaggtgatcgacccctggtctatcgccttagatgatgaatagatccaccctatatataaataggtgtagacaaagtccacgacgagcaagccagcgagacggagctgccgaccaagtctctgcacccacgagatggaaacctgaacccagtgatgtgagcccacgcacaccgcgacacgatgcatcattgccttgccacaaccaaacgtgcgcacactgcacgagacaagccccgaggaagacttcaacataggagtcccaatagtaccgcgcacagtggaaaagacgagacagcatgacataccaaacgtatttattgtgtatgatgggagaaaacacaaggcgtgtggtggacggagccacaccatgtacaaccgtgtccataga

SEQ ID NO: 2130 - DNA, 574 bp, Zea Mays
taccatacgccataaaatcatgaaccgagaacagatacgcaacacgaagattgaatttctgcttcttgaagcagtcataggcttccactcattgccatagcttctttaaatcttcaatcagtggttgaagcatcacattgaggcgtacgccaggatgctcaggcccaggtataacaatacataagaacataaactcatatttcatgcaaaaagtaggaggacggttgtacggtatggcaatgacaggccaacatgaatacgacgcaacagacatattaaaaggtgtgaaaccatcagttgccaagccgatatgaacgtttcttgcatcattggcaaaatctggatcaaagttgtcaagagccttccatgcatcaccatctgacgggtgcaccattaacccatcttgtctgtccgtacaatctttatgccacctcatgtgcatagcggtcatcctcgagagaaacaaacgtttcactctaggagtgagaggcatgtaccgaagctatttgtgtgcaacctttgtcaccaccttctccccttcttcatttaaaagctccacgtacctcgacttccc

SEQ ID NO: 2131 - DNA, 280 bp, Zea Mays
cgggaagccatagcaagacaggaagttcagtaagcagttcgtcaccaagaccgacgcaagcaaagtcggtattggggttgtaatgatgcaatctaggcatcctccgtccgttggccaggccatctaagtagagatggcaataggtaaataaccatcgggtattactatcccatatccatacacacgatgaaaaatagctccgccaggtcacctatattcactggtgaatataaatttaccctaatgtccacaaagattaaacatctacattatacaaatg

SEQ ID NO: 2132 - DNA, 477 bp, Zea Mays
ggaggaggtctcggcttcgactggattttatacccaaggcccgagtccgaccagtgataatcctagcgggggattacggggattcggtcactggcttgtcgcgcgtttgttacgacctgagaagaaagagccgagccaagattttgcggacgggagttgagaggatcacagtgcttcctattggagaagaaacgactgacaaggcgaccccacctggcagagaccacaaaaccggacgcgcgcgcgagtctgcatgcacttggatgtgtggccgccacactgggcccacaaagcatggaccagggagaggagatgcccacgtccatgagactgacgggtagacccagttgtcggtgcgccccagtgctgggccaggcagatgagattgggcctgtgcgtgataaaagtggagatgggccagacagaggaggagcgcgggtgggccgaaaaccaggtagcaggcccagcaggttttat

SEQ ID NO: 2133 - DNA, 403 bp, Zea Mays
ctaattcagggaagcccggggttaaatttgcaaaagtataccagactcagactactcccgtggggatggcgcaatccctggtgagccggcgagcaacagcctcagcgtgtggatcaaagcgggaacagagactgcgcatagcggagatgatagcgaactataggaacgtgctcttacttgcgattgaggcgtaggccggtcgttcggcgtgaagttgtcgatggcccaggcatcccagcgattcctggtggaaacacggccacaatgacccccagacccagcgaagtccgcaccacgggcaccttggctgcagggccctcctcacttccccggtcggcaccgacgcgcggtgttgtccagcgccggtgacactccatcctatctctattccgttcctgatggt

SEQ ID NO: 2134 - DNA, 1052 bp, Zea Mays
gtctaactcataaaagtcctaagtctcagtgcacagtaaggctagactgcgggttgtttttaggaaagtataggggctttttttgcaaaatgtgtggccgaaagggtatggtcaaacgagatccgttggattagaggccaacgaccctgattctaccggccaccccgtgaaatggaatgtcatcgggtccgtagggtccgagatccatggacggggttgtattaacgcgcgatctatcccccaccgttggatcccaatccaacagcccagattatggttcccacaaacatcatgcttatccgatctcgaccgctggtcttcaaaatctccggctaccaagccgtcttccccaacgcgacaagaaccagagcactggcgcgccgtggccatgccccaccagagataacccgcccggcacctagtgtctaagtatctagcgtgaatcacggaggcaggaagatatttcttacccaaggtcacggtggtgtcaggcgctgttccgcttcggcgtgcagcaggaggattctctggctagcctcatctgtggcggcggcaactcccttctctcccctcggtctcccacgacagcaggcgcaggtgcgacggtcaatgacggggatgagccggcccagttggcggactcaccacggcccgaccgaccagttttcgccgtgtgtcaacaccaaagtctagacgcaggcgaaattcatcgccggcgtatagctgaggctgcgacgggatagcacgctgagtagacgcggatgcgagtcgaggtggctggcctgggagtgggagaggcggagctgggactcaggcttggcttttatgcatcacgggtggagtccgcgcgggaaaatcgcctggtgtatcaccccgaaatacggaacggtcgcagcgcttggtcattccaaatcacggtgtttgttacgaatgccggggagcagactcccagatacgatggagatagaatttggcttgcatgatgatgtaagttgtgatgtcatccgcggcaaggggaataaaataatacaaaatagagatgtgggctggct

SEQ ID NO: 2135 - DNA, 364 bp, Zea Mays
agttgatccccttcatcccgaaaggttttcggctgagggcgtctgctaccatgttggcctttccggggtgataatgaatctcaaggtcataatctttgatccgttccagccatcttctctgacggaggttgagatctggctgagtgaagatatactttagactcttgtgatcggtgaagatgtgacatttgttcccaattaggtagtgcctccatattttcagggcatgcactatggctgccaattccaaatcgtgggtgggataattctgctcatgcggcttgagtaagcgtgatgcataagcaatgactttctcattttgcatcagaacacaccctaagccttgccttgaagcatcacagaa

SEQ ID NO: 2136 - DNA, 498 bp, Zea Mays
ggaagttgctatatgcagtactcctcatcgcgcgatagctgcgcccctattttgatgattacaaactcatagtggttagaggcttcccgataggagacatactccgcaatagagaagcagtgggaaggacgacaagtggccatgtgaacttggagctcacgacatagaattctgaccccgcaccgcaattaagagcctggctctagtggatttcatatcagaatagaccgaacaaaagatcccctaaaaccccaagtcagtggaggtatggaagatgtactttgatgggtcgttgaagttacaaagagcaggggctggtatccttttcatcgcccctggaggagattagctcaaatatgcactccaactattatttcctgcctccaacaacgctatagaatatgaagcttgatacatgggcttaatattgttgtatcactcggtatcaaaagattgatggtgtacggagattccatggttgtcatcagccaagtaaac

SEQ ID NO: 2137 - DNA, 588 bp, Zea Mays
cgggtggttgcactccgacctttgcatctacaggttgtgggtttgattcccacaatgttgcaatatttgctcactttttctcatttttctattagctactaggtaaattgccctaccttgttttccttttgccctccgccgcttatagtgtcaatgccaatgtcggccgtgtggtctgtttggccatctacagtgcagagtatagaggtctgtttggccatctacagtgcagagtatagggcatcagcgacagactgttgggcttgacataagggagggagggagtgacggtctagcgggtggcgcgaacgcatggtgctggcggacgaatgtgcataagggaggtacaatatagatagaagctaacactaaaacaatatgatttcagtttcaatataaaataggagttcaagatgttaggtgccttcctcgttgcatcttcgatcacgggcttccctcatggccaaactcgataatttcatcatcttgatttctacgtggttgtcatgatgcaaacatgagaaaaatgggtgatagggtgagcacgatgtatacaccatgtggaacatctggaaggagagaaatcgg

SEQ ID NO: 2138 - DNA, 618 bp, Zea Mays
cgagcttatgaggagcagtggatgcgagattggggtagcaagcgcacccgaagacacgaagatggtcgtaagagggatcgatgccgaagagagcgaaggagtgggttgggcaaccgtcttggtggggagacggttgaggaggtaggtggcagtggcgagggcctcagcccagtactgagcggaaatggaagcctggaaaagtagagagcgcacgacatcgttcgtcgtgcggatcatacgctcagcctggtcgttctgaggagacgtgtaggggcatgacatgcggaggtggacgccgcgagagaggagaggagtaagtcacgggacacattgttatagaactcacgcccgttgtcacactggatgctccggatggtgcgaccaaactgagtggagacccaagcgaagaagtgagacagggtgggataagtgtcggacttctgacgtaaaggaaaagtccacatataatgcgagaagtcatcgagaatgagtaaataatacttatagccagaaatgctgattacaggggatgtccatgcataacattgtatcagatcaaaagtgtctgctgctctagaagaggaggtgaggaatgggagcctaacatggcgacctaac

SEQ ID NO: 2139 - DNA, 934 bp, Zea Mays
ctaaccatgtatatctctactactatataagaacctaacgtaggccatggtgcacggttctgcctcctcatggcgcatacgacccacatgttagtgtcttccttcttccccgtgcgcgccctctcccctctacccctgcatccgcatggtccttgccacaatcccctcaccgattaatgccttagccatggaaggaaaaattatgtcactgccacagaaggaaacacatcccctcgctgctatccacgcctcgcagcaatccagcctgtaggaatcccatcgccgacgacgagtaggaccaccccgcccaatcgttcttcccatgcaccacggatgccccgcccatatcctccacgtcccaaatgcaatccatgcctcactgctatggaaagaatcgcaacccaatcccctcgtcgccatccagcgcacaggaccaccatcggcccgcatcccatcgcaagtgcatgaccacctcaccatctcattcttcccattgtacgcaccagccacgcccggatcttgcgatgctcgagtacttcccattctacgcgccagccccgcccagatcttgtgatgcttgagtataagatggaagacacctctctgagcgctcaaatctgaacaccacacctctctgaaacacaaactgacttggtttacaaaatagagaactactcatgtggttgttcatctgacaaatttaggtttgtgtttctaagttttatatatctttccttttctccaattgactgtagctttatcatccgtgcaccctttccgtaaataaatagagttttagttgtagttgaatcaatatttgtgggcaatgtgtcctatgcgacattttgtatattgagtgtaccacatgagctattttagcacttgtcggattttttattttttaaaacatcagtcactcaaatctgaacaccac

SEQ ID NO: 2140 - DNA, 617 bp, Zea Mays
tgaaagaaaggatgaacgatttccaggtgcaaatgaccttgctctctccaccttctttgtccaagaaaattaaagacttggaatcacattgttcaccattcattgcagaatctaagacaaactatacaagaggagtaccgagaagttgtagagaggaggatcttcacaggtatgtaaaacttttttttatccgtcatttcagtttgagttatcctgttggctgaatatttacaagccttaatcttgaaccggaacagtcacgggaacaaagccttctgaggaggtgagatggtggttctacttctaccacgctacacaaggcacagcgaacgcttacctcttctgaccaagttttggcacaatgcctaggtgattgatcgtctcatcgagaccggaagcagcgagcagatctttgagagagcaatccaagggacaggtagaggacaggtcggtgaatagcactcctacattgtcgtttatttaatttcacctcatacttttattgcccatctcaatgtgctacgcggctacgcctaaccactcttgcttttcgtttcatgaaattccatctatgttgatatagatccttgacacggttgaagaaattcaggaacggc

SEQ ID NO: 2141 - DNA, 373 bp, Zea Mays
aatatcacagtgatgtaagtacaagggtaactcactagctcctatagttcctaaactgcaaacatgtcaaaactggcacccactctagcagtctctattgactacaggaacatttccctcccctgaaaatgtggaacccagacgagtccctgaccgagatcactttaccggtggcagcagaggcgtgctccaagaaagagtgacagtccccacacatgcggatgttcttcacgacgcggattgtctgcccagggcctgccatcagaagaccgtacattgatgctagcttcatgctgtggtacatcaggaagtgcctcttctggtactcctcgacgtcgtgcagaacaaaggtggtgtctggctcgtacccggc

SEQ ID NO: 2142 - DNA, 387 bp, Zea Mays
ggatcctgccgatatcattcgggccagtgaaccagcagcacaggcgcgacctcctctgcagcggcatgacccggcatttcaggaagtcgccgaccacatgcatggaggttagaccaccggttgccaaggtattaatcctgtctagtatgggcaggaactctggcgatagcgatggcttggtcctctagtgcttgcgatcgagggctagcccgttgctcggcaggacgaggcggtcgttggcctcggcgctggcaatcacccagtcgccgtgccaattttcccacctcacgccgccaaaggtggagatgtaggctacggctgaatccggcctcgtatgaaagtagtaggcaccaagatggtccctagccttcccagacttgaccagca

SEQ ID NO: 2143 - DNA, 491 bp, Zea Mays
gattgggtgttcgctatcggctaagtcgtcaagtattgtttctctctcacacacacttcgtccggccaaccttccgccttttatagaccaaggcggaggttggttacatatggcttctcttggaagggatcgctgtggagtggttctccctcggtaaacgccttcacgtatgttgttatctgttccgcataactccctatcgactgttggagtgctggtaaagtgtgtccacgacgggagtctaagtgtcatcattactccgcatgtctatctatgcctgtgtcagcccctagctttcatagactgtcttcctgccttccttatgtcatcttgtctgttacgtaggacgttggaggactccggtctaggggccataggtcatgagcagggctcaagcgtaggtctagagcgggaggcagaccaattctctcacatgccatgactcaacgtcggacatagttaatgagagttgccctttggttagaagcgga

SEQ ID NO: 2144 - DNA, 769 bp, Zea Mays
agtgctctgccgagaagcaattgtagcatttaccttgaaatttcttcttgaagaaattggcccccttaaattcatcttctttgtggattaaattggcccccaggttgttgttcttcctgcgccaccagaatcgaggtttgactacagtccagccctcatcctcctcctttgccgaagaaattaataatttgcctgcaaagggtcggctgtcgcggtgctgcccactgcccgccgggtcaaaaaggttcacctcaccggactctcgggatggggtcttcaacgcgctccggacctcaacggtattgaaaccaggcgggtcgctgtcaactgtccatttcatcttctcagaggatgggattctcttctgtaaaatcgtcttctgtggaccttcacttgaagcttgctctgcaactccgtctccattactgcttgcattgaaatctctttgctctcctggattggctctgtctttgcagtaaaagtaaggtacagccgctcccagctggccctactgcggtagaggagatccatggccgtgcaggagcacctccttagctaggcactcgaggacctcgctggcacgcccctgcaacttcggattgatctgctgcaaaaatttcctctgccaagaagaactgctaacatgaattgaattggcaccagtaagaacagaactaccaacaacctctgcataagatttcctactattgacaagcgaaagaacgacaattatagatatgaaagccaacttgcttatcgcagaacgaaa

SEQ ID NO: 2145 - DNA, 680 bp, Zea Mays
tatatggagagggggaggagtcgaaatcaatagcttggctcagctcgctctcgatcaaatgggactagtccgagaccccgtggcttgattttttgcccggaagtgaaacccatgaaatatgaggtgactaaagaattgggtggaaaagagaggttgagagctggtttggtcaccaagtatttggaggggattcatggaccatagggaggaaatccctttctattcaatccttgctaccaaactagcgttgagaggtccggaggtagagcgaaggtggtgtgggttgaaaggggtgagcttgacgtcaacagtaggaggacatatcaatggcgacatatggagttagggaataagtgacaatgggtaaatcacaagcacgaggcatgttgtcgagaagataaggtgcaaagagaggagggaaaaggtaaaataagtgagaaaaaatggaggatgaaaataaaataaaaaatatgtggccattatggacatcctggatatctactactcagaaaatattttatcaaatgttttattaaaataaatgcaactccatcaatagaattgctcatggagccaaagaaaaaaaaggctctaccagtgaagtcgagttgtactaaatagggcctcgataatctacatacggttgacacacgaatgctagaaatgatcgtcaataatta

SEQ ID NO: 2146 - DNA, 441 bp, Zea Mays
ctaggatggtacaggagcggtcggtgtaggagtaggcgtggccaggaactgagggaaaccctgcataggcacgaactgaggagtctcgggcatatagaactattgctgaggggatggtacagaaaattgctgctcagcgcatgacatcatgttgatagtgccctgcgaagaggaagaagtcactggctcccatttgagtttcccattgggattcctcctacacaccacatccttgtgatccaggctgcagatagagcacctgccattccactgacactcgacacggcgatgtgcttcaccacaatggaaacacaccaaccccagcctgggcttaggaacaactcgatacctctgagtactccctcctgaagtacccgatgcagagggtttgccacgataggggatgtggcgctggtgttgtgactttcccctcttgttggc

SEQ ID NO: 2147 - DNA, 408 bp, Zea Mays
caaagccaccgcccttggacactataaattgagcataccgctagctccgttaggtaatcacgaagccagagcgcccgcccctgtctccaaatagccaccatagctctctaattcctctcttcccccaaatcgggtttccgcgccaccgtgaacgccgcgccgtggccagctctctgcaggtccgttcatgtcctcctcgctcttgtttcagcaccctcgtgtgctatagatgatcatcgacctagccaattgaaataaaccacgttagatcaccaggaacacctcggtttgtcctcagttcgcgccatcaccgtggacagagagattgtgagctagaactccgcaattgattgagggattagtgtcaccgagggtggaattaggtgttgtgcaatggaggggcatagt

SEQ ID NO: 2148 - DNA, 462 bp, Zea Mays
ttgtgatcctttatgtttccaccacatttgttgaatagaattgtaagttggtctattaggtgatcccttatttgatgttcatccatttgatatgtagggtgattcattgttttgcgcatgttgtattgaatgtcatccgctagtaatttccaaactttctcaaagaatgtgtgttcgtctccaacttcgcaaaatagcaacatagtcacaaaaagttgtcgaagctgattcgaagttgcccatttagctgcttcatcaaatgcattataccactcttgatcatcgtttagaagaccatgagctttgcatgcttctttgaaggtgcggtgtagcacaccgttatgttttcgtagatcttcgtagctctgtgcacctttgacactcaatagcaacattctaagataatatctttctcctgatgatggatgtacatagtagatacgaccaattttgccttccttt

SEQ ID NO: 2149 - DNA, 566 bp, Zea Mays
cttctcaccatagccaacttctcaaaaaagctcgtaagaaaaaagccgatccaaacaggcccatagtacatctgaccagccttactgttgcatttaatcatcaaaaccttacacttgcaatcaattatgggaatgagactcctcatccaacctaaacttgagctcgctgctatggtcacataggaaaacatggtggatgccaccatagtgataaggatggtgaaggttgtagtgacaaaggtggattgaaggtgacgtccgaggatgccgaatacagtggcaacaacctaaccctattattctaatggacgacgtcagatagaggaggaagagaatgagcccacgtcagatagatagaggaggaagttaatgagcccatgccgcaagtggatatcatactcgaaaaggtggacatcaggcctagcttgcctcctctcaggccaactgtatgcttctctctcggcggacttcgatcgctccaagttcgaggccaccgagctcaccacctttgttgagcgtcgcgctgccaagctttcctcctctcaaccgaagatacatcaggccta

SEQ ID NO: 2150 - DNA, 416 bp, Zea Mays
aggtgaggaaaggatggcccagtcacagggtcagtcaggacaacaggcaagctctcagcaacaacattcacatagcacattctgaccacctacttcgaaaggaaggggtggtcgaagctctggtggtagatttggtgtgcccccaaggacgccattctttttgttttgtggtgaggacaagggccacactacaagaacatgccatcataccatcaacaagcagaaagagcttgcttcgtcagctactcaaccttcatagctaaaagaggtgtacactacatcttcgtaatgttcaccctacaccccgcaatatgttcaaacccagtcacaagagccaaggccaagtatgccttcagcctcaaatgcctcaagcaacccagtgatgagtacatagtcaccagctgcctccttcatcc

SEQ ID NO: 2151 - DNA, 669 bp, Zea Mays
cacacaaatcgatcagaattctttttgcagagataacattttagttttatgcggtgcataggacccacaaaaaaatcaaattaactaccacatcatatccaccttctctcagatatatatatatttatatatatatggttggcaagagctaattaaatatgtgcaaagccagccagactgcctgtggttgcattggatgatatgccacctgctgtagcacgaatgcatgcatgatggagcttctctaaccagcagagtgtctggccgggggctgagcaggtatggagctgggatagtagtaacgtgcagtgctccaacgctttacgaaagctgtacatgtcatcgatctgttggcgcgcgcacacacacgtacgtatgtagaaatgcatgacaagctagccaacagtcttggcaactccattggccaccacgaggttctcggttgttgtgcctaggcagtacatagagttctcactactctgacaatcaaccttacaaatattttagaaaatcaggaaaaagtagggcaatgtgctcaaaccttgaatcaacaattaatgtattttagtttgaatgcacccgcttttaacttggatctgctgctgttgtttcggccaggataaggaccgacaaaagtgattaattccctgttgccgggcccacacacta

SEQ ID NO: 2152 - DNA, 407 bp, Zea Mays
tgagcttctccttcgctatctttcccttattcactgccttcccctttgtccacggatcagaaccaagctccggcgaggtatagcgaggtctgaagaagcgtttggagatgcagaaaatatatgtgatgtaaagggcgatgcgatggccgtggcacgacgcgagcagaggagaaagtcgatcgacccgggcgaggacacgagggtgatgctctcttggtaggcgggtgccatacgagactggaagctagaggtggagcagggcgagactgtgttgtttacgtcgtggcgtggctgctgtaggcgcacagcgaagtcacgcgggcacgacgcgaggctagatggcgacgtgcatgaatgggagaccaatcaccaagcggtgacgtggacgaacgggatgcagcctttcc

SEQ ID NO: 2153 - DNA, 434 bp, Zea Mays
cagttaatttaatccggtcttttgcagtcaaaaaggactgactggcctgcacgtcttctccaggtttgagtctctgcctaccgcatgccttaagaacctgatttcatcatcagcacatgttcatgttgctatttatgtcagttctattttgctgccagttcagagtttggacactgcttggacttggagtggcatttcaagccagctaagggtccagatccaccatccatggctgtgcttccaacgcgtcaggatcccttattaaatatcccggcagcgccttctccactccctgctggccgtcttgagcatgagcatgatggacctactccttttctttttccagccaggagaatcaacaacttggcccttgcaagcacggtgcttccaaaacgtgtgccgctccatttattacagaaaataacaaatgattt

SEQ ID NO: 2154 - DNA, 275 bp, Zea Mays
gaaaaaggagatagctgaagccgaagcatggcagaatcagccgaagcaggtcttgcatactacctcatgctattcgccatatatccctaagtatgtaggcaaccagcaacccacgacatcagttgctttggcaagtcattctcaagctacttgggctcagttaccaccaccaccaccattgacacctacattggttcataatcagcagccagaagggcatcgccaagcgcaacaacagcgcgacactcgagaagagtccgaagcttgcacagtca

SEQ ID NO: 2155 - DNA, 782 bp, Zea Mays
gaagaaattaaatactttgattttagggtggctattcgacaatggtgataattcaagtgccaaaactggagatccttttcctcagatgggatctgatcaagtccaagctgtaaactcatcttgtaaagctcaagtcctaaaactcaagctttgcaaagttggtaaccaagatttttgcttatcgcttggcaccctgctgcctaagctggtctaacaaccagagcgcctttgttaggaggaatattcacaacaatttcttacttgtgcagcagcttgctcagaccctacataaaagtaaagaaccatacatccttttgaagctagagatttcaaaggcatttgatactgttagcgtaactgtatgctctattgtaatgcctctattgtaatgggcctcagacccacctaactctattatattaatgcactatcaactctggttagggttttctattccaacatggtatcaagcctctacattccctaaccaccaggcactctagccgtcggcgcacccccggccatcgccaccgtcatggagcagtcctccggcaacccctccctctccttcccctgcatctcccagagcgatcgtcaccgcgtccgcccgcaccttctcggcgtccacgactgcctccctccctttctccttttcatgtgctcgcctccctccccacgcaagcggcacgaacgtccactgcaccaaccaccgctgcagccatcgcgcggacgattgcgattacggccgctgccgcacctcctcctccggtgacagacctccc

SEQ ID NO: 2156 - DNA, 280 bp, Zea Mays
cttgctgatcctcattggcgtcaggctatggaggaggaattctctgctctacagagtaacaacacctgggacctcgttccccgacctccttcctacaatgttgtttctggcaagtggatattcaaacataagttcaatgctgatggctctcttgagcgctacaaggcgcgatgggttctccgtgttttttcacagcgccctggaattgactttgatgaaactttcagtcctgttgtgaagcctgctactgttcgcacagtcctcactttggctctaactc

SEQ ID NO: 2157 - DNA, 788 bp, Zea Mays
agttggtgggcagctagttgaacacgctgattttctgggcaaccaatggcttccagtttccttttgatcgtgcgcatccaatcgtctacatcgagggggttgcttgatccggcgaacgtgggaggtttgagtctcaggaagtcccccattctgtcttgtggtcttccaccattcggccgctgattttccatatttcgagtgaggacctcgatgagtcgggtttgattggctagaacttgggctaggtctaagggtagtggtggaggtgcagggaggtgggtttcactttcttctctaatgacttccccttcagctcttcggggaaaacctgctccaatcccagaggcggtaggcgtggttttatccgaagccatctgccaggggagagagtcactattatgcacatgcaaattgttttcaaccaagttattttattcattacaccatcacattacaagcataggactactacaggtgggactacacgagagcgttcttcgaggtactagcgagttccttgtctaaggtgtccccaaatgccttgagaagatcatcgaggctggctagggatacatcttcttcgtcggaccagtcatctattctggggggtggtagggctagaggggccttcttcttcttcttctctgtctggcatccttggttagtggtcttcttctggatcttcttttttggggcgagtgtctttagcttcttgtcaaagtctatcttcaaggtccgatacgcctcacgggtgttggcttcctcgccttctgctatgctgagactct

SEQ ID NO: 2158 - DNA, 507 bp, Zea Mays
cggcgggatggtagtagatggaatcaatggtggaggcgcgacggtggtagagggaagtgtggcgcgaatggtgttatggtggaggtcgctcgtatgctgttgtaccccgtcagtccgtttagaaagctaggtgggtagatgatggaagagacgacagactgtcgggcttctagagcagcgagccgtgtggactgctggacgcccatagcgcttagccacacaaagagcgatgtgggctgctgcatgatcatgcggtggaagtcactatcatgctggggtcgggcgcaacaggggagtcggtggagatggctgcagatgacgtcagcgcgtctccacctcccgtcctggtctccaccaccacctccaccatttggcatcgtcgtctcggccacccaggagctgacgtcataaccaagcttaccagcagtttagattcttcttgtagtaggagacattttgagggcctctgtcatgcttgtcagcttggccgacatactcgtctccctt

SEQ ID NO: 2159 - DNA, 381 bp, Zea Mays
gttagcagacaacctaaatcgctagattggaatccaacgatggagatggtgttgccctaaatccgatcgtgtctgcccgatctaggtcaacggatcagattgcacgcgacgaaagggtaaggcatgctacgatcaagaccattgtctcagctaccagcgaccgcgatgatcccataaccccttacgaactgcgagccaatcacagccattcacaccaatctcgatggttatgtcggcctcttccttactcccgccggccaacccacggcggtgccctcacccgtggcagcgccaaggccggtaacgccgcccggtgcattagcatcattaataatccccccgatctagcaaagcgaacgcggagcaatccccaaatacgat

SEQ ID NO: 2160 - DNA, 683 bp, Zea Mays
gccggactagcacaacaagtgcgcaaaaccgaagtcttcttcaaaagactatccgtgcaaaagtcgcctaagggtgcagctggactagcacaacaagtacgcaaaatcgaagtcttcttcaaaagaatatccgtgcaaaagtcgcctaagggtgcagccggaccctccgtgcaaaaaccgactacaggtacaaccagaccaacacaataaacgcgcaagatcaagtgcacaagtcttctacgggcgcggccggatcagcgaaggcacacaacctcatcacacaaattatagttacatacatgcagcgagggcatcacacattacatcggctcaaccttcgggatgatacccatctccctataattgaacaacattatcctcaattcatcgccctcaaacagacttcgcaactctccctcacctacactcgccccagccggcgaggacaaaaattcccgtttgctagccccgtccacacaaagacaaccaccctccacctcaccataatgacgcctatctcttcgcgacacctcactaattctccgtttcgccaccgcccttcgccgcctacgcctagcactcgcaccaggaagaacttcagcacccatcacacgtggagaagcctccgtcgcagccacatccaatgccgcaaaataatccaagtcctcatccgaggactcctc

SEQ ID NO: 2161 - DNA, 293 bp, Zea Mays
gactgacattgaagcttcagtgctgaatgatttctgtgtattggtgacctcaggaagtggagcgtttaagcatatgcgcaaaaatcagtatgaagaaatcttgtttatatgtgaagatgacatgtatggtgtttttgttctctgtttgactattgcctaattgttgctacattgcagcacttaatatgttcacaatcaccgtgtttgtaaggcatttttatcaaaacttgtgaattggatgatttcaggtttgagctggacgtgctgttggaatctgttagtgttacaattaa

SEQ ID NO: 2162 - DNA, 698 bp, Zea Mays
aggtgcagcctgctggggagcaggagtaaccagcggtgtcgtggccacgcgtggcgtgggagtcggcgaagatgcagggaatgtcgtggccacgcgtggcgcgggcgaaggtgtagtgcctgcagcgcctgtcgcagagggactgggcgctgctggtgtggcagccgacagaggagaaactgcagacaggggcaactgtgctgcgccaagcgagggaagagcgccaggcaaggacatcggtgctacaccagggtctagggttgctgctgcagcaagagccgacgaagtacctgcaggcgtgagtgggtgccaataggctagaccaccacgtcatcattggaagacaaaagatctaaatcattagtgggatggggcgaggcagagaaagggaagtctgcctcttcaaagaccacatgacgggaaatgtgaatacttggtggaaaggtcaaagcagcgatagcctttgtggtcactagagtagcctaaaaaacacaacgagtagaacgaggagatagtttatgggaagcagtagcggacagattggggtagcaagcacaaccaaacacacagaggtgagcataaggaggatctatgtcgaacaggcgatatatggagtctagaagcgttgatggttttggtgggaagtcgattaaggaggtatgtggttgtatgaagaccctccacccagtatgcagcag

SEQ ID NO: 2163 - DNA, 1191 bp, Zea Mays
atactacaaactgggggcagcagagcagagcaaactacatgcattcacctagactaatgtactaaacgtaaaatggttggtcatccattgtttaacgtttaagatgtgtagacagcaactactcaatttgtaatatagcatggtagcagcaaggacttcaagcatatgcgcgatatataactatagatggcatgcttcataccatattttgaagtgaaaactgattatgagatatagggcataactattaggatttctacttcaatttgtcattgtcctcatattcattagccaatgattcatatcaacaattgccataacaattcagggccagctctaatctcaccacaaaatgatttgtgtttgatagcacaaccaccacaaactgagcagagcagagcacgcaagcataggccagcatggaatacacacaaggcagatcacaaactagttgctacaatgaaatgaatccatagagaattagcacaagcattcatggagcagcacaaaaagagagcgctccacaccaagcgctggagtctacaacaggagaaccaaaatacctggagcttgagtctcagatttgggaaggttgcagatgagagctggacggatggtgaagagccgaagagaagtgacggaggacagctagactgcacagctcactaaggagtgaggacctaggtcacacatgagcagctgagttgacatgcaatggagaacaaaccggctgctggacaatgagtggttgcgggagagaggaaccctaaggttgtgcttcgttgctttcattagggcctatccagacttgtacagtgcaagctcgtaacgtttggttactcaaattgggccttaagcaggcttagagggtgcagaagcaggctccaaaccagcattatggagcatgccaaaattgattgtgctagcttatgtactcttgcacaagccatgggtccacaagattgaagtgccctcgcgtcccaggccccttaccatggctaacctccacctgtaccccgtcccttcaccaccccctcctggcacccaccatgacaccttgacacttcccaacacatagcagccaccgcagatctggcaaccaaagatagcgagcccccatggcccttgacaaggttgagatccaggtgtaaagcgagggatcccttttttctgacgataaggcgaccaatc

SEQ ID NO: 2164 - DNA, 1412 bp, Zea Mays
aaaattaaggagaaagtaaaaacacctgaaggagttccacgcctttttgatctagtaaaggttaaagatgagaagctgaagttagccttcttccatgtcttggggaatactgttgttgcaaatgatcttgatcaggttgatccttgatttgtttggtcttaaactttttcctactaacgtagttgcttgtagttgtaatttgtgctgtgattaatggtatctcagcacctgtctttgtcaggcttcacgaattgcatacactgcagcaaaggagttccgtcgggtagttaccctcggcggtgaattatttgagaagtctggtaccatgagtggtggcggtaaaagggtacaacgaggcatgatgggaacagccatccgagaaagcttttcagaagaggctattaaaaatgctgaaaatgaactaaccaagcttgttgatgaactcaacaagttgcgtgaaaaaatgaataatgctaaaaaacaatatcgatccatggaagatgctaaatcccgtcttgaaatggaattggcaaaagctaaaaaggaggtatttagacaggagtgttctgcctgcctttaagtcggttgtttcttatgccttggtctgactactgttttaccattttctttctcgaaataggttgagagtatgaatgcacaatatatttacaatgaaaagcgactagattctctgaaaaccgcttcacaacctaaagctgacgagcttcgcagaatgcaagagctggatggcatcatatctagtgagcaagctgaactagagaggctcacaaagtgttccagcaaacttaaagatcaggcaagtgcctatagacagtctcgtttccatttccaggtcatatttatctagtctttttcccaaccatttccattcactttgctttagtgtggtcacatgataaaaggggccaactctacaaattcaacactcttctgtttcaaatatttttgtatgcatctccttatatttttagcattgctgctaacagaatcttgctttgccaccttaacctatttgtaatgtataccaggcttcggaacttcaacaaaaagttgaaaatgctggagggaagaagctgaaggaccagaagacaaaagttggcaacatccaatctgtaagcatgcaaccttttgcttctattgctttcgttttttatggtaatctgttttatagttttatggtaatgtcaggaacttgacaaaacaagttcagaaatcaacagacacaaagtcaacgtaacttcaggtgagaagttggtgaaaaggttaaccaagggcattgaggagtccaagaaagatagagaaaaactttctgctgaaacagagaagatgatgtctatgttcaaagagattgagaagaaagcgtttgttgttcaggaagagtataagaaaac

SEQ ID NO: 2165 - DNA, 426 bp, Zea Mays
ggagattttagataacagacataatgtaatcacaaggtatgatagagtgatgagaagggtaaatgaagtaataaacaaaaacccaacaaacgatagagttaaaaactcacaggtgacaaagaagaggatacgaccaagggaaaaataggtaaagtacaatgctcagattgagatggaagagaggatattttaaaggccggtataagataaacaacaaggtaagatataggggtgacaaggataaaggtgataatgatgaaaacataatccatggacagagttaagacaggacttgttgagggacgaagtgaagaaaacaatcaaggataagataagtgaggttccgacagaagagttgaaataaaaattcattaccgaaggaagttacaaggaatcaatgagatcaccaaggatgtgcgaaataaa

SEQ ID NO: 2166 - DNA, 465 bp, Zea Mays
gttttgacaacaaatatattgccacaagttttataattaatatttaccatatttatggcaccgagtaaggcatggatgaatctagttgatgagcgtcttagtattgaatgtttggatggcctgacttcaaaaaaaatctttatttagatggagtcgccaagttcttggattatgcattcagtaggtcaggtgatggaggtatataaaactttggatggtttaatagccctcatcagacatacagatcacacccccttggataagttactgcagccacttgaataacgaagaattctttgagtagctgcaaccttactatgtgaacaataagttccggactaattcatgtgggaggccttttgtctaataggcagtcaagggcagatgggctttgtagccaatattgtgattagataaacaattatgatttaatggcatccatggccagtagaggatactctagga

SEQ ID NO: 2167 - DNA, 471 bp, Zea Mays
aggacttgaagcagaagtattggtggtatggactaaagaaggatgttgcttcacatgtagcactatgtgatgtttgccagagggtgaaagcggaacatcaaagacctgctagtttactgcacctgcttaagatacgtgagtggaaatgggaagagattggcatggacttcattgtggttctaccccacacatctgctgggtatggctctatatgggtgattgtggacaggctaactaaagtagcccactttattccaatgaagaccacgtattcaggagccaaactagcagagttgtacctagcacagattgtatgcctacatggtgtgcctaagaagattgtgtcagaccggggatcaccgtttacttctcggtattggcagaagttgcacgagtgcttggatacaagattgaattttagttcggcttaccatcctcaaactgatgggcagaccgagaggaccaaccaag

SEQ ID NO: 2168 - DNA, 826 bp, Zea Mays
gggtgatgcagttcgggagctagactttcacaccgaagactgacaagacgggtggcgaagtgtatgaacttgtaccgtgtgcaaagaacaaatgaggtagttggttcaagtcttcgttttatgttgatcttggagaaggggtaccaggcgtggttcaaccggtagccagcgttatggtggcccatgacttagttgctttctctgacttcaaagtcagggagaatgattctgatgaatgggcgttgcgttgtgcgagggtgatgagcaacaactgagatttggtcgaagagtatactcgtatcaaatgtggccactcaatagaggctagacagttggtgggtcacgcggcggaggatgccgctaaagagtgcttttttcaagatggatgtcattgttatgagtcctgccttagctgttgaacttggcggggcgagacagggcgggcttcgttagtggtgctgaagcgaaggctgttaaaattgttgggaaatactctgcgaagactaagttaacaagaagcctgtaaatctgagatggtaacattcgtctcaatagggttttcaaaatgaatgagctagaatatgggtcatatcccgaagacgtggaagaaggggaggaagaagattcaagtactactgcaaggaggaaggaggttattgaaggcggcgaagatagggtttgtttgaaatggaagtctttgcctactgaggacaaaatgaggattagggcgaagggggcgaggtctccagacggagcagagactacttctgaagatttggtcggcttgaacgctgaaacaactaaatttgctaaggatttggtggag

SEQ ID NO: 2169 - DNA, 333 bp, Zea Mays
gtcgtgaagatcgagagactgaaaaatcctagataccggtttgctctactaaggaagaagaaaaggccataaggtgttggacgaacctgcagatgttgtggaggcgaacacagtgcacgaagagtgaggacgaacggccgctggtctccggcatcgtcgtcgccctcgctggagagtgaagacgcaaggctgtttgagaggaggccttttgggggacggaggtgtttctatatattaaaccagggaccgttgctccccatctatctatgtcacgccatccattttttcatagccgtctgattatacgtccgtgagatatcttgccgtacacgt

SEQ ID NO: 2170 - DNA, 827 bp, Zea Mays
cgctgaacacgaccgagtgttgggcgactggattcactccctttcgcctgctatacggatcggaggccatgaccccgcaggaaataaaacatgggtcaccacggacaagcgcttcaagcgtccccgacgtagacgaaccaacctccaaagacctcatcgacgaagaccgtgtctttgccctgtaggccctcaacaaataccaagctcaaacgaaggcctggcacaaccacgcagtcgtcccaagagaatttgacgaaggggacctcgtactcgtccgaacagcccggacagagtcacggggcaagctagagccaaaatgggagggtccattcatcgtcaagacgaaggcatcccccagcgtgtacaggctaacaactccatctggcgaggacctagagcattcctggaatatcgataatctccgcaaattttttgtttgaatcctcagggccaacacgcccttgtaattcaccaaacaatatcgttccagcccgcactcttttcctcctagggggtgaggtttttaatgaggcggagccatgtaatatacctgcaaaaatcccccgcaaaaaccaagacacaatatgtcgaaaaagactgcatcgacggtcttcggcattcgaccacaccgaagtcaccgcgaggggcagcgctgactaccctcgcgtgcgacactccgcgcaaaagtcacctaagggtgcagccagaacagcacaacaagtgcaccaaatcgaagtctttccaaaagatctccgtgcaaaagtcgcctaagggtgcagccggactagcacaataagtgcgcaaaatcaaagtcttttccaaaagac

SEQ ID NO: 2171 - DNA, 464 bp, Zea Mays
tgcaggggtcgacacagggtctttgccggccatagcaggcacgggcacggtcgaggggccttcaccggcatctgagggcagcaccggattgacctccgcagccttgggcggtgcgccgacgagacctccaaggtcctcgacgtcctcggcacgctccatctgcagcaacagcacattcacttagcaaaaactacacatacacacacgcaaccaaccacacaaaaataataaccttcacctgctctcttgcccggtcggattgctccctgacagcctcccgaccatgcgccccccacatcctatcaaaaagtgccctcgctgactgcttcacaacagggtcttcggccttgaagatctcgcgttcaaagctctcgtctgattggtcgaaaacctcatagtgtctgcagccctcacgggacaacgcattaatggccccctcgcaggtgacgagggaggcaaaggac

SEQ ID NO: 2172 - DNA, 422 bp, Zea Mays
gtgagccgacttgagatgatccttagaggcaaagtgtcaaatgttggtgctcccgtggcattctcagcttggaacttgcctcctcccaaagccttcactctttttgtgtcgaatcctcctgatactgacggcaatttgggcctcagagtgcggccctctgctgaagaagttagtgccttggttgccacacttgggggaattcctgatgatgaacggcaggtttattttgaggtgcccctgaaccctagtgatgcggaaataggtgccatgctagatttgctggctgaggactcttctgacactgctcctgctggggcattagtggtggcgcccctcccagaggctggtatgaccttagatactcagaaacctactggtactcgcccgaggcgcccttgccgagccaatccatccgatcctcc

SEQ ID NO: 2173 - DNA, 594 bp, Zea Mays
gtcttcattgatgatatcctggtatattcaaaaagtgaagacgagcatacaaagcacttgcacaccgtacttcaccgattgcgggatcatcgcttgtatgccaaattctccaaatgtgacttctggctaagagagatcaagttcttaggtcacaccatttcgcaggacgggatagcagtttatcctgagaaagtacaagaagtgatggattggaagcctcctaccaccgtgcaacagattcggagttttctgggattggcaagatactgtcggcgattcattccggatttcttcagaattgctaaaccaatgactgagttgttgaagaaaggagtgaaatttgattggagtctgaaatgtgaagatgcctttcacgccttgaggcgacatctgacaacagcacccgtgctagcacagcctgacaacaccaaatcatttgatgtggattgtgatgcttcgggcactggactaggttgtgttttgatgcaagacaaccgagttattgcctacgcatccagagcacttaggcctcatgagcaaaattatcccacacatgatctagagttagcagcggtagtccatgctctgaagata

SEQ ID NO: 2174 - DNA, 540 bp, Zea Mays
ctcatacgaagaaaatcaatttcatccatactgatcaaaccggacgattaacctttaaattattaaacctatccttcgtatgactaacacacacacatcacttacttgtctagcaaaaccactcttgcctaaccattccaccacacttcgtatgcatagaactcatctacacatacccgacaaatacattcaccgaaatattcttcacataacctatattttgacctacgatataccacccgattgcgattattaaggcaaggcatcaacataccaaaaaagcaaaattaacaaaacatcgctagtctaacatgtcggctagcctattgaatgctatccctgtttctcgcatcaccgctataccaccatgcaatcacatgcccaccaaaagcatctttcccataaaacttgcaatatcaacctaaccttcatatcacgcaatacatatattttccccgtcgcgaatacaaccataacccagcagaccatcaaaacacttcatcaaacatctaacgcaaccactaatataatgtacttcgg

SEQ ID NO: 2175 - DNA, 580 bp, Zea Mays
gttaggacaagcgaggactgtgaacactatggaggtggtgtgacggacctgcgaaatagacccgagaagtgcggtggtgtgcgacgtaaaaatgctagccaatcattttctttttctttcttcaagaaaacattgtatggagtgtaagttcacaagctatggatggacagctagctgcagttcacagcatataagcatcttcactcatgctacaaaatggctagcccatacaaaacttaacagaacatacaatacacaaatgctttaattgaatgtcattaaaaatgtctccaaacaaatcaaagttgtaagctgaaagcctatgttgttagagtacatacagaaatgaagcaaagtaatacctatcaaagctcttcactcctgccatgttgctttctctggccatcttgtaggttgcttgatcctataaggggaaataacagatgtacacatcatccggtaatccttagaaattcacaccatatccaatgaatatattaatctaacaccacaagccatgtttagaggaacacctaaattattgcaaaactaaaggaatataccacaacaagcaactgag

SEQ ID NO: 2176 - DNA, 598 bp, Zea Mays
ttgctcattccaacagtagtagatgcagtagagcagagtgcagatgaccgttgccagcatacccataatgatccacatctgtcagggctcaagttctgaatctcatctcatatacctaattgacaactaatcagtgaatagttaatagctcaatgcaatgcaacatgcccggtgagcggtggctaaatactactccaaaaagcatcgcagatcagattcattccttctgaattcaatcaacaatccatccagtcaactggactcaacgaagcagcagcaaaggaataaacggtccaccatcctcagctattcgtaaaagtaccacatgcgcttcacaagcaagttccaatctctgatgaccagccgctgccagatgtccatgccggcctgcgcttccatcttccatgccctccaccacttcctctccaatagacaggtagagctactgccaacatcaactgcatccttgccatgctcacggacacttcaggaggccatggcgtcacttgcctcatcaccaggtccctgcaccggcacctgacttcaaccaggccacccatcgctgtcagcagagggcctaatgtagctcatgatctct

SEQ ID NO: 2177 - DNA, 576 bp, Zea Mays
cgagggggttgcccttgccgcccgcctgctgggctgggccagagagagagttttcgcgcgacgcgacgacatcgccgccgacatgcattgagttgttcggtatcagatgggcaggggcaacagttttgctttttgtttatctcttgtcgtcagtcctcgcctcctcctgcctcctcttcgtaacgacaggcagcagacccagaccgatgcaggcgcatgcacagtcgtcacctgcctgccaacgctgggcgtacaggtgggaagtgggaactgcgatcagcagttcagcaccaaggaggaactggagaggtgcggattgttatctctcttctgatcttctccacggtcaggacgaagaacacacgagtcgtgagctgtgacctgaccctaatctaagcatgcatgcatgctactctactcacactggccgctgctttcagccatcaggtagcagcgagcatccaatccaatgactctaaacccatcgggcgtcttggcctgattgattggaatggaacgggacgggaggagggggagtcgtctgcgtccatctcatcactccagtgaggagttctc

SEQ ID NO: 2178 - DNA, 602 bp, Zea Mays
tgtgctctgtatatctaccatctattttgatcagttattagtttctaggtcgccacgatcggtgcgtctaggtctgattcctgaatttaactcgattggttggtgacttcagtttgatcactttgaatggtttggtttcaaattattcggtccttgtctcaaaacaaacgattcgccgtcagacttatccttaagaaaagggtaaaagtaacggctacctgttttagattgttctaggatgctggcaggtgaggtgatttgttggcaagcgaacagcggcactaattctgttttacataattggtacgagtagtaggccttatgtcacaccgatagcgactgacatctgtttccgtggacttgaagaagggatgggcgtcatgagcaagcctctttctaaagcagcttcacctagttttggttatgatcccatttgaagccgtttcacttggaatggaatggaatggagtcacagtcacaccctttgccaaaaaataaataaatgctgtgctgtgctgcgtttgccctttgccagtgaaagaacatagaatgtctagccttacagtgtataaccatctaactaacattagcattaatgatgc

SEQ ID NO: 2179 - DNA, 332 bp, Zea Mays
tttataggtaaccgagggatcacccgatcctgtcaaagacatttaggccctcagttacctagcttatccccgaaatattccctcgtagggaggttacggtgagtcattacagcacactttattacagacacggcccaacccactctacccacatggcgtccgggggcggggccctacaacatgggccgaattgtacatgggccctcctagtgctgagggagacatggcctcatggtcttcgcggggtcttcgtctcggcttgtctgtgtgaagaggggcactcgggccttagcatgggcgatgttcgtagcctgaccggcgaggcccgttag

SEQ ID NO: 2180 - DNA, 492 bp, Zea Mays
tgtggatcgcgtcgtatcctaacggcggaaccccaaaattttttcaacaacccgcttgggccgcacctcgcctatatgtgctcggccctacctcgggattgctccccctcgtccatcctatccacaccacgccactggattgacagaagaagaaagtgacaggggaaacgcgagagaaataggagagagagagggagaatggatccgccgccatgggttcgtgccctggctgttgatcgtggcgcggccttatcctggggagtttcaacctaccgttaggagtgtgaccgtgacctgctcgggcgggttgatgctctggtctcactggaattagtcgccagaagtcatcctccgctgccaggctactgcgcttcgtggtcatgctccaccacctgcgtcaagccctcggtattcgaccaggggggaagcccagcgcgcatggatgctcgtcacggcttcgcctgggcgtaaccgtgctccagaccgctggaa

SEQ ID NO: 2181 - DNA, 305 bp, Zea Mays
ctgggaataggggggtccaaatcagttaccgtttcaacaggatcttcacgacaatctggtggtgcctccaaccaagagttgtcaacgtcggcgatcgtcagagcagcatcgaccaacggcgacggattgagggccagccctgtgtcgctgccaacgacctcgcctggaggcaacgacgaggctaactcgccggctgcgtggactgcgaggtccggcgagagttcgtccggcgaggggactgccggagtttgcattgggacgaagagagagctctgtacggcgatatgtgtgaagttaaattagct

SEQ ID NO: 2182 - DNA, 889 bp, Zea Mays
cataagccatgattgctagtagcacttcacacatagcatttcatttttgcacctagaaaatataaatgaatatttgtataaaggagaaaagggattaaggaaaagaaaagaagagaaaaaaaagaaaaaggaaaaatatcctccccctgctagctgggccgacttcggcccatgcctttccctctcccccatttcgcacccgcgcccctccactctcggcccactacagcccaccagaacgcgcgcccgcaccacgctctcccctctccctcaccgaccgctcggccccgctcgtcagccacttcctctctctcgccctctctccctctactagtggggctcggatgtcagctccctctccctcaccgtgcacagcatcgacgcgatccccaccgaccaccgtcctcccccgctccgccatcacttctgcgctagtggagttaggcactgcttcgtcctcacccactatgctcacacccccacacggcaacctgccccgagccatctcgtcctcggcgctgtgtgccattatcgctgctgttgtacacctcgccggtgtccgccagcccccgctcctcttcttccccgggcgcctataaaatggctgtcctgagccccacatctccttgccccggcctcagccactctcctctctccccccgagcttaatcaagccagcgccgccgcccctccctccgctctagtgagttcttcctcccctccccgatatcctaatgccaaattaaactagctcactagcttcaccactttgtcacaagcacggaacactgcatctcatccccagtcacactccaaggcctcgtcggcgacctcaccatctcttgagccctgccacttcgctgtggtccacccctttccgaacctccac

SEQ ID NO: 2183 - DNA, 752 bp, Zea Mays
gtgatgatcttgcggagcttacggagggctcaatttatactaagcgagagcggtggccgagaattggaacgatgacgcgcggcggtcggaggagggggggtttcactggcgcagtggattggtgtcctataccgtggcattcactccagtgatcaacagagagctaaagcaggtcatggcgatgcggtggagatgcctagacacgcgacacaaggccggaaggcggcggtcaccggcgaactcatccgattacaccgtggcgagtgcggtacaatagacggaatagtttactggccggagttatccacgtcgacgacatttacgcgaccttgagcgctatctgatcaacccgagcacgaatcgaaacggcggcggcacgaatcgcggcggagagatcgtcgacggcgagaaactgagttggcggtctgatctacttcagatactgtaccatggccattcctcattcagtgcacctgatagtcaaagtttagggcgaattttctcttaattttatttagtaacatgatcgacactctttagcaaagttatagctctaggatccagctataatcttggtatagcaaccctaggaaaattcttgctcgatcatgcctgaattcgtgcccaaagttcttgcagttgcactgttagtctgaaattcagacaccaaacagcctgacagcccaactttgggtgcatttttctccaatttcttcataacaaccatgcttactatcttaagcaaagttatt

SEQ ID NO: 2184 - DNA, 529 bp, Zea Mays
cgacggtggactgctctcggctgatctccgacgagctcaggctggccggaccgggcaatggctgggactctcgtgcagcagacactgaattggacctcgcccgtgcatttcccccaacccaatttcatgaatggtggtctaccctgctctgtccacggtgacagtgcggagaatcaaaggaacaatgtgttcccgacgatctatggtggtatagttcaattagagggatcgaggagcttgaggagaacttaaggatgttaggacaactgattgaggagcttgaactgacctggaacaggctggctgcggtgaggctaaaccgagcggagttctggaacgatttggggagaatccaaaattggagctctctggtggaggagttgaggtgcaggtgggtgcgctagctgcttgattacttgacggagctgagggcgcggtcaatttatagagcccgcgagcggtggccgtgaatttgggcgacgacgcacggcggccggggaaacaaggagctactggcgcagtggattgg

SEQ ID NO: 2185 - DNA, 375 bp, Zea Mays
cttcactgtaaaagaaaaggaaaaagagtaaatagtgttgtgctgaatctagcccagtcggtccaacagcacagcgaacaggggagggggcgcccatgcgcgcccgcgtgcgctctggcggatttgcgaaaaagccctcagggttttcactaactggaatccggtttctttactattgtccagggtcactgacaacttacggaaaggtccctctactttcttttcttccccacgagtacccctggccatggcgtgcacacagatcaaccctggtgcaacccgtactggtcatggcgggtgttggctactacgactagcgatcgggaaggcattagcgatctacagggacctcggaacacccaacaatttgacacg

SEQ ID NO: 2186 - DNA, 368 bp, Zea Mays
atgtcctcggctctctcttctgcactcgtgcggcatttggccctgggctccgatgacttggtatgggaaggaggagcggttggggaggtcgttagataaacccgatagaagtaggcaaggtggattgcaacaactccgaaggaagtgcgcaggttgttgagctcggtgcgccactcgcgcggagataggggaagggcgccctgacttcccgatcccacacatcatcgacccatgatcgagagagaggcgcaccacgtggctaaccgatagggccacagtgtcggcgccagcatcacagccgatagggagactgaccagcgggcccaaggagacaacgcaagcacaaggagttgggttgcgcgaagaag

SEQ ID NO: 2187 - DNA, 918 bp, Zea Mays
ttcccactcaatccatagaaaaccggaggagatttaaatttccaaactaaccctgaaacatggaaattatccctagtccttgtggaaaatgaactcactccctctctgtgtgtgagacaaaatggataacgaaacgtacccgtctgaacaggaatgtatataatacagggtcacttatccctaacaaatatgtacaaaaaaacagaataaatagcgacatgctaactcatcattcccggcaccaagcatcaccatgattaaaataaggtgataacagcaacttgatcatcggtattgggagttcccacccatcaattgtaaggcctgcagaaaatgaccactgctgatgattgctttgatctcaccttcattgtcgacatgctgattgacaaacagagacgaggaaaaaaatacagtgctggagtggatgagaaaataacaataacaacaatttaagtacggtaactttgtgatcaccaaaaaggggtacatctcttcctagaaaaaggagcgggaaacactagctggatgataagaatctgcagggacattgacaaaaaagggataaagtacaactactataagaattaaatcttcagtaacaactcagagtgaaaaacaaactttagtctagaaagcaaacaagattcacaacttaaaatgagatgttccaacaataaagtgttgcatagtacatgacgccatacagaagaagacgattaattagtagacattagaaaaacaaagtgaacacttccacagaaaccaaccaatcagttactttgcataaatcaatgtgccaaattgaactattatgctatctccaaatgagttcccaaatttctcaggcctcagttcaaacacaccttgtttctggcggtgagatgagctccaacgttcattaacccttaaaaatca

SEQ ID NO: 2188 - DNA, 684 bp, Zea Mays
caatttccagaaaggtcaggggctctggtgcaataattccaagactcagtgaatagcggtcaaggacggcgggtttaattcctgaaaacaagggggtcacatttgcaagttgcgcggccgaaggggtattgcgagattctggccgtccgattagagatgtacgcgccagattagatctaggtttaactaactccgcgtgcgctcgcggatcgctggattcagatccgagggccatcgcgcgaccacgctaccgccccatgccagccataggatcagatcgaacggaagaaaacttgccgagagacgcgggtatgctatggtctaatccaagtcatagattgacagattgacgaccccgatccatcctagcgaatcggtatgcccaaaactaatcctagccgtgtgttccctgatcgacggtcagggcgcttctccccaattctctaacgcggagcacggcggcgcttggagccgtaccggcagcggcatcgccggactcggccacgcgagactccgaccaccagggtttagccttaaacgtatctacattttgcgggggcaaaaccgaagtctattagggtgttcttacttactataatcgtgccggtgtttctgcccacgatgtcccgcggccccgcggtagatcggcaattccggtgagcaatcaccgaccacgagagcctc

SEQ ID NO: 2189 - DNA, 288 bp, Zea Mays
gggatagggcaccaaagtggtgaatctcagacggcttggtccgagatggcgatgccaaggacttaggcgttgcaaccagtgggggaaggacgaggtgaggcaaagcagctgttgcaggacgcgcggtgggcacgaaggcaagcgtccaagtgtggcacgggagggaatcgagggaaccatgagggaggtcgaatgagctcgacggtagatctcaccagctccccacggtgattcgggcggcccatatagggagcaggaaagtccgagcggagggtaagcggaagatca

SEQ ID NO: 2190 - DNA, 320 bp, Zea Mays
cgggtttatatagactttgtgggcgcgatcgaggacatgtttttattccacccacctgaacccgacccattagcatccgtgcgtgcgtccctcttctatgtaccttctccataatcatggtcctcatatttgaagtcagaaccaattatcatcactaatctttttctcctccttttcctcccacttgtcttgctcgtatgaactatacatgtacatctggattggcccgacacggcaaggccagcacattaaaccatgacccactaaagcacaaccccaattataaactatgttatgcccacgagtgacccgtacccgac

SEQ ID NO: 2191 - DNA, 524 bp, Zea Mays
atcgatttcgacgagactttcaaccctgttgtgaagcctgccaccatccgcaccgtccttagcttggctcttcaccaggactggccgattcattagttggatgtcaacaatgtgttcctccacggtaccttgattgagacagtctactgcaccctgccagctggttttattgaccctgtacatccagatcatgtctgtcgcctcaacaaatcactctatggattgaagtaggctcctcgagcatggtacaactgttttgcgtctcacatccggtctatggggttcattgaggccaagacagatacttcgctcttcatctaccagcatggtcctgatagtgcctacttgcttctctacgtggatgacatcatcttgactgcctccacaacagctctgcttcgccagatcatcacttcactatagcagtcttttccgatgaaagaccttggtccacttcagcattttctggggattaccgtgactcgttccgccaccggcatgttgctctctcagcgccagtacac

SEQ ID NO: 2192 - DNA, 469 bp, Zea Mays
cacttggttggtcctctcagtctgcccatcagtttgtggatggtaagccgaactaaaattcaatcttgtatccaatgactcgtgtaacttcttccaatatcgagaggtaaactgtgatccccggtctgacacaatcttctttggtacaccatgcaggcaaatgattcgtgccttgtacaactccgccaacttggctcctgaataagtggtctttaccggaataaagtgggctactttagttagcctgtccacaatcacccatatggaatcatatccagcagacgtgcggggtaatccaacaatgaagtccatgccaatctcttcccacttccactcaggtatcttcagtggatgcaatagtccggctggcctctggtgttcagccttaactctttggcatacatcgcacatagccacatgtgcagccacatctctcttcaaaccataccaccaatacttttgcttcaaa

SEQ ID NO: 2193 - DNA, 290 bp, Zea Mays
ttcgacaggtgatgaatttggagttcattcgtggagtttatttaggctatagatggcatacaagctcgcaatcaggagtttagaatgttttgctctgttttaggctaggccacaattcatattctgtcgtgatggcgtagaagagatatgcaactctggattgatgcttctaatactagatcagttatactaattattttctctggttttataaattttgtagaaaacacttctctctagccatctatatctttttagttggtaacattttcatttcaaatcatcagtca

SEQ ID NO: 2194 - DNA, 382 bp, Zea Mays
ggccgatgaggatctggccgtcatggctcaacagatggaggaaacggagaagaacgtctcacgccttcgattggagttactagcaaaggagttggaaggtaacgaaacaaactctgatcgagagggtcgtgttccgcgtggggatgatcggggtggaggatttggtagggaaggtggtatggatcgtggaggagatcgtagagaagagaacattggggaggtggaaaggagttttgatcgagttccttaccgaagtggacatttccaaagtttcaaggaaatgatctaggaatttggtttgatcggtgcacggattatttcactgtctaccaggtgcatgattggatgtgggcaagcactgcatctgtgcacatggagggaa

SEQ ID NO: 2195 - DNA, 364 bp, Zea Mays
gtctgacaagctttctatcctggagggaggcagtgttggcgaggcttcctcttttcggtcagtctggcatccttggctcttggtccgtttctggatcttcttagtgggggtgagcttctttaacttcttagcgtagtccatcttcagagttcggtaggcctcacgagtgttggcctcttctccttctgctatttcaagactttcttggagggacgccttttcctcttttaattccttgatttgttgctctaggctttccacccgtgaatttaggtgggtgtagtgggagaaaaggtcgtcacagtggttgtcaagggtgtggagatatccggccatgtagactatggtggggtcatcctcatta

SEQ ID NO: 2196 - DNA, 314 bp, Zea Mays
ctaaaacaaccatgtcatcagcatcatcgtcggatcttctccgatctagtccttgcatctatcattaaccctaatcttcccaataccacctaaaccagtttgctcgatgtcccgtttccgccgctgctcgacctcgccccttcctatcgcctccgtctcttgcgacgttgtcgtcgtgacgccgatcagcccaacaagctagatctcgctcgacgcaacgatgtgacccatccccggtggtcggtgagcttggtgaaccattaaacaatgactctcatgtggtctttttggcctccccatgaatttccgtcctg

SEQ ID NO: 2197 - DNA, 446 bp, Zea Mays
cggacctgcagaaggctggccacgacgagctcactcacggtggcgcggagaactgaattggaagaaactctaaattagagctctctggtggacaattcgagacacgggcgggtgcactggatgcgtggttacctagcggagctccctagggcagtaatttataggttccatcggcggtggcgtccaatttcgcaaaggcgcgctggcggtcggagagaggggaggtcactggtggctcagtcgtggcgtccgccggggcaacggttctaatatggcaagcctaggcgtgccacggttactactacgcgataaagaactacggcgtggcataattgaggtcgccggagtaccacggcgacaccgacggtccgaccacgtcgcacagctacaggcacaggtgataagcttcaccctgcgaccaaatccactcccccgtgagatctttt

SEQ ID NO: 2198 - DNA, 298 bp, Zea Mays
gggaggtcgtcgtctcccaacaggaacgcgatgcggcggatgctcacgtgcgtgcgaccctggaacgcaccacgcgtgaaggcgcggctgctgcgccgcttcccctagtgacgacgcttcatcccacggagatcccgacggtgacatccaagacggcggtgcctcccctctggacacagcactccatcatgaggctgcaaccctgctgaacctacacgcccaagcagtggcaatgctgaacatttgcactctcatcccgctcctcctcgacgtcaactccacattctacgcccgatgg

SEQ ID NO: 2199 - DNA, 1475 bp, Zea Mays
ttgatattcattatcaagaaagcaaaattacaaagtacgatgttcttcataaaaggacccagcacaaaattaaagggcctgcaagatttctctattgttggattgaagcactacagttaaattttctgtctggcaggctagatacatcgtggatgaattgaaggacaagagtaacatagaggtagaacctagttcgtggactgtagtgtcagagtctttgcccttgcagcagaacgggtatgccttccttctagtactaatcaccataaaatccagcatgtggcgctgattgatttgattaaggaaggaattcatataaagtattaaattccagtcaacgcattactatttttcaacgtccaagtgttttctattttgaatccgtgttgtgcacattaatgggcaagcatgagactatctttgacattattctctcgttataggtgggactgtggcatgtttatgcttaaatacattgatttccatagcagaggtatcaaaccatctttcagtcaggtataagttgacatgtgaaaaacatacatacatatctgtaatttcagttgactagaaatacttagattgaggggcttgagttttgccatacttaaaaaaaaagaactttaacttgctgctatgaagcttaacctctgatgtaggagtacaatcatacactggtgtgcaacgtattaagaagtttctgtttagcatgatgtttgtcttaatgttgttcgcaggaacacatgatgtattttaggaaacgaatagcaaaagagatcatggcattaagagccgactgaagaacaccattctgacattgtctcaagtcaggtatttgctttcaaatagcagagatgtgattcttctaaggctgttggtgtgaattcaagtccatgtcgccacaccttttgtaggcttgtatttttttaggacctgattttggtagggaaaagaggggtaaggtaaaacaatgaaaaacgtaggagttcggaaatagttcggcaaaatggccacacctatgtaattgcattgaaactgactaaagctagtgcaaggaactgacacttagttttgttttgtgtttatttcaactcatatgttgtcgtggaaactaaagctagtgattgcacgactccccagtattaacatttcgtgagcgttttatgtatttgggaagtttttggttgcagatggataaacaactgtgaacctaggagcaacttcaaacttttcaggttcaaatcataaagctgtaccgagctggacacatgtctgcacttgaacaacaaaccaccaaccactacagtttctctatttctctagttagctaggagcacaaggcagaacattgaatgctgatagagggtagatcaccccatttcacaaaaacttgtggcaaaccaatagcaatcttaacaaatcgaatcatcttcccaccagtagaaatgtgactgactggctacttagatgcctaa

SEQ ID NO: 2200 - DNA, 589 bp, Zea Mays
taaatgtgtatggtggatatgcaggtggtaggtatggatgaggtggataaacatgtggtgcagtccatggtgccagtggtgtgggtggaaccatctagactacctcttgggctatattaatcggtcgtgttccttttgtttgtttatctagtatgggtgaatgaggttgctttgttggccgatcacttggagtgaccttcttattgacatatttataaagtagttgatcaaaagtaggaatagtattaataatctgaccagctgctttagatatattttgttcccacataactattttgggtcatcatggcttgaagattcagggttgttgtcgcctcttgtcggacacgaatcgtctctgggtgatactcaaaccgtgcgctatgtgtagtaaaggggtattaacctaatcctctaattgtgcttgccccctagtactttcagtccccttggcgattttaatgtctccttcccatcaagatttgtttgtgcagtcacctccctgtattcaatttgcctattttcaccagtctctcaagggtcaccgatgataatgccttttcccttgtctttatcgattgcatccgac

SEQ ID NO: 2201 - DNA, 673 bp, Zea Mays
tcgaaacggcgtatgcggcccgaaaattacggcgtaaaaatcttgtgtgtcccatcgtaattgggttctgactcggacagattttagcgtaaaacatgaaccaaaatagcgtaaatgattacgaattttagcgtaaatcatatatctattttgtaacggcgaatgtggcccgaaaattatggcgtgaaaatcgcgtgcgtcagatcgtgggcgggttctggctcgggtggatatttgcgtaaaatgtgaaccaaaacagcggaaatgtgtacgaattttagcataaatcgtagatctgtttcataatgacgaatggggcccaaaaattacggtgtaaaaagcttgcgtgtccgatcgtgcgcaggttctggctcggacagatttttgcgtaaaacgtaaaccaaaacaacgtaaataagtgtgaattttagcataaatcgtcgcgcagacctttaatagttctcaatgtattagctaggcaagagaagccaaacaacatacaaatatgtatcctaaagtaatgaaccaaggatctattatgcatcctttagtcaaggcacaacatactgccaactctaactataaaagattaattcacgaattcagataaattattgaatgcaacacttgagggctacaattacacgccacatgttacctacaataagacaaa

SEQ ID NO: 2202 - DNA, 408 bp, Zea Mays
ctcaacccgggttaccagtaggagaattccctctgctgacttggtaagccggcttgagatgatcctcaggggtaaagtttcaaatgttggtgctccagtggcatactcggcttggaacctacctcctcccaaagctttcaccctttttgtgtccaatccgcccatgaccgataacaatttgggtcttagagtgcgaccttctgctgaagaagtctgtgctttggttgcttcgctcggggagattcctgataatgaacggcaggtttattttgaagtgcccctgaaccctagtgatgcagacataaatgacatgctcgatctgctggctgaggattcatctgatgctgctcctgatggtacgttggcagtagtgccccttccagaggttgatacaactttggatgtccc

SEQ ID NO: 2203 - DNA, 499 bp, Zea Mays
ggaagttgctcggattcattgtcagccaccgaggaattgaagctaacccgaaaaaaatcgaggctatcatgaggatggaagcaccacgatcacaaaagaaagtgcaaaggcttactggatgcatggcagctttaagcaggttcatatcaaggttaggaggaaaaggcctaccattctacaaattgctcaagaaggtggacaagttctagtggaccttagaagctcaggaagcccttgatgcactgaagaagttcttgaccacactgccagtgctaaagccgccacgccgagccatgctaaaccagccggcagaagatctgttgttgtacatctcctgcacgactcacgtggtgagcaccgcgatagtagtcgagcgggcagaggaaggacacgcatatccagtacaacatcccgtctatttcatcagtgaagttctaggaccctctaaaaagaagtatccccaagttcaaaaactattgtacgcagtacttctaactgc

SEQ ID NO: 2204 - DNA, 716 bp, Zea Mays
cttcctaccacgctcgccgaacagtcgcaagaattcaataagcaattcaagccgtctgaaaaatgagtcagttaacaggcaccgcttcgcgtaacacgacaccgtttggaccaaggtcaactgctcaggcaatataattacaccccgcggtcacatcaagttactactccaggacagtgtggtaaatactctgcgtaccaagacacccctttggcacaaccattgggtgtgtcgccaggaattttcaaagattttctgaagaagtcatatccacaaaatatacgtaatgaatgtatcacgacaaaaggaggagatggactgagatgggaggaagtccaaatgtggctactgaagtacaagtctaatcagcagaagcattgaagcacagagcaggatgatgtccagccgagagccatctgtctcaaccagccagacgtccaatctgtcatcgatcgaattaatttcagacctaacaaggcgtggacagatagcgtcgtttgaattcacagagtataagatgaaaacctttgaatgaattatttccaaaatccactcaaagctcgggggctacacccttcggtgcccccaatagattttcagtctcatggagataaaatgctgatttctaaagcataagatgatgacctttgaatgaattatttccaaaatccactcaaagctcgggggctacacccagtgcacccaatagattttca

SEQ ID NO: 2205 - DNA, 670 bp, Zea Mays
aaagtcagtaaaataaaataaagatatccatgggcaaaaaggtcagcaagacagagcagcaagcaatatgagtggagtagtacgtctggcctgttattattaaccaacctaacccgtgccttggtctgtctcgtctttgtgttatctaatgcggtggcttggtattattatagtatcacacgccttctggccccaagctcacatctccttcttgggcgtatagcttgcattgcatgcctggagctgacaatgcctcggggcaagggcaatggagcatgcatgatgaagtgcacaagcagcagttggtgcagatcaatatcacacagatcatcaggatcagttgaactaccaatacaacatgcagggctccagcgatattccatttgcttgctgctagctgcctagctactctgcgcgcgttgtaccgctatgaagatgcctctcgtccgatgtgacgtgagaggctcagtgatgggccctctcttcccccatgatttcatgaacacattttttttacagggaagcttccaatggctggagctcacagatggatagcgaagcaagcaccacgtgaatactgctgctgctaccagagtcgtatggcagtgacaagtgagggtggcatggcatctgtggaagccgaaggagatccaagcatgccaatgccatg

SEQ ID NO: 2206 - DNA, 363 bp, Zea Mays
ctcatgtgtcctcagaagaaacaaacacacagatggtaatgtcaacccaaaacaaacccccaaaggagcatcaagctcatgtagaggctcggaggctactgtcgagggcaaataccaagggtatgatgtggcacgagatcaacgagaggcaacaagtatctaaacgattgaatctatctagcattcactagatcgaccttatctcatctgaccaccaagcatgggggatagatgttttctgtctcggtcgacccttgacagccaagggtctatgggacagatgacgtcgccttgcagttctgtctcatttgaacctcgaccacatggggtctagagggcgaatgactaaacctcggagtttca

SEQ ID NO: 2207 - DNA, 447 bp, Zea Mays
ggggggtgctcgccttactgccttaataactgattgtgaaggcgagggtactctttactcaccctggttcattcctcttctggctgggggcatcacctcaatcttgaggttatattgccaagttggacgtcatcggtggcttgagttcttgtgtatcatttgcctcctcgtgttgccatcttgcatccatcgctattgtgcattgggaggactggagcactctcttcaattgtcaccacaaacaagaacctccactacaagttgcaaggagcttgtgagtattccttgtaggttttatcgttgggtgtcgactccggggctattgcatcgtatgcactctgccccctcctatgctttggccttgattttgagacgccatacttggaccttctttcaatgctgctaatctatggtgtgcatgtttttcttagcttattatattccgtg

SEQ ID NO: 2208 - DNA, 576 bp, Zea Mays
tttaattgtcaggaggcgggcattatctcgaaggctgagccgatgtagtatgtttggtgccctcactcttgtcttgcggtagtaagtgaaaacactgccctcccccggctcgcaataaagagggaggggagaaagtgcgattgtatttatttgtgcggtggggttggtggcccttcgctgtgtgtatgtaatctatgacgattgtttattgtttgtgtaatgtggccggttacccttcacttgccagtgcgatgttgttgaatgagatggggaattcgtgtgttgtgactgtatggctgcacccttaggcgacttttgcacggatttgtcttttggaaaagacttcgtattgtgcacttgttgtgtttgttcggctgcaccgttagatgacttttgcgtggagttgtcttttagtaaacacttcatatcgtgcacttgttgtgcttgtccggctgcacccttaggcgacttttgcacggagtcgtcttttagtaaagacttcgtatcgtgcacttgttatgcttgtccggctacacccttaggcctcttttgcatggattttgtcgcacgcgaggg

SEQ ID NO: 2209 - DNA, 504 bp, Zea Mays
gtagcttcttacacgtcgtaaccggcgcgccggttacatgacatgcgggcccgctttctttgcgctggtccaccggatgtggatggagccgaaggggcgcacagtcatggtgcagttggatgcttgttgagtggtagtccaccctttcgaccaccggtttctgcgaagatgggagagcacttgtaaccgcaagacggttacatccctcatgtgcggcggttcgccttcttcgtgcttcggaccagctcgtatgacgtgtgggtcccagccccgtgtcgtgggggagaaccccagaggatgtcagtggggatttcgcccatgacgctaaggggtgcaagcgaggaggtctgcctataaaagggggatcgatcccctgggcagtggccatgccttcgtcctcccctcatgccttgcgcccttccaccttttgagcccccagatggggtgctccagtgccgccttgctctcgctatcgtcggaggagcgcggcctcgtggaaatcgg

SEQ ID NO: 2210 - DNA, 423 bp, Zea Mays
tggatgccaccgctgatggattctataaattgatgccccagtgagctccactaggttattacgcccctagtgcaccaactctcgcctctgatcgtccaccatagcctcccaatttcgcatttcccccaaatctgttttccgcgtcgcagtgaacgcttcactgtggccagctctctgtaggttagttcaagctcctctgcttgatgttctaacctccctcaagcctcctgttgctcgtaaacccatttgattgagctagacctccctgaatcaccaagaacacctcggtttatctccggttctcaccgccgtagtgagcagacaaattctgggccgaatttgtgcaattaacggagggtttagggttgccagaggtaggattaggtgtcggccaagttagagcaccggtgattgcgcatctcg

SEQ ID NO: 2211 - DNA, 310 bp, Zea Mays
ctcggatattccgtcaaaaaacatttttcagtactgaatgtcgttattgtttttctgttgttagaatacaaccgtatctatcaccgcagaagtaaatgcagtatgatggttttgtatttcacggggcatagaggtcgccctaagatgagtaattgcaaacgtgctcgtgttggattaagtggacgcgagtgtattgtgccgatttaagtcattaccgacttaaaccgactgctccgttggtagggtatagtggtcaccccgagttaagtaagcgtgagcatgtcgcaccgccttaagccgttgccgactt

SEQ ID NO: 2212 - DNA, 454 bp, Zea Mays
tgactgctgaatcaataatcttcactggtttttcacggtactgaaggtctttctgaatctgtaccgtctcttcctcgaggtgactttctggtgcttgcaggcatttgcggagctgggatacgtgaaacacattgtggatgtcggacatggattccggtaattctagacggtatgctgcgggtcctaccttgtcaatgatgggatagggacctacgaaacgtggggctagcttcccttttacttggaacctcctgacaccacgcattggagaaaccttgaggtagacgaagtctccttcctcaaatcggagttccctccgcctgttgtctgcataactcttctgccgactctgagcctcaagtaaccttctgtggatcagtgcaactttttcttccgcctctttgacaaaggcaggtccttctagtgctttttcccccacgttagaccacatgag

SEQ ID NO: 2213 - DNA, 993 bp, Zea Mays
acttatggtccggcacatgaaaatttgtccaaggatgagtaggatatatttttcttcaaccacaaccatctcaaccgaagagcccagccaagggtttggatattagaaattccaagaaatccaccaagctctttggggaggcacactttgctgcacgccactagacagtgccacagtggccactctttgctttttgtagtttgtgcttcttattgaaaaagctttctaaaattcttatctttttgttagatgccagctggtcattcaggtcctggaagtccatggtcaagttttgaggatcaggttactgtctttgcaatattgtgggtcttattttttattggttggcaatacactaatttcctttcacaccaggctcttgttgtccttgtccatgatatgggtgaaaactgggaattggttagcgatgcccttaacagcatcatccaattgaaggtaacattttattgaggataactgttttaatttgttatcagtcatttacttttctcctgaatcatcaaaatgtgccatgcaactattttgttgcaacctgttacgagttagtttatgttatttgtgttcctctttgtaaatgatttatgtatataatattccagggctttggatcttaattgttgtaaacttgcaatagtctgttgctaattgaaaaacattttatattttattacttgattcaagattttagcatcttcttcgcagtgcatatacagacggcctaatgagtgtaaggaacgccataaacttctcacggataaaagttgtggcgacggtgctgacagcgctgatgactcaggctcatctcaacactatccttctgcattgcctgggattccaaaggttaattccattattctttcatctatttcacttctcagcttgtatatggaaatgattttttttggaagattacgattctagattttcggtcaagtggcttctatctgctgcatctttcccaaaaatattatg

SEQ ID NO: 2214 - DNA, 460 bp, Zea Mays
tgagatcaagtagtacagagatgcaaggtgggtgactcctccagaagcgttagggaggatatacgactttgagcttagtcagaactctccacatgtgatgcaactgcaactccatcttccaaacctgcatatggtggcatttcacgaatgacaaatggtcgagcgagtcgtcaaccgtccaggtgctgataggtcaatgctcacggcatattttgaagcgaataggctacatgagggggctcgtggcatcctttattgtgacttctctgagtggtacacttggacacttggtagagtggtaagggaaaagtatggcaatggaggaagcgtgatacgggtggacaagtcggtagaatagtctctactcttcctgctaagggggagcgctactatctccatgttctcctaaaccacgtgacttgcgccacctcctatgtggatctaaggacagtagatggtg

SEQ ID NO: 2215 - DNA, 854 bp, Zea Mays
cccggggcggcggagccactcgcaggccccttgcccttgtccgaggaactgggggccgcaggaggagctctggagcccacatcggcaggctgggaacccctgaccgatacaccaggaatatggattccctggtgggggtcccagcggccggtctgacgaatcgccacaccgctctcatcgagggtcggcagtcgggccagcaccgccgaccgcaaccgtggattgtcgcaaagcggcgaaatgccctggggaggtatcaaagctttggggataaaagcctcaccagtgatccccctcactaaaatttccaactgctcctaggacaggtcagtcctaggcccacgctggatcctaccaatgttgctggggccggtaaaccagcaacacagacacggcctcccctacagtggcatgacccggcgcttcaggaaatcgctgagtacgtgcatcgaggtcagaccaccaaccgccagttccttaatcctatccagtacaggcccgaactccggtgcgaggcacggttttaccctccattacttccggtcgagtctgggcccgtcgcccggaagggcaaggcggtcgttggcctcagcgctggcgatcacccagacactacgccagttctcccacctcgcaccgccaagggtggcgatgtaggtcactgttggatctgacctcgtctggaagtagtaagcccaaggtggtctttgcccttcccagacctcactagcacaaaaaactagcgaaagagggaagtgcaggctaccacccccacgaacatctcacagaagtggacaaagatggccacctggagaatagagtggggcgtgaggtgctggagttggagtccaaac

SEQ ID NO: 2216 - DNA, 442 bp, Zea Mays
ataaagtggagcagaatgatggtctgtgggtaagtgtaaaagcgtcgagacaaggaacatcaagtaattcccctcccagactacctcatatgatcaaattaaaagagaaagcaagaagtttatactttattccttatgtacacatccaatgtattttttagtaggctgcccattttttccaaacaaaagtatgtacacatccaatgtttctagtagaaaacaagttatttagcgagaggctataatatactacaataaaaaacatgggtcaatcatttggtcctaacagatggggcaatcatttggtcctaacgcacgggcaaaaatcagtgtaatttcacaacagattgttgttagggagtccacacaccttatgggaggagagtagtagggattctgtgttccaaagtgacaaacacagacagagctgctctacaatctg

SEQ ID NO: 2217 - DNA, 423 bp, Zea Mays
aggggtgttacactcggtctgctgctgccagcatatctcatcgttggaagttgttcggggaccaaggaggggcaccgggactatgctcgggcgtgctgcgtgtgtatgtgggatagccgagccaagacatcgacccaagcgtgggcaattgctcaccgacgcggtgtcaccgtcgtggatctgccacccgcagtgggtcggcttctctatcgcctctgaaccctggtaagaccccccatcatcttcaccatgctcggtgcatcacgtagctgctagctggggcagaaataggtgatggggtgcctagatgttcagtcactgaagaagctccgccgcggtcagggcggcgccgccgtgatctgtgtctcggggaaaggggtgagctaggtgacattgatcatccaacgcatggctaggattata

SEQ ID NO: 2218 - DNA, 684 bp, Zea Mays
cgatcatgatccagtcattatttggctatgattgatataacaagattgtagctggatcatcggacaacaactttgctactggcagatcaacaagttgtcatgtaaaaacctaagatctaagccctgcaaagtggtctgtcaggcgcactgaatagagactccatggtacagtaactgaacaagatcccaagttcatcccccttcgccgccggtgacagtcgcgccgcaattcacgctggccgctatgattcatgcgccgtgacttgcggataaccgtgggcgagtaaagatcttggcacctgatcgactcgggctcggtcacagctaagctcaccgtacccacttgctcgtcgatcggtcggatagacctcgccaccgttggccgcttaccgccgtgcgccacatgctaaagcgctagaccacatcgtagtgaatcacatcatgcatgcccggtgatcgccggagagctgccacggtgaaagccactaatcccgagtgccagtaaccttctctttctccggccgccgcgcgtctccctcaagtaatccagccagtacaagctcaccggagctcggccctacgctgttcgccgtcgtggacttcgggccgtgaagaaatagaactagggggatgtttttgtaacgtgttagtgagacatgggaatagcgcgtgactcgtttcggg

SEQ ID NO: 2219 - DNA, 818 bp, Zea Mays
aacgaggggtcctccccttttatagcttaagggtaagaccttacagtggagacttgtttcctactagtaaggatatgatctattgtagtgtcgccttcagtagtcccgtcgatgtagccttccggaactcgtctccgggatcatgcgtagttgtttgccaagcatggtgtaacgtcttatccgttcggtatacggatccctatagcgagtctgacgttgaggtccctgtagcgtcgcctagtgggtcccacggggcagagtaaaggcatgtctcggggtcatgcgtggtgcggccttgccttttgtcaggaaccctatgtcatcctcgtagcattcgtagcatgcataagtgtacactcgacatggtgttgcaccatcctactcgagacgtgagttactgtggcaactttgaggtttaggttctccacgactgaggttgaccgatccaacaaggcagagaccgtatgcggtgtcgtactgtcacgttgatagagacttctcggcactccttcgatatgacacgccactgatcctgacgtagtttgacaacgcatcctgtcatggctgatgtagggcaatagtactggattggggcctccgtctcgctaagttactctacaaggacttagtcatcgactcagcctcgttgagttgctcgacaagggcttgatcggtcgctccgcctcacagggttactcaacagagacttggtcggccgcttcacttcgcagggtggctcagcaaagacttgttccaccgcttcgcctcgcagggttgcctggcagagatttagtcgacaagtgggttgtcgagagcct

SEQ ID NO: 2220 - DNA, 273 bp, Zea Mays
ccacaatgaaccactcgagacgccaccccttgatgctatccttgagggggatgtcgaggtactctgttttcctcccgcgacgaagctccagactcgcgctgccaacaagttggtgctgtcacccagccatctcgggccgacaatgatacaagtacttccagagaccgaagtgggggagaatcccgagataggcctcacaaagatgtacaaaaatggaaacttgcaagatggaattagggttcagatgggtcaggttcagtttgtagaaatcaa

SEQ ID NO: 2221 - DNA, 382 bp, Zea Mays
cgcatgttcgagtcaatggaggcgatgactggaagactgaaggaagttgagcgggtgcagcaacaattgttgatgcagtctgagttggcggctgtggttgctgaacaagctgcaaccgagaggaatgatttgcaccacaaattggaagagactggtcgggaggtgtctcaattaaggctggaacagatgggaagagaattgggagaatcttcgacctctaatcaggatcatggtgctaatgatcgtggtccacgacatgatcaacagatgccccggggtggccatcaacggggattgagaaatgatcctcgtcaacctgtggattcaggtaatcaagctattcctaaactgccatttccaaaattctcagagggagatcctg

SEQ ID NO: 2222 - DNA, 471 bp, Zea Mays
gtctcgaacattgatgtataatgttcgacaacaggatcaaaccccatgaagtagtcctgttgggcgtagtcagcttcctcgtggacgtgttcgtctccaccttcttcgtcgtcgtcatcctcgtcatcgttgtctccggagtcgtcggggtcgtcgcctccgggtgcaggtgcttggaaggctggtgcaggcggtgctgacgtcgatgacctagctacgaaggccagggactctaccaacggggtaggcgtcgacagctgctcctccgagctatcctccaggttgactacattctccactcggatgggagggagatccgccggaacttcctcgactaccactgggtagaccgggatctgccggggctgaggggcgtagctggtgttgatgcgggtagtttggagagtacgaaccatctacaagagaagagtcaactcagttgaaattttaaagaggtaaggctgataaaat

SEQ ID NO: 2223 - DNA, 697 bp, Zea Mays
ccacttaacaaggtggtatttttttctatctcccctaccttgccaaagaaattttttcgcttaatgtctaattttttgatagttgtgctaggaagaagatacatcgacatatgatagattggggaattggataaacaagcattaatcaaagtaatcctcccagcaatggatagagagctccccttccagctatctagccttttatcaaacttctcttccaaccttatccaatctgcaattcgcagacggaaaggaggactccaagatacatcatgaggaaagtacccatttggcagtcaacgaggttacccatttggcagtcaacgaggttcacatacgcgcacggatgataatacgctatcttaatttctctactggcgcagcgtgaatcagaggagacggacggatcggcatatcaccagattcaccaccgcatggcacgctgccttgccaaaaaaaaaagtccaggacgaggtgcgtgtgtttcagcagcacgagatcgcggagatcggagggtggttggattatggaatcgggcatatacaaaattgtccaaagtacgtgacggacttataatagacttcactgccacgtttatatcatacgggtatgatggccacaaaatatatttagaccatcgtttatttagagcccgagcgaataaaatagctttttgggacgctgactctaccaagac

SEQ ID NO: 2224 - DNA, 1120 bp, Zea Mays
tgtagatctatggaaggagcacaactttgctatagaactcatgccttggtaccatgaagaattctgagataaatgagcctgaagttggactgtcagactgcttgaaatctgaaattcagattaacagtgggatgacatgaacatagggcttaattttaagcaagatccagtgacttcttgtgggagcacattgtagcaaagttatagctggttagtagctctaaagctttgctgcagaatttggtatgtgttgccatacaggtttgggagaaaatcaagctcaaaaacggtctgtcaggctaactgaactccattcgccatggtacagtaagccccaaactgaagaagatcacgattcacccccctgctcgtcgccggtgacttttcgccgggattgttgacggatcgccacgattcgtgcaccgtgggcagcagataagctcgggtaggtaaatatctggcgcccggattgagttgagcctcgtggcggctaagcccgccgtccttcctccccagctcatcggtcgaacggataacctcgctgccgtcgagctgttgccgttgcgcgccacgtgcttaagcactagtcctcatcgtggtgactcacggggtgcatgtccagtgatcgccggaccagcgcggctataaatagcccatgatccgcggcaaagtatgaacatcacgcacaccgtaagttgatccgaagcaaaaattcgtgctgcctctgtcccctcctcccaaattggttgtgctcagtaaagctagaaccccttatggccgtatagccccaagccccgccctcaattccactcgtgaacaccacggcgccattttcccccaaatcggtccgccacaccgtggagaacagcccgcccgtggccagcttgttctggtaagtcgctgtccaatccacatgttgttttcatgcctttgcatgcttgcgaagcctacggtggtgctcgttttcttgattccgctatggtcgtgtgggaacacaagctcgtagacacggtgtccgccatgcacgtgagcagatcattcttcaagtattcaagctaaattcgcacacgttcctaggccgccttaggtcagtgatgcctccccggttgttggccgtgac

SEQ ID NO: 2225 - DNA, 318 bp, Zea Mays
gttagagcagggatagcctatggtactataagtcctaaggtcgcaccttgtttaggtgaagaaaactcaagcgtcatagggtggagtggtggactgaccgcataaactaatggaggtggggtactatactggaaccatcggcctctgaatcatgtggtcttcaatgtaaccatgcatggaggtgaaggtggtagtacctgtctggtatagggttggcaacaagacgtgtcgtggtcagggactgctccccatccccaccttgatccccgaaacctattccccgtcttggccttgaaacgcttatacggaggatttcat

SEQ ID NO: 2226 - DNA, 323 bp, Zea Mays
gtgagatcgagtaaaaagaaataaaatagggtaatacctcaatccgaagtttgaatcacagaaatcccaacaagagagagggagatgatggaggaagccgagatgaacggatctccaacaaaacttccaaagattggatggcacaaatgggttttggagtggtgagagtgtgaaggagagagaggaaaatgtgtaggcggcgtcgactgggaaaaaggaactgataagaagagaagggaggaaggggagagaaataggggaggcgccaaccggtcaacatactgaaaactggttcaaccggttataaaaccggttcaaccggt

SEQ ID NO: 2227 - DNA, 611 bp, Zea Mays
tcggggaggaagaagggtgttagccattaatgttaggattggtggggcctacgccggttgaagtcgcgccgccgtagggagacctgtgcgccactttggctctggccggaggtagatgatgccctgagcaccattggattgagtatgggcgtgtaggattagatggtgcggtgagtgatggcttgccgtcgtggatgattaggcgtcatcgcgtcgtcacagttctcgaccggagttgaggagagagagtgacgagggtagaagaagcgctctgcacgggagcaccgccgccttgtgcctgtgtgctggcgggtggtgaagatactgtcctagccgttgctgccgtgatgggcggttgggaggaatgggcgctagaaaccgtagggattgaatccaaaggccaggcgtggatcgcgattcataaaaccttaaccgtcgatctcagatcttgcgatccttaatgcgtaccggttcagataagtggcagtctaatctggaccgcagggagtagatcggacggcccgagatgcttcataccctttcgcgaatgcatatttttataagagcccttgcattttctagaaaataacccgccgtccaccatagctgtg

SEQ ID NO: 2228 - DNA, 915 bp, Zea Mays
aggagtacctctgaagtatctcattacacgttctagtgcacaccagtgatcgcctcctggattagaggtgaatctgctcaatttgctcgtgcaccagcaaggtacatgagggaaccaataatttgggagtatctcaactgattaactccttgtcctctgttcttgcgaagctttagactaggattaaaaggtgttggagaatctttggagtcaaaatacccaaagcggtttagaatgttctccacataatgagattgtttcagaataatcccattctcacccttaatcagttttatgtttaatataacatctgcctctcccaaatccttcatatcaaaattttgagataaaatgatttcacatcatttatcacatcaatactagtcccaatgattagtatgccatccacatacaaacacaatattactcccttaccaccaacaaaccgatagtacacacaagtgttggcttcgtttaccacaaagcctgctgacgttagagttctatcgaacttctcatgacattgctttggcgtctgcttgaggccatataaggatttccttagtctacacaccacgttctcctgtccatgcgtcacaaatccctctggctgctttatatagatctcctcgtcaagctcaccattaaggaaagttgtcttcacatccatttgatggatgagtagatcatgactcgcagcaagtgctattagcacacgaattgtgatcaatttggcaactggtgaataggtatcaaaataatcctcacctttcttttgggtaaatcccttggccacaatcctagccttgtatttatcgacagtaccatgtggtttcagttttttttcttaaatatccatttacatcccacaggtttacacccaactggcaggtcacatatttctcaagtcccatt

SEQ ID NO: 2229 - DNA, 516 bp, Zea Mays
atgttatcctgcctctatgagagtgataagctcactcaacctagatgtgtcgtcgtcgtcctcctccatcagctccaccgtcgccattttttcttgaacgtatcttgcatgtgcctcatctacgatatagtttacggcacatccaatctctgcaaatataaagacaaataagtttgcaaagtcataataaataaattgtacaaacaaatctatagtgtcatttttctcactcacttcccttgagacgatcagcaagattatccaacatctgtttctcggctctagccgcctcccattccctcgcatcatgtgctctcttctcattttccgccttcaatctcctctgttgtgcacgcattgggctgtcaaaactcaccgatttcgcgtacctacgcatgtcctgtatgtgattgttaatgttcgaatcgacgagctgagatccacaacgcatcttctgtcccattagtctcttggactttattgtgcatatcacctctcctttgttgtcataactct

SEQ ID NO: 2230 - DNA, 480 bp, Zea Mays
ctagagtccaaataggggggatagagttccccgctgatctaatagttatggctaaccaggatgcgactatagatgtcatcctagggatgaattagctaaccaaatatcaagcaagtcttagctgtgacaataggatggtgaagttagtgtccttatcaggagaggaagtgttagtggagttggtcttgtctggaccaaggaaaggaagctgtcaccaagtcaccgcccatattgaggaaatcgagccattagaaactatcaacgtagtatcagaattcccagatgtgtttctcgaggagttactaggcatgccacctgaaaggaaagttgagtttgccatagagcttatacctggcaccgcccctatttccatgagagcctatcgagtgtccggaccagatttggttgaactcaagaagcaaattgatgaattgttagagaaaggctacatcagaccaagtacctcgccttgggccgccc

SEQ ID NO: 2231 - DNA, 366 bp, Zea Mays
acgacacggtgatcaagctagactggcacaagccctatggacaacgggtcgggccaggttgggctcaggccaggctaaactatctcagaccacgggccacctagtaggtccgatccatttggacatgtataacggtacaccggtgatgcgctcgcgcaggcatgcagcgtcgcaagcaaaacgatggcacatgcaggtgaggctactaggtgtcaacgcaacagagctatcaggtcatcgattgaggtacatgatgttttgatttggtaagtttacgattagtttggttctatttaaaattgtagttgtttgattgaggaggagagaggcgatggtgaagtcacccactatgatgccgcccaccac

SEQ ID NO: 2232 - DNA, 1020 bp, Zea Mays
cacagacggccggccagccagttgcagctcgctgccctcttctccttttgggtgtcgtcgagtcccttttcagccgatcgccaccggcgcatgtgcccccatcgccctcacgccgtagtggtggctcagcctctccctctcggcatgcatgtcagaaccgaacagagattaatgaaacaaaaagagacgggcccgggaaaagacggggactgggggaggggagaggaggaaacagaagtggcatctcagactgtgggtgaaagaaagaaagaaccctacaaagctagggtagggtgctgtcctcctcgagtcgagtgtcctcgtcgcttgcaacgcaaaagaacagagagcaggaaagaggaaaggctagatgggttgtctcactagggacagaggacaaagggagcccatctactggcacgagagagacagcaaggcagctttctttcagccttttttttccattatttgcttcaatgagaagtcatatttgtttgctaccatttcttttctgctgttgttccaacttccaaccaatagttacaaccattgcatttgtcgttccaatcagcagtatttttcacagcattatttattcacccggccggggtgtatgcctgagtagaatggaataaggtttgctcccaagaaaactaaaccaaaaggaaagaaggccgggtttgaagcatctaaccaaaagttatgcacgcatgcatgaatggatgggacgcatggggcacaacacaatggtccattggttcatcagttagcctttgtgttgtggggcgtgggctaatgcatgtttcttccgatgaaagttatgcctgagtcattcagaaggctggttggatccttccaagttccaacccggccgggccggttgtctttgcccaagccacagctccggcatgcatgctaatctccttggcccatgcacacacacacgcacacgcaaatgcagtagggacgaccactgtctgtagatgttgcccccaaacatgccatgtgagtgcctcgtcg

SEQ ID NO: 2233 - DNA, 442 bp, Zea Mays
aacgagtaccaggggcactcggctgattggtaggagcaggggcagtaatgagatgaataaagatgggctgcttgaatggatatgaaggtgggcgaggcgaagaacgattttgattgaaaggtcggattaccaaccttgttctcttctcaggtccttgagtggatctctcacccgcataaccttttgattttccatgtcccatatttttagcttcaacttccagtgctgtactaacagcccttctataagtaaggtccaaacatgttgccatttttcgctggagcctgtcattaagtcccctcataaaacaattcttcttcttgaggtctgtatccacctggtcaatggcatactgggagagatggttgaatttattaagatactgcatcaccgtatctcctccttgcttcagccggataaacacttctaatttcatttgtag

SEQ ID NO: 2234 - DNA, 848 bp, Zea Mays
gaatgtatgagggtttgagctctgatccaaaaccaagtgctggtgatgttggttgactcgggtagttccacaagctttgtcagtcagagaatagtagaccagttgattctaccaactgaagctgcttcaccagtcacgattaaagtggccaatggcgaatttatgttgagttcaagaagggtggtagcactagagtggtgggatgatggacatacttatgtcagtgatatgagagtgctggatttagcaacttatggtgctatactgggatatgactggctcaagagccacaatcctatggaatgtgactaggacaacaaaatactgacattcagggataaaggggtgagggtgtagctgaggggtgatggagtgggaaataaagaggtgctacaagtatcttttgtacagctgcaccgatggatgaaggtaatgaggtctgggtttttgtgatgttgggaacagtccaggaagaagtgactgaaggggatcaggaacctttgagacagatactcaaagagtttgaggacgtctttgttgtgcccactattttacctccatccagggtgtatgatcatcacattcccttgctaccaggatctattccagtgaattcaaggccttacacgtactcaccttttcacaagacagaaatagaaaagtaggtgacataattatttactacaggcctgatagcacccagtaccagtccctttgcatccccagtattattagttcaaaaaagatggtagctggaggttttgtattgattatagaaggctgaattgtttgaccatcaaaaattgttttcctatgcccttggtagacgaaatcttggatgagttagc

SEQ ID NO: 2235 - DNA, 582 bp, Zea Mays
tacccttaaccgcgcagagaacaaccccaggggtatctcgtgagcagttaaggtggcgttcccggaggcaacgtcgtcggacccagaaggcacgggacccctgtacgcacaacccggacccccgaagtaaagcagcccggagcccttcggatagggttcgaaccccaccaagtaagctccggaccacccgtaacaaagaacccgggaggggaagtgtcgtgacctaggcatgggttcggtattgacgcgtgtctaggctctatccagagcacctccactccccactcggccaagggtctaatactgccacatggcttattgtccgtgacgtaggccggcgggtggtgcatgatgtgagggctctgggccgcgcgatctccgcatttattgcggagaggacgcgccgcctatccgcccttctaacgggcgatgtgcccccacaacatttattgtgtcctgtccattccactggcagacggcgccagggccacctgcagacagtgcacctgtccaatccgttgtcgaaacagtacgcccgtgctgcgcggtgcactgtactcatcccttgtgcgagaagcttcc

SEQ ID NO: 2236 - DNA, 671 bp, Zea Mays
ctcgaccagtggtattcctgcgcaccttcctccactctcgttggtacctggggcccactgcctagcctctggttctctgagcaggttcgcctcgttagcgctcactcactgccgtgtgggtccaccgtgtcagtaccatcgtcctcggatcgttatcggtcacggcgccgctcaacagaatccgctcgattacagccgaagctagttgttaggatcttggcgaagattgtgggattcgggtgccatcctggggtacttataggtgacctagccacctcctctcgttcatcagatcccgaccccgagtagagccaatggagagcagtctagtagaaaagaaaccaccgtcgatgtgtgctgcccgtgctgccggtctatggccagagtggggctatggttgttgacgaggccgtggtgaacctaggcacggagtcgtaggaactggagaccaaccgaatcctccctaattcatcgtcggtgtcaggaaatccgccgccgtgccgcgcggtatcgtgggtggaacccggaagttccataatccgaggtaaaaacttcttctatgtgttcgcccacgcagccattagggtaggaaccattctagggcaagtattggtcaccgtgggggatagctcaactagcgccggtgtgggcgccgccgtgatgggcggtcg

SEQ ID NO: 2237 - DNA, 567 bp, Zea Mays
ctggacaccaagagtgaactctacagataacatcttacgtctacacgtgaaaatgattcgcacggccaaagctttgaagatttggaggcaaaagagagtaggaaacatcaaggtgcaaatggctattatacaaattgtcctaaccctattggagaaagcacaggaatccaggcagctttctagtgctgagctagttttccgtaggcagctaaaaatcaaaatgttggggcttgcggctattcagaagacaagagctagacaacactcaaggcagacctggatgcgtctaggagacactaataccagattctttcatctgatggctaataacagaagacgcagaaattttatcagaacgctacatcaaggaggaaggttgttgaccagccaggtagacaaaattaatgcagcccatcagtatttcctgaatatcctggggaatagaggggtaagacactgtgtcctcaaatgggaaagcctgggatacaccccttttgatctttcagatctagacagcatgatcaatgaaattgagcttaaaaatgttattatgggaatgcagtcaga

SEQ ID NO: 2238 - DNA, 369 bp, Zea Mays
gccagaaaaggagcggagtcaagtggcgtctttggttgagagctagggttcgctggttcatcaagctcgccgcccgctggggacggattgcatcatcctgacgagtgagctcggtcatgtcgggtggaccgatgtacgacaataattatcagcagagcaggggtgctaggaaggcgacgagtcgggcatcatcatgcatcaggaagggagcggtggcaagcgacattagggatgggcatcggaacggactgacccgaacgatgtcgggaagaatggggccagatggatagatgcaaggagtgggacaagaaggaggaatggagtcgagaggactgaatcgatccaatgacgagacctaggacggggttg

SEQ ID NO: 2239 - DNA, 392 bp, Zea Mays
tagctagcttctttcgccgctgcaatttcacagtacaaagagcacgaagcataccgcgtgtactagattctttcgcttgccgattatatactgtgcgtgcgcgtgcgcgtgcacgcacgacggcacgagcgatcgagcatgctgaggagggagaggagaaaaggtgcatgccagcgccacacagatcctccatgcacgaggacgcgacgtgtctatccatctctgtcgtccgtccgtgagccagagtgtcggtgtgtgtagacgtgcgcgccagcattccattctagtgcgggtttgctggcggcctgcctgcctgcctgtgacaatctgaccccaaaaataaaatatcaccggttctttttttttcactaagcgctaaacgctaatttggg

SEQ ID NO: 2240 - DNA, 796 bp, Zea Mays
gggattttagatttcagacgtgaaattagctcctgctgtcgccatccttgaaaaatgcgttccccaagaatgcatttcctagtttttgcctttctacagtccgaccatcttttgtatgtatctcttctgtagaacttcccatagtagtatgcaagcacatcaccaacagtctttgtacccagaaacctgctcagcaggttgagattcttgccaaaaatgtagagcccaaggagaaatacctctgcctcaagatcactccaaagagcaacgggtgaataaggtagaggacttaattgtttggtttctctctgctgcattattgaattattggtaacattctgtccttcttgagtggggcaagggaccattttttcatcgtatgcttgattactgtcagatttaatttgaactacaggcactactgtatgtggatactggaatgttgcagcacatatgccagtgtcattgctagttgcacaagttgaggtcacctgactgtgcacatctccagtgctgccttttgttccaaattctgaacatttttgcgtttgtagtacctcttccgtcttatcaacttcgcttggtgatgcccacgtaattggtaaagctaacccaaccacaacagggtaaccatagccatggaatatggaatcattatgtgaactggccatgagcttacggcactcatcctctgtagcaagattggggatttctgcctggtgctcacttccaatgcatggacatacaagcgagtcatcatataccacatctgaagcaagagaagcttctgatgaag

SEQ ID NO: 2241 - DNA, 1182 bp, Zea Mays
ggggggcgaaaactctgctcggggccacatgccagttgccccttagtgacgtctcgtcgtgggctgggcaaggggaaacggtggaaacgggcgacccaagagtgcaatgggcccacgctcggattactcgcggcttgggcgtgatcacgttgaggctggtcgtttttcccgcgccatcctcaaacgccagagatagcttagagcgaaggcgccgggttttcctcgggatagtgaagtttgttcgctattagctaggagataagcaggaaaagggtgatcagcgtgtatgcgggaagcaccctacggtcgtgtatataaggccaagggggatccccatcactttcatctcataaacacctcacaacttagtagacatcgcttgtaaacacttcccacatataaagccaccctaggaagtagggtattacgctcctcaaagcggcccgaacctgctgaaactcgcttgactctctctcgctctcgtgcccttggcacgaaccatcgagttacaatccatgacaccgtcctacccaaaagcaccacgagggtaccccccgcgtgtgcggtcggacactaaacaccgatagctagcacgcctggtagggggtgtgtcgtcgatcaacgttaactccatggccatcatcttcaagagcaagatcaccttcagcctgggagctattttctgcttcgggaccatctcatgtgtagcggatgtagtgggaactctgcaccgcatagcaactccacccaagaagaaaccctcctcggaaattccacaggaagctagagtgaaaccgcgagccatgcccccgctcacagctcgacaaggcatggtccggcgcaagtctaggctcaaaagtcccagaggatgaaggtcagtcaaccagggcctccctagcccgacgaactccgttgtacacctcgcccactaaggagtggacacggatcactcagagaagggaagtgaatgttccatacaggggaaggaaaacacaacgagcaatcctcccaacacctcctcccttaaaggaggatgagaagaaacacaccaccgtacctgctcctttctaccccgacgttctcttcattcatgggagattggagtcatcacccatctctgatgatgaacccactgtgctgggggaagaacctccgtagcgcgatgctcagcgatggagaaac

SEQ ID NO: 2242 - DNA, 717 bp, Zea Mays
cgggaagacagccagacgttcgcaccccaagctggaccgagtctcccacagatgaggaggtagctgaggcgggtgtgttgctagctgaagttggactgctgaaagagagaggtctaactgctgaagctgtggtcgctgactttgttttcaagaacattcagccactgaaagatagggtctacccagcttatctgtatcgagggctagccgatccaactcgggttaccaacaggagaatcccttctgcagacttggtgagccggcttgaaatgattctcaggggcaaggtgtccaacgttggtgctccaatggcgtactcggcctggaacttgcctcctcccaaagccttcacccttttcgtgtcaaatccacctgtgactgatggcaatttgggccttagagtgcgaccctctgctgaagaagtcagtgctttggttgcttcgcttggggaaattcctgatgatgaacggcaagtccattttgaagtacccctgaaccctagtgatgcagatataaatgccatgcttgatctgctagctgatgattcttccgatgctgctcctgctgatacattggcagtggtgcccctcccagaggttaatacaactttggatgttcagaaacctgccagtactcgcccgaggcgccctaaccgaaccaatcagcctaggccttctgctgatgagcaaaagaggaaaagaagacgcctccggcgag

SEQ ID NO: 2243 - DNA, 1697 bp, Zea Mays
cacccggtcaagggtaagcacgataccccactccctcgattcactgcaaattatgatcccccacccaatcaattccgaggcgagtcagctacaccccatccgggagctctagatgctcacgacaaccttcccaaaatgtcgttccctcatttcaatggtgagaaccctaaactatggcgatcccgttgtgagtcgtactttgagatgtactccgtagactctaccatttgggttaaggtcgccaaaatgtacttacaaggtcccgctgctcgctggttccaatccattgagcggaaactcatccatctctcctggtccagattttgtgccctccttgacgatcgttttggccgcgatgagcatgccattatgatccgcaaactattccacattcgccaaacccaatcagtagcggagtacatagctgaattttctgaactggttgataacctccatgcttatgagtcggccccagatcccctatattacaccactcgtttcattgacggccttaagggtccgatccgctctgctgttcttcttcagcgccctcccgatttcgatactgcctgcgtgcttgcttctctgcaggaagaggagacggaaactgaagcagctcgaaaatcggagttcaaacgcccatattattcagcagctcgactagaatcccccaatgcaatgaagccagcattccgaggtgcctttccattgccggcaccaccccaagcaacagatgacaagactcccttgccgatcaacaaatacaatcaatcagctgctgataaaatggaggctgtccgaaattaccgtatggccaaggggctgtgtaaagtctgcgcagaaaaatggcacaaggggcataaatgttcaactgcagttcagttacacgccgtgcaagagctttgggatatctaccagcatgaggacacaaattcaccccaagtggacgaggactcttcttctcaactttatatgacactatcctcagcagcttacacaggatcagttgctccgaagactgtgaaatttctgggcccagtgcagtctcagcaggccttaatattggttgacagtggcagtactcactccttcatcagttctgccctcgccgagtcattgcagggactatccccactaaccactacactcaaggttgctgttgctaacggcaattctctacattgttccactcagttggctggctgcaattggtccacacagggcgtcaccttccaaacagacttcaaagttatcccccttcaatattatgacatcatcgtgggtatggattggcttgaaaatttcagccccatggagatacactggaagaacaagtggatgctgctaccttataacaataccaaggttttgctgcagggcaatcttccagagcaccctccgcatacagtagtccaactccttccactcacagttgcttgttttgctgttgatttttcacaatttcctgaagacctgcaagcagttctatcagaattcagtgatctgtttcaacaacccgaagggctaccccccagtcgagcctgcgaccatgccattccacttattccgggagccagaccagtgtctattcggccataccgttacccgcctacactgaaaactgagattgaaacacaagtgcaagccatgctgtcttctggcatcattcagcacagtacaagcgagttcaactcacc

SEQ ID NO: 2244 - DNA, 355 bp, Zea Mays
gagaaaaatgacataaaattatatcgaaccaaacgaggataaccattcattcattgcattgttcatacaggtttttccgagttacatcatgttaggagatccaccctaaagcctagttcaaaagttggtaccaaaagctaagcttacgtggttttctcgttctcctaacatgtttaattctaacccgtctaaccctaattcgtagaggcaacactggccgtaggtgtagggggcactccgaagtaggccgtgttcgggctagaagccagctctatttcctcgggatcctcctcctcctcactgcctacctcattagcgttcatgtcttggtgatgcatttctatgtgagcgttgg

SEQ ID NO: 2245 - DNA, 567 bp, Zea Mays
gtttgatcactgaacaagccttgccaatctttgtgtcataatgtgacagcttctctatgaatccaagtcggtggcgggatggaagctggttcagcttgcttgaaatcaattctttgatcagtgggagttggatgtgaatggtgtgctggccacatgggtcaggacgtggtacatcaaacgtgtttgtcctattcctatgctgttgcaaaatgaatattattaagtaaatggatacaatataactgaacattatgttaaaagtttaagacaaaaaaggttataaataaaagcttgccttaaattgtgattgaacaggtggtaccgctgtgtagcatgtctctgtgctgcttcggaactaaaaaaggtgtgtaagatactgactcaaatgtaactatattatgctaatatgtgttctagactgtggattatccttctaatacaacatagtacaaaatgatataacaaaaaatggagttcatttgtacattaaaacgacactgcttctatccatgtaccatatataagccaaataaattgataaaaaatataatagatgtaagaaaaaat

SEQ ID NO: 2246 - DNA, 467 bp, Zea Mays
atttgtgttgcattaagtcttagactcatgccaaatgattaaattgtatagagggtacccggtcatgctgatcagactatattattaatcggctaaattatgacattggctaaatattggctgcgccctggcaacacgacgtattatttgtgtcgtacgaacttggttgcgtcatgtgattactatgttgtactctcacttagtcggaccactcccgttgagtcggtgccatcaccaagtcacgtatttttcgcatgccctgcaggcacggttcgtctgccatgatcagtgagccacaattgcacctgttgtgcacgttgcgtggacttatcgtgtaccccgactatcgagccacaattgcgcctgttgcgcttgttacggaggcttattcgttgtcgtagccttgctggccacacacatgttgacgctagatacgctggagcttgtactcgcgtggaatgtggtgg

SEQ ID NO: 2247 - DNA, 384 bp, Zea Mays
ccaaattccattttcttcgcctaaattcaaaccaagcactcacttcactcatatttacccatataaacctattcgtaaagtatcggctcaattccacgtcatttcgtgcctcaattcgaattccaaacctcctatgacactatttctcgttcaaacgccgttttcacgtcgtttgacctctcgatcgccatatctctcgttttctgtgccatatttctctgtgtatgtatttattcacatttcatatacttatgactatgtgactaatacatattcccctcttctgtcatttcagtgaccttgcctgcccgtgagccgtctcctgtcctgcctggatttccacctctcgtgtgagttttccaggtagacatctcctcttttgat

SEQ ID NO: 2248 - DNA, 360 bp, Zea Mays
atgaagacattaggagtgatccgtgatggggattctctgagtcaagaggcgctggatgaatatagtcgcattttcagcaaatctctttcccaggtgcagatccaagctcttgcctctcttttcggttggtctctaccagaagagatgatggtaggggaggtgtctaccttttgaggaaggttctcttccttgggttgcgggtttgttggtcgtcttaagctagtgttttatggacccttcaaaaattctcacttggaatgtaagggggcttaatgcctcggctcgccaagatgttgtaagggctgaggtcgtctcctctggagtggatgtggtttgtttacaggaaactaaaatgcagga

SEQ ID NO: 2249 - DNA, 460 bp, Zea Mays
tccaatagctgataaacggtgatccaatgacccagagacgtcttccccgcggccgaaaccaagcggtggagcacgcacacaccacacgacggcggccatggcaggcacgcccatctcctgcgctcgcacccaagcattgatccgaaaagcgctacacatagtaggggccaaggcgaacatgatagaaccaacttaccgatgatttggaccgagaggagacccgaccacggcatggggcggtcccgcggcggagatcgaatttcggggacaaattccgcgccatcccgtcatgagcgccacccattgaggtaacgggaaagcatcaggcgacccaaggaggagttcaggtcggtcgtcgaggctagggagacgacgaattgcacggtcgacgacgacaggtgcccttcgcaaccatggttacaccctcactctcacttccggattcaacggagtttctcgg

SEQ ID NO: 2250 - DNA, 438 bp, Zea Mays
gtgggatgaggccgaggccgaggatggggatgggaggaggagcacatgtaggacggaggaggaggtgcaggtgcctcagcaggacgaggacatgcacgtggacgacgcagcaggacgacgatgatgatgcacctttgtccaacgacgaggcgcagtaggatgcctctggttctggcacctctggttcgacgcgagtctacttgcgaggtcacgtgagtctccctcagcaaccgatactttgtgacagacgcctgatgattcgaccagagggagaaaagtatgtgactttagatattcttactgcttcttcatattatatgttcaaattcaaaatagaagataatacttttttaatgacttgaacatgtcttgtacggttgtggagaatgcaggtggtcacaaacacaatcccaatggcattctcagtcttttggtcaa

SEQ ID NO: 2251 - DNA, 395 bp, Zea Mays
gaggggtcctcatgaagtgcatccactcggctaccaagaggcagcttttatatgagattcacgtcaggcagtgtggcatacatgcaacatcaagaactctggtgggaaaggcttttagatctggggtttactgtccgactgcgaagaatgatgccgccgagttagtctagaagtgcgaggcgtgccaattcctgtcaaaataacaacatctacccgcacaacagttgcagactattcctgtgacctggccatttgcatgctaggggctggacatgatcgggcccttcaagaaagctccaggaggatatactcacatactggttgccatcgacaaatttacgaagtggatagaatacaagccaatcatttctttgacctcagcaaaggcagtagag

SEQ ID NO: 2252 - DNA, 476 bp, Zea Mays
atctaatctagatcccatctaatctaatattatccaatctaaagtgagttattaacatgttagttaatctggtgatatgggttagacactgcttccacaaacataacctaacctaaattaatgtcacataccaacttgtccataaacaacaatataacctacatcacaggctgcctagtccatttgttccaaaagcaaaatacaactctgttcaaacctacctacctcgtgtaccccgtctatcctaactatatgtccttaactcggatggcaattccaagaagaaagaccaaagaagaccaatcacgtcaaagaaggataagcactcaagccttcaaagatcaagctaaatcatcagatgaatcaagatccacaaatcttggatggagtctttccttaccctactctttcttacccaaacctatctatgctttaaagatatccttgatcctgcataataatgtggctacgcccat

SEQ ID NO: 2253 - DNA, 419 bp, Zea Mays
cacgacatatgtacaaccattgcacaagagatccactatccactctccaggacttgtaccaactcttcgagaagtatgtccggtccgaagagctatactaccggaaggtagaatcacaacgcaagccgaaagagtccccgcagtccagcaagtcatggaacaggggcccacaacaggaacaccccaccgagagcacaatcaacaacagccctaaattcataacatagccaatcagcagcagcagggttgagtcccctctcgacgttgcgattaccctccgcagcaaggccgcggtggtggtatgccaagaggaagaggccggggcagagcccccaacaacccagaaagtttaactgcatgttctatggcgaagacgcagagcacccaaccagagattgcccagaaaccaaaaaaatcaa

SEQ ID NO: 2254 - DNA, 744 bp, Zea Mays
gactgctatagtaagattgaagctggatagtagagcaacacctttcttaaagatggattagtaagtcgctacatggaaaattaagatccaggccttgcaagttgggctgtcaggccgactgaagaacaatcccatggtacagtaactaaaacagatcacgaattcatcccccttcgccgctggtgaccgtcgcaccgcgattcacgccggccgctgtgattcgtgtgccgtgacttgcggataaccatgggcgagtaaagaacttggcgcctggatcgactcgggctcggtcacagctaagctcaccgtacccacttgctcgtcgatcggtcggatagacctcgccgccattggccgattaccgccatgcgccacatgctaaaacgcttgaccacgtcgcagtgaatcacatcatgcatgcccggtgatcgccgaggagcttgccatggtaataggccacgaatcaccgcgccagtaaccttctccccctccgaccgccagcgcaacttcgtgaaattggacgccaccgctgtgggagcctataaattgccgaccccgcctgctccactaagtaattgtgcacccagtagagcaacccgtgcctcgaatcatccactagaactccccaattggggatttcccccaaatcactcaagaacaccgagcggtgtgacctcaccgtggtcagctcgtctcaggtccgctcataccctctgccctttcgttttagtgttcttgtgtgcc

SEQ ID NO: 2255 - DNA, 955 bp, Zea Mays
gggggtgcgagtttggagatgcaccgtggaaggaaaactgactaccttgaaatcccactcaaggatagtatcaaaggatggctcttggtgtggtttattgttgagaaccacggaaaatctctccccccacggtcagggagacagccggatgttcgtactctgagttggaccgagtcccccacggaccaggaggtggctgaggcaggggctttgctggctgaagttggactgctgaaggagaggggttttactgcagaggctgtggttgctgattttgtcttcaagaacattcagccgttgaaggacagggcatgcctggcctatctgtatcgaggtttagctgacccaacccaggtcaccaacagaagaattcctgctgtagacttagtgaaccggcttgaaatgatacttagaggcaaggtatcaaatgttggcgcccctgtggcatactcggcctggaacctgcctccttccaaggccttcactcattttgtgtcgaatcctcctgctgctgatggtggtttgggccttagagtgcgaccctctgccgaagaagttagtgctttggttgcttcgctcggagaaattcctgatgatgaacggcaggtccactttgaggtgcctttggatcctagtgatgcagagataagtgctatgcttgatatgctggccgaggactcttctgatgctgctcctgctgggacattggtggtggcgcctctcccagaagctggtacaaccttggatattcagagacctgtcagtgttcgcccgaaacgctgttgccgagccaatcaacttgattctcctgctgatgagccgaaaaagaagaagagacgtcttcggcgggtatctagcttggatcgggatgctggtccttcggttcctgctgttgaggaagtgcctgtgcctgaatttgccgacgctgaccccaatgggtgtgattcatctgtcg

SEQ ID NO: 2256 - DNA, 520 bp, Zea Mays
gtttgcgatggtacagtaacctgacgaagatcgccaggttcagtgcaccgccaccggtgatcccgcgccgtgatcctcgtcgctgttgtgattcgtgcccggtggagtgcagacaactacacatggtgaaaaatatcgcacaagagatgaacttggggcactgtttcgccctgtcgtcgtacccacttgcacgggcgacgtggctgcgcgaccatcaccgttgtgccaccgtctagctcgattgtgacacgccttaagtcgtctcaccactcgttgcaagtcgtgaagactcggaagtgaccgtcgtagatcgtaaaccagtgaacgccacattagcaaactccggtgactcctcccccttttcaccgcgcgcacttcctcgtccaaattcgccctcctcgtggccatcctctataaattgatgcctcagcttgttccgattacttgttacgaacccaatgaaccagtccttgcctccaatcattcaccatagcctctcaatttctcttttcccccaaat

SEQ ID NO: 2257 - DNA, 604 bp, Zea Mays
atctggcattagaaatatcgaagggcggacctgatgtagcggtaagagctgtctcagccaccaggttccagacccaattacccactgtaaataaactcttgcgttatccatagcagcaactagcaacctgtaaagctgtcactgtccatcggctaatttatccatctattgatccacaggctttactcaggtgggtgccagcactctcagtgactgaatcctaacggcagtatccaaatccaacggtgagctcatatggcatcatggatttgtatgttccaaatgctgcttatgcctttcaagctttcagatcatgcatgcacatgtgtggagcagaaaccggtttgctggcatttgtgcgcataacatggttgcaacttgcaaacggaggtttgtcgcatccacttatatcaattccaggttaattatcccgttcagagagggagggaaaacgtaatgcttttgtgaaacttcctcgtgctttctggcgcagttgtgcatgccagcttctgaaaaggtgttagctcagtccatgtaagtgagtcaattctagttggctactatttttcttataaccgtgaaagaatttaggtgctgctgatgc

SEQ ID NO: 2258 - DNA, 468 bp, Zea Mays
tcggcaaaggaggggaaacaaccaaggacgggataggtaaaacaacactctcaaactgcaatgggagtgaggaggctttaaaatgtaggtacaagataagcatcatggtaaagatcatgatatgacaaggtgataacaaacaaacacacaataaatgatggatttaagacaaaacttgcaacacgacaaagaaggggaagcaatcaccgatgtaataggtgaagcaccatcctcgagctgggatggaaaagaggaggatttaaaggtcaggttcaaagtaagcctcaaggtaaagatattgatattacaagggttaaagccgaaaaacaatggcataagagaagacgtaaaggtgcataagaaccaagggtatgagtaaaacaaagaatggagttgagacaagacttgcatgtggcaaagctgaggttacgaccaacggtgaaataagtagagcaccactctcggatt

SEQ ID NO: 2259 - DNA, 666 bp, Zea Mays
tgctgggacattggccgtggcgtctctcccggaagctggtacaaccttggatattcagagacctgtcagtgttcgcccgaaacgcccttgtcgagccaatcaacttgattctcctgctgatgagcagaaaaagaaaaagagacgtcttcagcgagtatctagtttggaccgggatgttggtccttcggttcctgctgctgaggaagtgcttgtgcctgaatttactgacgctgaccccaatgggtgtgacccatccatcgctgatcccaatgggggtgctccatctgtcgctgatcccaatgggggtgctccatctgtcgctgatcccaatgggtgtgctgtctgtgttgctgatgaaaacgagggggaggaagaagatgaggtccctttgactcggaagaacagtcggcaatatgttgccagtggggagagtagtggagttccttctcctgctctgtctgccctcattggtctacaggggttgtctctggcaaactttgatcagactcttgaagatatggttccagaggatctgttatcagagccagcggatggtgacgcgatggatgtttgtgctgatgtgttcgacgccgggttggggtcatcccgggcagcatcccgcgcctcatcgaccttggagcgcggtcttgagggtcaggaaactga

SEQ ID NO: 2260 - DNA, 364 bp, Zea Mays
tgctcatacactaacaaatgggtcccactacgtagggctccctgccacctcaggtcagactcgccctcgtcctctccgcgagcactgcaacaaactcaggaaaacgtgggcatgaagctcgggctattacaacgaccatacctcctcccccttctgaaccagactctgctccgagattagaccgagcgtgttgctccctctgccgcggcttgggaactagcaggtaggccctaccatgccgacctcccccacaggcacgcccatggcgctggccctgtaacaaccccacgaggatgcggccgtggatcggtccatggggggtataaacagggatggcgacctccctcccttgagcccgctaatc

SEQ ID NO: 2261 - DNA, 621 bp, Zea Mays
tgggcgcaattggaaggaggtgaccggaggccgtgcgaattcctcgccgtggttggagatccgtcgtgcgtcgcgggtggcttcgctcggttctcaactccggtgagtaaaccctatacctctttcgctcgtcccatgcgatggcgtagcacccagcagaatcaagcgtagggcactaaatcaccgggttcagattccggcgatggcggtcgccgcgggttaaagcgcgccgccgcagccctccatcggagttgggtaggggggtttcggccgttggatgagcgatctgtggccaggattagacttgggataccgcttcggccaggggggcgtgtgccgtccgattcgaatcgagcggacggtgattgtcatgtaggtatttagatctagagctttgtcgtctgatccaacgggcgtggtgtcagaccgattcgatctcgggtgggtttgatctgtgccgtacacttctaatccgacggtcgtgatagctgcttaccccttcgcggaaccaaattagcacatgaaaccccctgttttcaggaattaaacccgccgtcctattcaactgttctctgtgtcttaggaattttaccccgagaccccttctgtcatcagttattg

SEQ ID NO: 2262 - DNA, 323 bp, Zea Mays
ttgggcgacttctgcacggatagtcttcgcggtagacttcggtttttcgcacttgttgtgctagtccggctgcacccttaggcgacttctgcgcggatagtcttcgcggtagacttaggtttttcgcacttgttgtgctggtccggctgcacccttgggcgacttctgcacggatagtcttcgcgatagacttcggtttttcgcacttgttgtgctagtccggctgcaccctaaggcaacttctgcgtggatagtcttcgtggtagacttaggtttttcgcacttgttgtgctggtccggctgcacccttaggcgacttctgc

SEQ ID NO: 2263 - DNA, 472 bp, Zea Mays
gtgccttacccacgataagtgtcgcgacagatcttatgataccattgaggtagcaagaggttgctccatgaccgacacccctagtggtcagcgaagctaccatggtcgatggaccccttcgtcttctctcccctggtagaatagccgatctattaatcctcctcagccttgcccattggccttcgctaataaccaaatcaagaacaaaggtgcacattagggtttgactagagtaagattagagaagtattgggtgatggaggaggatagagtagtccacaccgacgaagtggaacatgggtggttgggtagcatcattgattagaccttgcagcttggcgtccaagacctcgatgcccgcgaggaaagcaactcgcgaagtcgcgtgagaggagcgctacatgatgtgtcatgctagatgggagcgataatgagatcacgtggcctgaaccctaaaccataaatgcctaaa

SEQ ID NO: 2264 - DNA, 756 bp, Zea Mays
ttttactataaaccatgtgtcagtgaaacaaaaatctgaaaataagccagcagctgattgcttaatataatccactgaaagcaacgatgtataggcgtacgtgtagccctgcgagccacgcatgttgccaccagaccacacagattgctgtcatgattccgcaaacattaggagggggggccccgatcgctgctgcctccactccactcgccgctccaaccctacaaagatttcggcctctttgccgtgcgcttccctatgattacacacatgactggacgatctgatctcgcccttttcctctcgggggtcgtgctcgcttcgtgccaaaacgtcgccttgtcctgcgcgtctagtttgactgtttgagtggctcatcagtgctgcacaggcacagcacacagcacagcgccacgccgccactcccacggtttcagcaggtatggacaagccgcagtcaggctcaggcaccgcggccagttatcttcgaaaaaactccgaggggacggggtgatccacgcacgcacgaagccatgaaaatgtgttctagttaggacgtagctgatgcgggcccattcatggttactgcacgagagcagagtctcttttgtgattattatgcggtgaagcagtagcagcaccagctagctcgacaatctatagtgcactctctgccaaaacctgatgagctgagctagctgcgggtcggccatgagagaactctcatcagagctcagtgtttatgcatcagtggac

SEQ ID NO: 2265 - DNA, 355 bp, Zea Mays
ctgctccaccgtccgggctggttggttgggacgcggccgccctggctgccttccagactcccactctgactccgttgatgtgtcccgagtggatcgcggacaccggtgctacctaccacatcactcctgaccctggtatactcacctctattcgtcccccttcttcctctcttccttcgtccatcatggtggcgaatggctcgtgtcttcttgtcacatctgtgggtgccgccggcactcccggctcttttcgtattcccgatgttcttgtcgctccttctttggtccacaatcttctttctattcgccgttttaccgctgataattcttgttctgttgagtttaactcttctgg

SEQ ID NO: 2266 - DNA, 450 bp, Zea Mays
agcacacaacgagtgcgatgagggtacaaacttcttgcattccaggagggtgagagcatctaagatttcacactccaactcataggcatcgtcaaccagctcgccacgctcggagatccttaacccgaccacaaggtcatggagaagtatctccaaattgcatgatcaaggtacaagcagttagtcatttaaattgaggcattgctagatgtttcgacgctttcaattgaagagatcacaagttggctcgtggcctcggaggatgatctagacccccatccttccattcacgccgacggcaagttgtacctcacggaggagcagtggcttgagcgctacaagcagaagaagcaagagggatcgtgcggtgccgatgacaccgggtatcgcggtcgacttcatggcggctggggcaaggcttgcggcggcggcaaaccgagtgcacgagac

SEQ ID NO: 2267 - DNA, 641 bp, Zea Mays
cgcaagtactagcatagtcttagtaacaatcagcaacgccacactgctaaagcatcgtccatgcaatccttactcttcaccaggccatcaagagcagcagcacctcatcctcactctggacttgtcttggatatccaggtcatgaggagctaaccaaacttgttcatgattctgccatccagtcttgtaataaagatatgaaagctatatgtcacgcgtgtcaactcagtcgtgttgttcatctttcttttagtgtgtcaacatctcatatgtacattgtgacttgtggacatctgttgtaggtgtcttccagttacaaatataatttcgttatttgtgctaattgctcatattttctttgaatttttccaccgcgactcaagttgtacatgttccctactctctatatttctttccttatgtctccacttagttcagcgcctttgttaaggccatctagtgtgacaatggcaggaagcttgatagaactacaatgcccacaccttcttccttacgcatagcactcaactcagcatgccttgcccctacactacgactcgaaaatggcaagcctaaacacatcatccgatctatcaacaataccatctgctccttgtttctgttagagtatattaggcaag

SEQ ID NO: 2268 - DNA, 769 bp, Zea Mays
gaaaaaggaagggtggcggctggttgatttaactggacaccgatggcacccgattggccaccgtcggcggcaacatctactggttggctgcagctgccgtgaaggagagggggacagggagaggagtggctgctcgaatgatttaacgggacgctgctggcagctattggcacaggatttggtggccagccactggctagagctggcagtggcagatggtgctatcggctagagaagaagacagggagatggtgaccgctggttgattatttaaagagaaaaagagatgattgtttaggagctaattaaaatttttatttgatttctctgagataaagctcccatataagttgtatattaagacgagggcaatttattgtttggagaggagtggtcatctgttagccgattcgtgcagcgctcactcgttggctaagaccgacgcagggaacggagtgagctgacatacggatgaacgagaggccacagaataaaatgaaccgaaacattttatttgggtgttgcttggaaattaaattctcgcacacaagtagaaataaaatgaatcgagatcgatcggcttcggattcagtatcgaaataaaacgagtcggattaataaaaatcattgtcaatgttgattttcgaatttagattggacatagagattttaagccgagttggataaaattaaataggtgccaacacgtggagtatcccgtttgagagcacgggctcggattaatttttggacacagatcgaacatcga

SEQ ID NO: 2269 - DNA, 455 bp, Zea Mays
gtcgagtgtctagcttggatcaagatgtcggtccttctgttcctgttgctgaggaaatgccagtgcctgaatttgttgtagctgaccccaatgggtgtgacccgactgctgtggatcccaatgggtgtgatcctgctgaagttgaccccaatgggtgtactgtccgtgttgttgatgaagatgatgaagaagaggatgaaatccctctaattcggaaagaacagccagcattacatagctagtggggaaagtagcggtgttccttctcctgctttgtctgccctcattggtctgcaagaattatctctgacgaactttgatcaaactcttgaagacatggttccagaagatttgttgtcagagccggcagatggtggcgcgatggatgtttgtgctgatgtgcccgatgccgggttggggtcatcccaggcagcgtcccgtgcctcatcgacctt

SEQ ID NO: 2270 - DNA, 1493 bp, Zea Mays
gtcttggcgagcgcattgcccttggccaggggatggtggcaaatctatatgcggaaatggataagattgttacttgcactgtggccgatggtgtgtgtggccgtctagatgtctgcgtgccagtctggatgctgcaggtgtggatgtgggagcgctacaagaggctgtgcccgccggagctgaaggcaccgcagttccctgtctccaatgtcagggtattgtattggagccggaggaagaagaagagcacatctgaagaggctctaaagattttgctggacgaagtatgctttgagtggaggccctatcggcacaactccctcaactggatggaacccaagtggttcaacaaggacaccattttggtgacctgtcatggtaaagataagccagagtggttgttggattacattgctgttatcagtcaaacaatgttgaccgggtttcatagtgatgacaccgacaattcagtactgtacaatccacagcttgttgcgagacagtttggttatgatcaggctgctcctgtgtccattgtcagggaaatccactttgagggaatcgagttgtggataccaagtatcggtagatatgggatgcctggtgaagattatgttgcatggtgtagcagcagtgggcagttctacaagcatcaaaatgatgtccaatatggttgctcggtattacgaaatcatgaaaatggggctatttcgtcgcaactgaatgtaaatgagaaatgtgttgtagtgccaacacttgatcaatttatcacccaagtcactaggagagaccacatcaattacattgtagaagggcagccggagaaaatggataatggaagtcatgaggatgaaacagaggtgattgtctgtggccttgaagcttgtgtcaaggatagcagaactacttcagtgaaacagaatgtgcagaaacaaagagataaatttgctgaagatggaggtgatagtaagaagaaaagaaaagtagaaagtaacacgaaaaggagttcgttgcaattggaaggtcagaagtattcttcactccagaaagctctaaattctgattctaagaaatgtgaggagttggctcaagttgacagtgatgatgaatgcattgttctcgaacagcccaagaataaatgtgaagtaataaacctggatgatgatgaggaacagagtgtttctaatcgagaacatcataacatgcaacttgtcctagaactggaagagtttgtccgctctggtcttctctcgcaatgggaggaaagctcagatgaagatgatgtaagtggaagcaagcaagaaacccagaagaaaagcaacaatgacccctatgctgaagcagccatgagggagtaccctctgttctttgagttcattcctcagaaaccacattacagaggcttcgtgaactatgatgaaactttaggagatctaccttacagtggattatggtttttgctaattggcttggctaaggaggtgctcaagacg

SEQ ID NO: 2271 - DNA, 588 bp, Zea Mays
cgctaagcctaacgatagtgttaggagttagctgatgaaggtagatcccaaacttcttcaatacatcagcaatcatcttgtttaaaggaaatctcaaaccagctttaaagaaacttttgaaaaccactacttcatcctttcctggctttggagtaatctcttccccaccaaaacgaaccagctctttcttcgcttcattgaaatagcccaaatttatcagctttggcatgtcatcttcggaaatggtggatttcccgaaatccaggtggctgggtttacttggcaccgcgctgtaatcatcttcagactcagtctcctcaacatcagcatgttctgcatcagtggcaggtgcatcctccgatgctaccagccctgagcgcttcatcacttcagagattggggcagtttgagcacctttgacttcctctccgtcgcgcgtaaccctagctgtggaacacactatggccatctgatgattgaatttcttgttttttgaatgaagttgaaaatttttctttacttttccgaagctctttcttgttacgaagcttgagcaaagtaaatagcttcggttgaggatgcagcaaa

SEQ ID NO: 2272 - DNA, 387 bp, Zea Mays
ggattatggaagtatttgtatcactgtcggcctgggatggctgggggcagcactagctcgttggtggtgtaagtctggagatgcgccgtgggaggaagacagaataccttgacattcctctcaaggacagcattaaagggtggcgccttgagtggtttatcatggaaaaccactgcaagtccctcctcctcggtcggggagacagccagatgtacacacttcgagttgggttgagtcccccactgctttggaggtgacggaggctagggttctgcttgctgagatttgtctgctcaaggagagaggtctgactgccgaagctgtggttgctgacttcgttttcaagaatattcagcctttgaaagacagggcatatccagcttactt

SEQ ID NO: 2273 - DNA, 317 bp, Zea Mays
tccgatccatctaggtcgctccaccgtcccgagctcagcaggtagctagggctgttgccccagggggaagcaaattaaggaccacccatgcccatgcggatgcaggcacgagggcttgctgcttcggtggtttgtttcaggagaattgaagaaggacttggagtcatttctctgcttgtttgttggatcgtcgtcctcgtttcgcaaagagggacgcgtgctcctccttcgctgtgtgggttgtgtgcagggagtagaaagaaccggcgagcgagcgagcgctggtccctcccagtagtcccaggccatccatccat

SEQ ID NO: 2274 - DNA, 618 bp, Zea Mays
aagtcatgcacagatggcgtgatggggtggttaatcgccttgcttgttattggtgtaccccctgcggtgatgcacttctgaagccgtgatcaagccagaaatcaatcctgaacatggcttagtactataccctcagggctcctactttgttgtgctcaacctttcgaatcatgtagctggagcttgtcgagcagagctttaggaaccaacccttaagtttggtcaaggtccagacctttagggacccagtccgaggtattaggacaacaattctagggtggtggagggtgtaggcttatggtacggaaccaggctaagtggctacctagctccggaccacccctgagaacgtggtcctttcccctggttggaggtccctagctattcgatcctcgttcaacatcaaatggggccccaaactaagcgacaagctagttacatgatcacaacagaagttaggaaccacgtgagggctagaggaaacaatatatgtaaattaaagcaggaaaatgattgaattgagagcaaattcttccttcataaatgaatttgtaagagttaggcgatggacgccagagattgggtttatgagggtggacctcaccgagtacaaaagaa

SEQ ID NO: 2275 - DNA, 350 bp, Zea Mays
ccagctgggggagagttgcggagcacctcttggcatggcacttgccacagggctaagccccgacccagggttcctgtctgcatttgacacgggagcccttgtctctggctgtgatcacttctgcatgtacctgtctgcagctcggacccgtgggggtccagaagggcctccggaggaaggcgtgctttagcttcatagaccgggggacacggagttcccccgaggtccgtctagttgtcttcaccggagtaggagcctccggcgaagatatccttcaggtccccctcgggcgactgatacccgaggtcccgttcagccgcggccacctcgccgtcgtccaccttttcttt

SEQ ID NO: 2276 - DNA, 390 bp, Zea Mays
cctctttgagtggattgggttgcttagaaacaactaagtgtcgagcacaaaggtggccaacaaagtttgagtttgcaatgtgtgagcatgggaaagagtcctcgcgcaggaggtcatcctctcccttttatagaccaagggagaggggattacaactaacaaatggggccaggttggcacctgtcccaccatacattaatgaaagtcttgttgacgtcaatcgaggtcttatagacacatgctctacatgtcgcagatgatcggggtgtgtttagggtgtgcgcatgtcgcagatgctcgggggaggtagtacaccatggcatacattgtgggagactgggaatatggaaagttgaggcgcacatcgtctacgctgttataggggatgtg

SEQ ID NO: 2277 - DNA, 733 bp, Zea Mays
gggcggtgaggtcagtggtcacagcgacatggaccgatcggtggctgcttgccatgcattaccacttccactgctccgatccatgcatcatatcctgggtcgctccatccatcccgagctcgatctagcacagtagcagctggtagtagctagggctctcttgccgctgcaggcgagagaaggaccacgcacgaggcttgctgcatcggtgttccgggaggagaacacggccgcgagttattgctgctctcgtttgctgcatcttccatgtggagtctccgtccgaccgacgaggcccagaggtacgtacgtacgtaacacacacgcacgctgctggctggccccgggacgatggatggaggtctgttcgggcttcggcggggaggctcggcggagcggacgccgacgccgacgcgtcctactcctaccaactcgcctgctgcgcctccgtcgcacgcgccggccgggatgtcatcatgtttagcatggcattgacatgcccatatggctggcttgcgtaagcccagtttaccggtgcaagccgccaggctgcagcactgcactgcgccagggctagcttgtctgtatttaactgcgcatacttatcggagattgggggtgatcgcgggctgggtagcatggctggtgtgggtggatcggagttggagcctggcccggaccgcaaccgggcggggaccggtctgctacctgcggtacctaccgcacatgtact

SEQ ID NO: 2278 - DNA, 389 bp, Zea Mays
ccaaactgagatggcataggagtagtcggtgcaggagtaggtgcagccatatactgaggaaaaccctgcaccggcacaaactgagaagacccaggcacataaaactgctgtggaggaagtggaactaaaaattgctgctcagcgcttgacatcatgttgacagtgccctgagaagaggaggaagtcactggctcccatctgagcttcccattgggatttctcctacacaccacatccttgtggtcttgactgcagattgaacacctgccattccactagcactctgcacggcgatgcgcatcaccaaaatgaaaacacaccagccccagcctgggcttaggaacagctcgaaacctctaagtacttcctcccgaagtacctgagtcaga

SEQ ID NO: 2279 - DNA, 471 bp, Zea Mays
aaggttgccgaagctgacaaaatgcaacccaaagctgatactaagcaaatagaagttgaagctacaataacccaggttgaaaccaaggttgggcccacaatgcctggtgatacgaagcttgccccaatcgagcagggggctgaagaataatatagtttttgagaaaattgtggccaaagaagctgaatcccttactctcgaagcaccctccgaaggttttgattatattgttagacatgctttgggaaaaagactatccgaagaagaaatttctaaagccaaacattatgcccgggaattgcagtatccgaagggagccctagtatttaatggtacaaccgaggatgactttttgtactacctcccggacaacaaagaattatccgtctaccaggagatgggcagaagtatgggtttcccaaagctcgaagctggcctttgcgccatgacgaaggccgatctcgcagatag

SEQ ID NO: 2280 - DNA, 561 bp, Zea Mays
agcgtgagcatgttgcaccgtcttaagtcactgtcgacttaagccgattgctctgttggtagggtatagtggtcaccctaagtcgagtaagcgtgctgattggtaataaacacttcgagtgcccttgagaacgaaatcttttattgatgaggtatttaccgattatagaatacaatgctccccctatagcttttgaaatcttgctaagggtaaaacttcctgagatgctctatattccatgaattccctatttctgtgacatccatttgagtaagcctatatgattctggtcgagtgacctctgctactacaaatggtccttcccatagtggtgataatttgtgacgtccttcccccgttagaattcgacgaaggaccaagtctcccactacaaaggatcgatgtcgtatggccttgtcatgatagcgcctcagggtttgctggtatctggctgactgaattactgtattcaatcgctcttcctccaatacgtcaatgtcctctaatctggtagcctctgcttcagctatgctttcgaagaccaaccttggtgccccaaac

SEQ ID NO: 2281 - DNA, 497 bp, Zea Mays
tgaagggagatgtggctgcacatgtggctatgtgcgatgtgtgtcaaagagttaagaccgaacaccaaagaccagctggactattatacccgcttaagatacccgagtggaaatgggaagagattgtcatggatttcattgttggactaccctgcacatctgctgggtattattctatatgggtgattgtggatagattgactaaagtagctcacttcattcctgtcaagactacttataagtgatatcaattggctgagttatatatggcttggattgtgtctctacacggtgtaccgaagaagatcattttggatagaggatcacagtttacctccagaatttggaaaagttttcatgagaatatggatatgaagttgaattttagttctccctaccatccccagactgatggacagacagaaaagactaatcaagtgttggaggacatgttgagagcttgtgcccttcagcatggtagtagttgggacaagagt

SEQ ID NO: 2282 - DNA, 445 bp, Zea Mays
ccagtctagttcactggagtagttccctgtgtcacccctgtctctgctgaagccagcccaggccttagcacgccttaagtcccctccccgtggccggaatcgctcaccggagtttctccggcccgcccgagaccttctcaccgccgtcctcccctctctgcccatggattcatggcctcttcctcgcgatcgaggtcgccgtggcaccctcttcccctctacccaactccggcgaccccggagccaccctagctcgcgcccgcctcaactccggcgatttcaccgctgtggagaggagcggcgccgcccgcagccgtctgtttccccggtctaatcccctcagtccgattcagatcgaacggcccggaccgcgggataccgcttcgtgcacgcgcgcctgacacactctggcccgcctgtcagtgccattcgcacccactcggac

SEQ ID NO: 2283 - DNA, 531 bp, Zea Mays
cgcctcaccgtcgcccgtcgccgtagtctctgccggatcttcgtcaccgacccccttccgtgcgacgcccctctccaaactccggctctccatcggtgaaatccctaaccctaatcagaaatccctaaccctaatctcctcttatccagactccggctctccctcccgccgtcccgcgtcatcgtctccggctccgggctgcggcttggcagataagtccctcttcggctctccctctccagtcggccatcccaatccctaacccaaaccctaatctcctcttctccggctctccctctcgtgtcgtccgtcgtcgtgcacttcaccctcgtctccggcttcgggctccggcttggcaggtatgtcactcatcctcaccagtccccactccccagtcggcattctctaaccctaatctcctcttcgctgcttggttgtggactttggtaggtcgccggccgactacgtggtcgtgctagtgccgccagtgccctcgaggtacggtgccgagatagaagtgggttatggatg

SEQ ID NO: 2284 - DNA, 807 bp, Zea Mays
caaagttctgcaggcccttctccaaaaaaaggaaaagaaacagatgtagttcaatttaagtcaggaaagactgagtttggcgtgtggactgctatccaggtaggatttcagctacgtagttgttggttcacttggttgcagatttgactccttatccaggttgaagtgcacagttatcgggcatcagcaataaacagaaaaataatgtacataacacgaaaaccatggcatggcatggtatccccccagacaaactttcgtgttttggcctctcaaaataggatagggcttcagttaagagttcggttggagttgctctaagtaaatggaacagcaggaaaaaggcaagatgcctatctatcgacattctaccaaaaaggaattgaatcctccacctgcgcaattcaacgagaagacacaaaacagcggctaaaatgggcaatgtaccttcttgccatcctctgatttccgcggctttctcttcttcttccccttctccagcccctctctaacttccgtcgccgccgcctccccggccgcaggcacaggaggaacagcctcggcatctcctcttcctgcttcaccgccgcctccttttcctccaccttcgcggccgccgccggctggtttgacaagcccccacgagagtttcgactgcacgcaccgcctcggcggcttcccgtcagccgacgagggcgatggcttcgtcggagacggcgacggcgcctcgggatcagcggatccacccatgggtacgagaaatcaaatggggaatcgcggtgggtcagagctagggtttgggtttcg

SEQ ID NO: 2285 - DNA, 374 bp, Zea Mays
tgccttctcatttaaggtaattcacttcttaatgctcaaaacttgtgtttatatgagtgttttttttggataaatgttctcctacatgtaacatattcatgtgtttattttgattttcccatcatagcataaactaaaagttgatatgtgttgttcattgaaactattaccatttgttgctttttgactttggggtataacgttctctcccttttatgaaaaagaagttgccattatctggtgtacctgatttaattctcattagtgcttggattttgaatagtcaattatggtgccaacagccctgttatattctgcccaccaggtgattcatgcaagtgctcacctcccaaagatctgaagaaagtaagaaa

SEQ ID NO: 2286 - DNA, 563 bp, Zea Mays
tgctgtttcaagatttctggagccactgcttcccaagcagatgagtcttcaaagaacatgttatcaagctctatcacctcttcgtctacctcctttgcacaagttttatcaatatccttaggaatttcctttttcaaatcagatccttcatcaatattgcctagactctcagatctttcctcacttgcctctaaatcattctgaacaccctcaacatttgcagtttcagaatttgaagatacagaattggtaggatagcttatctgttccttcaagtttccatgcttggaattcttttttgcagctgttaagtgcgggagggaatcataagatagttcgcggtaaactatctcaactatgtaaacttccaaaaagttgtcagggccacagggccatgtaactaaaaactagtagacaacatatgtcatagttacaatatgaatgccaataaaacaataagcaaagttacccttgctcttccgcctacttggctttgcttcgacaacttcaaaactttgtaagcagtgatcctcccatgtagaggaatcattggaatttgcatc

SEQ ID NO: 2287 - DNA, 528 bp, Zea Mays
atgacatattttccttgctccgatagttcttgctaagggtaaaacttcctgaggtgctctatattctatgaattccctacttccgtgccatccatttgagtaagccgatatgatcctggccgagtgatctccgacaccatgaattgcccttcccatagcggcgataatttgtgccgtccttctcccgttagaattcagcgaaggaccaagtctcccactacgaaggatcgatgttgtatagtcttatcatgatagcgcctcagggtctgctggtatctagctgactgaattactgtattcaatcgctcttcttccagtacgtcaatatcttctagcctggtagcttccgcttcagctatgttttcgaagaccacccttggtgccccaaaccgaaggtcagcaggtagcactgcctccgaaccatagaccatgaagaagggggtgtttccatgcagagctcgactgggttgagttcttaggctccaaaccacataaggtaattctttgatccacttccctgcgaacttt

SEQ ID NO: 2288 - DNA, 504 bp, Zea Mays
ccgggtgtgacagtatgacatgttataaaatagcaaactaaactctaaagtacttctagtggggacagaatcttgtttgttaaatttgtattaatttgatacaattaatttaaacttatctttaaatattgtacttctagtggggacagaatccccgcggggttccccacggggataaattccccgacggggacggggatgggagaaaaagcttccccgtgagcgtttgcggggacggggatggggagccattcctcaatggagaaatccccgttgccatccctagtcatgttgcgcctagcagtagtcgtgcacaacatcgctatcgcccctccgatgtgccactggcactatggtcgcccacctcatgtcggtgcagttgtcttaggggaagaagtgggcggcccagcgatgccctatgcctgtagcgtggcgtgcacttgcctaggaaccagccacagtgcatggtataggtagagcgccagcgcgcagcacaggattgtg

SEQ ID NO: 2289 - DNA, 918 bp, Zea Mays
tgccttgttcttaattcatagcatttgagaacaaaggaccaacaggtcctctgactatttgatggtgaacactatagcaaagttagagagggattatagggcaacaatttctctacaggacgaagatcatgttgtaacacaaaaattaaagaaaaccgcctctgaagatgctctgtcagaacaattgaagaagaccctaatggtacagtaacaaaaagatcttctgattcagtgtatctcgccgctagtgaccttccgccgcgattgacgtcggtcatcgcgatttgtgtgccctagcttgcggataacgactggcagtgaaagatctccacgcagggaaggattggagccttatcaccggactattccctgagccacttactgcgtgattgactgaggtgtcctcgctggagttcgcggtcttttcatagccgtgccacgtacttagaagagttaccacgtcgtagtagacaaccgtaagtagtcagtccatcgcctaagacgttgccccgatgaacgccacggtagctcgcgccggtgactcacccctgtcttcgaccaacgatcttcccctttcaaaattcggagccaccgcctccagacactaaaaattgatggtgttgctagctccgcaaggttgtcacgaagccaggacatccacccctgccctcgattagccaccatagtcggggaattttgttcttcccccaaatcagtcgaaatcccgctgtgaaggtctctcaccgtggtcagcctgcctcaggttgattcatacccctctgttgaatgtttttagcatctctaggatctcctgttgcttgtaggctcgattaattgaactagacgtactgaattgcccggaacaccgtagcttcttctcgatttccgctgttgtcatgagcaggcatgctccggcct

SEQ ID NO: 2290 - DNA, 334 bp, Zea Mays
agctcactcattcatctttttcccgggaggatctcgaccttccctggaaaaatacttgggtctacctttacacactagaaaacttcgacggattgaggtgcagcctctaattgataagattggtgctagactagccggttggaagggcaagctcctatcaaaagctggtagagaaaccctagtaaagaatgttctatcatctcaacctatctaccacttaacagtgttcccaccgcaaaaatgggtcattcagaggattgatcgtatcctgcgaagttttctttggaagggtgatggcccagaaaattcgagtggtggtcattgtctaatcaaa

SEQ ID NO: 2291 - DNA, 359 bp, Zea Mays
caaacgtctgtacatgggaatagaagaccgaggcaatcacggcataatcatgattgatggttgccatcccaatcacctagacgttgccgcaatctttgccctgccgctaatggcgctagccgcctgttactatctatagttagcttgtggacttattcaaacattctcgtcctaagtcctagagcaactactttaatttcttcatgccgatctgaccacgaagctcatgtaaccgagtgtgcccaagtgcttttgtcagtatgtcacctagttgtagctcagtgccgacgaactcgacgtcgatcagcttcctgtcacagcactcctggatgaagtgaaacttcacgtcaatgtgctta

SEQ ID NO: 2292 - DNA, 992 bp, Zea Mays
gtcgcagagaggggggccgcagtgaatgtgggtctgctgccagatgcgcgcggcgcggcggagatgcagtgcaggggaggagtaatggcgaagcgcacacgtttggtgggagcgggggtggccggttggcaggagacagcagtgcaagcctctggaaccacaataactgaggctgggcgagatctcctctgtgatcctgccggcggcggaggcggaggtagacagggcgggggcgcggtaggagagcgcgtcggccgaggcgagacagggcttgggagggaggtagcgggttgatctatcgatctgcggtggaggagagaggtggggagctgggttgaggtgggggggtcggctgcaatggcggggagggggcactcgctcgccatgggagggggcatcgaagttcaatgtatcttgcagccctgaaggcgtacctttcaagcgaaccattcggcatgtactcgtaaacaagcgccctcttggatccttgcaagcagaaccccgtcagtgtcacgatgttgacatgacaagtcctgctgatactggccacctcgttcatgaattcctcgccatcgcctttggtgtcctttagcatcttgactgctacctggcggccatcgtggaggctgcctctgtacacggctccgaacccaccttggcctagcttctcggtgaaggatcttgtcattcttttcacatctgcgtaggtgtatctttttggatgcaggttcccgttcttctgtagaaaggactcgatccttggttcgtccttcgatttgaatggcagcatcccgtatttgtaagcagagaagaatgtgagaatgactagacacaagaatagaagggacgacagcgtgcctgcaagaatacctgcatcacagaaacatcacaagcgaattcaactgcaaagcattctaaaaaatcaatttgcaaagaacaaatgtgccataaaaaactcgaccctagtggcttggttgggggcaagaagattg

SEQ ID NO: 2293 - DNA, 1510 bp, Zea Mays
cgaccttgcaaaattcccgagacacagccaacagtgcacgggacggcaggttctattttgtaataacctagggtctcttacgcaattttacagggccgaaggggtatggttctttctgagccgctggatttcaatccgatggtacatattagattaggcgcttaatgaaccggtacgcgcctgatttaatctctaccgctcgttttcaatccaaaggcccgagttctattactatgtgatctaatctccaccgcatagactctatccaacggttaaaatgcatcccgccaaggatctaatcacagccctccatggagatctaacggtccagtgatcgtcatctacattgccatcacccgaccgaatgccccgccgcggcgttcaccagacacggcaaggccattaccggcagcacccaaagctcaagtcccaccggtaaacttcactccgacaaccgcgaaacgaagagtagtggattgcgagactggtacaggagttctcaccacggttggtagcgcggacagccctggccacgggaacctacggtcagcggccggacgattcccgacggtgtgaaattaccgcaactccgagagcccctccagatgcggatgccacgaacggtttccacacgcgccggcgacttcgctcgatcctttcctggtccgattccaaggccccaatgatgatgaggacgcggggcatcactggcggctggccttctctgctacgcggctgcacagcggcagcgacgaggtcgaccagagaagaaccactgccacatcgaaacccagcaccgaattcgcaccccccaagaccaccagtaagcccaaatcgcacaaggacttcactcggagctcggtcgatggtggacgcgcacgacggcgaggatgtcccgcgagtgcacggtagacccgcagaacctcccccgcgaactcggtctgtggagttttttttgtgatgaggatagctaggggaaaggcagggcacggtatttattcgttggcgctccgaaatcgcggagtccggtggcaaatccccggccgaaattgcgcaacagaacagagtctgttggggtgttccgtgatggtaggtagatggagcaccaggcgctgaccctaccttctgctgcgctcgttggagatgccctggcaccgtgcgcagtggcgcggcgcccctccttggctgcacgggtcggtggtgtggtcatggcggtgaaggtttcgcaacggccatggcgagctcccaagcagctaccgcagcgaggaaagcggcttcaggcgcaaccacctgaggaagatgcggactgactacaggggtccactcggcagcgtattttctgcgcactgggccgagcgcgcacgggagacaagtccaggttgggccgaaatggtgtttgcaggcccaaaccagattcctttttttttcttttctgattcattgtcttcctttcctttctatttttggatctcaaatttaaattcaattttctgttgtgaattttgtacct

SEQ ID NO: 2294 - DNA, 623 bp, Zea Mays
cttgaggcatttgaggccgaaggcaaatttggccttggctcttgtggctgagtttgaacatattgcgggatgtagggtgaacagtatgaagatgtattgaacacctcttttagctatgaaagttgaatagctgacgaagcaagctctttgtgcttattaatggtgtggtggcatgttcttgtagtgtagcctttgtcctcaccacaaaacaaatagaatggcttccttggagtcgcaccaaatctgccactaaagcttcagtctccccttcctctcggagcaggtggtgagaatgtgttttacaaagattgctgctgagagcttgcatgttgccctaattgactctatgaatgggtcattcattcctcaccctgtgatgggttatggatgcttcagacatgtcttggatggaatcttcctccaaagcctctgcgacttcgatgtacctgtggaactcttccctcctttgatgaaaatcattatcagcccttatgtactcatccattttctgcaataacttttcaagggaatgatgaggcttccttgaaaaatactgggcagttggttctggcctgagccccttgaccattgctttgatgacgatgtcatcctgaacggctgga

SEQ ID NO: 2295 - DNA, 414 bp, Zea Mays
cgtgggtgcatgtaagtggcaaggtcgaccgagccgaggtactcccatgcctccgggttagggacatctcactcgtcacccgccacgaaaagtgacccctacttggggaagccaccctgctactgacaggcgaagccggacacacaaaataaaaagaaaaggagtacgacttcatgcaacggtaacaaagtgttcaggcctcagcggccgcagaaagacacacgcgcatccaacagaaactgttccaacaagttaggcgtcgccttgggaaggagccgcgccttcagctccgtccccaccttcaactagggatgaaaacgatcaggaaaaataccgtcccatcccataccgtattcccgttttgaaccgttcgttttcgttttttcgggaaaataagaaaacggtacgggaacc

SEQ ID NO: 2296 - DNA, 393 bp, Zea Mays
gtggattacaagggcgcataggccctgaggtttaaacaaaaaatttgcgtagattgtcgatgttccaggagtgctctaagtcttcgccggtgggcgttgatagcctgtacgcgctgggggatgccttcgacttgacgatgaatggaccctcccatttcggctccagcttaccccgtgactctgtccgggtggtccggacgagtacgaggtctcctgtgttgaactctcttgggacgaccgcgttgtcgcgccaggccttggtttgagcttggtatttgttgagggcctgcagggcgaagacgcggtctccgtcgatgaggtctttagacgttggttcgtcgacgtcggggattgctgatgtgtttgttcggggcgacccatgctttatttcct

SEQ ID NO: 2297 - DNA, 629 bp, Zea Mays
gtcatcggatgaggacttggattactttgcggccttggatgtggcagtggcggaggcttcgccgcgtgttgcggatgctgaagttgtgcctggtccgagtgctgggcgtaggcggcgaagggcagttgcgaagcgtagagtgagtgaggtggatggcggtcggcttcgtgtgggcagggctggcaagcaggaattgttgtcctcgccggccgttgcgagtgtaggtgagggggagttgcgaagtctttttgagggtgaggagcttaggataatgttatttaactatagggagataggaatcattccgaaggctaaaccaatgtgaggtgtggtgccctcgctgtaagtatgttactatagtttgtatgatgaggccgtgtgccttcgcgcatccggctatgtctatagggacgttatgcgcttggtagggcgcatttattatgttggtctggttgcgcctgtagctggtctgtgcgcggatagtttcttggtgtagacttgtgcatggacgtaatgcgcttgcgttttggcacgcttgttgaattaatccggctgcgcccttaggcgagttttgcacggatagtcttttgaggaagacttcgattttgcgtatgtgttgcgctagtccg

SEQ ID NO: 2298 - DNA, 407 bp, Zea Mays
ctccagctgcaccaccatcaccagatcactcttcagccacttcaccggcacctgtggtgaatgagattagatggacctgcaagaactacttcacgcaagctccagacacggcctacttccacagcctgttggcttggatgatggatgaatactaccatgacatgtttgtctccatcaagtactactgtgcagagcacacacatcctacggaggctacctactggaaggcacatgtgatagtcaccgcttggaatgtcatcactaatgctcagaaggtggagaccactcatagacacagggctcatcgagcagatgtgttggatagcatggaggatgtcgctcaggaggcctatcactagttcactactaccatggtaggaggtatgaggccatgaagaaggatcgat

SEQ ID NO: 2299 - DNA, 934 bp, Zea Mays
gcgggccctacgggtcggtcacacgcgcgctcgcctgaccatttgcacacgcgcgttgtcccattgctccacgggtcccgctcgtcagggcacgttctccttcttcgcaacggcgtccgcagctgtcgccgccataaccgggccgttggcgaacatctctccgagctgggtccccggaagatatatgggcactcccgtgaccttttttttcccttacccctcctacttcctcgcgcaagctcagagccccgccgcaaggtcgtcgtcgcgcattgcgttgtagggggaggtagagcggtggacgtcgaaatctcacatgcgtccaccattgtgtcacggtgtgtggctccagtgcatccgtgaccttccacgaagattcgcgtggtggcggaaggcgtgcggaggcacttcggtgtcgggaattgctcgtcggcgttggtggatccgcctgcgctgtggccttgccttgtttccccctaaatcaccggtatgaactcgtcaggctcactcgccattgtctgttcactgcgtagcattagttacccataaggctaggacccccgagacctccgtgctcggcatgcgtgtgttggtgaggcaatcctggccatcggttgcccctagaacggctgagattagaacctagggacacctcttcgggttggggcgtgtgccgttggatgagatctaacggccccaaatcgttttcgtctacataaattagtagccgtggatcttggatcgggcggaccgcatcgcataccgcttcacgagagatcagatctaatcgtagtcgtccctagttgatctcacggctaggattagttgataccctttcgccctgtcggttttgcaaatgaatccttacggttttagagattaaaacccgccgtccttgaccactgtgcactgagtctaggatattttgctccag

SEQ ID NO: 2300 - DNA, 648 bp, Zea Mays
atcactaccggcgacaccctcgagggctgggtaactgccagcaccaccctcgggggctgggttttctgcgacagccacctctaaggctgaaggatcctcagtcacctccatgtgagtcggcaatcctgaccaacgtcttgacatcgaaaactaacttccaaagtcgatgatgctcgagacacagcttgggatacctctaatcgcatgtctggaatttcagagcaaatagccatcatgtcatcagcagtcggctccgatagcatatcctcagagacgacatcctcaagggcctaatcaaaatccgttatggacagttcttgaaggctgacaagagcagacagagctggagaaggaatatcactatcccccctactacctctgtaacgccggctattcttacgaattagcgggacttcttcttcctcttcctcgtcctcataaaaaatacggacaatagccagtgcacggtcacacccattgggttcaatttcagcacgattacacccattgggatcaacttcagcacgattacacccattgggatcaatttcggtgcggttacacccattgggttcagcttcagcatggttacacccattgggatcaacttcaacatggacaccgtcattgggatcaacctcaggaaag

SEQ ID NO: 2301 - DNA, 1029 bp, Zea Mays
gtctacagggtacttggtgcccgatacgaagtcttgcacagatcctacgctgctagggactagaggtggactcatgtggcctggcttgagttcacatgatatgcattctattttcttcattttcttcatcacgtcattaatagccttttgtaccctttcatcaatagtctcttcaagggtccttttcgacttctcgtgtttcctatatgacgccgcatactctggaaacgcctctctctaggaaatcttagaagagattccctgagcccgtccagtgagtttaggattgcctagtgctgcagttagtatgtcattctccctccgaggcttaaattcgcccttctttctcttttctgcatattcttgaatttttgtcgaaacttcgcctaccaattctggatgcaaaagtttgccgtcctcagtcaaacctgcccgacctaagatccaatgaatagctcgctcatcgatatcttttaatattgggtccaaagtgtcgttagctatagcttcctcgattatcctgttccactgcacaactttatggtgatatccggttgaccccaggcgatgggggtgtttgttcatcttcaccctctaagaattagtttcgcccggttctttggccttcagttcattcttctgacgaacaaattcctcccactgagcttgagtgattttccccattttcttgggcggaggaaccttattcttcttaacaaaatccctattcatcttggtcttccaccaacgaaacatcttggccatagcagagagcatcgacttccttattgcatcctctgtgccttttaggaccttgaatgactcagacaacttagcccatagcttattgcgggtgtcttcatctaaatccttccatttctgaagtgtgattggcactatatctctaacagtagacccgcaggtatttcgaaactttgtaaccacgtcaagtggttcttcaggaaacccctctgcattgagttttgttacgtacataactgcaccttttttcatctgattgggacctcg

SEQ ID NO: 2302 - DNA, 638 bp, Zea Mays
tatgcatgatctaatctaaatcatcgcttcgcagatctacggccaatatacgaccaccatcgtattctaatcccagatgccccatccgatcgaacagctaggaggccgtcgccttcctcacggtccaaccatggcggcgccacacgacaatacggtggagatttcaccggtgatcggtgaactggtgcccccatgacccaaacctcgatacaaacacataatgcgaagggtaggatgtgaggaacagaatgaagggctccataccaaagaccgaagtacgaagatccatggccatagaagcagtggcgtggcgacggaggagacgttccggtgagaaatccttagggccacggtggattctcccgctcgaggcgaccattgccacaaccagtgtgcgcccacgaacccacatggctaccacacgggggaaaatcatcggtgtagatgtgggtaaacagtggcttcgttttccctcacggtgttgcgacgaggttagttcttaaggcgacgatgggaggaggtgacggctcgagctggaggacaaaggggtcgagttttatagcccgagcaaggaacctccgcgaggttcgcaaccacccccggtagattcggcgtgcacattgttggggcgaaggcga

SEQ ID NO: 2303 - DNA, 604 bp, Zea Mays
ttcccccaatccctcgccggcctgaggcggcgccaggacctccccacggcggagttccaccggcgaacagactggcagccatgctagcgtctcctttgcaaaattgacgacacctactcgtagtacataactatgcgaacggagtgagggtgttattaccaagttccgtgccgagtcgcgccctggccacgacgaagggcgggttcatggcggaggcgccacaccggagagcaattctggtggccgcaaggtctttccccacccagagacgccaccgcaagcttccatgcctaccaccgaacctcatagtgccaaggccgagcccccagcgacggtgaggtaccgattcaccggtagtggcgtgacggcacgcacaactctctctccctgctttttttccgtctggtggaggcacggacggcagccaaggtcgcagctagatggccaaggggagggcgcagggcgtgtgttcttataggcaggggagcccaggcagttacaacgacccggattcgtggccggtgaggacggccttgccgccaagctcgcgattcgttcacggagtgcgctagccgcggaatccgttgaggaagacgactgacag

SEQ ID NO: 2304 - DNA, 756 bp, Zea Mays
tgccgccacgcaccaggctaacggcacgcaagtctacgggaccaattggagtgcctcggcatcaactggccccccgacatgaaagcagcagcagtggaagtaatgaccccataggagatctggaagcccgagtgagtcgacttcaagcggcgcttcaacataggaccgatgcttgggtcgcagacggagatagaatcaatgaactaagaagggacatccgtcacctgcaggatcagcttgctgatcgagacttagcacttgactgggccgtacagtctcgtttgctagcgtgtgctaaggaagcaagggctcaggcccgaattaaagaacttagctcaactgtcgacaacctgcaggtttactgcaatacgttgcatgaggaagtccatatactatactcacaattacaccctagtgtgcctgcacaccctgctgaggcggaagccggaccatctcacgttgcgggacgcgcgctgggtggggagttagacctttttgagccccctccttctttgaggttggttgatgtctggactcccacacctgacgatgaggccgccaagagtaatggaaagcaggaataatggtgtaatagaagtagagtagtgtattgtagggtgtactgttgtataataggttgaacttttgtataatgggtaatgtatcctgttatgtaatatcgagtctgtatcattactttttatagtaatgtaaaatggaaggttctctggcatattatgtttacttcaaatgttt

SEQ ID NO: 2305 - DNA, 332 bp, Zea Mays
ggtataggatcggcggccagatgctgaccttggcgtcgtgatatcagggtcgtggatcgcgtgatgggcggcccagatcgtataccagttcgttttaaaataaatctaatcctggtgctctgttatttattggacggttgtgatcggagcttaccccttcgcttagcattcttacttaagagcccctgcacttagttgaaataaacccgccgtcctgtctggtgagatcatgagtcttaggaacgttttgcgtaatagccccggatctctctagattttgaaccgcagcccagtagtaaataataagggaataaattagtgtagaaaatgat

SEQ ID NO: 2306 - DNA, 617 bp, Zea Mays
cgcgtgacgtcgcccagccttgtaaacaacagatcaatgctctgattgaggtgattccagcgttcctcttcacgttcccccgcggcggccatctcgtctaggacgaaacgagtctggacagaaggtttcggcggcgccgtggtgactacccgcaaatcggaccgtggtggcgtgggaattacggggattcaatcgacgccgccggtgctgcacggcaaacgtcgagaactcaccaaacccgtgcctattacggtggcgatcgacggaatatgcagacacccgcggtagcgtgccgaagatcaactggtctttgataccaactgttgtgccccgtggccaccgaggatctccgatggcatgaggtacgtactcaaacgaacgagagagaggtgggcgctcgccaggaaaggttccggcggcaggtttctgatttcttttctttcttgtctctcaagttctccagtctcgcttattacatactctgcacttagtcactgacgactgggcccacaggcggtgccctgattacagactccatgacatctgacatacttaggccactaaccaggcttagacacgtcgggtcgcgacacatcgcctcctgtcccgccccgtcg

SEQ ID NO: 2307 - DNA, 632 bp, Zea Mays
gtgcggcctagaggccttacgtcaggctccgcccgttggcttatgtcacgggcaacaagccacgtggcagcatcggatctccgcctgagcggggagcgcaagcgcacaggataaggcctggtcacgtgtcagtattggacccttgcttatgccagggtctcccctgttccgggaccttgttgtggcccggaccttactcggagggatctggaccccatccaagggacccggcatgcttacttgggagtcccgggccgtaatcgggggtccgggttatgcgtacaggggtccggtgctccctcgtggaggtccggtccaactgatacatcctgggatgtatcatcttttctcgccacgtggtgccccttgagccgcccacgtggtggggtcgagcgttgttcgtcgtgcggctaggaaacgtcgtacgggcatcgcgtcttcatactgtagtagggggtacccctgattcagggtaccgacatcgtactttatctcatgttcaaacaactataccaaacataggattagatctcagggtgaaacatatatctgtaaaactgacctcaccatgagtccattctctcccaagatctcattgttttgattcagagtgttgataagttccagctcac

SEQ ID NO: 2308 - DNA, 561 bp, Zea Mays
aaagcttatgagaagctgtggcatagagactggggtagcacacacacacacccaaagacacgaaggtggtcatagaaaggagtggttccgaagacggcaaaatgaggcgtgtgggagcagagagagctttggtagatagtcaattgagcaggtaggtggcggtgtgaagactctcgacccaatagcgagcaagaacagaggcctgaaacaaggaacacatgatgtcgatagtagcacgaatcatatgctcaaccttgtcggtttgggaagaggatacgagcatgacattctagctgcataccatgtgacagtgacattgttcatccgccgcgctgcctcctcacatcgatgccgcccctgtcttccctcattcacccctaccgattgagagagatccctggtaggatcaggaaccctaccagtccgcctcattgcttaaggcgttgccccaatgcttcgagcggtggcaaggcattaatttgtggatgctttggcctttgtagggtttggggaacgatatagaggtcggaaaagagaggcttacagtgcgagacactccaa

SEQ ID NO: 2309 - DNA, 644 bp, Zea Mays
ggtttatgaccctacgttggtccaagggttgtgtcggtggaactctaagggaccgccgaaacctacaaaattgtaaattgtgcactggtaataatatcaatccaacaaaaaatagaactccccgtcaaaataaaattacttgaagttcgttgcctgtgtcgttgtaacaacctcgtcatcagcctctccatcggcctctccatcgtagtcctccccatagtcatcatcacgcatcgatgaaccttggcgtgccagctcgtcctcctgcctaggtgcattgtggtctgccgcctcgcgcgcttgctcaaatgcattgtggtcctgctgtagcataggtccacttgagcctatcgcctcatgctctggctcaagtgcattgtggcctgccacctcgcgctcttgctcaggtgcactatggcctgccacctcgcactcttgcccaggtgcactatggcttgccacttcgcgcccctgctcctccatgcaaccaaggagctgctctagccattgccttgacgctgtagagccctacaaacataatcaacaatgagatatatcaagtactcgaaaataaggtgataatactattgcatatgtagaagaaaataaaataaaacaaattaaatacctggaacaacaaagag

SEQ ID NO: 2310 - DNA, 399 bp, Zea Mays
ttcatcttgaaaaatcaagttgaaatctccaaccaccacccagggtccagcacattctgccctgacctccctgagttccataaaaaactgaactttagcttcatttccttgagggtcgtaaacacatgtaagccaccaaggggaaccttgagctgaaccaaactgaactgatactgaatgcgagtcaattctgtataggccttgatagctgagacgatcacgccaagcaactaaaattccgccactggcacccaccgaaggcatgacaacgaaattcttgaaatcagggcccaacattcgtgtaaccagaaaacgagaaacctcagtcattttagtctcctgtaagcaaacgacatcacatcttaaggagccagctaaacccctaacaacatcctgacg

SEQ ID NO: 2311 - DNA, 1113 bp, Zea Mays
gtaataatcttttgaagtgaatgcatgatcgatgtgttcacgtacgtcgaattcacgtaagcttgggcgcgtgaatggtggcgactgttggctggcgatgatttcatgatgatggatgcatggggagccttcaattctccgtgcgtggcgtgccgggccttgttagcggtactacatcttctgctactgggaccattgtggcgcaacgggttagcaggccgactaagaaatctacaaaggtgtatgagccggattgggtgaatgggctgcagctgtgctcgctttgcgaataagtagaacgagagttgcctggtgaagggcatgtaagaattattcactacaacttcttctccaagttctgctgctcgtccgccgccactcttcttcctccttaccttctgctactcctaatcgtcctctgctactcttaattgatgttctcttctactgctaccttgtatccataccgagttgttaacagtggtatcagattcaacgatccttggccgatcctcgcgttctcgcgctggatccttctggtattcattcccatttcactcgttttcgccgtcagcaagttctcatgaatccagatactcagatcatcttggacgagatcgctcgccgattcgctgatcatgatgccaaatgggatcggcgcgcgtcggagcaagaatctctctgggaggcggcgttctctgattttgccaaaaaccagagcgatcgtgtcgtggcgctcgagaaagcctccggtgcgttcgacgaatggcgtgtggggatggaaggcgccgtggatgatctgcgcttggaggtgggcaagattgcgcgtcattgggagcgggctgtcgtggacaaaccgacctccatggttggggtactcgcgccttcccctgcggctgccgagcacacaaccgccggatctcctaccaactcgccccatgggcaccgcgtcgaacttcattcccgggaggatgagtttgggtcggtcaccacccttattcatcccccggtcaggggtatgtgccagtccttgccttcggttctcccaattcctcgaattgagtcgaaaccaattgagatgtctagtgcacgtttggaacaagcgcctgcggg

SEQ ID NO: 2312 - DNA, 452 bp, Zea Mays
gctttttgttatactgtgctggctgcgcccttaggcggttcctgcgatagacttcggatttttgcgcgtttgtgcttggtccgactgcaccttttaggcgacttctgcgcggatagtcttcgcgatagacttcgttttttgcgcacttgttgtgctgagtccggctgcacccttaggcgacttctgcgcggatagtcttcgcgatagacttcgttttttgcgcacttgttgtgctgaatccggctgcacccttaggcgacttctgcgcggattggtcgcacgcgagggtggctagcgcttagcctcgcggtgacttcgaattggtcgaatgccgaagaccgttgttgcggtcttttttcgacacatgcttttgcgggggattttttctcacatatattacatggctccgcctcgttaaaaacctcaccccccgggaggaaaagagtgcgggc

SEQ ID NO: 2313 - DNA, 727 bp, Zea Mays
ggactttggaaagtctactgtctctgcggctgatatgcccatgatgttaaagttaggctacttcggggaagccgagaagaagctaattcgttttggcggggaagaaaccactccgaagccagaaaatgatgaggtggtagttttcagaagtttcttcaaagcaggattgaggtttcctttgcatgaaatgattggggatgttttggaagatttcgaaatttatcttcatcagctgactcctaacgccatcattaggctcagcgtctttatctgggctcttcgaagccaaggagtggagccacttgccgaagctttctgccgggtgcacgagcttcattatcagacgaaggctagagaagatgggcttcacgagaattttggctgttacaactttgcttatcgcaaagatatgaaaactccggtggtcagctatcgcaccaaatggccaaccggttggaagaatgagtggttttatgttaaggttgatgagaagaaggagaagatagttcagagcccactggtcctaaccttcgggttaactaggcccctgtgcgacatgctacaagggtcaccatgccgaaaagctgtgggcgaattccgagttgtgtctgagcatatcggtactagagatttggtgaaggaatacttagccaatagagtatttctgacgttaaaggaatggaatatgccgaagcttaaaggagaaaagaaaaagaatgaacttgtt

SEQ ID NO: 2314 - DNA, 510 bp, Zea Mays
cttcgtaaggaggtagagagtatacaacttcgtaaggaggtaccccgaaagggttgatcagtgaagtcctcttgcttcagtgggggtggtggtggtaacagttgatttggatgttgtggtgctggtggaggcgatagagctaggatttcttggtgttgctggtatatatcgtggttttgttggtgaggatggaagtgttcattgtggaattggtgttggttgtactgatggggatggtaggtgtgggcgacaactctttggttgtcagccagttggtttctggccattcgatcttttgttgctttggtttcagagcaatccctggttgggtgtgccgagtcttcaccatggaaaaggcaatagaatcttcgttgttgcgggcctcgtcctctgcccctgcctctgattgcgttactgtcgcgaccttgctgcagagggtaatcgtgatgacaagcggtgtcccaagtctgctgctgattggcaatgttgtgcatctgggactgggtgcgg

SEQ ID NO: 2315 - DNA, 350 bp, Zea Mays
atgagatcacgggtataaagaataagtgtgccattttgtccgttggatcaagatcccatgggtcgaatcgagagcgaaattaacatgtgaccagagtcgttcatccatggatcaacgactcatattgacacatgaagcggtatgtggccggtctaatcgtgatcatccatggccagatcaacggccattacaccatcttccaccctcaagccaacccgagccacgccgtccgccaggcgcggcggcgatctcaccggcgccaatcgagctgccccccgtgaccaatacgtgccccgaatggttcccacccctagagacaacccaggcgaacacataggcgacatccatac

SEQ ID NO: 2316 - DNA, 594 bp, Zea Mays
atatttatttttgacataagttgctttcctccttggcttcttgcaagttgcatccaacagcagctgatcatcaaagagagacaagttaataatctgaaaaactatacaatcagatactttggaaagagtagaaactcatctatgaggggcagctcaatattgtacatgcacagccaagcttccaaacaacagagcaacatcacaattcacaagtcaaaggatcacaagaaaatatatagaaaacactaacagttcatcacatgccttaatggtccacaaattaaataatagtacagcacacattaatggttttatggtccacagtccacacacatttggataagtaaataactagatattaatatttagataacttggcagcatgctgccatcatgcaatctcctcactcctcatcatcctcataggcaatgtcatcttctagatgattagggtcttcagtttcagattcccactcttcttcatacaactctctagccactcttgcactcctacgaacagaaatgagcagagaacagagaagaaaaggaggagatgaacagagcagggagtaacctgggcacagcgtggagcag

SEQ ID NO: 2317 - DNA, 1102 bp, Zea Mays
cattttctgtattaatttattcaatttcctatgtctctggactgggcgtcaaatgctggaaaagacagggtcttctgcgcaagaattcccaagacacagagtactgctacacagactgcgtgttagttaagtaaaagtccagggtttcttatgtaagaaagcaaggccgaaggggtattcctggtttctggccgcccgatctgcaatctaggttccagatttaattattgattcactcacttcagaccgcccgatcaaacagggacggctaggattaaaatctcgcacgcccgaaccgttacgccacgccaatcgttagatctagatcctagggtttatcacctatccatgccccggcccaacacctgccatctgatgcgatcgaacggcccagattaagtccccacaaaaacgaaccggtactaaatcctaaccctcgactagacgatcaacgactatagggtcttcttcttccctctgactccagacggcgccacaccacaccgagatggtgcaatctctcggtgagccggtgggcaacagccccagcatgtggatcaaggcgtgaaccgcgacagcgcatagcgaagataatggagaactacaggaatgtgctcttactggcgattgaggcgtagttcggccgcgtgacgtgacggtgcttcttcatcaccgccggtgaggttctgcttctttgtctccgtgatgttgcggacgattcccccactctgaatcagggagacgtcgtgggccatcccccatgctttgacgtcgaagaacccatgccctcctctcggtttcctgcgctcacccgcgatcaaacccactcccttctcccttggtttctctctcttaatggctgcaatccaggcggcgcacacctgccatttttttctgctccaggtcaaccgcgacggccaacaactaggaccatccgacttatgggcgagcagagcggtagcaccggagaacccgttctccgtttgaccaacgcccacatccagaagaatacgcgtatgcgaatacatcatggtcccagccgtcagtggtggtggaggtataggggtgatgtcacccatgacgcctggctaacgccatcctc

SEQ ID NO: 2318 - DNA, 1292 bp, Zea Mays
aggctagtaaccctttccggcgaagatttagagcactcctgtaacattgacaatctccgcaaattttttgtttaaccatcagggcccgcgcgcccttgtaatccagcaaacaatggtattccggtccgcactcttttcctcccggggggtgaagtttttaacgaggcggagccatgtaatataccagcaaaaagcccccgcaaaaacaaaaaatcaaatgcaacgcgtcgaaaaagaccgcttcgacagtcttcggcattcgaccactccgaagtcaccgcgacaggtagcgtgcgagagtccgcgcaaaagacgcctaagggtgcagccggaataagcacaacaagtgtgttaatcgaagtcttttatcaaaaagacactccgtgcaaaagacgcctaacggtgcagccggaataagcacaagtgcgtcaatcgaagtcttttttaaaaaagacactccgcgcaaaagacgcctaagggtgcagccggacaagcacaataagcgcgtcatcgaagtcttttccgaacagacactccgtgcaaaagtcgcctaagggtgccgccggataagcgcaacaagtacgtcaatcgacactcctcgcaaaaagtcgcctacgggtgcagccggatcagcacaggcgtgcgaaaacggccaacaggccacattacaatacaagttgcagttacatacacacagcgagggcaccatatactacatcggctcaaccttcggggtgatacccaactctctataattaaacaacattattctcaattcctcaccctcaaaaagatttcgcagatccccctctcctatgctcgtcccaatcggcggggacaacagttctcgtttaccaatccggtctacacgaagacggtctcgctccatcccaatacgacggcgcctaccacttcgcgaaacctcacccacgctatgctttgacaccacccctcgccgcctgtacttggtcctcgcactaggaagatcagccgcctcgccaacctccacacgcggcgaggactccgccacggccacatctaatgcagcaaaataattcaagccttcatccgagaactcttcagtccaggaaaacgaactcccagattcaccatcagactcaaaacactcagatccagaaccatacaaattatcatcggcaggcacaacggttgcggccgccacaaaattagtattgccagtagcggttgcttgcgcaggcccaaacgtcggaacctgcgcagccaccggggttcagtatcacaaaaacaaaagtttacaccgaaagccctag

SEQ ID NO: 2319 - DNA, 339 bp, Zea Mays
cacgctaggatagtactttttcaaatacttaccgttgagtgctttgggtaatttctttccttgcaaatcctcaacgaaatatgcattctcgtgcacaatacctacaactttgaatggtccttcccaattcggcgaccattttccgaatttattatttttgactcccacgggtaaaatcgttttccataccaattctccaatctgaaacgatttctccttcacctttttattataagctttcgctactctcagcttttccttctctatttcccttaaagctgttaatcgactttcattattcccatcaattttgtctagcattagctcaccatacacctc

SEQ ID NO: 2320 - DNA, 641 bp, Zea Mays
gtcacggcggtgtttgacagcgcacgggtgcgttcctgtgatgagcttcggccaaactctaaattgtcgtatctaggagcaataggagatcaaagactaactaaaacagggagtaatttgagagttactgaccagaggaacgctggccacgaagaagttcttcacggcggagcaagaacagaggagagagggaattggggctgcgcaagttctctggcggaattgagtcgattgcttaaacactgaggtgcgtaatggggggaagaagcggagtccgagctcaatttataggccgtcgaccggagttggagaagaagcgcggacttcacggcggattccggtgagggcacggggtcgccgtttaaccggagctcgccacctcagtaaccttttgccacgacgccgaggatatttaccgcggccaccaatgaccagtcacgccgcggtggcgttcttatcgccggcgggggggctgacccttatccacggcgtgatatttctgaagacggtgaacagtgcgccagattcagtggacagcttaactgacagaccaagttggagccctattttctccaatttttatgtgaaacctatgccaactttctgcagcaaagttgtagagctataatccatctataact

SEQ ID NO: 2321 - DNA, 573 bp, Zea Mays
accacgacacgagtagtaagatcccatatggtgagcccccacgaatcaaactcgatggaacaatggttgtcagtggtgaagcgacaaattgagaggaatctatgtgatattgggggcaacaagatgttattgaggtacaaatgaccaagaagaaccgtgttgcctactgaggtgacaggtagagtcgacccattatcgacaatgatggaagaaggtaaggtggggctacgaggatggggtaaggaaacaatatcaggtcaggagtggtgtggtacgaggtgtcggagtcagcaacctagttggtgggagtaacaaaagtgggccaccgggatgggcgctggggtcgacagtggcgagcaggctaacggtgagcatgagcggtggagataatcttggtactacggaacacaaacggcctagtagtgtggttgccttcttgaggatggacggaggccggagggtggtagagctcgatgcagtcacggagaagcgggttcatggcccgatcaaaggccacgaacgttccccggagagattatctgtcgtgaagggatacacgcacacggtagggag

SEQ ID NO: 2322 - DNA, 847 bp, Zea Mays
taaaataacatctaaaaaactggaaggcaagaccatggggcagtaagatgaaactatcataggggcacgtctgagagggtaattcttttctttataacttatcatgcatgggtgcagaccaacaggccgggtttatggggatggacctcatcgggttggcgtacacgtatgtgttacctagttacaaaagggaaacaaattcgacccctcagactggctcctatggatagaacttacagagatgctccagcactaggaggaggcactcctttagtcgcagctagacggtcacactcgggtctgatgaggacatcctccactattacccgttggcaaagacacaattggcctagttggcccaattgtagtcggacggcgactgtgtgagcctcagaattatcccacctcgcttaacttgggaggaggaagccactttaaaagggagagccacccttcccccattggactagtcttttggggcgattaggcctttccctaagttgggtgtgcttgatgaactgttgggctccgggcaaccctaatttgttgggcctcggccaaccccacctgggctgggtgtatcatctggtatcaaagctagggcccattttaagaaggtgggaatgatgaggacatcctccactattacccgttggcaaagacacaattggcctagttggcccaattgtagtcggacggcgactgtgtgagcctcagaattatcccacctcgcttaacttgggaggaggaagccactttaaaagggagagccacccttcccccattggactagtcttttggggcgattaggcctttccctaagttgggtgtgcttgatgaactgttg

SEQ ID NO: 2323 - DNA, 315 bp, Zea Mays
ccggactccgtcagtgtcccggctgaatcggctgcggccgttgcaccttgacccttggactataaaactacgcgcatggtgatcctctcatccttcccttgaacccaaatcctcgccaccgacgctaagcacgaactaggcgctagcgcgtggaaggaacgatccccgccagccatcctcgcctcgcttcgatcttgtgctcggtgaatgtgtgcgggacgtcgacgactgatcgacgaagcaagtgtgtgacctatccgtgcccgtcgtgggctggtgttgggagaattactcaccggagctccttcatcgccg

SEQ ID NO: 2324 - DNA, 563 bp, Zea Mays
gtttggacacttgaactttccccgaatgcttttcttcccattctcattgttagttttctttttcccactgcttccctcaaggcatcctttgatcctatttttcctctgttgacctacaacatgtttcccaatgggagcacccgcttcttttgcaaaaggaactcgtggccaaaatgatttgtcaccgattgcctggaccacccttgagtacgctgtggtgaacatagctacagagtagtactcgtggacaaaatcctccatcctgacatccctaaattcctgagctgttatcaagcatagggcatggatgcatggtttgcccgtgtgctgccactctttgcatgaacattaccacagctgagcattgacaatgtgcttcgaatgcacatcattattatcccttacctctgcaatgtagttgtcagctttccatactgctaaatgacctaaacctcttgtcctggcgtgtaggatatgcagaaccgatggtaaaatccgtccttgcaacttttgtgcaatcctcctcctcctgtgaaacaactccataatttcctcccatatcc

SEQ ID NO: 2325 - DNA, 430 bp, Zea Mays
cttcggttccctttacatgacatgataggagaagttttaaagaattgtgagatatatcttcatcagctaacaccaaatgccatcgttagacttagtgtttacatatgggccctctgaagctagggtatgagtgctaatgctgaagctttctatctggtgcatgaattgcactaccagacgaaggccagagcaaatggccttcataagaactttggttgctataactttgcgtattgaaaagataccaaggccccggtaatcggctaccgcaccaagtggccgactgggtggacgagtgagtggttctatataaaagctgatgagaagaagagggaaaaattgatgactatggtcatgagtccgatgagattaagctttggaacaacaaggcccttgtgccacatgctacttggctccccatgccagctgg

SEQ ID NO: 2326 - DNA, 363 bp, Zea Mays
gagatgtattacaatagctgggtgtcgcgcaggttatccaaagatggcgaaaggtggcgtatgttggtaattgggaaatagtcacgtcattagccaactcgtgttaaacaggagtcgattgcgttaagcgattgctatatacatattgtgtctcggagtgctatgataatgagttagcagacttgttagatggttttgggttaagttcgtggtcacgatgaattgctagttgtagtctaaatgtgtgtggttatggtcgcgggtaaaaattagtagtgctcatgtggtgtctaagttaaaatgcgaactagtgggtgaaaagcgcttcgatatacatatatgccggatttgatgatgtggtga

SEQ ID NO: 2327 - DNA, 818 bp, Zea Mays
gtttcaaattggaagcaaccatccaacgtcagtgaagtacgaagctttctgggaatggcagggtattaccgccgttttatcaagggattctccagcatagcaaaacccataaccgaacttctcaaaaaggacaataagtttgtgtggactcccaaatgtgaagaaagtttccaaatcatcaaagagaagcttacaaccgcaccagttttgactctaccagacatacaccaagattttgtcatcttctgtgatgcttccaagcaaggcttagggtgtgtcctaatgcaaaatgagaaattcattgcttatgcatcccgcttactcaagccgcacgaacagaactaccctacccacgatatggaattggcagccatagtacacgccctaaaaatatggaggcattatctgatcaggaacaaatgccacatcttcactgatcacaagagtctaaagtacatcttcacgcaaccggacctcaacctccgtcaaagaaggtggctcgaattgatcaaggattatgacctcgaaatccactaccaccccggaaaggccaacgtggtagcagacgccctcagccgaaaacccttcagggttaaaggaacaaactttctggaagattggaagagagaatcagctcagctgaatgcatgtctgggagacaacggtggcctggaagtcaagccaaatctagaagatctcatatgcaaggctcaacgcctggacgcagagacagccaggcttatgggaagagcacgcaaggagcaacttccggaccttaggacagacgagcaaggagtcctctggttcaagaaccgcct

SEQ ID NO: 2328 - DNA, 820 bp, Zea Mays
cgcccggcgtcctccctgttcgtcattcgcgtgcgggtcgaggcgctccaactgtgtgagctgttatttcgtcggattgcttgcttcgattggttcgctaatgcagtggcttcgttgaattgcttgctttgattggttcgctgctgttgcttcgtcgaattgcttgctttgattggttcgagtaggacttttgcagctagttattcggttcaagcgttgctttccattgtgctcgatttattcttctagggttcaggggttctgaggattagcctttggattatcacctcgacttattcttctagggtttaggggttctgaggattagctttggattatatgtgtacgattttcctcgtgatgatacagctgttatacagtcgaattgtgtctgcaatgaacccagctgtcgaggggggcaaaaactatttccgttccctgctgttgaatggtccactaaaactgatttgataagatattctaattttcgttgtctcagagtttattctgctttctagttttacgtagcacaagattcatacattttattccaagggacagcaccataactacgattaagtagaaagttctataggacgaggttgccaatagttaactaaactttgataatggattacaagctctttattagccgggaaaaagcacaaatgtgaaatgtcatgatcattttttttctaaccctattgagacggcatgttagcaagtagtggcggaggacacgccaaaattaaggtattgctaaagcaatgatgaaacagaaataaacacaaactcttgcgggagattagacaaaaatcgc

SEQ ID NO: 2329 - DNA, 827 bp, Zea Mays
cataatcattgctactcagtcatgtattccagaatgcctatatttcagtgtttggtaaccacagttatattccttggtattgcttataatctttgctactcagtcatgtacatattattaatgttcttttgtttccttttggtggccctagaattggagatgtcattgacgaggatgtggttcattcaagggctccatttgtagcctgcactcaacaatgttttgctgttaaggcaggaattgatggtctgcttgatgttgctcgtcgatctttctgtgataccagtgaaggtaatgctgcttatgtacatcattctaattcatgatattcacattcttaacaaactgtattgcagccatacataacctcgccaaaaagtacagggatgattataatatgccaaatttgaagataacctataatattaggcaaggattttactttattattccccaaaaggacatcaccgataggcttcctaataaatttatccaggtaacatgaacatgatcttacaaaatcagcttgttagctgtaatatgctaaccagtatttctgaattcttaatgataagttaggttgttagacatgggaagaatctccattgctcaagcttggaacttgcttcagtaagttaacttctctgcactgttcttagacatcttagtattgaccatgaaagtttttctgctgacactcaaatttccagtgtggtaaatgttagtcaagagtgcatgaatacccctgtatatgttatccattttccctacattgttctgcaactgtgaatgtgcttgttggctttatagctatcggatcactacta

SEQ ID NO: 2330 - DNA, 840 bp, Zea Mays
gtgggagatagatatcccctgggtccttatgagtagaaatgcagttctgactcgcccgaggccaaccttagatgggagacactattctgactcgcccgagggaaacctcggaccggagatgctgttctaatttgcccgaggccaacctcggtgggagacacagtcatggctcgaccgaggccaaccttggacgagagaacgcagtcacgactcgcccaaggccaacctcaggcgggagcatagaaacgctccatgggccgcttgatggccccctcgatggtttgcctagcaaggtatgcccttaagccgcaaccaagctagatcagctcgacccagggagacgaagacagggacgactgagttatgcgcagaaggagtgttgatgccccgcccagggaggttgcgcatacctgaagagctagatgctcagagataactcggatgaagggtgatcgtactccggataagaagaaatgcatgtcacgttaaaagatagatgcagatagagttagatagtcatcacgacttgtaaatggataaccctctagtcatctatataaggtcgaggggtacctattcgaaggcatctcatctcgtcacatcccatcaccacctcatagctcattagccttctcaaagcaactacgccaccagtagatcgacaggagaattcaccatccaccgtccatagctcatctgtaacccgtgtacaccagtaatacttaaatactcagcctccacatgacgtagggtgttacgcattccagcggcccgaacatgtataaacttttgtgtgatctgacgtgcacccgcacgtatcatcgagtcgcaatcaacaac

SEQ ID NO: 2331 - DNA, 906 bp, Zea Mays
gaacacaagcggtttgcagaggtgaggtttttaggttgcagctatcctactgacaagatggcttcttcatctaatccgtggcaccgacgtttgaaacgcatgtacgaggatgaacaagtgctacacatgcttcatgcatctaccgttgcagacggggaagaaaagccacatgtgcatagaggatcggttccaggtagacgtattattcatcgggataggtcttcaggttatgctaggcttgtggaagactactttgcagacatccctgtgtacaatgacgacattttcagacgacggtagtatcctggttaccattgtttcattttcgtggcaatatgatatgtaatgaagtgttctttttcagattccggatgacgaaatccatgttcgaacacataacagaagctctacaagtggtgaacccctacttcaggcaatcatacaatgcagcacatcaacccggatttcaccccatacaaaaggtaactgctgccattcgtatgttagcttatggtggaccagcagatagcctcgatgagtacttacggatgggggagagtactatcctagaaactgttgcccagttcacaaggtctatagtacacttatttggaccagaattccttaggaaaccaaacgcacatgacataacatctttgcttgacgttgcccaaaggagggggttttcgggaatgttagggagcatagattccatgcaggcagttgaattgctcgaagtgctggtactacgagccttctttgcacggtccctacccattggtcgcacaaaggtatcagacggtgaaccaaattcgtcttccccctgcttcgcctgggacccggtttcgttgacgttgacattcccagtattattatgtggagtttcacaacttgagagccaggtcg

SEQ ID NO: 2332 - DNA, 309 bp, Zea Mays
gtgaaaacgggacgggattacccggcgggtaccggatacgggtacttaaaatacccggtttttcgggtaccggatacgggtaattttgtaaacgggtcggatacggatactacccggatatgcatcagtcggatacgggtaggatacaggatgaccactatccggcaaatacccgagtagtacgggtaggatacgggtacccggttagcgggtacccgcttcagttcgtgcgtgcgttgtgcctgtgcgtggaacgtctcggcccatgcttgtttcaattttctagtgcctgctcgtttcatttttgaa

SEQ ID NO: 2333 - DNA, 661 bp, Zea Mays
caggacacacaagggcaccacatcgtcaacctcatcatggccaaagactggcgggccctaataactctgtacttgcagggccactaccatccaagcgatcgcaatgaggccaaacgactaaagcacagaagtcgatacttcacattagtcgagggtcagctgtacaaaaaggggatcagtcagcccatgctgaagtgcataactgaaaccgaaggcatacaaatcttccgcgaagtccacagcggaacttgcggctcccactcaggacctagggccctcgctgccaaggtgattcgctagggtttttactcgcccgcaattatttgcactgccaatcgagtcacaaggtcatgcgaagcatgccaaaagttcccccctcgctcaggcagcccctcgcaattcaccaagctcatcgcccatacatggtcatttcaacactgggggctagacatcgttggaccactgcctacagctcaagggaacctcaagttcaccttcgtcgccgtcgaatatttcacaaagtggattgaggctaggacagtatccataataacatcgaagaccgctcaaaaattcttctggcaaaacattgtttgtcgctttggagtcccgtccgaactcacagtcgacaacgacaaatagttcgacaaccaagacttta

SEQ ID NO: 2334 - DNA, 277 bp, Zea Mays
cgtgcgcaggagccgcgcagattttactgcttgttcaacggcgaagactgcgcacaagagactgcccagagacgaaggctaccagagacaggatggcatgggcgcaaccagccgacaaccctagagttgtcgcgcacacatatcaacaaccccctcaaccatacaaccacggccccgctccgcatccaccgcaccatgcataccaacaccaccaggagatacaaatagtacctcccccacccccacctccacacccgcaacaacagcaaaatatcca

SEQ ID NO: 2335 - DNA, 761 bp, Zea Mays
gcagtgcacactgattataagatatggtattaacaatcatcgtacgaagaaagtagaaacatgtgttgtgatcctaggatgcaagtttcatggaagctacattttagatgattattgcagggtagaagtgacgacggtcgtccaaggatccaaggatgacatgctaaacatccctgggcccgaaggtatcgagacacttggacaagccataaacaattccatacgttggcctcaaagggatgtcgaattggttgatccaccaacgccgtcgtcgtcgcatccccaaccatctctgcctcctcaaactttaatacctattgtacatccataatcacctcctcaatattcacatgctgctctcatcctctttctaacctaccgcctccgccacaagcatcaacatttaggactccaccttctcctcatcctcttggagacccgctgtctacgccaccagcaagggatccaccttctccatagccatcaagggattcacggccatcaaagaaatctaaattccctataccaaaattgttgtccatgttcgagaaaaagaagaataaagctactattgctagcacagctcgatttttgaaacggattgcacgggacctcacgtcacatactgttgatttggccgagcatgaggggtctacaaaaaaggctgaggcaatgacggcaaagataaagatcccaactaaggcagattataaaaatgtgcctaaacaatatgtgccgggcgtgctctactatcttttgag

SEQ ID NO: 2336 - DNA, 561 bp, Zea Mays
ccgcgcatggtgattcggggtgcggtcacgagggcgtcttagttcagctctcttctatggtgatggggtgagcagggtgttctgcccacgacgacggacgacgccgagtctgcaccatggccgaccgtcatccatggttcagaaattcagccccccaacccgcaactacgtgtaaattgcagagaagaagggcaaacgaacaataccgagagtgatcttactggaactagagcgattgcgatagcgacagggtgaggcggatatggggtggagtacaattccgacgagaaattctcaatgtcgctgttgttcaccacgtgattgcttgccggcaccaactctgccgcacatcgacgacccccatcaaacccaaatcgaccgagacacccctccgtctgacccccccgcggagattcctgagcaccaactcaacactcagcgaacacggcaatggcggatgtttttttgttaggagaggcggagggtttcgatccgaggagaggctcggtttttatgcgcgcaggacgactctatccccgcatgggcccaagccagcgcagt

SEQ ID NO: 2337 - DNA, 492 bp, Zea Mays
aaaaatataaaatttcaacgcgtaacctacaagggagaatggtcggactcctcatcgtcccctgcctcccacggtggtccgaggggacatgaccacatgggtatggatatatggcgccacctgggacgaaatcttgaggaataccgtggagttgtcgctcttcattgattgattgaatatgttgcgtcgtcgtgggagagggagggcattcagtttgtggcaagaattggatgccaacatgtctgttggcctagcgtctgcggcactgcttgcgttgttcgatccttgctaggctttgcacaactctcttctgttgcatttgcttggtgtagcctccacgcagttctggcgcaacacagcaccgcttgcctgcttcccttgggatatgccatcgtcaggaaaattgcggtgtctatgaggatcccattgccctgcacatttcatcactgtttggcactttggagttccatagttcatgtttagcagtggcag

SEQ ID NO: 2338 - DNA, 314 bp, Zea Mays
ccacctcctcggcgtctgcgtcctggccgtcccggcggctgagctcccaggaagggcggtccaaggcccagcgctggcgcggcgactcttcagctggaggttccattccatcttctcgttcctttaaagatgctctcctttccagctcgatttgcgccgctggtctctctcccttggcaagccatgtctccccctccccttctgcgctagctgctcctgctttccccgccaaggtgtcgtctggtgtggcccttccggttgaagaagtgggctggcaggtggttgagcgtagacagaggaaccgtggtgtgcac

SEQ ID NO: 2339 - DNA, 418 bp, Zea Mays
gtgatttgtggcacagtaggtggctgaggccgagctcgggcgagacggagaacttgttcgaggattgagcctggggtcgggcaaggaagagcggttgcgcccgaaggctcgtctgcttggcttgtcatgttaggtgtcccatcggagggcattaggcagcgtgcgtgcactgtgatgtaggcgtaatcatatcattgtgttggacgtgactgttgtcttgtctgctactgttttctgctgccacagtgcgggttggcacatgcattaaatgcacatgtcccccgcctatttttgagtgcccttgtcctattcgcttgaggccggcttgggcgagacggactgggctgaggcggcttcaggcaaacaggagcgagtggtgtcgacctcgggcgaggtggggtcctgctcgagttgggag

SEQ ID NO: 2340 - DNA, 969 bp, Zea Mays
ctctttctgagtgaaaatatacttgagactcttatggtcggtgtaaatgtcataagatttgccatagagataatgcctccatgattttagggcaaaaacaacagcgaccaactcgaggtcatgtgtaggataattcccctcatgcttcttcaactgcctcgagccataagcaatcactccgccttcctagatcaacacacagccaaggccaatacgagaagcatccgtataaactgtgaaacgcttaccacttcaggcaaggctaagataggagcattcaccaacttgttcttcaatgcctgataactgaccacataatcgttggaccagacaaaaggaacacccttctccaagagtctagtcaatggcttagtaatgctggaaaaatttggcacgaaataccgataatatccggcaagccccaagaaacttcggatttctgagacactagagggtctcttccactccaccacaacagtgacatttcttgaggtcaaccgcaatggcatgttgattaatcacatgacccagaaaagcaactttagacagccaaaaggtacacttcttcagtttgccatagaattgattcttcctaagagcacccagaacgagacggagatgccgctcatgctcttcctctattttcgagtaaatcaaaatatcatccagaaacacaaccacaaagtcatccaagaactcatgcaacatcctattcattgcttccataaaagcaacaggggcattagttaagccaaaagacatgatgataaactcgaaatgcccatacctggtgctaaaagttgtcttctcaatatcctcctcgcgaatcctcaattgatgatacccagagttcaaatcaattttagagagtacctgggcacctctcaactgttcaaagagaacatcaatatgaggtagcggatattagcacgataatccacacataacctcttgcttttatccttcttc

SEQ ID NO: 2341 - DNA, 1070 bp, Zea Mays
gtgtagagcactgtctctaatgaagttatgcaatgtcatacatgcaataattatcttggattgtttcttaagcgaaaatgaagggagacttaacaaaattctccacttcattttaagcacaccaaaagatcgctctataacattgcgtagcgacgagtgtgcatagttgaatacttctttgctcccaataggttgcctcgcattttgccattctgaaatgtggtacttctgacccttataaggtgcaaggtacccctttctatttggataacctgaatccacaagatagtatttacctgcacaaacagaaatataaagttcaatacttaagacataaatgaatatcgtatgatacaaaagtacaacatacttatttaccttccggtggatgggggaacctgtccgcataagttatcaaagtatcttgtaatactctagtgtcatgtactgaacctggccaccctgtgacaacaaatgtgaacctcatatcgaagtcacaaacggccattacattctgtgatgcgtaaccgtgcagactaatatatttggcttgctccgaggccgggacagacgctggaaagtgactaccataaattggtcctacgcaatccttgaagtggggccaaaatctcccctctcgcaaacgaggatgaatctctatgaaatttgggtctttgggcttgattacgtcagatgacatcttatatagtgcattaagtacttcactatacttgcgactaatagtttccaaggagtgaccaaacttattccttatctgcctaaatgattgtggatccccacatgcccacaagaaaatacctagagcttccatagtactgacaccacggcttggaagcagaccataactttccaccaacgtctcatgcaatcgtctaaaaacagtacgtcgcatgcgaaacatgtcaaagcagtcgttactattctccaaagttcgctcaacccattgaatacctgtttcaaccattgttcttctagaaacctcactagaaggcctgccccaaatgtctacatcatatagggcaacaagcaattgtccatctctgtcatct

SEQ ID NO: 2342 - DNA, 702 bp, Zea Mays
ggcagacccaaggcagaagaagctacatcatggcttgacgagggaagatcagcaggaataatttgaagggcattatcaggggcgatctcagccccgccagcagatagaaggtttctcgcatctggatcacagacctctaaggtgacttgttcgttcaaagccgtggaagcatgcaccatcgttgccccgttgaaccgaggtggggtagacccgacgtggacatccatggaggtatgggaaggagagcccgcctgaacaccctcgggggctgggtttcagctcgcgctacccaccagagccggatcactatcgacaacacccttgggggctgggtaaccgccagcaccaccctcgggggctgggtcttccgcagtagccacctctaaggctgagagctcttctgtaacctccatgggagtcaggtgactcggaccagcatcttgacatcgaagactgtcttctaaagtcgacgatgcgcgagacaccgcttgagatacccccaatccatcgcctagaacctctgagcaaacaaccatcacatcatcggcagtcggctctaactgcatgtcctcggggacgacgtcctcaagtgcttgatcaaaatccgatattgacagtccctgaaggctgacaagggctgacagagctggagaaggaatatcacttcccccctcactacctctatagtgcctgctattcttt

SEQ ID NO: 2343 - DNA, 440 bp, Zea Mays
gctgcatcatgtccgccgtgtcatatgctttctctttgcgtgcggtagaactttgattagggtcggggtccttgattgggtgtcaccccagcgaggcatcaccgccatggcaccatgctccactgggcgcgcacaaccggtcggaagacgagatatcagtgaccgttgatctttacagtgacggtctcgattagaagcaagataccgtttcggtgcgctaattgtggccgtagatcggagatccgagggtggcaaaatgctcttgggtagattgaatggagaccgtacatcgctgatccaaggatcaggatggcataccgaatcgagtacagctgagtctaatctgggccgtcggtctatatctgagggcctctgtgtaacgataccccttcgctggcccttttgcgcataagccgtttgtgatactggatatcaacccg

SEQ ID NO: 2344 - DNA, 569 bp, Zea Mays
ttgaactaacctgtagagggctagccacggcgaggtgttcacggcggcgcggaaaatagaattggggtaaaaccaaaattgggacgctatggtggatgatcagaggcaagggctggtgattggagttcgtaataagttggcgaagcaggccggggcatcaatttatagtagctcgaagcggtggcttcgaatttgggaggagaacgaggcttatcttcccagcgaggtgattaccgaggcccgccgtggagcgcatgcgttcaccgtgtgacggccgctatttaggggatgccacaatcatggcaatgcagtgaatcaggtgagtacgtgtcccctgctgcgttcacggcgagcaccggcggcgatatttcaccgctcgtgcgacaaggggtacagcagtgactcagctttagccaagccctccgcatccaagatcttttaccttccacggttatccactccacactagcacgaatcgcggtggatcgcacagatcgcagcgcggtgatcaccggcggcgaggttcagtgaacccaagatcttcttcagactactgtaccatcaaagtc

SEQ ID NO: 2345 - DNA, 405 bp, Zea Mays
cccgtgttaagaggagaaaacagatgaaatagcagttccgtctacgtcacaaaatgttctacgtgacgatgaacgactactttaaccctgaccgtagtacatgaaaatcgaggccctttcagctctgaatttgactttgtccccccacgtacgtgaaaaggtcacatcatcatcagcagcctagctataaaagtcgccaagtttttgttcttcacaggtacgtacgatgtgcaagtagtaagcgctgacgaacaggaaaggataacgtaccggacgtacgtaggagcatgcaatgcaattagtagtaagcagttctgacttgtcttgccgctcccggccggccgtacgtcaagattccgtggatccccgtaccattccaccatacattacagggtacgaattggt

SEQ ID NO: 2346 - DNA, 322 bp, Zea Mays
gatttttatccattatatagggggcatgaggaaccacataggtacctccatcacacttcaagtgtaaatcttttcttatgcccatgtcctcaaaatcaagccttgcattaatactgtcctttgactttcctggaagagcaagaaatgtacctagcaagtactcacatatatttttttcaatgtgcattacatcaagattatgacgcaacttcaaacctgtccaatatggcaaatcccacaggcacgaccttctcttccaacattgaccaccatttgcatctcgcttcctcttattgctatttggatgcttccctggtttaac

SEQ ID NO: 2347 - DNA, 728 bp, Zea Mays
gaaatagcacaacaagtgcgttaatcaaagtcttttatttaaaagacactccacgcaaaagtcgcctaagggtgcagccggaatagcacaccaagtgcgttaatcgaagtctcttattaaaaagacactccgcgcaaattcgcccatgggcgcagccggaccaacacaggcgtacgaatacgacaaacatgccacattaccatacaaattacaattacatacacacggcgtgggcatcacatattacatcggctcaaccttcgggatgatacccatctccctgtaattaaacagcattatcctcaattcctcaccctcaaaaagcttccaaagatccccctcgcctacgctcgccccaatcggcgaggacaacaattctcgtttaccaacccggtctactcggagatggccacgctccatccccatacgacgacgcctgccacttcgtgaaaattcacccacactatgttttcccaccacccttcgccgcctacacccagtactcgcactaggaagatccccggcaccctccacacgcggcgaagtctccgccgcagccacatccaatgcaacaaaataatccaagccttcatcagaggactcctccgtccaagaaaacaaactcccagattcaccatcagactcaaaacactcagacacagaaccaaacaaactatcatcggtaggcactacggttgaggccaccacaaaatcagtattgtcagcag

SEQ ID NO: 2348 - DNA, 874 bp, Zea Mays
ctggcacttgggcctgctgtcttgttgtggagcgtttctgttgccgatgccaatctggcgagactgagatccgccacgtcctcggcctctagaatctctacttcctccaccacggttgccgcctcttcctcgggaacttcctcttccacgggtggcagcgttgacggagtaggagtctgactcgcgtaggagatccagccgttgctcataactgagcagttgggagtacacctccccaatggtgagcggatcagctcgcgcgacgagggaggtgatgaccggattgtagtcgtagtcgaggccggtgatgatgtacgagatgagctcgtcgtcgtcgatcggcttgccggagtttgccatctcatctcccagggccctcatcttgccgacatattcagcaattgtgaggtcccctttcttggtggtggcgagggcgattcttgtgttgatggagcgtgccttggtcatggaggagtaaattgtttcaatgaccttccaggtttctgtggcagttttgcatgccgctacctgggtgagagcttccttggtcatggatgagagcaagaatcctaggacctattggtctgtggtcttccagtcctcccatgccggattgggaacgtcgacgtccttgtccttgatggtggtcgccggagctgcagcagcacccgtgaggtaaccctccaggcgcacacccctgacgacggctaggacttgcatcttccagagttgatagttccccttggccagtttctcagaaacagcttgaccgacgaggggattgataattgcagcagtgctcgacatgatgattctctggtggattttggtgtttatggattggctcttgaaagggaaatgtgcctttgggcca

SEQ ID NO: 2349 - DNA, 583 bp, Zea Mays
acatagggtattacgcactcgagtggcctaaacctgtataatccactgtgtcttgtcgtgccttgtacgaaccatcgagccacgatcaacctcatcgtcctcccaaaagcattgtgtggtatacctcgtagtgcgtcgtcggtactaaacaatgacaactgatgcgctagctagggtgtgcgatgtcgatccacgatagctccatggccatcatcgtcactagtcaccaccatgatcaacttcaccgctggggagattttccactttgaatcccccctcctgcattgcaaaccagaagggcaccctgcaccgcatagcggacgtggggaaggaggccccaaggtctcgtactgccaccccaacagagaaaaaccccaatcgaggtctagggtggccccgatgacggtcacgactaaaccccggttggccatgactcgacccgcaccgatacgcaccggggcacaagggctccgactcatccgtgcaccacattaggttgctactgtgccgaccagacgcacggttgcaccagcgccaccaccatggtcgactgtcaaatcagttccaacatggtggaccccac

SEQ ID NO: 2350 - DNA, 471 bp, Zea Mays
catgtagtgagccctagttgggcatgatggtcaattggttgaagaggggaactagcagatcgtggttaggctttgctactaaggatgggagtgttgcttgttttggtaaggttggtgagtacattggcctgaaacccttagagaaacctttagccacccacaaacttgttaagctcactccacctaaatccgccacccctgctgtgagagatggattgcttgtggagcctgtgagagccccacctcagaaacaagtgtggtgtccaaaacctaaccatctcaggaacacacttgacaccctgccagatatctctagtgatccccttcctagagcccctcaggcatccaaaaagacccattcccacaaacagattccacctaagagagaggtgaggtttcattatgagtattgtgagagggatgtacatttgcctccttttagctttaggaggaagacagatgagtggcggg

SEQ ID NO: 2351 - DNA, 622 bp, Zea Mays
acgaataggtttatataggtgaatatgagtgaagtgtgtgcttggtttgaatttaggcgaagaaaaaagggatttgggcactcagctcggaaacgatcgctcaaaacgggaaatttggtgaaatttaagcctggaatctcggattggcgtgaaatttggcaagtaggttactggaagtgttgtgaaggtgcctgaaaaatttgggttcaattggagcatttttggctggtttgggcatttcaccgagcacgtggcgtgcggggaattaggttttcggtgaaacggctatttgaggtgtgaaaaacctcccgaaggagctagagacctgcaggagagttcaaggaatacaggggaacacatttcacaattgaattgcactggatttcacaggaattggagtttgagcaaaagaggtggaaaggagtgttctgctcaaaaagaaatagggaggagagagagggagccagagcttctcacctaaggggggaaggagagaggcacgagttcgccggagcacggaagaagacggtggccgccggtggagggggatcgccggcgggggagagggaatcgccaggaacagagaggaagcgggcgctggcagggagaagactgagcctct

SEQ ID NO: 2352 - DNA, 677 bp, Zea Mays
caacttctcgcgaacagcgtgttgattgcatttgctatccccgtctacctcgtctacccttcgtctatcccctgtatgccctccatctaccccatccatcaatctcagctcgtgtcgttctcgtctacgctcggcatcttttctcgatagtttctctacgctctgcggaacaccggaacctccgctttgctccacacatttaccatgtccaccccaaccatcgctcgataattccccaagtcactcctactcgcgtctacacggtcttaaccccgtcgtctacctctcggcggctacctttgtctacccccacatttccttgtctcgtcccgccgcgcccaagggctgtgagcgtaaccgccattcccactcacccattcctctcattgtcgtcctggcccgtgtgtcagctccgtctaactttgtctaattccatttgtttccgtctaacctcgtcttacccccaacacgcgcaactcaccgcacaaccgtcttcccataacctctcctctatgtaaacacatgcctcaactcctcccctttgtgtatgtcggttctcttcacttatcctggcgcaaggaggttccaagatggggagtcccctgggcgattgcagtaaccggaggagagaaagaacgctgttcaccatacgcaggtgtgaattctcttgtcccttt

SEQ ID NO: 2353 - DNA, 1089 bp, Zea Mays
gtaagcttctggacgtccttgatatgggccggaggcatcatcgcctcaattgctttgatcttctctgggtttgcttcaatgtcccggtgcgaaaccaggaaccccagcaactttcctgcggagacaccaaagacgcacttgtctgggttcagcttcgtgcgtgttgctcgtagcttgtcgaagaccagggttaaatcttccactagggtcaaccttctcttagtcttgaccatgatgtcatcgacgtatacctctactctgtccctaataaggtccccgaaagtcttactcatcgcccgcacaaatgtcgacaaggcgtttttcaggtcgtaaggcattacgacatagcagtaaagcccatccactgttacaaaagcggtatgcttcctatcttccctagacatatggatttgatggaaaccagagtaagcatctaagaaggacaagaggtcacatccggaggtagaatccacgatttgatctatacgtggaagtggatatgggtccttgggacaagcctgattaaggctggtgtagtcgatgcacattcgaagcttctcattcgccttggggacgatgactgggttggccagccacattgggtgatgaacctcttcgatgaagccggcatctagcagcttccggacctcctttcggatgaagtcctgccgctcaacgaactgtctccgaggcttctgactcaccggtttggcgtcagggttgatcttcagatggtgctcgatcacctgcctggggatcccaggcatctgcgatgactcccatgcgaacacgttggcatttgcctggaggaaggcgacgagcgcgagttcctatttttcctccagatcacccgcaatgcgagtggtctagggggaattcgcgcagagccggatggccttgatggggatgtcgtccgctccggatggccgcacctttggcaccttggtaggcaccttggtaccggaggtcgaggggttcctccctctatcgtctgggcgagcagtttccgccgctagggcgtgcagcttttccacagccgcaagcgcagcagcgcggtcgccccgcacggtgaggatcccggctggagac

SEQ ID NO: 2354 - DNA, 875 bp, Zea Mays
ggacgggtgctccccagggagacgaactgggacggatgtaccctttttgttgcagttctgcaatctggagttttaattctgctaactctgtgggggccatgcggtatggtctctttgcgatgggcgtagtgccaggaatgaggtctatgtagaactccactcctctttcgggtggcattccaggaaactcttccggaaatacatcctcaaactcttcgattacagacatgttttctgctgccaggttaaacatcattggatcgatggcgggcgactgggcttgacaggaaactgcttttccttggcgatcggtgagaaggacggtcttacttgcgcagctgatgatacccttgtgcttagttagccaatccattcctaggatcacatcaatccctttgggatggtaagacggttaagtccaccaggaacactaccccacttaagagaattctgacttgggagcacctgagttggcataggaggtctgatcccggggttcgggtgaccaaagggatggctaggggtgtagaggggatgccatgcttttccacaaacttattggctataaaagaatgggatgctcctgaatcaaaaagcatagtagcgggagtaaattcaacaaggaactcaccgagcactactcccggggcttgctgggcttcttgagcgtcgacgtggttgactcgggctctgccctagtactgagtcctgctctgctggctgttggaaggaggtgccttggaggtaggtgccgagggaatcttggggccattcaccgagttggagtaggttggtccgggtgccttcaactgagggcagttattcttgaagtgactggggtctccgcagtgccaacaggcatttgctggcggttg

SEQ ID NO: 2355 - DNA, 424 bp, Zea Mays
gtcaccgaagaaaattggtgaccaaagatggtggaattgctcgacgctggtcgggtccgttgcggaactgctatctaccatgggcaggacaccggactgcgagattcacagtaagcaagccctatctagttcgttatcgttcacgctttctgttgcacccgtataggttgggatccgagcactgggtcgttgatacgccgtacgtcggtagggtcgccaccgcaggctggtggcgccgctgttgccagctgaccagaggtggaagaaggctggtagtcatagatttgtgatcggacagataagaagagatcgtactgtaataaaatctaagccgtagatttaggatcttgcagcctcagtttcataccgatttggtggtgttagaatctaatctagacagtggatccggatatcaacagtcgga

SEQ ID NO: 2356 - DNA, 607 bp, Zea Mays
taagatctcttctccagacgacgagatctaggttcctgcgaggaggaagatgaccttacgccatcacagaccgtccggtccaaagcacgggccgtccaaagcgacgtacgtagggaaggagccgcttatgcagcaaggtcacgaaccatccgacccagtgccatggaccgtctgtgccacccagtgtttggtgactagatcggcgccaacacatgcatggtgcaattggctggggtggatcgtcgcaggccagcatatcctataactgcggaaggcgggcggcatcatattagtgaggtggcgtgcctattaattatgcgtgctctaccgcaacggtaagtccttacgtcgataccagcatagtattacgtagtacctctcatcattgtgttgggaactacagtacctgcaaaatttgcggcgggcggcggctgggtctcgagcggcgacgaccgagatgacgagctagagagccatggcggccgggctggcggcggcgacgaccgagatgacgaaactgtgtgtgtgtgtgtttggttcgagggacgatccttctcacgcgcgccatgcatgtatggaattccttggtttggaatttacagcagac

SEQ ID NO: 2357 - DNA, 369 bp, Zea Mays
gattatttcctattttccttagtctatggatcgggcatcaattactgagaagtgcaggggctcgcgggtaaatattcctagactcagtgaacaatgccccctggacggcgggttctattttctacaaacagaaggtctcttttgaataaatgcagaggcaaaggggtattggctgactctggccgttggattccaaatcaacagatcagattagatctgaatccgtaagcgctgctagcccatggatctaagatctacgacctggatttaaagtgccaaaggggtattaatagatctaatcccagccattcgcagaaagatcaacggctaggattcaattatgagcgaagggttacgtatttctaatct

SEQ ID NO: 2358 - DNA, 284 bp, Zea Mays
gtgggagtagcaaaccaataatgctcagaggtaaaagtacaggatggtcagacaaaacacggcctagctaggtgaacaatgtttattctgttggaaagaataattggctgggctgggctgggcacaagagaatgagtgggaacgaacggtgtgctggtgctggggagccggagaaggacggtggcggacagtggtgtgataagcgacgtcaggacgaacaccatcagattcagacatgaaggcgagcgaccttccaggaagcttccaccagctccctttctctc

SEQ ID NO: 2359 - DNA, 802 bp, Zea Mays
caaaaatgaaagcggcaccacgaccgcgggatgtcgaaaaatactgcagagtcagtcttcgacattcgatgccaaaacagtcaccgcaacggcaagcctcgtcagccattacgtgcgacaagcacagtccaggcagaagtcacctaagggcgcaactaggttattataagtgtgtagtcatcctagagacacatatttttatccgagcaaaagccgcctaagggtgcagccggatcagcacaacaagtgcgtaacaacacccaaagggtgcgaagtcgtctacaagacacatatttttatccgagcaaaagccgcctaagtgtgcagccggatcagcacaacaagtgtgtaacaacacccaaagggtgcgaagtcttctacgacaagcatatttctacatatgcaaaagtcgcctaagggtgcagctggattcacactaggcgcatcacaaaaagcgaagtcatcacagaagactaccaacagatcaatataaacatattaacgacgcccaagcgcacgaagacgctaccaggtgcaattcagcgcaaacacaacaaatgaaagacacattatgttacaattataaggtgcgcactatgcataagatattcaccccacatagatgtccccatagccgtcctttagcgaagggggagagggcagcattttcacttatcgtcgccaaagaacggcgatggcaacactcattattacatcggttcttgtttcggaataagaccagcttctcggaaattaaacaacatcaacctcaactcttccccatcaaaaaggtcccgcagat

SEQ ID NO: 2360 - DNA, 393 bp, Zea Mays
aggctcttgctattgaacacaagcgtgttcaactgggagacttgaagaggaaggctatctcacatggacagggtagcagcagtgttcgtccccactacgtttcaccatagggtacacctactcgtctaggaggaggaccacgcccagctcagtatgctccatagaggtctccacggacacctcctactcgtcaggatactcccactagcaccccgacgaggtctgcaggacagaagaccggccctacatgcttcaagtgtagtcagattgggcactatgctaatgcttgtccaatggggagttctggtacactagctaagaacaagcaacagactcctggcaagggatattctatagccagggtgaatcaagtcagcgttgatgctactcctg

SEQ ID NO: 2361 - DNA, 431 bp, Zea Mays
taaattttttgaactgccttccgttggaaagtacattacaacacacatgaccaacgaggcgtttgctgtaattttgtgttaccaccgccgtgacggatatatctatactataccacggtataattcatcagtttaaattttataaaatacatttaactaaattactctcacactcgtaacattcacaaaattcaccaaataaattacactcaaacataacataccattaaaaccaacggttcatatcgctggataatcatctctctcttaaccattcaaattcaatgaacaatattattcatcgctcccctaccgttctcaccctcctccctctcccttcgcgtcatcgccgctcctctccctcactcgtgttgccgtcagtgtcaacctctcgcctaatgtcgatgtcgctgtcgattctatctgttctc

SEQ ID NO: 2362 - DNA, 374 bp, Zea Mays
ggactaactgccaaaacacatatgggcagtaaacacaacagaatccagagcaaccgggttcacaccttttcgcttgatgtacggatccaaggcaatgacgccgcaagagctaaagcatggatccccacgaacaagcccaacagccacccctgatgtcgacgagctaacctccaaagaccttatcaacggagactgcatcctcgctctggaagcactaaacaaatatcaagcacagactaaggcatggcgtgacaacaccgtcatcccaagagagttcaaagcaggagacttagtactcacaagaaccatcagaacagagtctcagggcaagcttgaacctagggggaggggccctacattgtcaagaccaaaac

SEQ ID NO: 2363 - DNA, 654 bp, Zea Mays
tcgcaagtgcttggccggggagatcggcgagctctggtcgtgtgtgtgaaggacctgtcggggcagaaaggttcaccggggtggcatcaattgctcgttggactcaaaggaccacggcagatctgcccattgccacgatcaacaccaattaggcgtccatctgcggtaagatgtatactagcatgttcgtcatattccgtacttcgtataaccctgagccgtgatagaataggagcacgatttggccaaatcgcctaactctggcgatccccaccaaggatggtggcggagccgccgtcgagtagttggtttggggagggcgaagtttggccgtgggatgtcctatgaacagctatgattaaaccgagcgtaccctttcgcgcaaacagatctgggtcgtagatacggtatcgtgtgagcgaggagtcgatcgtagtcgtattaaatttggtccgtggatccttaatcctgcggccataaacgcatatcgattcggatgattatcatattagatccgagccgttcgcctctaatctaacgaccagaactctccaataccctttcgttgtgaccactttgcaaaataaacctcgtgcttgttctgaaacaacccgcagtccactgcgggatatatctgagtcttagggatttttt

SEQ ID NO: 2364 - DNA, 472 bp, Zea Mays
gatgaactgggacgaatgtaccctttctgttgaagttctgtgatctggagctttagttctgccaattatgtgggagccatgcggtatggtcttcttgcgattggtgcggtgcctaggattagatcaatgtagaattctacctccctttctggcggcattcctggcaattcttctaggaatacatccatgaattcttctaccacatatatgctttctgctgctatgctaaacaccattggatcttgggtgggtggctgagccttacacaaaactgactttccatggtggtcagtgagaagaacggtcttatctgcgcaacttatgacgccattatgcttggttaaccaatccattcctaagatcacatcaattccgtgggatggcagtatagctaagtctgccaagaatactaccccacctaaaagaatccagacatgggagcatttgaggcagcatagaaggtctgaccctg

SEQ ID NO: 2365 - DNA, 488 bp, Zea Mays
tcaggaaaaaagtcttcgataaaaatgaaaagtttgcagggaaatggataagggagttgccctatgtcgtttggagcttaagaactcaacccagtcgagctctgcatggaaatacccctttcttcatggtctatggttcagaggccgtgctacctgctgatcttaagtttggggcgccaaggttgatctttgaaaacatagcagaagccgaggctactaggctggaggatgttgatatactcgaagaagaacggctgaacacggtaattcaatcagcacggtaccagcaaaccctgaggcgctatcacgataagaccatgaaacatcgatccttcgcagtaggagatctcgtcctctgccgaattctaacgggagaggggcggcacaagttgtcacctctatgggaaggaccattcatagtagcagaaatcactcggccgggatcatatcgtctcactcagatggatggcacagaaatcgagaactca

SEQ ID NO: 2366 - DNA, 304 bp, Zea Mays
ccgcgctccaaggtcgatgaggcgcgggacgctgcccgggatgaccccaacccggcgtcgaacacatcagcacaaacatccatcgcgtcaccatccgccggctctgataacagatcctctggaaccatatcttcaagagtttgatcaaagttcgccagagacaattcttgtagaccaatgagggcagacaaagtaggagaaggaattccactactttccccactagctacgtagcgccgactgttcttccgagtcagaggtatctcatcttcttcctcctcctcattttcatcagcaacacaga

SEQ ID NO: 2367 - DNA, 1281 bp, Zea Mays
tagctagaaccaacatcatgtcatttaggtagactcttacatatgtttacatacaactcactctttctaatttaacagttgcaggaaactcccactgataaaggtaaaaagtttgagcttcatcttcagtctcctccaaggaggtgagcctcatttaatgttcacctggaaactgggttaagatggtggtcaatcactttagtttttttgcaaaacaataaaatcttgtactgtcatcaatcgccaatccctatcatactattatgtacaatcttttattgagcgcgaaagagtagaaagagctaacatagtaagccaatgcacaagaaagtctcactaggaattcataataaaaaatacccaaaactaaaagaaaccaatactatgtagcgtatatgaattcattataaaaaaatataaatgaatccatcttagaaaataccaaataacaatgattcctctgacctttcaataatagcatagaaactacacctttcagaccattgccttgattgtttcatatgttttgcctaaaaatgatacaacttacatctagaatttttgtgtggattttatttgtcatatctatggtctgcaggcttccagctattccagatcagaatcttgtgtgttcaaattggtgccttcctattctgtgtacaaaaataattgctaaatactgattacatgacaaaaccactttgtcaagactctacatagttcttgtgtacgtacttggcttcctattttgtgtgtctagcagtgtgttttctgtgttttcagttatgactattgttagtgtatttcaaaattaatatacttcttacattcttagacatataaagtcacattggggcactagatatttcacacatggaaaacaagcagatgaatgtaactgatctaataagagtaacttcctatatgtgcttgtagtttccagttaatacttaatttagtgtctttctatggaaacgggaaattaaccttgcaagttgtaacaccatttggttaacatggatgtggtttgtagcacgtgaggggtagaacgatgtccgcctctttcatttatggttcatggtacaagtctatgagagatgtctgttaattgaaaatcatgatggttcatatatgaaacagaataccaatctctctagaaatataaaagtatcaggggtcagagattaatctcgttggggactgcaactagacatcactcggttctagatcaaagtagatttattagggttttaattttttggctgagatgtgtcaagttac

SEQ ID NO: 2368 - DNA, 473 bp, Zea Mays
cactccataaccgatgaattcctcaacaaaatcgcgcccgctactcatgcgggcagcacaccgaagggccccttcgtccctatcatccttcgccacctcaaacggcgggaacgccacataacagtgggagcacatcacggccgctgggagtcctaggaggtcttcgacttcgcctcccgacacataaaaccaaaattcataccagttgccccacttgttgcgggcgcagggaactagttccacaacttccgccgaagtcttgacagtcctcggcgtaaaggtgcacaatccaaactgtgcaatcttgctcccaatttttctcttctgtcagtgcagacaataattcttggtgaagacctctacggagggctgatcaccatacgaagtcaccgcctagacatacttcgccagggccaccatggcattaggtgtcaattggtggatctgcacgtcatacctctgcaagacctccg

SEQ ID NO: 2369 - DNA, 794 bp, Zea Mays
ccatgtgaaaaaccctgagactcagagttaactacggtggatggttggttgatttcattattttccaggttttcttatgtaaatgtgcacggcgaagtggtatggtgagctctagaccgcacgattgacgatggacgacttggattagatcaaagctacccgaatcggtacatgaccccggtccttagatccgcaatccatggcccagattccactaaaccgtatcgattcctgagcgtccatccactgatcaatggctatgaggtttttggccgaaacgttaccccttatctaatccgggtcgcagatctcatgatcgacgataggaaactcatctgctacctctgccatcccgaccggcggcattaaaacaccgcacggcggcgccatcgttggtgtttcgcaattcctaatctctcgctcttgaacttcgctcggaacaacactatacgaagggaatattgttgcgactgtattaacgaggtccataccgagaatcacagcgcagtcgttcttggccacggcggagtgcggctcgccaagttcggtgagaaattgtcgcagcctcacccttcgctcgcccccgacgaggccaccaatcgcgacagcgctacctggtgacacaccctggcccagagatcgatgggtaacgttgtcaatctccggatccacaaggcggcaccgactgcaccccttttcccctctcagttttctgcttctatgcgagactacccggtgacttcgagatggcaaggaaggctttgcgaggcgctccgtgtcggtccttattgccc

SEQ ID NO: 2370 - DNA, 554 bp, Zea Mays
gacggaagatacgcatgggatcacgtgaggccgctatgtacagtgctactcttctctccggcacggcaagcatgcaagtcggtggtgcggccggaaaggcagccgcaatcttactcactcacgtggtacgtaccggacttgctacgggcactgttctctgcggaaaatggcagcgaaatcccaaagaatttaggatcccgtaatgcatgcagctcgttccattattccgctcctggcatgaactcggtcggtccggtcgtcacgctcggctgcttgattgtctacgggtaccggatcactatcacaacgcggtgcatcgtgcgtagtctgcactctgcagcaggtacagaatcactatcgcattcgcgagcacattattgtcgacgatatgatcagccatgggatgggagtcaaaggcggctctccttgagcaaaccgtatgtgtcctccgctcttcctgcacccgtgcgcgcgtgggcagtgcagcagcgggctcgggtcaactactcgctaatataagctcagcctcctccggccttcatcatgcattcgtt

SEQ ID NO: 2371 - DNA, 604 bp, Zea Mays
caggtacaagcttattgcatgtcacttgttaagaaaatgaaagactcgtatggctgccctggtgatgtaatggttgattctcacattggagcatggccgggttggacaactgcctaactgcttcaaggcaatcagttgtgaggatgctgctgcttctggctcttttcagtatcctaacacttttagccaagaaaatcaatccgagcaagtgccagttaatactaagacgtctcatttggaacaaaatgatagaacccaggaattttctctgcacaatattgctagttttcaggtacctcgtgtgacttataaaagggagttctttttgcagtagatgtcttttttatactgattatgtatctaatgagtctaatgtctatattcaccactaagaatgggaaagcaagagaatatgactgaaattcagcaaagctcagctcataaggtaactgaaactatatggaatataactgaaagcactatagagaatatgacttaaactatagggaactgtcaaccgatggatatgaaacattatttctctataacgagtgacattagcgggtaattaatctcgaaccccacgtttgacgtttacatctaa

SEQ ID NO: 2372 - DNA, 530 bp, Zea Mays
tcaccctcttgcattcgtcaactattgaagaagcataccttacagttaccaaatttcagtattccttttgccattgaaacagatgcatcaagtcagggcatcggtgctgtgttaagccagcaatgtcaccctcttgcattcgtcagtaaggccttaggggtcaagaatcggggcttatccacatatgagaaggaatatctggctatttcaatggctgtggatcagtggcgcacttatttacaacatgatgagttcatcatttatacagaccaacagagtttatctcacttgtttgaacagaagctcaatacaccctggcaacaaaaggttttcaccaagctactgggtctgcaatacaaaatcaagtacaagaaaggaattgagaatggtgctgcggatgctttatcacgccgtcctcatccggatgcgacagtctactctatgtcatgcagttcacctcagtggctgtctgaagtcatcctgggttactccaacgacagcaaggcccaacagttgctttctgagttggc

SEQ ID NO: 2373 - DNA, 817 bp, Zea Mays
cgtcggtgacaatggcacgtccgatcactcacatcagttcagcctggggtactctggactggacagccttgaagctgtcataataaactcaaaaaccctgcttctccgccagttgtactgactgctcaccattattctcaaatcttagtaacattttctttaggcataagtatggttcattcaaaagtgtcttgtgggcttgtggccatcgttttcgtttcctgacacgtttacggccgttggatctgagcctctgaggtacatccgcacggccggggcgcagagatatatatggcctgattggttgtctgtccttcgggcgcctggttggtgcgggcctggtcccctagcgaaggccattttcagcttctcctcgcatgcaagctgaacagtgaaaaaggcactaaatggcctgattggttgtctgtccttcgggcgcctggttggtgcgggcctggtcccctagcgaaggccattttcagcttctcctcgcatgcaagctgaacagtgaaaaaggcactaaatggcctgattggttgtctgtccttcgggcgcctggttggtgcgggcctggtcccctagcgaaggccattttcagcttctcctcgcatgcaagctgaacagtgaaaaaggcactaaagtgcattcgcgcgtgcagtcccggggacgtgaggcacggcaaccaaacacgcgctcgcacccggtcaacgcatgccacgagcctgggcgggtaggatctggcaaccaatcatgcggaaagtgcattcgcgcgtgcagtcccggggacgtgaggcacggcaaccaaacacgcgctcgc

SEQ ID NO: 2374 - DNA, 314 bp, Zea Mays
caaagaagatgcattaggaagtgagggagatgacacgggttcaaccgctaagtaggcgatcgtagcacgtgggaagacaagcggtccaggcacgtgacggcccgcctgagggtggagctcgacgcagtcctggagaatagggttccaggcgggatcgaaggacacgaacatgccctggatgagctggccgtcgtggaggagtgcacgcacactcacgagagcagcgggtgaggtaaagctcatgtatagcgggggtgacatcatgaaatcggtgagggtagagacaccactggtgggaagaacgcaacagcgcg

SEQ ID NO: 2375 - DNA, 514 bp, Zea Mays
aagaggtcggcgtccccgtgaatccgtgtgtgatgtgggatgctcgctattcagtggacccgggtgtcgcacgacgcagtgtctggcttcactgactgtgggccgcgtcggtcaggtcgtcatcctcaacaactgagaccgggtctccgtgagatcgccggggaaagcgggcaggaggttgcgaaccagctcggtgcgcaggaaggtggtccgggtggatatgtattggtgccccgcgacccgtggggttattggagcgaaaaaagggaggtctatccaccagacagggagagacacctcggtgggtggaagaaggtgtgccgccgccgcaccattgcgcctcttgacattactctgcccctcttactgagtctagctgtgcggcagggatttcgagtgcgtgtgcatcgagaatcaggacagttgggcgctccgggtgtgacaccccagtgtcacctagggttttttctcaaataccaaaccaagaatcattattttatgagagccaaagtaa

SEQ ID NO: 2376 - DNA, 993 bp, Zea Mays
tccgggttctgctgattattggagttgttccgcttcggatatgggtagtctttgatgaaatgtccagacttcccacaattgaagcagccagttgatgaactcgagagtgcggggaaacgagcaccaagggcactcggctgagttgttgaggtgggggcagtagcagggtggatgagtataggctgtttgaagggatagaagggtggatgaggtgaagaacggttttgattaaaaggtcggatcaccaacctttgtcgctttttaggccctggttggacctatcacctccatagtcctttgacttccctgggcctgcatacttagcttcaacttccagtgtcgtgctgacatccctactgtatgagaggtcgaggcaagtggccatcttccgttgtagtcggtcattaaggcctctcataaaacaattcctctttttcaagtcagtattgacctggtcaattgtgtactgggacaaatgattgaacttgttgaggtactgtgtaaaagtatctccaccttgtttgagtttcatgaattcttcttgcttcatatggagcactccctctagaatgtagtgctcccgaaatgccaatttaaattcatcccaggtgacttgatgtctggcaggctgaatggccacatagtttccccaccaggtgctggcagggcctcttaactgctaagccgcaaataatggcttctgggtctccgtgcatcggatgagtccaaacttctgctcaataacccgaatccattcgtcagcttcgaggggatcttcagctttgatgaatagtgggggtcgggtttctgagaaatccaaatatgaagtttcgcggggtccctacggataagctctcccgccttgttgctgaagctgctatctcgccatttcacgaaggaagcgggtgttgtcagcggtcgtggtgactaagtcagcgatagcctcggccagtgtgggtggaaccgatggtggatttggtgtatcatcttgac

SEQ ID NO: 2377 - DNA, 790 bp, Zea Mays
gtatagaaagctatatacacaaattgaaactcacaatttacaatttaacttgagaagtaagtttgtgctaatgtttgtaataattaaggagttttgctacgatatggctccctcgcctctatctctctctaatacaagggagttaaaaggaaaatgcaataaatgtgaggaccacaccctaatccatataacgtgggactaggaagctaaagagtacagtcaaccggtggtctatgatgacaacagttacagccacttgctaccttttatcatttttctttcctgcacatcagcattcagtttaagtactcacgaagtacgtccataaagacacactctatgctcatctatactacttattaaggctacaataataatcggttattctgtgttctgccacaattccctgttctgcctttctgattctctcctcctcgcgcatagtccattcccaccattcacactctatgctcatctatactacttattaaggctacaacaataatcggttattctgtgttctgccacaattccctgttctgcctttctgattctctcctcctcgcgcacagtccattcccaccattcacactctatgctcatctatactacttattaaggctacaataataatcggttattctgtgttctgccacaattccctgttctgcctttctgattctctccttctcgcgcacagtctattcccaccattctatatctatatctatcattatgattccccttgccgcaaagcccattttcattcccgttcctccatacagccgac

SEQ ID NO: 2378 - DNA, 366 bp, Zea Mays
gagcttactatatcctgtgtacgatgaatcgatgaactgaaccaactgatactttccagtccatgcatagtgatcaagtggcggtgctgattctcaaattgtttcagggcatctctgaggaactgcggctttcggccagcgaaatggtagatagaaagctcacggtaaaagcaatcgatcgcttgtcatctgtgctcgtgttacgctaaatcttactgccgttgcatgaagctatagccataggtaaaagttttccctttggcttgttactggaattgtagacccttgaatcgagacggaataccactaggaaagagaaggtgtttctgcacaggagctcgaactctgtgccacacaatggaggct

SEQ ID NO: 2379 - DNA, 744 bp, Zea Mays
gcaatttataggttccatcgacggtggcggctaattttgagaagacgcgcggcggccggagagagggactgagtcaccgcagtgttttaccgtggcagtcactggttgaggagcaacgacggtcacttgtgagctgttgcggctagcagcgacgtggttaaagggtcacgacgtggcgcggtcacgacgaacgatgtataccacgacgacggccgcttggccacgtcgccggcacaagtggatgggcgacagagcggccacagtgttccgagttcatctgcgacgtgatctttttactgtcgagcataatccactcatccgaggcatgaatcacaacggccgacgcgaatctgggcgtgggatcaccggcagcgaggttcagcgcaccagggatatttttcagatactgtaccatcagactttcatcacagcatttgacagaccgatttgaagggccaagatctcagatttttatatgacaacttgttagtcctcctgtaacaaagttgttgatctataatccaactttgatcttgctatagcaaccatacttaaattctcactgaatcatactcaaaattgcttccaaacttggtcctagtttactgccagcccagtttcagagttacacttgactgacagaccaacttcaggtctatttttctcccaatttcatgtagtactagggcttaatcacttaatcaaatttgttctctttacatagctctacaagttttctacctt

SEQ ID NO: 2380 - DNA, 559 bp, Zea Mays
agaaaaagaaaaacaatgaacagactcgggccgaaatcagcccaagtcggcccaactacagcagaaacacgtccacgcgcgcgcgcccgcggcaattttgcacagaggccctcagtttattagttaaatcgaagtgggtttgtttactgttcctctgtgccacagacaaattgcagaaaggccctccatcttctatctcttccccgcgaatgcccctgaccacggcgcgcacgccgatcatccccgacgtggtccgtacaggccatggccggcgatggtggttacggccaactaccggggaggcatcactgacataaggcggcctaggaacaaccattaaactagcatgaaccctactgggagtcgcttgtccacgatcacggcggacaccgagcatgggagcacatgttcccgccaaaccatggtcgatcagagcaaacgggcgccaccatgagcttcgcaagcatgcagaggcatggaaacgacacttgaattggataggaactcaccagagtggcccagccacgggcgggctgttcttcgcgatgcggcggaccag

SEQ ID NO: 2381 - DNA, 762 bp, Zea Mays
cctaaatgactttgcttggactctgaaatgacttaatattgcctagaatgactgaaccaaaaacagggaatatccgagtacacataaaaagatgacacaatgacttaatgtacgctggaatgtctaaaaccgaagggaaaatgacttaagagatggcccactatagagccgacacatggcgaagagggagccgtgcgtggctagggccggagccgcacgggggaggcacggacgtgcacgtagagtggtcaaggtgatgtattgttaggtccatcaccctaggtgacgaatagagtatatatatacataggatagaccaacgctatttgtcacctagggtgaagcttcacccggaccaggccccgccatgaccccatccctcgcgtgtggtggaccaggacgactctcgtgcatgctgtcatgcaagaccgccagcccttcttttcggtgcgtcccttttttttcctttttgtatcgcacacccctaatgtgtgtgtgtttgctttttccttttttgtatgggatgaagtaactccatgtgcattttttttgtgtgatggtattcgttggtggtttagattcgttggtaataactgaacgtccgccagtaataactgagcaattcttcagtaatagacacacgctttttcaataaaaacaacttgatgttttctctgtagtaccggaaaaaatatgtcgataataaacgcaattccttgattaaaaaacgatcattctttgagtaaaagttgatcgtttctc

SEQ ID NO: 2382 - DNA, 706 bp, Zea Mays
acttattaggctacgaaacactggcccataggttggataatccggagcaaaacccaagccagcgtgcaaaagaacttgagggctcgtttggtggcaagggatttggagattggtggcaagtgatttggagaggattcgtggaggaggaaattccaatgttggcaacctaacatccaaactgaacatgcgactagtacttcagagctacacggcccatatggttgctacttgctagcataccggaagaaccccagacacggagagtagtttgggggatggggtgagcgggcacgtgaagtgtcaggtctctctagtctagtcgtgactcgtgatcgatctccattcatcaacatgcattaaacacaccactagctagacaacaacaacaatggttcgggggaggtgcaagatacatgtatacatatatatatgggcatagcaacacgacgccagtcacgctcacgccaccccgaaacagcttttatcttatcttgtttccgagcacggtgacggacactggatcaaacacaggaacatccatatgcacgaacaattagatccaatataaaggtcgggtccgggcgtccggccaatcacactgcatgcacggacacggaccggccgttgcacatatgatttggtcgacagcgaccggacgacgactacgggcgccagccgtacacccagccagcctgctccctctggc

SEQ ID NO: 2383 - DNA, 549 bp, Zea Mays
gagaaaggcaggggttactatgcaaaagaccttaagactcaaaacttcaggcgcgggactgcgggttaatttatatctttcgcgggggctcattcgcaaagcaacaaccgcgaaggggtatcagcaggccagagccgtccgattaaaaggtgacgacgcggattagatcatggctttaaacgaaccggtatgcgactacaaccgcacgatcgcgatctaacgtacaggattcattggaccgaaacgttatcccctggtttaatccggcccgttcatcagtcaatcaatggcccacagtaattccttccccagatctaatccccctcatccattcacgatcgaacgacagggagcctttcttcctcccagagaccgaacaacgcggcgcgaagtgcccagcggctgcgaccggcccttcttccccaacccgctggccgagagcggtgacgccccggggctctgcgtcccgctcccgccgatgcaagatgcctgatgccatggtgggaggttctttccccaaacacgaacatgctccaaagaaagtgggat

SEQ ID NO: 2384 - DNA, 298 bp, Zea Mays
aagcaggaaaaagcgcagcctccggcgccccgaacaaagactccaggggcagagggtccgtcaacccggagaactccgcaatccacctcttccatagagacgtggacatagatcactaggagaaaggaggcgaacaaggtcaaggatcgtcaaactgctcttctggtacctccgccctcaaaggagaacagaaagaagctcgtcactacaatggttccgttctaccccgacgtcctcttcattgggggaagagtagaatcgaatcctgtctccgacgatgaaccaaccgcgccaggag

SEQ ID NO: 2385 - DNA, 622 bp, Zea Mays
tgaggagaagaaagttgtggacccttttcttgctaggttttatgaatctatggcaaagacaaatacataaaagatcacaaaggaaataatggcggatttgtctaaagattctgatgacaacgatgattatgatgtggaaagtggggatgaagattctgaggaccggccctgatggccaagccataccatcttcggaaagtcgaccattaagcaaagtcatattgacgccatgagaggaagatacttttgtgacatgtctattgtgagggttggaggagacagcactgcccctgctccggaagaaaatgaggttgttgtctacagatgtttttttgaaagcgggtcttcggttcccattaagcagatttttggttgaagtgttgaagatatttcagatttttcttcatcaacttactcccaaagctataattagaatgggtttgtttgtttaggctgtgagaagccaagggctagagccgagtgcgaagtgtttttgcagcatgcatgaactgttgtacgagacgaaggccactggcaaagagcagtatcacaacaacttcggttgttatggattcattgctcgttctaatgcaagctactcggttccaacatttcggaaaag

SEQ ID NO: 2386 - DNA, 640 bp, Zea Mays
cggagcatccgccctctcctgggcgtcgctcttggggtcaagggtagcagtgatggctgcccctgataacaggggcggtgtcggcgacgagggcgcgacaaacgtggaggcagaagttgccactgcagcaagggaaccaaagcgctgctggcacatgatcttgaattgtggccacgtgacctgatgctcgtcgcgtttcagccgccagaaccacgtatctgtgtggccgatgaggtgatacgatgccagtaaggccttgtcggactccagggtgtgctgactccagaagaattgctcgcagtcgttgaaccaccccagagggtcactgctgtcgttgtagatagggaaggaggggttgctgcggtcatcggcatggtagcagcagcgagggtcggcgccagaggctagtacaccagtcctggtatggttgcccctggcgtcatcagccatgcagctggtgatgaagacgtccctgagggcgcaacgcaattggtaggcatcgctgcccacgaagatgtaggtgccggagcgggcgacgacgaccaggtcgctggtgctggcgtgctgctggagagcgccatgttgattgtgttaagcctcgcaaacagattgtcgaagtacgcctggtcggaatcccaag

SEQ ID NO: 2387 - DNA, 830 bp, Zea Mays
aggacccacggatgttgaaacaagatagcagggaggatgaacagaccagggattcgctgaccacgatgagggttctaccatggcgacggaaacagaattgggggaaatgagcaattcgcggtctctggtgaacgattgtaggcaattgctagtgctttggatgcgtaattatcctacggagctcatggcgtgctcaatttatagcaggcatgagcggtggtccagtgaatttggattgggcatggtagcggtcggagaaggaatgagtcactggtgttgtgattcgtggccttcaccgtggcggcctcaccggcgacgaactagtggcttacagtgactcactatgacgttgaggcacgtagccaggccggataacggcgaacaccggtgatgccaacgcgactaaccatggcacgacacgacggcggtgagaacagtggctggagtttatctccagcgtgatatttcttatcgaggagcacttatccgagttcagtcgggcgtgaatcgcaacgccggcgcagatttgagcgcgagatcatcggcggcgagttctctgagctggcggcccaatccggtcactgtaccatcgcgaagttcatccagtgggcctgacagaccaagttggggacgaattttcttctgatttcacatggcaactataccaacattctgtagcaaagttgtagcctaatgatccagctacaaacttacaatagcaaccatagccaaactctcacaaaatcaaggttaaattccagtccaaagattactcagtcacattgtcagtctgaattcagacttaaggcagtctgacagctcgactttcg

SEQ ID NO: 2388 - DNA, 425 bp, Zea Mays
ggcgtgcagggggaagcttctcgcacaagggatgagtacagtgcaccgcgcagcacgggcgcactgtttcggcaacggactggacaagtgcgccgtctgcagggtggccctggcgccgcctgccagcggaatggacaggatacaataaatgtcatggaggcacatcgcctctcagaagggtggacagacggcgtgtcctttccgcaataaatgcggaggccgcgcggtccagagcccttatgtcatgctccgcctgctggcctacgtcacggacaataagtcatgtggcagtattagaccctcgaccgagtgggggagcgaaggcgctccagatagagcctggccacacgtcaatatcggactcatgcctaggtcacgacacttcctctcccgggactttgttatgggtggtcgggagctcactt

SEQ ID NO: 2389 - DNA, 751 bp, Zea Mays
gtcagattgataggctttggtcatatatttaggtagcgaatggataatgaaatatcatgttgtgatttgttggccatggaatagttacctttcagttcattttacttttgttgtcagcaaatttcatgtgtaacggtttcccaacgttagatttgcctaagggagtcaggtttgtcgtgcagcctgacaaatgaagtgaggtagctggacttctccattttatcatgcatttggaaccacatttcttggtcttccctttcacgacaatttcgtgcacatgcaaggtggatagctttccgctttgtctgtttgtactacatttgtgctggctcatgcaaatagtcattaaccagtgttattctgccctgcaaaagttaccttttccaaaataggcttacattcacagcatgcaacaaaatactagtgatttctagtcatagaatcaccattggtggacatgtgaatgaatccaggctatatgggatatactggttccattgggcttgagcgagtcgctgaccatgtctcatctggttttgttgtgaagagctaagatcatgctgtacctttttaagtcctagtaaaggatatactaaagctgaaacatctcgatagtagctcaaagaagtttgttgaaatcgagtaatattcggatacgtcttgtagcgaatttaggctgggcaagttgaactgatctatgaaattccaagatgtactttgttactcgctcaagtcacaaaagaagttcttt

SEQ ID NO: 2390 - DNA, 747 bp, Zea Mays
gttcagtgaacctcgccaccggcgaccatgcgctcggattcacgtcaggcggtgtgattcgtgctcaacgaagtactgatagttgctcgaggtagtaaatgtcgccttgagaatgaacttaggccactattcaaccccggccaccgtgtacgcctgactcacggtcggttcagttaagatcgccggagttggccacctatcgacaacacaccacgtgcctaggtgccttaccacatcgcagtaactcgtattacgcatgtttgttgatcgccagtgagctcgccacgaattccttgcgacagtgctctccctctctccggccaccaccgcgccatctcaaattcacgggccaccaccctcgggccctataaattgagcttgtcattggctccgctaggtagtcacgcacccaatacaccaactcgtgcctcaaatcggccactagagctcaccaatttgggatttcccccaaatcggtcaagaacaccgtgtgtgtgagctcgtcgctgtcagcgctccacaggtccgatcatgttctccttgctcttgttctagcgttcctgtgtacccttgaagctcgtcggcccaacgaattgcattgaaccggagtagattgacgggaacactttgaattgtccccggattgcgcggtcaccgtgagcagagaaattgggggctagaaccttgtaattgatcgatgggaaacgattgttaggggttaaattaagtgtcagccaagctagagcc

SEQ ID NO: 2391 - DNA, 529 bp, Zea Mays
cccaaattcagggtgttacaacttggctcgtcaaattggtctctgtatctgaaggtgtatttcaagtaaaccaaaccaccttgactggaccgagcagcagtctcctttcggcatctcccagttattcacaagtggccacaccctgtaggctatgtgctcctgaactaggtctcttgtactaatgaaggcacaaacattgttgaaagccttctggcatgcttcggtatcattcccaagcgcagtagccggccttctgaggccaaagcgagaccagatagggcgttggataatcccctttatgtcctccctttcaatcagattattcttaacataaaaccattcctccatcctggccacgggccacctttttcgaaacgttggaactgggtagcttacattagaacgaggaacgaagccataacaaccgaaattgttgtgatattgctccttgacagtggccttcgtctcatacagtagctcgtgcatgttacagaagcactttgcgcttggttctagcccttggtttctc

SEQ ID NO: 2392 - DNA, 1085 bp, Zea Mays
ctggagaaggaacaccactgctttcgccactggcaatataacgtcggctgttcttctgagttagagggatttcatcctcctcttcctcaccatcatcaacaacgcggacagtacacccattggggtcagcgtcatccaggtcacacccattggggttaatagcaggcaggctacacccattgggatcagtttcagcaaatgcaggcactagcacttcttcagcatcaggaaaggaaggaccagcatcctgatccaaactagacactcgacgaagatgtctcttcttctgtttcttcccgtcagcaggagaagcaggatgattggctcggcgagaacgcttcggacgaacgttgttagacttctgaatatctaaagcttcgctagcctctaggatgggcgctaccgccagtgtttcagtagggactgcatcaaaagaatcttcagctaacatatccagcatggcacttatttctgcatcactcggatttaaaggcacctcaaaatgaacctgcctctcatcatcaggaatttcttcaagagagacaaccaaagcactaacctcttcgggagagggtcgcactctaaggcccaaaccgctatcgccagcaggaggatttgacaaaaaactggtaaaggccttggaaggaggcagattccaagccgagtatgcaacaggagcgccgacgttcgacaccttgcctctgagtatcatctcgagccggcccaccatgtccacgacaggaattcttctgttggttacccgagtcgaatcagcaaagcctcgatacagataggctggatatgctctgtctttcaatggttggatgttcttgaaaacaaagtcagcgaccacagcttctgcagtcagacccctttctttcagcaatccaacttcagctagcaaagcccctgcttcagttacttcctggtctgtgggggattcggtccagctcggagtgcgaacatccggctgtcttcctgaccgtggggggagagaattcccatgattcaccacgatgaaccattccagacgccatcccttgatgctatccttgagcgggatgtcgaggtaatcagccttcctc

SEQ ID NO: 2393 - DNA, 605 bp, Zea Mays
tgggggagagaggccggctgtaataaatatatgatggtgagttatgaaggtaaaaacgaacaacaaggcaaaaagtttcaaataaaagtacttataatcatggcacgttcggcagcttcttcagcttgcttagcttcctcatgggcgtcgtgagattctttctcattctttttaatggctttgtcagccatctcacgaccaccctccatgcacacatcggagtagaatttgccgcccagggtagaagcctcaactgaagggtccttagtattgtcagtagagagaatagattctggtaggccacagccttgacatgttcacacccagcattttctaaggttgccgcaatccctcgggcaccgaaaaaaacacaaaaatctccgcaatcgctaaggatctcgtcgaaagcttcggcttcttcacctatccattggataaccccttcggggtcgccgcgaataattttttgttctcaggaatacgcccccaccttcgcaaagctatcttttagcttcttcgcgcagtccaaggatttttcataacacctttccctggaatcacgaagctcttcaacattcttttctagccttgaacttgtccattca

SEQ ID NO: 2394 - DNA, 286 bp, Zea Mays
ccaccaacacttggtacaattgtttgaccgaataagcagtgctgcagttggttgggtggttgacaagttgacgtactgcatacagctccctccagggcaccaaacaaagaattaatcccgaaatgaaattgtgtctcaagggagaggggagaagacatgtcggcttccgaaagtgatcacagctcagctacagatggcgatgctactgttttcttcggactttagactggggcgggctcaattcgtttgttaaataataaaaggactaaaatggcagtagaaatta

SEQ ID NO: 2395 - DNA, 459 bp, Zea Mays
aacaagtacgcgaagatcgaagttgttcccaaaagactccgtgcagaagtcgcctacgggcgcgaccggatcaacgaaggcgcacaaccttatcacataaattaatttacggttacatacacacagcgagggcatcatatattacattggctcaaccttcgggatgatacccatctccctatagttgaacaacattatcctcaattcctcaccctcaaaaagatttcgcagctccccctcacctacattcaccccaatcggcgaggacaacaattctcgcttaccagtcccgtccacgcgaagacgaccactctccatctcactacgatgacgcctaccacttcgcgacaatccactcactctccgtttcgccaccgcccttcaccgcctatacccagtactcgcgcccgggagctcctcggaaccctccgcacgcggcgaaggctccgctgcagccac

SEQ ID NO: 2396 - DNA, 534 bp, Zea Mays
gtcttgggcaccgggttataaactcggtcgccgccttactccgccctacgcttcgagatcctgtgccgcattggagtcgtttttgtgcagctacagataggtgagagatttaattccgccagtgctgttcttcctcccggtggcgctctatcgcatcgattgctggagattgttggtcgggaggatgcgctagggagtggtagtcatggctatcggtcgattcggtcgcagagattccttcgggcggggcgatttctcgccgatatcgaagaaataccaccgggccaccgacttccatgggcagtgcgcgtcagagaaccattggaggtaagaagtttctgaatcgattcgtgttgttcaccgtattgcatagcgcgtagtagtggaggattggggatgaaacgtcagccgttagattcggatccagcgggcgtgtgatgatctaggtactttaaaatccggggcgtccctcaaaaatccgatggccatggttttatggcaagtccatctattctacaccgttggttggcaatc

SEQ ID NO: 2397 - DNA, 345 bp, Zea Mays
tggtacttggcatcgaagaagcgcgaggcaggagtaggaggcgggactggtcatggaggaggagtagggtgcggtggaaaggtccacgcagtggtgggtggcgttgaagaagcgcgagggaggaggggacgcagtgccggcattggaggcggaggagggcgaagtcctcctcatcggcatctgggaatggccgggaacgcacggggcggactgaggtgtggcgcgagccacgaggagcgttctggaacctgctcgtccgtgggtggtagctacagtttgttgtcgttagattagaatcgaacggtcgtaaaaaaaagaggctgacgtggagcttcgaggagcgag

SEQ ID NO: 2398 - DNA, 627 bp, Zea Mays
aagccggagaacgggactcggcacaacccgtctctcgggacgaagcctcagagatgggggagaccaccgacgaaagagcatatcgagaacgacgcaactcccgccgccgcgaccccgtcaagctcaggaacgcgagcgggaactagccgaacaagatgctaggctccggcgggagaacccgctccttgcccgaaacttgtaccctgactttgcctgagcattgaacacgccgagcgaagttggaggattactggcacagataaccgatggcctcccgtgaaccccagacgcggagggctatcggcggatgcttacttaggcggccaatcatattctacctctcgcccacccccgaatgacctgcgtcatgccatcagcaaccggcgagatgcgtggagcaacatcagtgtttcacacgatcgtcggcacgagaatgaaataaggcactaggaggaatacgactgagatcatggtgtaccagcacacagccgtgcaacacggatcgagtcagcagcagcctcaatcaacagcctggcccgaggatggtcgaggcgacctaatactcgctcccctccccgggatcgacggcatgatcatcgacaagaggatacgtgcggggtctccatg

SEQ ID NO: 2399 - DNA, 867 bp, Zea Mays
cccacgcacgcgacgacgacttagtgaataagtccctgcagttttgattagcccgaaggagtccaaaaacactatttaaaacagtcactgacactttgcataaataccctcgtacttctatttcttctctagaaacatccctggccaaggcgcgctcgtcgttcgtcttcaacgtggtctgtaccggccatggctggctatgactgttatggttaactatcggggaggcataaccgatcaaggataatctaggaacatcctttaatttgacataaaccccactggaaactgtttgcccacgatcatggtggaaaccgggttcacgagtacgcgttcccgccaaatcatggccgaatgaagtaaacgggtgccacggtgagctttaccagcatgcagagccacggaaacaacacttgaattgtataggaacttaccagagcgggctagccacgatcgagctattctcggtggcgcggctgaccgatttggggaaattggtgattctccggctatggtggctaatcgagggtgggagcgggtgcttcagcttcgcaatttagggacgaagaactgtgctcggttgatttgaacgaaaagagtgaggatgcggtgaatttataggtgcagtgagtcactgccgcggccatggtgataaccatcgccggccttagctggcgatcaacgacggcgtcgagcgctaccctttcctacatgcttgccacgtccccgccgcgacagtaacacggtcaaatcggtgaggcgtggatgaacggagaggagcggcgccgatgaccggatatggccggagcgattagtggccgcgtggtgaccggaatcattgcactccaccgcggcgatcttacccag

SEQ ID NO: 2400 - DNA, 407 bp, Zea Mays
tgttacaaactgacgtgtttaggagtagtaaaaatggaaattatgcatcaacgctgtcaagcgtggcttggctcatgtacgctacaagaatgcagacacttcgtcctccaggcagacagacgctgaatccagcatctgcaaatctttgtttacttaaagacttacatatgactctcatatgtggtatgatgtgcttaagattaagacatataccataaagatttcacaggaaaggcagattgataaccataaaggacagtagaagcttgggatttggctatatgctgaacctctctgtaagactgctcctatcttgtttgagcttagccaagacaaagttggtgctgtagcacaggttaaaagtagggaaaactgttattctaaaagtggagaaaatctgggatgat

SEQ ID NO: 2401 - DNA, 720 bp, Zea Mays
atttattttctctggttttatatttccctggagtgggcctcaaatcctagaacacgcaggggtcctagcgcaaagtgtcccgagacacagcaaaaccaggccgtggactgcgagtttattaacagcttttccaggggctcttttacaaaatgttcaaggcgaaagggtattatcggtcgtccgattagaaatcacgcgtccagattaaatcaacagacgcgcgaaccggtacgccatgggatccacatgatctaagatcaacggtcaccatttaatgaatacagagataagcgcctatcgtccgattcgagatcgacggcccgaacgaagggggtatcactgatctaatcagaaccgttcggccgtaaatcaacgaccatgggttcatcacctccaccgctggccacccacggcggcgctctgctccccaacggtggagccattgccgccaacagaggccgtgcgccaccgctatcccaaactccgattgaacagggcaacatgcatggtagatgatggcgaatatgggtaaccgagactcaccggtgatggcgtgcccaaggggtcggtctgcgacagtatgcggtcccacggtggtccttcaactgcggcgaggaattcaccggagttccctgtctccgctgacgtgatttcgccgcagcagcaacccacgcaccgcggtgacccgtccaggcccaacacgagtcccgcagcggcgat

SEQ ID NO: 2402 - DNA, 440 bp, Zea Mays
tagcctcttcctttgctgcctttttctcaatttccgaaggttgtttatcaacaggctctgaaggcccagcttcggcactagtctggcccactacagcctcaacttcggccagttttgtttcaacctcggcaattttccctgaaggaatagaacttgaagcttttactgactctagtacatctagtacacttgccatccttttccttttgggagtcgtcgtaatacctttttgtgccttcggcaccgccacttctgccgaagggcttaaaacttctaatgtttttttcgattcttggctcttcaattttatcagtcttcggctcagctaacttggccgaaggtgccttcggcattgtagccgtctcttcaatcttctgcgtaggaggagcaggtccttttgcttcaatagctgaagaagtttccccgctaaactcgggcac

SEQ ID NO: 2403 - DNA, 825 bp, Zea Mays
agtcagaaaagtcacatgagattgaggatcttcgtgagttgttcgccaatgctgggttttcggcagaagaatgggagatatatttgcagacgggtcgcaaagggtcgccggaacttccatcgcaggtacgtcgattctctgatgtcggtcggacaatgggtgtcaaagtgaaaccttggagcggtccgctgccaaaagcccgggtgtcaccggccgttactctcggcatggtgctggaggcagcgaaacataatcaatcgaatttcgtcggaaggccgaaggggaggtcgtcaattcctgatccggtttcttcggagggaacaaattcaaacgctgtgtctgtgcgtcgagggaagggagacgacgcggcgatccctctgggctcttcgggtgcttgtgttgggccggatcacttgatttctacaagcggtgccaacacaaggaagcaatctacggatgtcacggccgagacgatttctctgcctgggctgagttactcacctcaggcccagaagtctcgggccaatagcgaggtttgcgctttgattggcacgagatccatgctttcgtggaaggagcgtaatccaggtattgctgctatttcgcgacggttgtttactagggattctcgaaaccctaaacccagtttccagccacacataccccgcgccacgtttttatcttttggcaaatccttcgctgctgccgtcatgtcaggtggaggagcgggagatgcattgcgtgaaggggacaaggtatggaaggaggtgggtcgtcggagggctgtttcccaagaagatgtcgggcgtcaccatgctggccgtg

SEQ ID NO: 2404 - DNA, 347 bp, Zea Mays
agcgacatgttatggaagcggacaggaaactcatcagccaaataagggaagccgggatgaagccgtcacaagtgttcgagttcattaaacaattttatggtcgccctgaaaatgttccattcttgaagattgattgttgcaatgaaattggtcgcgaacgaaacaaatacttagaatccaatgatacacaaacactgttagaatatctaaagaacaagcaaatggaggatcctgcattttttatgccattgaaataaataaagaaaatggtcggatagcaaatttcttctgggctgatggtcagtctatcatggattacaaatgttttggtgatgctgtatcatttg

SEQ ID NO: 2405 - DNA, 347 bp, Zea Mays
agtgtgtaaataagggggatagagtttcccgctaacctcatagtgatgggtactcagggaatagatgttatcctagggataaactggcaagataagtaccaagcagttatcagctgcgataagacgacagttaagttggtgtccccactgggagaagaagtggtgactgagctagtctcacccaagccaaagaaaggaggttgtcaccagatggttattgatagcaaagagatcaatccacttgaggctatcaaggttgtgtcagattttccggatgtgttccctaaagatctaccaggtatgccacctgagcggaaagttgagtttgccatagagcttattcctag

SEQ ID NO: 2406 - DNA, 557 bp, Zea Mays
cgagcggattaaggatgcaagagacagagagcatttcttcaagcgtccaaacagccaagtctccagaacattaagaattctgctctcttttgccacttcaagctgcagcaatatttctctggcaagctcaagttgcagtttgaaatttccaacctttctgtcactccaactttgcagcccttttgttgtcgccttgaattttagggagagggtcttgaggggacaggaagactgctgaacagaaccccaggtattagataccgcttccagaaaaccatcaaatctgggccaaaatgattcaaagtgaaatctccgtttcccagtgtggttgtccttcaatcccaacaggagaggacagtggtctgaatcctctgaagccgaactttgcagcagataattggggaatttttcctcccaatccgaagaacagaaaacccggtccagcttgacttgcacattattagcgccagaccacgtatatttccggcctaagaggtcaatatctttgatgcttaaatcattgatgcaccttctgaacctccccatcatgggccggt

SEQ ID NO: 2407 - DNA, 295 bp, Zea Mays
ggaggtggtagttgatgttgtttctgtcgttcttagcgcatttcttgatgttcttgccacatttcctgtcgttcttgacgaatctgtgcttgcatttccgtcattgtgttggccatttgttgtagtaatcgcatttgagtattagtcacatcatcaacaggcgggggatttggaggaggattcatttctggttccgggttagctacaacccttcttcgacgaattcgtgctggtagatcgacacctcctaccctcctagtattaaccatctgggttaaggacatatgttaaggta

SEQ ID NO: 2408 - DNA, 328 bp, Zea Mays
tacattttacagctgggcaacatgttattggtctggcatgctgacttaaggtgtctgccactctgcctgagacaagccacggtagatgaaaaattgtcatggcatgtttgagtcctggcaaatgaatgccgttacttgttgatgaatgtggcaaaatgctttcgttgttgcctttgttggataactcttcaagtgtttcagtttgttgggtcacatgcattagtgtttttgtcatggcgtactgataccactgcctgactggcttgcacacttttcgtatttgtgtgaagactatttgtaactgccagcaacgccattgacatgtgct

SEQ ID NO: 2409 - DNA, 476 bp, Zea Mays
ttgcgtgtatattacatggctccgcctcattaaaaacctcaccccccgggaggaaaagagtgcgagccggaataatactgtttggtggattacaagggcgtgttagccctgaggattcaaacaaaaaatttacggagattgtcaatattctaggaatgctctaagtcttcgccggatggcattgtgcctgtacgcgctgggggacgccttcgtcttgacgatgaagggaccctcccactttggctccagcttgccccataactctgtccgagttgtccggacaagtacgaggtccccttcgttgaattctctcgggacgactgtgtggtcacgccatgcttttgtttgagcttggtatttgttgagggcctgcagggcgaagacacggtctctgtcgatgagatccttggaagttggttcgtctacgtcggggacggctgaagtgcttgtccgtggtgacccatgtttgatttcct

SEQ ID NO: 2410 - DNA, 500 bp, Zea Mays
ccgagagggaccccgtcggaaaggagagatcctataagatgcctagagcgcgcggatcgggccggacggtccggcgctcagtttggtgctcaactgaaacactagtgtaacatagatgactttgtttttttagctgagctttctaacaaacaatttgcagtctcaagattagactacaacgacaataccccactgacatcaccaaacaagaaccacccccaaacacaatacatctaccggcttcttgtgccggagataataacaagagtttagcacaccacaaccgtttgcacgctggcatgtctcgaactcagaggcccagacccatggcgacggcaacgctgagacccaaagcaaccgagttccccaccaggctgcatccatgcttgagcgccccactgtcgtacgggctgttgtccaccagcggctggttgccgaatccgaacgtctgccccacatcctgcacggtctgtccctgccccgcggcggcggcggcggcg

SEQ ID NO: 2411 - DNA, 378 bp, Zea Mays
atgtgcagttgttctatggtttaaaaatattgaacaagaaatagggaaaatgaatttaattttgcaagtcttgaatagcattgacctgttctgacaaaccagacatgctccttttgaaaaataactatccattgttttgaccttgattgacctggtgtactactcaggctgacagaacgtcttagaatgtgatcatcatgaaagaatcactgtttagctctaagtatccagtcatgttgagaattacttaaaatgtgcattgtcgagctgctggtgggaagttttagaaatgcagtcaattgtaagaatcactgtgtaggtaaacataacttggtaataacttgaacatgcaccgcactgcagaaacttacggatgta

SEQ ID NO: 2412 - DNA, 952 bp, Zea Mays
gcagctctgaaacaccaccacaaactttgttccctgcaacaaagaagttccttgaatcgttgaacactccgcttgtcggcactggtccatcaaactggttgtaggataggttcagataatgcaagtactgcaacgtcgataagtaatctggaattgaaccagacagattattctctgacatgtccaagtattgaagccctttcattgagctgagtgattggggaatcctaccaacaagctggtttccctgcagaaataagtactccattgcttggcactggaagagtgcccgcggtacctctcctgagagcctgttgttcgacaagtctaaaaccccaaggctgctcagtcgacctacttgtgaaggtattggacctgagaaggtgttgtgagacaggttgaggaacagggttaaagaagagagactgacaagctgctttggtatcatgccactgaacttattgtaagacaagtccaggattgcaatatttctcatattctcaaagctctcaggtatgcttccttccaactcgttctgtgagagatccaggaaagaaagctgggtaaggtttgcaacaagcagagatgggatctcaccagataagttgttgccagagacatctagcccagtcatgttgtgaagaccaccaatggtgtctggaatggtgccagtcaaggcattatcagcgattgcaagaacacgaaggttgctgagtttacctatctctgtgggtatcgaaccacttatcttgtttccatttatcaagatttgttgtatccaaatggtaaggttgacaagagaagggggaagcatgccttgaaacctgttataggaaaggctgagtgcaaacagtctactgcaattccctagtgattgtatcagaggccagtccctgtcccacttatcctcaagctggttagactgcaagttcagcacctcaagatctttcag

SEQ ID NO: 2413 - DNA, 470 bp, Zea Mays
gcatgtaagagtgctgaaacaagagagcagaagacaagattggacctaaatcgagctagccacggtgaggaccttttcacggtggtggaaacccgatttaggggagatgagcaattcgtagtctctggtgaacaattggaggcacgagcgggtggattggatgcttgaatacatagtgaagccgatggcacgctcaatttataggctctgggggtggtggcgcgtgaattgaagatggcgcggtggcgtccagagaggaggaggggcactggcgcacgcgattggtggaaattaccgtagcaagctcaccggcgatcaccggatgggctaacgtgagtcacggcggtgtggttaaagtgccgaggcacgtggcgcaaggttggggggctaactccggcgagcctatccagaggggccatgacacaagcgggtacggtggccagagtaaaatagcagccggagttcatcca

SEQ ID NO: 2414 - DNA, 572 bp, Zea Mays
tggtcgccggatggccagggtcagttcatgatatgagagtgtttaatgatgctctgcgcaaatatggtgacaaatttcctcatcctcctcctggtaaatatatatactacaaagttattttatggttatggctttatcattttctaatggtctaactttttgtaggaaaattttatcttgttgactcggggtaccctaaccgtgatggttacctagctccttacaagggaactaagtatcatgtaccagagtttcgacaaggccctagaccaagtgggaagaaggagttattcaatttttgtcactcatctcttcgcaacgtcatcgagcgttcgtttggcgtgttgaagatgaaatggaggatcttgttacacttaccatcatatccaatggtaaagcaaacaaagattatacttgcgtgcatgacccttcataatttcattagagaaagtgctatggcggacgcggattttgaaatgtgtgacaatgatgagaactatatatcgattcagagcaacaatttgtttgaagaagatggtgatgaagaacaaggcatgaacgctttccgtgac

SEQ ID NO: 2415 - DNA, 666 bp, Zea Mays
ctggaacagcaccgaggcgactgtgggcgcgaaggtgtatgcatcgcggaggaatttctcaccggagccgagggtctgcgcgtcgccgtgtgccatcagcacaacgcccgtattttgggtgagaatgcccttgcgacattcgttgttccttcctctctctatagtgtgataattgtcgagtattagtggctgggtcaaggagcgcggcttcgccggtaattgcaccaccgcgggtgggtgctccgccgtgcttggtcaccgggggagtgggaatggttgacaaggcggtcagggtcgtcgatcttcctaggggtggcctagattagatggtagagtaatgtttctccatgactattgagaaccgtcgatctggcgatgactggcttagattaaatagtaggcaacgcgtctcgcgcagatagatctggagcgtccaatcccgttcgggcggctgtcgctttgtaacggttcgcgagcatgtaaatctgactgagcccttgattcctgaccggacggtcgcggtttgtggataccctttcagctaaaccttttacatttaagccctcggagttctgggaaaataacccgccgtccaccgcagtttaacctgagtcttggaacttttgcgcggtagcccctatactcttagaaatcttgtgtgcactc

SEQ ID NO: 2416 - DNA, 599 bp, Zea Mays
caatcatcagatatataaagaatgaagaggaaccggatgacaaagctgcaacaaaacgcatcgcaaggcagtcagctcactacaccctcattggggaggcactatacagaaggggcgcaacaggagtcctcatgaagtgcattctttcggctactgggaagcaactgctagatgagatccacgccagacagtgcgggatacacacaacatccaggactctggttgggaaggtcttcaggtctggtttctactggccgacagcaaagagtgatgcagccgagttagtccagaggtgtgaagattgccaatacttatcaaagcagcagcatttaccagcacaacaactgcaaaccatacccgtaacatggccatttgcatgctggggactggacatgattggacccttcaagaaagctcagggaggatacactcacgtgctggttgccattgacaaattcactaaatggatagagtacaaacccatcgcttctctgacttcagctaaggcagtggaattcatacaagatataatattcaggttcggaataccaaatagcattataactgacttaggatccaatttcactagcttgaaattc

SEQ ID NO: 2417 - DNA, 579 bp, Zea Mays
gatgccctaactttccctcggcttctttggccacaccctcacatcattcgcttccctagtgcccttgctagtcccaatccctatccctcccttgtacgtcaaccctgtgcatgtctatcagtgatgtgcacaagaggatgtcccacctcactcccagtttgagctgatgatgtactatcctcctctttttcactaggatccttaccacgtccactcaatggtgatgtgataggccgttggtgttctttgccatatcgatcgtcttgtcctctctatgacatcctccccatcaatcacctcatgtcattttcagttcatagtgccctcatcaatcctcaatagcatcatgttatggaggaagagtactaggccctccttgccaacaaccacacctaggacttggtgccccatcccccaagcatcaatgtggtgactagcaagtaggtctttacacataagaggaaggcagatggttctatgtattggtacaagtctacctaggttctctgtggcttcacataacgccctagcattgactatgatgagacatttagtccacctaccgtctgtaccattttc

SEQ ID NO: 2418 - DNA, 285 bp, Zea Mays
tccgtgagaagataagggctggaaaagccaaatgtttcaaagaagacgatcaaggtgttgtatggttcaacaaccgcatagttgtgccgaagaatgaagagctccgccagcaaattttggatgaagcacatcttagtcgctattctattcatcccagaagcactaagatgtatcaagatctgaaacaacattattggtggacgaagatgaaaattgaaattgcacgctatgtggatagatgtgacacttgcagaagtgtcaaagccatacatatgaagactgccg

SEQ ID NO: 2419 - DNA, 1072 bp, Zea Mays
aaatttggtacaaagcgccgataatatccagcgagccccaagaaacttcggattttagatgcactagagggtctcttccactccaccacagccacaacattattgggatcaaccgcaatgccctgttgattaatcacgtgccccaggaaagccacttcggacagccaaaaggcacacttcttcaacttgccatagaactgattcttccttagggcacccagaacgagacggagatgctgctcatgctcggcctcggtctttgaataaaccagaatatcatccaggaacacgaccacaaagtcatctaggaattgatgcaacatcctattcattgcttccataaaagcagcaggggcattagttaagccaaaagacatgactatgaactcataatgcccatacctggtgcaaaaagcgatcttcccaatatcctcctcacgaatcctcaattgatgataacccgagttcaaatcaattttggagaacacctgggcacccctcaactgttcaaagaggacctcaacatgggggagcggatatttattcttgattgtcacttgattcaaagcgcgataatccacacatagccgcttgcttttatccttcttctcaacaaacaatactggggaagcccatggagacctgctaggcctaatgaaacccttagctagcagatcatcaaattgccgcttcaactcaacctgctccttcggggccattcgatacggggccttatgaataggctgcgtacccggaattagcttaatctcaaaagctgcatcgcgctccggaggaatgcctggaagctctgccggaaacacgtcagcaaagtcacaaagcacccggatgtcctgcacccgcaaggcagcctcaccctccaccaccatggagaaaaagatccccgacttccttgaccggcgatctggaagcaattgcgccagcaaggataacgtgaactttggggaacttcccaagaataccacctccttacccgacggcgcctgcaataacactgtcttccaaaaacaggatataactgcacgatactgggataaccaatccatacccaaga

SEQ ID NO: 2420 - DNA, 677 bp, Zea Mays
ctcgagtctagtttacttaagaagaaggggagagaatgcttgaacaaggagcccaaccttatagcagattcgctgctcacatctcttaatttatcttgaatgccatgagtttctctgacatggggatatgtcagctccaaggaaaatggtgcacgtgagggagcaggaagacgtccgattggcggtgagaatcagaaacagctgaagaaagaagtgttgggccgccgtgtgcctaggcccagtgggcgatatccatcggacaagtggtccgtgtaagagtgcaataaggaatacttaaactaagactggctacagtgaacgctaggaaatgagaaaatactattgctctccttccatctcctacctctggttctcctctgtaccgtagctgtagtaggctgttaacaattggtatcggctagggtttcctcgatctggcgtactacacacgcagcaagcagatggcggccgcctctgagtccagcatctcggcggcattggaagctcagtccaaatccatggcgacccaatcgcgtctcctccaacagatcgctgagcggctcgacgcacaggacagccattgggcgacgttagagcgccgagtcaccaccaacacccgcgcgattggtgtgctggaggccagggtgggcacagtggatctcgcccaggtccaatcg

SEQ ID NO: 2421 - DNA, 364 bp, Zea Mays
tcagccgtccccgacgtagacgagcctacttcgaaggacctcatcgacggagaccgcgtctttgccctacaggccctaaacaaataccaacctcaaacaaaagcatggcgcgaccacacagtcatcccaagggaattcagcgaaggagacctcgtactcgtccggacaactcggacagagtcccgggacaagctagagccaaagtgggagggccccttcatcgtcaagacgaaggcgtcccccagcgcgtacaggctaacaacaccatccgacgaagacttagagcattcatggaatattgacaatctccgcaaattttttgtttgactcctcagggccacctcgcccttgtaattcaccaaac

SEQ ID NO: 2422 - DNA, 580 bp, Zea Mays
cgcaacaagataacagagtaggccggggcattaatttatagcgggcgactgcgagcacgacgaatttgaacggagaagagcccacagtgatgagggaatgagtcacccgagcttgctaacgtggcattcgctgggcaaagacttacggccatcattggctatcctccacaactcacgatgacatggtgaaatggcttgaggcgtgtcgtgaccgaggtaaacggcggcaaccccggagacgatcgcacagccacatcgccggtgcaagtgggtacggcgactgagcggtaacagtgcccaagctcatccctcgcgtgagatcttttaccgctagccattatccgcgcaccacagcgcacgaatcgcagcgcctgcggggatcgcggcgcggagatcaccgacagtgagttcactgaacttagattcttgttcagtccactgtaccattgcaatcccattcagtcgttctgacagagcaagttcaggaacccttttctcaaatctttatgtaacaacccgctaatccgtctgtagcaaagttgttcttctataaactagctttaattttgttgtagcaacc

SEQ ID NO: 2423 - DNA, 380 bp, Zea Mays
aagttgtcacatggaaaatggagaacaagggtccttaaatcgcgctgtcagaacgactgaacaagatggccatggtacagtgcacaaaaagatctttaggttcactgcactttgccgccggtgacctccgcgcctggattcgcgtcggcccccacgatttgtgcctcggataagtggattacgctcaatagtgaaaagatcttcaccgtggatgagtttggggcactttggacgccctatcgtcgtgcccacttgctggcgacgtggctgcatggtcttcgtcgtgactgtcgccgttcactcggtcgcgccacgccttaggatgtcttaccatgttgtcgcgagtcatggtgattacctagtgaccgccatggtagttc

SEQ ID NO: 2424 - DNA, 696 bp, Zea Mays
gaaaacaactagacaaggacactctgtactttaatgagatgagatgagatgatgagatgtggctatgtggataagtcgatgagtgggatcttaaattatatcattagagtatatacataatataggacgcactagaccaccacctcaccttgagaccatagtaagatcggaaacccgatgccctttgcctgtcactcggtcaacaaatatgtagtggggcagatccagtgccatgcccggacgctcgtgctgtctgagacaaaccgaggcaactttcagcactgtactattgtttaattacgcacgtgtcatgctgtttccatcttacaacctgtggttggagggtggtctctttcatgttatttcttgacccgacattgttctgtatagagttagagaccatactagtgggttctgattctgattatattcagttgcctttgttggcacggtttcttgcttatgtaccttagttctgaaatgaacccaaaatctgatgtcacctttacaactgcactatgttcacaaactaacaataagaattgatggtgtttgttgcgtggtgctaccaacagtgctagagataccgactcatctctccaggaatagctaacttgcaacggattataccactgtttcgcatctgctcccttatttgggcatgaacatgctttcagtttgtactgacgattgtgg

SEQ ID NO: 2425 - DNA, 572 bp, Zea Mays
gtagagtcttcacagtgtattgggcaccaagctttcacttagtgtcgcttttcaccctcagactgatggtcagtcagagcgaacgatccaaaccttggaagatatgttgcgtgcttgtgttctgtcatggaagggtagctgggaggatcatcttgcattggcagagtttgcttataacaacagctaccaggctagcatcaagatggcaccatttgaggctttgtatggcaggcggtgtatctcccctctgtgctgggagactttgggagagagatccctagttggtcctgattgggttcagcagatttctgaaaaggttcgagaaattcgtcagaatattttggcagctcagagccgtcagaagagttatgctgatgtgaggaggcgggatctggaatttgctgtgggtgaccaagtccttctcagggtatcacctactaaaggagttgttcggttcggtgtctctagaaagctcagcctgagatacattggaccgttcactatcttggcccaagtgggcatcctggcttatcgcttgctactgccggattccatggcaggggtacacccgg

SEQ ID NO: 2426 - DNA, 730 bp, Zea Mays
ataatgttaagtgacttacaagggcgtgatggccctgaggattcaaacaaaaaatttgcgaagattgtctatattccaggaatgttctaggtcttctccagattgtgttgttaatctgtacgcgctgggagacgacttcgtcttgacgataaatggtccttcccacttcggttccagcttaccccgtgactctgtccgggttgtgcggacaagtacgaggtccccttcgttgaattctcttgggacgaccgcgtggtcgcgccaggccttcgtttgggcttgatatttgtcgagggcctgcagggcgaagacacggtctccgtcaatgaggtctttggaaagttggctcgtcgacgtcgggtactgctgaaacgcttgtccgcggggacccatgtttgatttcctgcagggtcttggcctccgattcgtataccaggcgaaagggagtgaatccggtcgctcgacactcggttgtgttcagtgcccagactgcttcaggtagcaggtcggcccatttgcccttcttgtcgtcgaggagcattttcttgatcgctgtgaaaatcttgccgttggcgcgctccacgacgccgttggattgtgggtggtacactgaggcgaaggcaagcttggtgccaatggagaagcagaaatccctgaggcgaaggcaagtcttggttgtcaaattgcttgccattgtcaactgtgagctcagatgggactccaaaccggc

SEQ ID NO: 2427 - DNA, 378 bp, Zea Mays
ggtccatcagctcaacagttctccaaacgccaaagcaggttcaccctagcttagtaaagtcagtaaacaactttctgcacattagcccaatgcacaatagagggtaataggatattttttaatatctattttggtggtaaaacctttgcaaatttctattgcctaaaccaattggcagaatgcagtcaacagttgacattattggaggatggtatagcttcctctggaacatgtattatgatgtttgggcatcaacattttgagcttataaagattagtctgattaaaaattgaaacgacaagtaggtatacaaggttcctcttatggatttcaaaagcaaatgttagctagtttgcactggtattagtattcattat

SEQ ID NO: 2428 - DNA, 622 bp, Zea Mays
gttagtggcgtcgggcgtcctttcgtcaatgttatctaggacgaggccttgctcgagcgaggcggaggttccttctgaggccatggtcagacctgcaccggggcatgcagtcgtgtagggagtggttagaacagtcactagagtggccccttgtgggattcataggggctgagatcgagctcgagtgaggcggagtcttctctcgaggctagagctgtcttcgggcgaggtagatttctctcccgagggtgaggttgtgctcagacacgtgcatgtcccatccggagttgttcaagaacaatggtaagagtgggagagcagtgcccgttattcatgggcgtgtgtcatcgtagttggcgtaaatagatgggaccatggtcccatcatcccctgtttgactgtggtgtcatatgaagcagatatccatgtcgcatttaatgcacacgttccacagttcccatgacctttggctgaggctaggctcggggctatcttcctgtccgagacaagctcgagcgaggtagaaattgtcgttccgtgaagaggggtcctcgggcgagatgaggatttctcccgagcgctgcctttgcccgaggacgggcgagggcgaggcatagttttg

SEQ ID NO: 2429 - DNA, 541 bp, Zea Mays
tcaacactatttttatgctcaaacttagggatttttatgatcatgaatataacatatcattgttatcaacatctctcatgttggctcggtatttacactcatagctgagggtttttacgttcaaaactaaaggtttttatgctcaaatctatagatgtgttcactagtgtaccgcatgccagatttttacgcctaccataaaaacaccccaatttccatagggttgttgattgggtctatattaggactttttcatcaattatgatgttcagtgtcaacatttatgctactttttaaaacgatttacgctttgcgcgatatctaccagtcattttttgcgtgcatatagtgtgaacaaaaatgtcattcaaaatttgcgtgcatgcaatggaaactcccacacctgccataattttttggatttacataaatatagaaatcgcatgcatgtgcaccgtaaaaataggaactcgtgggacgggacgcgtggcccatgcaagcatgcattggaaccctggttggacacagtacagagggtatg

SEQ ID NO: 2430 - DNA, 295 bp, Zea Mays
ggaagatgaactagtaaaaggaagtctagtatgacgacctaattaacaagcatgacaaaaatcgggagtgctgtgaggacaacttattgcggtggtgttgtgaagtttggtgaggacatcagggctaggatgtccaagacgtcggttccacgtggaagcggagatagccgtcagagcgtgagatggagtggtagacgtgtatgggaaccgaatggtgtagaggggaccatcactattgcacctaatgatctctctccgagaggtgaggtccttcatagaaacaccaaaagggtca

SEQ ID NO: 2431 - DNA, 777 bp, Zea Mays
ccacgccaccagaagggcctgtttgaagcctaggttcctccccctgttctttgtggtagtgttctgtagactgttatccatgaatccaaacaaaattttattctggaatgtgagaggaatgaactcctcagtacagcaagactcagtcagagagcttgtggactcttcccaagtggatgtggtttgtgtccaggaaactaaaatgcagaacatttcaacaagaactatcctctccatgcttggtgctgagttctctgattacgtctacctgccatcaacaggtgcaagtggtggcatcttgatcacttggaaaagacatataggtcatacagggcagcaaagaatcaacaatcacagtgtttcagtccagttgtgcatggagcaagggcaggcttggtggcttacctgtgtgtacgaccctcagggagatgatggaaaaatcctttttcttcaggaactcagagatgtcagaacagcctgtgctggcccttggttggtggctggggattttaacctcatctataaaacatcagataagaataactccaattttataagagccatgatgggtcgtttcagggatttgatcaatgaccttggcctcaaggagattccgctgttaggacgcaaattcacttggtctaaccagcaagataacccggtccttgttaagctcgatagagtgttttgtactgtggattgggagctaaccttccccagagttcttcttcatagtgctgcgtcacttgattcggaccactgccctttgcttctggg

SEQ ID NO: 2432 - DNA, 721 bp, Zea Mays
tagtcactttctgccgattcaccacccatacacagctacttctattgctcaattatttattgatcatgtttacaaacttcatgggcttcctcaagcaattgtgtcagaccgtaatccagtgtttaccagcaagctttggcaggagctgttcactcgggccggagtcagtttacacatgagttcagcctaccatcctcagtccgacggtcagacggaacgagtcaaccagtgcctggaaacgtacctcagatgcttcgtccacacctgcccctccaaatggattaaatggctatccctagcagagtattggtacaacaccagttttcactcatctctgggttcttcaccgtttgaggtcctctacggtcaccagcccaaccatttcggcttatcatcggcagatgtctctgttccagctgatgtctcatcctggcttaaagagcgctctctcatgcaggctgtggcccgacaacacttgctccgcgcccaacaacgcatgaagaagcaggccgacaaatcacgctctgaacgccaattcgctgtgggcgacctcgtttatctcaagctccaaccatacattcaatcctcactgtccaaccgttcatctcagaagctgtccttcaagttcttcggaccatttaccatcacagaccgcatcggttctgttgcttacagattggcgctgccatcttcatcatctgtgcacccggtcttccacgtt

SEQ ID NO: 2433 - DNA, 665 bp, Zea Mays
gtgggagatgaggaggctgctgctgggtctagcgaaggtggtttggtctatctaaagtacacgttcaagtacatgagccaatttgatgagccaaatgatgactgactagatgccattgaggcaaccagtgatgaattgcttggtgcctattcgagggctaaagatgatgctatgacaacagcctttgggggttgaggtaaaaagagactgaatagagttttttatgtcattgggtttgtatactcggagtactattattctttgcgaaagcaaggaaagaaaagaaaaactgctgcttcggcgatttctaacacgccgaagctgaaaaaagttaaagttttaacacaccgccccaagcgcgttgaaacggccgaagaaccgaggcctattgaggggtcttcttctgtatctgagccaagtcactccacccctgccgaagctaggacataatcgaccgaagagccagaactgaagaaagcagcagaacaaccgaaggctttgagtccgttgcaagagacggagctgccgagggcatcaaatattcctgcagcaactccaaagaggaggagaatggccagcgtactagacgctgtcatggaatctgtgaaaatacaaacttcttcttcagcacttgatttagagggtgaagccttaaagaaatcttg

SEQ ID NO: 2434 - DNA, 523 bp, Zea Mays
ttttagttttttttacagggccacaggtttttctggctcggccctgttcctaaactagtcctaaaatgggtacccgtgtttcgtgttgtatgatatgatatgatatccgctcgacaatgatcaggtgataaatgagattttctaggattcacacaaattctcctggagcaaatcgcgcgctcggggtttcaatggacgtctaaagtaaggttgggccttccacggccctgcggttcatattgtataacagacatatttaattaagaaaaattgggcctttcggctagagatatagagtaaatcatgaaaaacacatgaaacaaaaagaaaactatacctataaaacaaaccataacagctcataaatcagtaacttttgtataagtcgaataaagtttgtgctcctaatatagggaaataatatgcaaacttgctgaaaagcgtttgttcagctgcttgctgggtcaaactactctcgcccttagacggaccgaatcctgctcaacttgggccgaagtaagtg

SEQ ID NO: 2435 - DNA, 461 bp, Zea Mays
ccgagctcgcccatagctccggcgacctccccgcgacccgtcagagccgcccgagggcaaccaccgtggccgaaccatttcccgccctcctccgcttgatccatgcccttagatagctccactaggaggccgtgaagcttgctcgagcttgaaccgaggacccccgccaccggaatagcgcaatcgtgctcgccggagttcggaaccccgccgaagcacgtggaccgggtgagtctccgcaccattttccaattcactgcacgcatagcctctacgtcaccccgtggagctcctcgtgccgtttaatggaactataccgtcgtggtttggttggagcaggagccgccgacgacctccgccgcctgcgctcgtggccaggatcgctccgaccacctctgacgtcgacccacacaccgacgtgaccgccgtgacctcccctacgtcactgacaaccccgccgg

SEQ ID NO: 2436 - DNA, 418 bp, Zea Mays
attttggtttcgcccgggtgaacggtgtaaggcgttttatgagcttctctcaagatatccatcttcacctctgatttctaaggcacacaaagacaacccctgaaacgaaccaaatcactctcatcaatggtgaactcccagggtttaccatcaccctctttcgagcttcctgcaatagacgatcctgctgctgagctgcacgcactctctccatgagggaggattgaataagcatcccagtctcctcactagcggtgccgacatagcacaaagcgatccccaaacggtccagatcagcgatcgaaggcaaggccacttttggaaccccggacctgctaagggcattagccaccacatttgccttcgctggatgataatgaatggtcaaatcataatccttaatcaatttgagccatcg

SEQ ID NO: 2437 - DNA, 507 bp, Zea Mays
cactgattgtataaccatcccaagctctatcgcgtcaatgggaaataaggttcattatccagttgatgacatcacaaggcctatgacgtgcacactagttataagatatggtattaacaataatcacacgaagaaagtaggaacaggcattgtgatcctaggacgcaagtttcatgatagcgacattccagatgattattgcagggtagaagtgacgacggtcgtccaagggtccgaggacgacatgctagacatccctgggcccgaaggaatcgagacacttggacaagccatcaaaaatttcatcttttggccatgaagggatgtcgaattggttgatccaccaacgtcgtcgtcgtctcatccccaaccatctccgcctcctcaaactttagtacctattgtacatccatcatcacctcctcaatcttcacatgctgctcctcatcctctttctaacccaccgtctctgccacaagcatcaacatttaggacaccaccaccatc

SEQ ID NO: 2438 - DNA, 587 bp, Zea Mays
gcgttagaacaggagcagaagcgatgtgccacgtgctcgaccgcggctaacgcgccggtgcatgcctgcccgcgcgcccgtgccatgccgtgcccgaccgtgccccgcgcctataagagcagcacgacctcggccgtactccctccgcaccgcgtccaactccccagagccatcccctagctccggtgacctccccgcgacccgccaccacatctagagctcgaccaccgtggccagacctcttcctggccacctcccaccgatctagtgcatcgactagcttccctggagctccgtaaagcttcccgaagcaataaatcaaacacatcctcataggagacgtcgttccacccttgccggagttgttcttccgccgacacgtgtggccacgactaaccagtaagccatagttcaattactcgcgcccatgtctgacactcagtgaacctcgctgcacgttttaatcgaactataccgccatcgttaggccagaacactcgccgccgatgagctcccccgcctgcgcacgaggaccgactgactccgaccaccgccagcgacgaccgaccattgacatgaccgtcgtg

SEQ ID NO: 2439 - DNA, 709 bp, Zea Mays
tgcgcttgtactgctgtgatgtgggcctgagtcgccagccactaaccaaaatcgtgcgctctctatcagtccgggcccgctcgtcagcatctccttgcttctcggtaacaaaccgagccgccattgccgctcgcccggtagactcgccagccgttccttgcgatgggataaatatgcgctaggccgggatacctgggtccctccaactcccgtgattcttccctcctttctaccaccgcagccatcatcgcttgggaggaaattgatccgccaggtgctgtgccgccgccgaccgcgtgtgttgtgctagtcggagtggggagatcctcacgccgcaaaccctggtgagcattgtgtattgcgtttcgccttatgtccttctacatctatggcatgcccgtaaccaagaccatggtctagcgccatgatttggggtcgtcggtgtgggttaccggcgagttgatgttcagcgtatgtgcagtttccccaaacaactaccatagtcaaattgtcggtaccccctgtgatcgctgcatattttgtgaagtcagggctcatttaattgagattcggagcacctggccgccgcatcgccgccgtgctttctgctcagtagggaagaaaagcaatggcctttgatcctgtgatgggtggctaggattagttgataacataccccttcgtcccagtgaaccctggccgtccatct

SEQ ID NO: 2440 - DNA, 816 bp, Zea Mays
gaggctccgtccaatccctttcaaaaaacgagctgtgccagcagtggatttactcttctttttcttctcgaacggggacactaattttggtatagaaactttagatttctttgatggtcgtggagatggctgtggagaaggtggatccctgaagggcgatgtatgtggcggagacggtgggccaccatgaggatgaggagaaggagggtcagaaagaggatgaggagcaacatgtgaagtttgaggaggtgatgatggatgtacaataggaacaacaatttgagaaggcggagacggttgggcctgcgacgacggctgtcgtggtggatcaaccaattcgacatcccttcgaggccaaaggataaaattcttgatagcttgtccaagtgtctcgataccttcgggcccagggatgtctagcatgtcgtcctcgtatccttggacgactgtcgtcacttctaccctgcaatattcttctggaatgtcgtttccatggaacttgtgtcctgggatcgcaaggcctgtggctactttctttgtacactgattgttaataccatatcttataactagtgtgcatgccacaggccttgtgatgtcatcaactggatagcggaccttattcgacagagcttgggatggtcgtactctcgatggaagccggcgtttgagctgctagaattatttgcatctgtggagtggtcatctgttgaacagacatcgcactcgccatcgccaattgctgcatcaattctggaggaggattcgatagcatttcagacatcaggcctttgaactctttcttggcctcctcca

SEQ ID NO: 2441 - DNA, 366 bp, Zea Mays
atgatgtggtgagcgtgatggaccgacagtcagtggagctaatcccatcccatccaatttatgaccctctcatccagcaaatttatgaccgtttacccgacgccatcaaatcaaatcaaaccaaaatccttgtgattctcgccaatgcctccacaactcacgatagctacagcccggccctggtagattagattagctcagcccagtccttagcagcttgcagtacattctctgggggggtgtccgttcaggctcagattctacactgatgctcttctcctttaatcaccgcagtgtagctgaaaatgctgttgtaatggtagacacaaagagcatgcatgcatgcatcgccgttcaactcggtga

SEQ ID NO: 2442 - DNA, 705 bp, Zea Mays
cgatcaacgcgtttaccatcaccgttgcgtgggccccaggcgtcagcccgccttcttcgctgaagctgttgctgcggtgcccaactcccataaccgtcggccgccccagctatcccccttctcccctgtgttccgtcgcttcagcctttataaacggacaccatgaccgccccaccttcgtgtctaactcggagagaacaccaatgccatgtgccgtgggagagaggagaacccaggccaccgccgtcatctcatccgtgcaccaccgctcggagtcttagaaggggttgggggccatcgccggagcatcctgaacgtgcgtttggaagttgtgtgcattagaggtggagggttgccgggggattgttcatcggagctctcgcaccatcaccaagccgcagtccgccgcgggccggactcctacgcgcgccaccctcagtgagtacagtctcccctatctctaattgatccgcactacgtgttgtgtctgttgatcggggtttagggcattagaccgggggaatcgctgtggctggcaatggtgtcgatgtggatgcaattcttccaccatgcttgaaacgcgggatggggtggcgattgctggccattgattcctgcacgggcgccttggattagaactagggatcgattcgggcttggccattggggaccgcccgatctagatcaatgggccgcgatgggtct

SEQ ID NO: 2443 - DNA, 446 bp, Zea Mays
gttagtctgatatactggttccatcaataagggaacttggagaaaaggtgattcaaaagaaatcgagcccaaacctgcctccggggcaggatcgggtcgggaagcaagctcgcagatagaagtgcactttccaatgcagttagacagagaaggcatggctgtgatgttataatgctgaacgaccccaagaagagattaagccctgtagtctaccacctcccgttatttgtgggcttcaccgagggcgggaaacatttggtgacatcaaacgaccttcgggctggggacgtctgcgagcttaatttgctaaattgtactactgtgctcgtagcccaaaccgtccatgtcaccatttttccattagtcgtctgatcctttatcaatggctttcgactatgtttgttttttgttgtgtcccttcatgtattgttcatattgttttgaag

SEQ ID NO: 2444 - DNA, 439 bp, Zea Mays
tggttgtgatgggagactgaatatttatgatgcagacaacaacttgttagtatgtgctccacgtactgacaacagattgtatacagtaaagctaggcataggttctccagtatgtctgatgacaaagttaggggatactgcctggagatggcatgctaggtatggacatctgaatttcagagctcttcgggatcttggtctaaagatgaagcactattttatctgaagaatttcagagagcagaagttgaacaggaaggaagactgaaggctttgagaactgatagaggtggtgagttcaactcaaccctttttgatttgttgtgcagtgagcaaggcattaagcactacaccactactccttattcacctcagcagaatggtgtagtttagaggagaaaccaatctgtagtagagatgacaaggtgcttactgaaaag

SEQ ID NO: 2445 - DNA, 286 bp, Zea Mays
cgggagctcgggtgtacgaacgacccctcggtctcggtctcggctctctacgggaagtcaccaggcatgaatcaactgcacagttcgccgtcatgtcagacgtcagggcatctttccttcgaatacaaggcccgtcttcagtagggacgatccccttggtgtataaataggtggtggtccctccacggacgataaatcaacacacgtagacaaacgctcactcctccactctgtctcagatattggcacttgtctcaatcatctctagggacttggggacttctcc

SEQ ID NO: 2446 - DNA, 472 bp, Zea Mays
gtgaccaagtaggcctccatcaacttctggacgtgctcatccttggcttgcttcagggcttcaacagcaatgacttcacgactctccaaggcagttgcacgggcttgagctgtggtgagatccacatggagcttatggttgagcttctctgcatcttctgctcgggcaatcatctgacggtggtgtcgagccaagaaatcatactgtgtatcaagggtgagcaggtatgcagtgaggtacacgactggggggtcgtcctcaagcagctgctgttcctccaatgcacgcatcctggccatccaaactggacggtctctctgaaagggcggaaagaatctgagcggggtgtcggccacttcttcttcatagatctgacacagggccctcaatgccttgcgagcgacgacttggcaggtgtctttgaatttgtgcccagcagcagtgacactccattccacatggtgtggactgg

SEQ ID NO: 2447 - DNA, 726 bp, Zea Mays
caggcctcgatttccagagaagtcaggggtctctgcgtaagatagcctaggcacagagaatagtaacacatggacggcgggttggtttcctgaaaacgcaggggctcttataaaaatatgcattcgcgacaggatatgaagcatctcgggccgttcgatctactccttacggtccagattagactgccacttatctgaaccggtacgcgttaaggatcgcaagatctgagatcgacggttaaggttttatgaatcgtgatcccgcgcctggcctttggattcaatccctacggtttctagcgcccatgacctgatcaatactgagccgcacgatacatgcccgtcggtccagattttaagtatgcaagggaatcggtcgaatctaatccaaaccgtctgttagccgatcaaaggccacggtcgctctcccccaactctttctctcctccggcagactgggcacggcggcgcccgcatggttccgcggcggagccatgactggcaagccccaaagctccaaattgcggacacgcttcgaatcctagcagcctaaaatgatgtcctaaggaagagaaacacgatgaacgtagtcttaccttactgtgtgtcgcagggaaccctggccacggcgggcagcggattcaccaacaccggcaagggattccacggtctccggtgatcttccccttcaattgcgcccacgctcgacttcaacgcagtcgtagc

SEQ ID NO: 2448 - DNA, 539 bp, Zea Mays
aaggaccaaatctacggccggaacagcgacacgtggtggatcggagaaggccggacaggggatcgtgtggtcgagcccggggtggggaccctcgcatcgttggatcgtgcggttgtggtgcagagcagcaaaaaggcccacaggggttgtggcgggaatgtttatttggtggtgtctggtgcacgtacactggtggttggcgttccgtcgcgggcggcgataatatcttgcgcctgtgcttggaaacaaccagctcgtggttggtgttggtttgcctgctttagcacgtcgtaaataaaattggttctaatagatgcggatactacactatccgtctggcctaaattttcccatgggttttgtgttgtttgcgtgtgtcgtttgtaatgttggacatcgctgaagttttactcaaggcctctatctttcttgtcactcaaagatccctttgagcacttaagatttacggaggggcctttgtttttgttctgtgaatatgcacaagcatgattagttttactggttctcctaggacctct

SEQ ID NO: 2449 - DNA, 565 bp, Zea Mays
gtgattctctgttggttgtccaacaggtattagaagagtatcaatgttttgatggtactctaaacagctaccttgaaaaatgttggggcataattcattcttttgacgaattcagcattcgacacatctctagagttgagaatcacagagctaacaatttggcacaagatgcatcaggttatcggataaagcgagggaaatttcacaacaccaaaaatttgataaccggtacagggccaattccccaggtcgtggaccatccgggtgagggcttcagaccgtccggggttgccgggagagttctcctgattgattcggctggtgatgaagctgatgcaagcgattggaggacacccataattaattatctatgaaataccagtgttgggacagataggaacattcggcgtacaactttcaagtatgttttaatgagtgatgaactctaccgccgaacagtcaacgacgtcctgcttaaatgcttgggcccaggtgatgctatattagccatgaccgaagtacataaagggatttgtggtacccatcaatcggctccaaaaatgaa

SEQ ID NO: 2450 - DNA, 505 bp, Zea Mays
atgctatatgtattgaccaaccttgaagaggtgacgccatacatggaacaatttcttcatgaattctagcgtcgatcaatggaccccacttcacaggaatatgacactcttcttagaaagggtgcgagaaatggattgcccgatttcatttcctagttcaaacgtaaggtacgtgcttagtttgtcaaagagatctgtctatgaactcaatttagcgtcttttaacttgcgaatacttgcagggccaaagagatccgtttatgagtgccgagttgagacaagtagccaatggctttgcttatagggtcaagaaatattctgggtatgacatcaatggataccgttttcgcacaacaaactacgaccaaagtcggcccaatcagaaaacaacgtgttctggagtctttactcccggccttgacgatgtcgattattttggacgaatcgaagaaatatatgaactcaatttttatggttccaaacctcttactccaatgatattcaa

SEQ ID NO: 2451 - DNA, 596 bp, Zea Mays
gtccacgctgcagttcctgtacgcatgtgacgagttactctccgacatctcaaagggttatgacatcggcgaggagagctaggaccctactcgggaatgcctccacatcgaccaagagattcctgacgagggaaatcatctcggcatgcccctggaaggtgaccaacctcccctacgcgtttgggaagcaatggagtaggcggggcctaaaccactcctgggagccccgtggctcaccttgagcaactctgtgagctgcacaacaagcttggggaggaacaacaatggctacagagctacgacaagcactggagagggaggctgccaacaaacctcaataagggtgcacgcgcaaaggcacgtgacgtacaacgtcacatcatggaggatgccgaagccgacgcacccctgcccttaactgggccagtcaaagctttgtagcagtagtaatcttgctgcacaccatgtcggagccctctaccaccgaaggatgctgcatccacagcgaacttcgggagctcttagaatgcgccgctgtccagcaggccgaaagttcagcctctcgacttcgggagcccacctcgagtcaccaagcg

SEQ ID NO: 2452 - DNA, 750 bp, Zea Mays
gtttccactcaatcaatttcactagcggagctctaaatcatccagtccatggagacagcgcaaacaatggatgaacagaagtgttcccggtgatctagggcagtctagctcaattgaatgggtcgaggagcatcaggagaaccaaaggacactgaaacgggaggacagagagcacgaacagacttggaacaagctagccacgacgagggttctttcacggtggcggaaaacagatttgggagaaagagaaattagagagctatggtggctaatcggaggcaggggcgggtgctctggcttcgtgattacctaacggagctagcagtgtgcttaatttatagtgttcaagagcggtggccttcaattttggaatggcgcgctggcggtcggagaggaagaagatcactggtggcgcaatcgtggagttcaccggttcagttgttcagagagggtaagcctaagtgtgccacggttactaccgtgtagtgaagagtcactgcgtggcataattgagatcgccggagtgtccacgacgacaccggcggtccggccacgtcgcaacggctacatgcacggtgataagcttcccctacgaccgcatctgcttccccacaagatcttttacctccccgtggatatccactgcgtgcccgacacgaatcacggcgaccggcgcaaatccagatgcgcggattacatgcggcgagggggactgaaccctgggatatttcagtgcactgtaccatcgcg

SEQ ID NO: 2453 - DNA, 369 bp, Zea Mays
ttttcccactgtatctcggttggccaccatccgaagcaccaagtgtcttggtttgatgttttcagtcttaccttccgatcacgccatttaactatttcagcttgatacttattgatgtgatctaccgcttggagcctagtcccttctatggcgtcttttgttattttgcaatcctctttgtcttctgctgaagctagggtccttattgaacccgttcttgcttcttccgatgttattgcatcgtcacgaaatagaagcttgaacggggtaaatcctgttgaccttgagacaacagtgttgtggttccatactacttttatcaactcgtctggccactttcctttcggctgattaaagattgacttcatt

SEQ ID NO: 2454 - DNA, 404 bp, Zea Mays
gaccctgagctcagaaagaagatactggatgaagctcacctttccaaattctccatgcaccctggtagcaacaaaatgtaccatgacctcagatctttatattggtggaccagaatgaagagggaaattgccaaatacatatctgagtgtgatacctgccagagaatcaaagctagtcatttgaaggcagcaggccctttgcaaccccttcccataccgtcttggaaatgggaggacatttgcatggattttatcgtaggattacccaatacctccaggcaccatgattctatttgggttattatggacaggttgaccaagaccgctcatttcttgccagtgcacaccacccacaagacagaaaagtatgtggaaatttacattgatcagatagtaagattgca

SEQ ID NO: 2455 - DNA, 644 bp, Zea Mays
ttactggtgctggtaggtgccgtctgccggggcgcctggggcagcctgtaggcagcgccgtgccacaggatggccgggtccagcccgacaggatcgctggcatcgtcggaggcccgcgtttgccgtacgtctgaggtagacgaggctggcgcggggagtagatcctgtagcagaaaatcaagagtccggtcgaggctgtgaagccgcaaacggaaagtgagtctcatcaaatacaacgtggcgggagatgatgatcttgcgagtggatagatcaagacaccggtagcccttctgagaaggaggataaccgagaaagacacgccgtggatcgaggggacaatttgtggggggtcgtggcactgaggtttggatagcacaggcgaccaaaaactcatctggcattttgcgataaaggagatggtagggaataccattatgtatggacgacgaaggccgccggtttgtgagaaacacggcggtggagagagcctcggcctaatagggaggaggcatagccgcatggatcagaagcgtccgaacgacattgttcagagtgcgaagcatccactcagctttgccgttttgggcggatgtgtaggggcacgaggtgggaagaaggatgccgcgggcagctaggaaggcgg

SEQ ID NO: 2456 - DNA, 405 bp, Zea Mays
gctgatggtgcttcgtgcgtctcgtcggctgttgatggcgtgacgcaggtcgttcgcaggatgagcaaggggtagaagatgataggctgcctgtgtaagcagtcgctgtaaccttccacgtctggggttcgcgggagtccgtcggctatctgcgccagtactcctccaacttcgctcggcgtgtttagtgctcgagcgaaatcgaggtacaggtttcgagtgaggagagggttctctcgccgttgcctagcatcttgttcggctagctcttgctcccgatcctgaggctgtcggcgataacggcggtgggagttatgtctttctcggtgtactcgttcatcgggagtttctcccacttccgaggcttcgtcccgggacacgggctgcgccggatcccgttccccg

SEQ ID NO: 2457 - DNA, 490 bp, Zea Mays
cggaaattagcttgacgatgctttctgggaggaggtgagcgccatctgtgatgcccagtctgctaccaagagccaggagaggaaaaaggaggaggggagcttggtgctgtcctgcgatgatgcttcactcccccctgctatttccatcaccgcggagggtggggaggcgggaacgagcggcggaggaggtgaagctcgacaccggcaacgtgctcaacctaaggccggttagggttcttgacatttttgtgttgcacataataggttgactgcatttttaccttccattttgatatgttgcttcctttacttctttcttttatgaccttggagatcttttcagctcaacacattggaaatatgcatcttcacatgtatacatcgaattacttaaaattattgtcttgcaatccatttctgctatctctagctgtccaaacaaaagcagctctgttcttttgtagctagtatagttgctgatgtatttaaa

SEQ ID NO: 2458 - DNA, 522 bp, Zea Mays
ctctcttgaagggtccaatcatgtccagtccccggtatgcaaatgaccatgttacaggtatggtttgcagctgctgtgctggtaagtgttgttgctttgacaagaattggcaagcttcacatctctagactaactcggcagcgtcactctttgctattggtcaatagaaaccggacctgaaaactttcccaaccagagttctggatgctgcgtgtattccacactgtccggcgtggatctcatctaatagctgtttcctagtaaccgaggaaatgcgattcatgaggactcctgtcgcaccccttctatacagtgcgccccctatgagggtgtagtgggccgactgtctcgtgatgcgttctgctgcagctttatcatctggttcttcttcgttctttatgtacctgatgataggttctctccagtcattagagtccgattctggttggctcaaggtgttgcactcttccgcctgatctgagggaatacttgggcgtggcacttcctggatgaagactccag

SEQ ID NO: 2459 - DNA, 506 bp, Zea Mays
cgctgctaccccatccgcgataaacacatttcccctctgatccgtaaaagtgtgtagcatcgatttacaatgagccggggctgtggttgtgcgggggaagcctaatggctcgctggtggggggggggcagattccggtcgcgccgccactatttttggtcttggctacgggaggaggaagaagcgttgtgagccgctgatgtgtaaatggatggttcagatcaaaactgggcgcactacttcagcttggcgcgtggtggccgttagatcagcgtcatcggtccagatttggggaccctcataccgatttggtggattcgatcgttgtcgtagatcttctatccgagggttctgggcagatcaggcaaacataaaatcgggatcttaatccgatggcctgatgtgcgtaccagttcgcagggctcagatttaatctgagcgcttaaactaggatcggacgaccgaagcctatccatacccccttcgcgatggcgctttacaaataag

SEQ ID NO: 2460 - DNA, 692 bp, Zea Mays
ccatgggaacaagggagggctgagccatccacatggtgcaggtaaaatggagaaaaggagatggtgtgatggaggggggctgtagcacgccaacagagggggcgccatggcaaacctacaaccggaaggggcgaccatggaagaaaatctctatgcgcagatcagagggggaatgtgggggcgaggtcggccaccagggagatggctggtgtccagggtgccatggttggggcatcggcttggaggggaaaatagtggcagaggagatagggagctcctgtgccatggacaactatggctgggcacctggctggggagggaggagatagaagagaggcggccatgggagggacgccgaggtgagtgatagggaggagagggcgctgaccagccatggttgagggggaagaaacttggacgtggggagtgggaggagggagggagcaacagtggataaggccaagcaatggattcatgaagactccaggacgatgactacagatttggacgaggaggaaaagtggtggtgataaaatcaaagtgatatttttattctatttcattttttacttttcctttagcaatacaaatttcagaaattctgaattctgcgattaaaatttaagcgaggttaaaatggaccgaaggaggtggtagggagataagatgcgtctgcgtaacttcacagaaac

SEQ ID NO: 2461 - DNA, 577 bp, Zea Mays
aacacgtgcgaaccacgcatgacacacacgaatggcgcgcgggctcgtgcgacttagcgcgcggacaacacacgacatgcagaaatggcgcgcgacaatttaatgtgcgatgcgcgggcgatggcgaatgacacgaacgcacgcggggttagacgaggggtagacgggaggggggggtagacgagagtcgtctaggggtagacgaggggtagacgagagtcgtctaggggtagacggagtcccgtcgacgcactgcgcgcaaacgaacgcgagcgcgcgcactagttgcgcgacgcacgacacattgaataattaacaaaccgcggctaaataatgacgtgacgaacagacaacctatattacgcttaaacgcgaaaactatatttttctaagttcaacttagttaacataaattatttgggtgggatattttagataaaatagattatcaattagtcgatgattaatacgaggtttaattgactaatgcgtacggacgattatagcgaagtgattaactaatgcgcgcagattgcgcgcgacacgcacgaaacagcgcgaggaccctacaaacaac

SEQ ID NO: 2462 - DNA, 629 bp, Zea Mays
tctaatgacgaccattatagctctgttttcaccgcggaccagcatgggtcgtcaaattgcaatctggatgacggaatggcctagccagtttcccctcaatcccccccaattcttccgggatctcggatcaccaattcagctctaacggtgtaatctgggacaaaccggctgctgctaatcactggtgaagagaactgtagcatcgcaattatgcccccatcatctccccccgtgtcataatttaattccgtggattccgctctaatgacggccattatagctctgttttcaccgcgaaccagcatgggtcgtcaaattgcaacctggatgacggaatggcgtgactagtttccccctcaatcccctccaattttctcgagatcccggatcaccaaatcagctctaacggtgtaagctgggacgaatcagctgctgctaatcactggtggagagaaccgtagcatcacaattatgcccccatcatctccccctgtgtcatagtttaattccgtggattccgctctaatgacgaccattatatctctgttttcaccgcggaccagcatgggtcgtcaaattgcaacctggatgacggaatggcgtggccagtttcccctcatgcccctcca

SEQ ID NO: 2463 - DNA, 653 bp, Zea Mays
caggaagatctcttactggccaaggtaactcaggccactcgatcccggcaggctcgcagctcgccgtgggcagggagcttggatgcatcggtgggcaatcggcaagcagcaccatctgttgttacacttcctgcagcatctgtgggggtcaagacagagggagggcgagctgtaccagtgggttcgcaagcctctgtgacagcctcatcggcacctccataccgttgtcggctcagttcagccgagatgtctgaacgcaaggagaagggtctttgttacaactgcgatgaggtatactcgaggggacatcgctgccagcgtttgtttcatctcgaagtgctcagcgaggatgaagaagatgatgtgattgaggaggagcctaccctgtctgcgctagccatgcatgggtcgaagaccagccgcacaatgccggtcattctggttatggggcaacagcgactagtgggcttggtggatagtggaagcacacacaatttcattagcagccatgtggcttccttgctccaagttccccaactgtcaggaaccaagcagcaggtgcaggtggccaatggagctcgattgccatgtctggggcgtctggcggctgttcagtttggtatacaggatcattccttctcggattccttctt

SEQ ID NO: 2464 - DNA, 374 bp, Zea Mays
ccaatgacttgagttaattgtccgtaccatctgaagcctagcaattgctggtatactgatgcactttatatctgaggcctaagtactccgcttttaggtttgttgttggtggtaaatttctcgttttcaaaatttgcatgctgattatgaaccaacttaaattttgtaactgaaaacccgtattcttttcctcttctgctaggccagtgacttgaattaattgtccgtaccatctgaggccaagcagcagctggtctactgatgcaattttctctgaggcctaagtacttgttttttagcttctttcctggagttatctttggcatttccctcctttaatttttaatttagttgttttcttgtttgactatatt

SEQ ID NO: 2465 - DNA, 282 bp, Zea Mays
aagaaatttcttcaggcctgatatggtaaaggagacataagagaaagtttgacaaataattcataatttgaagaaagctcaagctcgtcagaagagttatgcagacaagcgacgacaacccttgtactttctagttggagattatgtctatatgaagatttcaccaatgaagggtgtatcgcgtttcggggtaaaagggaagcttgcacctcgatacattggtccttttcctatccttgaaagatatggaccagtggcataccgactctagttacccgaaac

SEQ ID NO: 2466 - DNA, 494 bp, Zea Mays
aaggcgaagacgcggtctccgttgatgaggtccttcgaagtcggctcgtctacgtcggggacgaccgacgcggctgtccgaggcgacccatgctttatttcttgcggagtcatagcctccgatccgtatagaaggcgaaaaggggtgaacccagttgccctgcattcagttgtgttcagcgcccagaccacttcgggtaacaggtcgggccacttgccttttttgtcgtcgaggagcattttcttgacggctgtgaaaattttgccgttggcgtgctccacgactccgttggactgggggtggtacacggaggcgaaggcaagcttggtgccgacggagaagcagaaatctttgaagtcctggttgtcgaactgcttgccgttgtcgaccgtgagttcggacgggactccgaagcggcaaacaatattttgccagaagaatttctgggttgtcttcgatgtgatagtggatactgccctcgcttcaatccattt

SEQ ID NO: 2467 - DNA, 490 bp, Zea Mays
cttgcatgggtaccacatcacaattaatataatcatggtatgaaccaattgtaaattccacatggaccatacgtgttaccttaatcttaccactatcgttgaaccattggatgtagtaggggtgtggatgtggaagcggtttcagcccaagcctctctaccatggtggtgcttgctaagttgttacagcttcttccatcaattataatacgacaagatcattccaaaactacacatttagtttggaacaggttgtgtcgcttgttttgtttagctttaataatttgggcactcaagacacgtcttacaaccaggctctcatagtgttcagcatatgcagccccaatgtgctctacatcatcattctccttttctgcatcttgggcaacaagcatggcatatgaatcattatctaaatcactagatgatgagtactcacgattttctcttataattagcacacgcttgcttgggcagtcccttcggatgtg

SEQ ID NO: 2468 - DNA, 723 bp, Zea Mays
catgacctctacttagattctactgagggtatccctttggcaggcacaccctgtagtaagtctctttgcagctgataatcattttcaagaattcctactttgttcttttcattgcctccattttattctttcctcggtccttgttgcaggagacaagtctgatgttcttgttgatcgtacgatcagaacacatatccattatggagatggaattattgcatccaatagtcatgagtttaggaatgaagaggagccttatgcctttgctatggccgctgattcagatgatgatcgtccggttggtgagcttacagagagtgatattgagatgttgaagcgtattattccagagcaccgggatccaagtgttcatgagttcagcgatctgagtttatctcatgaagcctttgcagaagggagggatgatgagttgttagatgctcctgaggtgggtcctaccatgatgatcgaaaagggtcagattttcaaggacctaaatgccttgaagaggtggttgcagcattatgtcgtcttacataagaggccatatagggttcttcattcatacgagaagcgctgttacactgttgtatgcgacaaggaacaatgcccatggagggtctgtgcaagggtacagaagatcaacgggaattggaagataacaaaagttgtgggcccgcacaactgtgctgaacatgagctaacgacgaagcatcgtcagtt

SEQ ID NO: 2469 - DNA, 1394 bp, Zea Mays
ctgcctctcagcctcgggaagaccccaaaatggagcgatgaaagcctcgatgtcatctaatgagggtcgcactctatgacccggactgtcatctcgaacatgagggttggaaatgaaatcagaaaagggactctatggaggtagattccaaacagaataagataagggggcaccagcatttgaaaccctaccccttagcatcaagtcaatttggctcagcaggtcctcatcaggaaactgtctattggtaatttgggtagggtcgttgactgtggtgtacagataagctgggtaaactctatccttcaggggctagatgttcttaaaaacaaagtcagcgaccacagtctcagcagtcaggcctttgtattttagcgagcatatcttggcaagcagcaccctggactcggttagctctgaacctatgggggactctgtccagctgaacgtacggatgtcgggctacctccccgaccgaggagggagggacttgttgtggttctccatggtgaaccactcaaggcgccatcctttaatgctgtccttcagagggatatcaagatactctattttcctgccccgacgaagctctaagctggcaccaccaacaagttgatgttgtcttccgtccatccggggccgatagtggtagagatatttccaaagcccgaaatgaggaagaatttcaaggaaagattcacagaggtgcacaaaaatggcaatttgaagaatagaattgaggtttaaatgtgtaagattcggatcgtaaaaatcaaggaggccgcggaaaaagagagaagctagcagggcaagcccttggatggggaaaggcacgaagacgacagcttcgtgagtgtcctctgtcggaacggtaaccccgtgctagattcacctggaacacagctccttcggcagcagaatgacggtttcgacgaggtgcaagagatcagacttagtgacaatggacatattgttaccggcaaatggaagctgactattaggatcgatgggcggaatgattagagcagcaacactctgtctcttcctcttggggcccatcacagtctctaaagtgaagtgggcaggctcaagaactcagaaaacagagaagcggcagaggaaaaagcaagagttagggttcagaactcaaggggatacgtcagcaaaaataggagttggctcgataagtcgggcgcaaaaaatgccagaacataactcggaaaagcggagatcacaatcatcacttgggcattacctctaaaatgccagtgagctgctaatgcacaagcaaaagcacgcaacggtggataagcaaagaactgcattttttattcgtaaggggagttcgtcacaaacttgaaaccgactcattatgagtcggcctcttccacccc

SEQ ID NO: 2470 - DNA, 1421 bp, Zea Mays
cagcgctctctcagccaacctcaaaatgaagcggctaagggctgctagcgaccctgtaagctgctagatgtccttaatacgggtgggaggcctcattacctcaataaccttgattttctccgggttagcttcaatgccccagtatgaaaccaggaaccccagcaacttccctgcggagacaccgaagatgcatttctctgggtttagcttggtgcgggttgcccgcagcttgccgaaaaccagggtcaggtcttccactatagccgacccttccctagtcttgaccacgatgtcatcgacgtaaatttccaccttatcccagatcaggtcccggaaggtcttgctcatcgcccgaacaaaagttggcaaggcattcctcagactgtagggcattacaacataacagtatagtccatctactgtcacaaaagcggtatgcctcctatcctccttagccatccggatttggtggaaaccagagtaagcgtccaagaaggacaagaggtcgcaccccgaagtagagtccacaatctgatctatacgcgacagtggatacgggtccttggggcatgccttattcaggctggtgtagtcgatgcacatccgaagcttcccgttggccttcggcacgatgactggggttggcccaaccacacatggtgatgaacctcttcaataaagccagcgtgcaacagcttccggacctcttctcggatgaagtcctgtcgttccatggactgtctttgtggcgtctggcttaccggcctggcatctgggtaaacctttagctggtgctcgatcacctccctggggatcctaggcatctgcgacggctcccaagcgaagacatcgacatttgcttggaggaaggcgacgagcgcgagttcctattttccccctaggtcccctgcgatgcgggtggtctgggaggggtccgcgccgacctggatggtcttcgcgggtccgtcgcctgccccggacgactgcattttcggtgccttggagggcgccctggtactggggcctcttcttccatcgtccggccgagcgatctcggccgccagggtgtgtagcttctcgacgactgctagtgcggcggtgcggtcgccccgcacagtgaggatcccagcgggggatgacatcttgaggaccaagtacccgtaatgggcaatggccatgaaccggtacagggccgacctcccgataatggtgttaaaagggaggttgacctccgcgatgtcgaactggacatttctggtacggaagttctcttccgtctcaaatgtaaccaggagtgttatgctcctgaggggatatacgagctgcgggcccaccccggagaacgggcgagagggccccaaccgtgaccccggaacctgcagctgtctgaatgctgcatggctgataacattgaggccgac

SEQ ID NO: 2471 - DNA, 443 bp, Zea Mays
gtactggtggaccagaatgaagagggaaattgctaagtatatatctgaatgcgacacttgccagagagtcaaggccggtcatttgaaggtagcaggcaccttacagcctctccccataccctcttggaagtgagaggatatttgcatggattttattgtgggattgcccaatacctcccggcaccatgattctatttgggtcatcgtggataggttgaccaatacagctcatttcttgccagtacatactacccacaaggcagagaagtatgcagaaatctatattgatcaaatagtgcgtttgcatggaattccgaagaccattgtgtctgacagaggagcactgtttgtggcacgcttttgggagcagctccaagagtcacttgggacccatgcaataagaagttcagcgtaccatccgcagactgatggtcagacagaaa

SEQ ID NO: 2472 - DNA, 323 bp, Zea Mays
caaagtggaggcgtgaggcctcaagagtgccctggaactgcggtggctggatcagctatgcaaaaatgtggcacagataatgagcatatggcagctgtcgccgggcacgaagtccatccaataccatgtcctcgatctcacatataaggaagtcaacaacatcaaactctgaatgagagatcagggcaccaagtagccagagctggatatgagtggtggcctctctataacccatccgaggcagtagcgttcgtctcatgagctgatataagtacttggccgctggagtgaaatcttccggtgagcgtcgcgatccatctttg

SEQ ID NO: 2473 - DNA, 317 bp, Zea Mays
gttttacgaatctatggcaaaaacaaatacagagaagatcacaaaggaaataatggcggatttgtctgaagattctgacgatagcgatgactatgatgtgcaaagtggggatgaagattctgaagaccggccctggcggccaagccataccatcttcggaaagtcaaccattaaacaaagtcaaattgacgccatgaagggaagatactttcgtgacatgtctattgtgagggttggaggggacagcactgcccttgttcctgaagaaaatgaggttgttgtctacagaagctttatgaaggcgggtttttggttcc

SEQ ID NO: 2474 - DNA, 433 bp, Zea Mays
gacttgtgatttggacacttattgaacttcgctaatctgcactcgatttttgctaatccttgatattagtttttggcctcccaagctccacatactttcttctgatcaatacagctgtgaccttgcaatgacggtgtcactacctcttggtaagtatcatgaaccaacctccgattgtaccatcctttgcttgtatttcgtcagacacttgtaagagcttggtaagatacattagagtgtgttcctgtgttccacctgagaggagtgtgtagtgagattattagggataaccatcaccgtttgtttcctatttttgtgtttcgatggcaggcgatgacgaggaagcaaggatccctatagattttgatgaatgtgttagccgccaagatcttgaggcaaacaacaagctcctgaaggagcaaatggaggagac

SEQ ID NO: 2475 - DNA, 768 bp, Zea Mays
tgctatctgcggccgccgatcattagccgactcgccgtggctataaatggcaccatggtccatgacgaggtgttttcatctccaccagtgaagctcagtcgaagtccaaattcgcgaaattccctccatcgttcccaaaattgacagtgcatggtgaaactatagtcctttacggacgtgtagccttaatctcgcctcccaattccacccgagaccgttgcggcttcgtttttacccttttctgttacccgcgagccaggatcctccgcgccccatggtcagatcgtcctaggtctgctcctgcttgttttaatcatgttccagtatctatatgcgctagtgatgctcatcggccctgccctttttgcttagtcacaatcaatcacccggaacacatgaactcacatcggtattttccgccaccatggtcagtctaaaccagggccgtaactacgtaattgaaacccgttctagggttgtctcatgcccgtaacacccacccagtaattaaattgggcagccactaccaatcttggccagtccgcgcagcagtatcatcgttgatgagcgcgccgtcgatttggacctcttcggagaagaaatagaattagaggggtatgattgcataatgtcagtgactcgggaaatagtctcgggagcgttttctgaattatttgaagtagcgagggcctttccgcaagactaccagagcagcgcggacgcgcgcgcgtttccgcgtggacatgggccgcttgaaccagattcggc

SEQ ID NO: 2476 - DNA, 507 bp, Zea Mays
cattttcatgaaaaagactgccaggtgtgtgatctagagaaagattgtgttttggggaggaggatattactcgtccgacagtgtccttcactgttcacaatctatagtggcccatcaggccgtctccaatggctacttcacaatgggcgcaagctggtaaacacctagctgacgtggtacctagtctagaggtgcacctgaccggtacgttgcccatcagctaaggaaactgaccaatcagatcccagacttggggcacatggaccaggtccggtggctcatcggaccagcccggtgccccatagaaggctaaatttcaacatctttttagaaggaaggggcaacgactatggagcattttgaggctatgaaagaaccccaatggcgcactcttctgcacccaagcactccaggagctattctacactccgacattctgccacaacacattccaactgttttagtgagattcgagcgctgtttttgagttgtttcttgtaacacttg

SEQ ID NO: 2477 - DNA, 429 bp, Zea Mays
cgtttcttgtatcgctagcaaaatctggctcaaagttgtcaagagccttccatgcatcaccatatgacgggtgcaccattaacccatcttgtctgtccatacaatctttatgccacctcaagtgcatagcggtcttcctcgagagaaacaaatgtttcactctaggagtgagaggcatgtaccgaagctatttatatgcaaactttgtcaccaccttctccccatcttcatttacaagctccatgtacctcgacttcccacattttaagcatttctgctctctgccatgttccttccaaaaaagcatacagttgtcctggcaaacatcaatcttctcatactccataccaagaccttcaagtaatttcttggactgatacatgtctttgggcatcttgtgacccataggaagaacctcgctaatcaaat

SEQ ID NO: 2478 - DNA, 837 bp, Zea Mays
aagagatttggttcaagaacatatagcctacaagatatggcaactgatagacagctgggaaatgccaaaggaaaccatcactaaccctagcgaaggtggtttggttcgattgaaatatactttcaggtttggagactaatttatcgaaccagacgatgactggctgaagtgtgttgaaaatactagtgatgaactacttggagcatactccaagtctgaagataatgcactatctgtggcctttgggagccgaaaaaagaaaaggctaaatatagtttttgatgctatcggatttgtgtaccctgactatcgctacccgtcgcggggggtagaaaagaaagggtgcaacttctgggaaggctgctgcttcggctacctcaagcgagcccgcaccgaagaggaaaaagttgaaggtccttactcaccgaccgcactacattgaaccggccatagtgcctgaatttggcgatgagacttctttagctattgaagccaaaggacctgctcttaggcagaggattgaagagccggctgcaatgccgaagactgacaaaattgaagaaccgagaatcaaagagacgaaaacattagaagttctaagccattcggcaggagtggaggtgccgaagacacaaaaaggtctagcagcgacccccaagataaaaaggatggctagtgtactagatgtgctggagacaataaaagcttcaagctctactccagggaaaattgctaaggcttcgaaggcgcagattgaaaccgaggcaaaggtaaccgaagccgaagctacaatgggccaggccgatgccgaagctgggccttcagagcctgtcaagg

SEQ ID NO: 2479 - DNA, 615 bp, Zea Mays
ggcatgttgagctgagaatattgaaggcggcacacaagaagagagcacatgagacaaggaaatggagatggctagaatgcagaaacagatgttgggaaatcttgttggtcaactgagtgcaagtgagtgagaaaaacacacgttgttttcgcttgcacattgtatttgctaacttatttgtctcaatatatttgcagagattggatgcaccgggaactatatcgtagacgaggctcgtgcaagatacgttgagcaaaaaatggtgaagtggagctgatggaggaggatgacaacacatcaaggttgagtgagctcatcgcgctagctgagataggattacgtgcgcaagaggaagaggatgagtctatgtcttaggccaccgttgaagcagagatctcttattacaagtagaaggctgatgaagcgaaggctcaggaccaactattttactaggctattgatgaagcaaaagccgcttactacaagagaaaggtagaagagcgtgatgcgggacaatcaagcaagtggaacgacattgttgtagaggattgcgcgacggatgactctgatgatgagttacgtatagataatgtttcagattgattccaatactcg

SEQ ID NO: 2480 - DNA, 298 bp, Zea Mays
gctttgtcttcccatgtagctagcttgtcaggccaagaggaccaattgatcagcaattgaggaacatcacccatgggttttggcagaacatggtgttgcaacacctttttggccattgcagggaatctggcaaaaggggtaaagatgagttaacctatgtgttaggtccaatagctttttttagaagagtgacatgaaagacatggtgtatgctggaggaaggtgacagctctaaatgataagcaacaacaccaatcttggccaccacaggaaatggtccaaagtacttgaatgtcag

SEQ ID NO: 2481 - DNA, 694 bp, Zea Mays
gccacgcccgagcatttcctcagatcaagtagaagagtgcaatgttttgagcctgccagagtcagactctaatgactggagggagcctatcattaggtatataaagaacgaagaggaaccagatgataaagctgcagcggaacgcatcgcaaggcagtcagcccactacaccctcataggggacgcattgtacagaaggggtgcaacaggagtcctcatgaagtgcaatccttcagttactgggaagcaactgctagatgagattcacgccggatagtgtgggatacacgcagcatccagaactctagttgggaaggtctttaggtctggtttctactggccgatggcaaagagtgatgcagccaagttagtccagagatgtgaagcttgccaattcttatcaaagcagcagcatttgccagcacagcaactacagaccatacccgtaacatggccatttgcgtgctggggactagacatgattggacccttcaagaaagctcagggaggctacactcacgtgttggtcgccattgacaaattcactaattggatataatacaaagccattgcttctctaacttcagccaaggcagtggaattcatacaagatataatattcaggtttgggataccgaatagcatcataaccgacctgggatccaatttcactagctctgaattctttgatttc

SEQ ID NO: 2482 - DNA, 2535 bp, Zea Mays
gccagcgccacctccggccgtggacacaacgggatgcagcaggaaaagggctaggcggccggagctgctcaacgccagggagatgtacggcggcggagtcatgttctccaataaagccgccaggtccacgttcaagcagcagtgccactacgcgcaggcgtctcagcccatggtgatcgcccgggctacttactccttgctttcttgtgcgttactgtattgtaatactctatttttttcatcatcgtgcggcttggcaggtctggaagtaccaagccaccacctctgtggctgataaggcgctcgaacaattggacgccatggttcagacaccgcaagggttgaaagagtccaggctgctagtctccggcagcatgaacggttcgattcggtaagagtcttcgttggtatctgtttctatttactatctatctactatttggattcatttgtttttttttgttcaagttatgtagagtcatggcattatgagactgaaattgtagtatgcaggccttgttgagactatcttggtatcaccatgtcacacttgctgtattgtctgctggcacagtcgcacagattgtcttttgtcttaactgttggttgttctaagagaaagtgtgcatttatctatacttcaattctcacaatccgtcgatatgttttatctctcaatgttcttacttctgtgtaagagcatgggttcatggccttactaatgtcaaatgtcacggtgcattttcctataatctcttaataggttatacggattagggactgctctgagtaactttgagaatgaggcagagtttttgccccaacctgcttgtactcttgtgggaaagcacaagccaggaccactccccagcatttggtcacctggaacaggcttcatagctttctcatccagtatatcatgcataaagaagctcggacgtcatgtccctgatgcatcgaacaccaattcatcagttcagcgagcattgtatcctgaactcgttacttattgtactctctatttatttggacatttggtgttgccatagttgcacatgtttgcattatgttttctttattattaactggaaatatgttgtgagcttgtgtcccttgacgttgtaaaacatggtggctactcttggatctggagaatctcgtgcctctttatatattatggatctttctgaagctgttgacttggcaatcggaccatggactacctacagagttcattcacttgatcgaacaatgtggacagctgattgtagttctgatggcacacatgcagctttcggtgagttcgttgagtcagagcttaaatattggagataattaaagtttcccttgcacttaggtacactatttttgcaacttgtttctgattgaaccttgtgttacgtaactctatcaagttggatgcattcactaagaatttcactacggaattagcatttctgaaattctttgataatttaaacgtgacagttgaatattgaacccatatagcaagacctgcttgttttggtacttgtatacatatgtgatttttttcacaataactcagttttggttattgtgatggccgttttgcaatttaaaggttagtcattgctatagttggaggaattaatttaattgtcatagcaagctgtactcattcttacagttttggcagtttgcagcctgcttatgttacagacacatatagtatcctttcgcttgggattcacttgttcatcttatttctaggttcggaccttggtgctggtctgatcgatttggaaacaaggggatcatcatggttatgtcgttctaaaagcgacattctttccctgaaatttgtgcactcggtaacaatcttaatctacctaaacttcttcccactttgtagttttaactggttgagatatcattttatggtttgttgtcaaatgacagttattgaaaattttgcttgcctcaaccttttgcccccactttccagttaagcttaaatttggtgcatgtgcatctaatgcatgactacatgattctcaaagttttgaaaggaaagcaatatgctaccgatgtgacctttcctattgcagcatatgtcataatctgcagacctacgtaatatggattttattctttcttgttgaccctgtatccatgttatgattacttcggaatttactgtgacacactattcctgtctctgctatgcccactggattttctcactcctataagggaaaagttgtgctatgtggtctacggaatgggagtatagcccctgttgatgtacggcaaaaacagcataatcagcctactggagtagcttcatctagcaatgctaggaggacagttcccatgctgcccacaagacatggtgggaagcaaagaaaccaggtatgtaatactagtaaacagcatccattattaccatacatgtttgccccaaaattcctaaaataaaaggattgtcagaggtcagattggtaatgcaggtggcgcaagttctttttagagcaccatgttcacatgatgttc

SEQ ID NO: 2483 - DNA, 928 bp, Zea Mays
ctagcccaaatacaacgatagctctaacccctcgcaatacatcatgagttgtcatgtagcagtgacattgtcggggggggagatggcaatgacatagcgaattcattcatcattaccctcgaatgcttagccctaacttggaatataaggctatcacccttatccattgactcctggagggcactccatgagaaattcctccctaacttccaaggatacaggccacagaccgatgctctcgtggagttatccctctataggcagcaagagaaataaagcctccatgcatactacaacaaattcttgtcgctggagacctagttatcattggctaaagaccatatggcaattgactacgccatcaatagcctcgcattggacatctatacagtcattgtataagggaccccgcacctccctccaagagttgtattagctctttaaaaaaacacgcaaggtcggaggagttgaattactgcaagctagaaacatagtgaaagcctaagaagacttcgcactctagcaacaagccttgggccagaggcaaacagaaaaaaacgtcagcacgatcgctagccgcaaccagcaagtccacaacattagaaaccagcaacaataggttgaagccccctcgcaaccaaagtcaccctcagcagccaggcgagggggaggatcaacaaaggtcgcatacgtgactgaggccccacacaggatcgcaaattgtattgtgtcttccatgacaaagacgtcgtgcactccaccaagaattgcccaatcacaaaagaagtcaaagaaagaatggcatgaatagtgtcaaatcagccagcgaaggcagggacccacacctatcaacaacaattcccccttgctatcaagacattcaaccaccacctccaatgcccacaaaataaccacccctaactccctc

SEQ ID NO: 2484 - DNA, 412 bp, Zea Mays
aaggggacagggatgttactacctggttgcaggaaagacaagtggcctctgaactgctcagagagaggttggcacaagctcaaaatagaatgaaacaaatggcagacagagggcgaactcctagggaattccaggttggagaatttgtgcttctcaagttacaaccttatgctcaaaagacagtggttaacatgccatatccaaagttatcctttaagttctttggtcctttcaaaattgtggcaagaattggtgctgtggcttatcgattggagttgccagaaaatgcacagatacaccccgtttttcatgtatcccagttaaaggcatttcaccctaaacatactccagtttttgttgagcttcccaaggtggcagatttgtctggtccagggatttggcctgagaaaat

SEQ ID NO: 2485 - DNA, 507 bp, Zea Mays
gtcacaagaaaaatgatgggaagaagaagaggccataaaggatcccgatgacaacactgtgacaaccttgactcgggcctcgatttcgatcagtgtgagtggcgcggaggatcatcgacatcggagtactgatgcatcagtctctgacgtgccatcaagggctgaatccagcgatgcataaaggagtgcaccagccgcgtgccggtgagacctcgctgcttcaacgttcgagtcaccgtcagaagacgccccacctcgctctttacgctcgcctctgcctcgtggtgccactcctctgttgataccggctcctgaccggtgaacgacggggcactcctagccatattcttgacaaagaaccactccccttcatattgcacataggaaggaagggggatcttgaagtacgtagtgttttcggcctgcacggagctgaatattggctgagccaacatacatctgaccgtcgcgacctcgagccacccatgcactaaagaaatactacca

SEQ ID NO: 2486 - DNA, 515 bp, Zea Mays
tcttgctttggcctttgggtaaccccagagcatggcgcggatcatccatggctctgttctgcatagctgggtgagggtttcttgaattggactaccttggattgaggaacacgacagaatagaattttccatctagatggtttgaaattcatatatatcagttcatatcttgcaggtggatgtgatttgtctcgtgcggatgggaaatggtcgtaggatcctttataggttattattgaactgccccccacagttaattggtgggtcttgtctattattgttaggtccttcttgcattccattttctactaaatacaagggcgcaggtgaagacatggattgatgctttagctctaaacgttgatttgttttgaataggcttgcttggtctggcgtaatgttagtcagggtattaatcctcatatggagactagagtccccatcaagccatctagtccggtacttgaacttacatatgctgtttttctttatttggcatatccacatatcccgat

SEQ ID NO: 2487 - DNA, 405 bp, Zea Mays
gcggtggcatgctccttgtgcggcggttcgccttcttcacactcgaagaccagcgggccagttgtatgactcgtggggaccgagcccccgtgtcataggatgaataccccggtgtccatcgggggagacttctcgcgatgtttcgaggcgggagcgggggagtctgcctttaaagaggggttcatccctcgagtagcagccatgccttacttctctcccactcgcggcgtcctctcacctccgagctctctgcgcccctttgccttcaaggtttctgctttatgtcaccatagtttaccatggccttgtaagttcatctctagcatgcccagactgagtgggtgctcgacatggtataccgcctgcttggatgggatgcaccggcgttcgacgaaaggatttgcg

SEQ ID NO: 2488 - DNA, 671 bp, Zea Mays
gaacccctagttactattccctctctctccgacattcacagaaaaacccttacacttctaatttttcaccgcgccaggacccaggacgtcgcacggcgggagctttgacaccggcgaggttagactggcaggatggcgcaaagactggtgctcccgaagcggcagacactggattgaactcctcccgcgcatttcccctcaatcaattttactaacggggctttgaatcaaccagttcatggcaacagtgcggatggtcgaatggatcaaatgtgttccggataaccgaaaacatagctgactaaattgaagcttgggtaagcttcaccggttcaccagagtttacgtacacgctagaatttgggctgggcaagagtggaaaagcgggtcgacagagagggcgtcgtggcggtattctatggagcagaggggtgttccagtgatgagactctggtaaactccaattggccggctccgagagcaacagggggctaaaaacaagcaagaacttgaatcaattgggtatgcactaactcgaggagtgctggccacggaagagttcttcacggcggcggaagaaactagtttagggggattccgttgatcacaaaggatggggggacagaacgtgatggctagtggctggttggattcgcaactgaggaatgaag

SEQ ID NO: 2489 - DNA, 720 bp, Zea Mays
tctccccctttgaataaaaatgcagctctttgctggtccactgttgcatgattttgtttgcacaattgacggctcgctggcattttagaggaaatggccgagtgatgcatgtgatctccgcttttccgagttatgatctggcacttttgcgcctgacttatcgagccaactcatatttatgctgacatatccccttgagttccaaaccctaattctcgctttttcctccgccgcttcttgatttcctgagttcttgagcccgtccgcttcgcttgagagattgcaatggctcctaagaggaagagacagagtgatgatgttccaattatcccgccaatcgatcctaatagccaacttccatttgttggcaaccacatgtccattgtctctgagtctgacctcttacacctcgttgaaactagtgttcttccgccaaaggagatgtgttcatggcgaatctggcgtggggttacagttttgacagaggatacccacgaagctgtcgtcttcatgccctttctcatccgaggactagccctgccggcctctccctttttccgtggcctcctcgatttttatgctctgaatcttacacacttaaaccccaattctattcttctaattgtcgtgtttgttcacctctgtgaagcttttcttggaattcttcctcatttcgggctttggaaatacctctaccactgtcggcccgggatggttggg

SEQ ID NO: 2490 - DNA, 1000 bp, Zea Mays
agctttctgcttcttccacgaagactcctagcagtccttgtccatcatagctcttgcaacagcgccaatattccacctgtaaggaaaaacattaaaagacagagccagacaagacgtaaaattatcctcaccgggagccacgggaatagggtcttttctgtgcaactcacccccggttactttcagcttccgagaagatgcctcctggaggtcgggcgaggtcatgacctccctggcttggcacacgtctccgccagttcaacaacaaatctgtctgaggcctccgccaccctagatgccttcgccaaacccatctttttagcctcaactcttctcttttttctcaccgccatagccacgaccttacctttagagaacccctcatccacaccaccatgtgtcgccatgccctttctcttgcgatcatcaatatccccagcatcaatagagccctcctcaggatacgggtcgtactgaagattgttcaactcaaagacacgattcagcctgacattcgaacctcgtatgtcccaacttttcagcatctccgtcttcgttgaatatttccttacaatttttaccacttctgcctccacctccctgacaaaatccatagcgtctcgacctcgtagctcaacggtgaaagcaggactcagcaccattcgatccttcaaaaaaggcatcgagcgcagctttacctcacccacctcccagtcgtgcaccggaggccacactccataggcaataaacacctccaccaagtcacgcctgctgctcgccttggaggtgcggtgaagggcgtcttcgttcacatctcctttcttcagcttaaactgcgggaaggcgatgtagcaatgcgagcacagtatggacggaggcagccctagaacaccttcggcatccttcaatgtcacataaaactataaatcccatcaattcctccacttgttctttgaacatggaatgagttccacaacttcacccatagtctttgtagtcc

SEQ ID NO: 2491 - DNA, 586 bp, Zea Mays
tgggaatctcaaaaactgtaggaaactgagatataacctcatgtatatcagtagacaaattttccagtacagcctgttctttgtaagataggtcttgtaggctgcacacttggataacatctatttgtagtactgaggattgaactccctgtaatgtaactgtggaatctttgagaggaatactgagccacttctgagaccagtgtataagcattgggctatgcttctaaagccaatccattcccacaatgagatcataagtggataactgaagcacccatagtgttgaagtaaaagatatgccactaatggaccatgaagcatttacaatctactgattataggataggtgtgacccattggctacttgaacctgtaaaggtttgtccatagcagcgacactcacacgttagcagccacatctgcactaatgaaggaatgggaactgcctgaatcaagcagtgctaaaatgtcaataccatcgatgtaatccacaaacttcattgtccgaggagcttcagtcccctccatagcctcctgagacactcttaccatgttcagctcaggttcatcttcttccattgtc

SEQ ID NO: 2492 - DNA, 629 bp, Zea Mays
gaccatttctgcattttcatcatcaactggcatggcagcatctagatcacttggatcaaaactattactttccgatttaaaatgagatgcaaagttacttggttctaggtgggttcgattcatctcctcatcctcatctccaagtcccaagaacacatacatctcatcctcatcacagattctaaacatatcaccctgatccccattatccttattttcagcattctcaataataaagctacttcagtcaatagacatggtgtcatcatcattaccatccatgatgcgaacacgcaattatcaccacctatttctagtgttagcacaaattattacacataatgatgaaacagatgctgcaaaataaggtgctgccacaagagctgcgacagaggggaggggatatgttacctgcagaaggaagtggcgcgacaggatatcacaggcttggacgaccccctatttccaccagctcgacgccggctcacatccgtctgtgtaggaagagaaaaggttacagagtgtagggaaagggcaagagaaaggatacagagggaaatgggaagatcacctgaaaagggaagaaggtcgtcgtcaacgtcgccgatgtgccgcagcgaagaaagggt

SEQ ID NO: 2493 - DNA, 547 bp, Zea Mays
tccatggcatgtcaacgacgccgcagtggctccattgctataccgcccctacacatgagtatacgttcacgcccacacacctagtcccccactgccacccgtcaccacggccaacaattaggggcggatttaggccttgggccatagcccgaggcctggtccatgtaactaaagtaggcaaaccatctttattgggacttttctcttatttgctggcagctggcgctctcccgctctcccacagtcttcattcctcgccttaagccccgccgccactcgccaatttgctagacgccaagtatctcatcatcggcctatcgcaggacggttgcctcaccatgactcccagcgctgctccctccactgctctctccgagctccggccagcgcttagcgctggtcaccctgctccctcgtctggccagcgcaccggtggagtgtcctagggcttgccagccgcgccgttctagccttcaggcatttgcaccacgtttcccccacccactggccaccgtccctatgtgcagctcaccaccactcccccagg

SEQ ID NO: 2494 - DNA, 417 bp, Zea Mays
ttgtggaggaactgtggcaactcatcaatccaccagcgtcagacattgaatgtcagtcggagaatgagggcgaacttcagtccatgctgctctcccaagctgctcttcagggcacagtggctcctcggacgatgaaatttcatggcactatccaaggcattgatttattggtgttactcgattctggtagttcacactcatttattagctcccaggtggctgaacatattcaaggggtgtgtccattgccaaaccaactgtctgtacaagtagccaacggtgagagactacactgtatgcagcatgtgccacaggccgtgtggacattgggaggttgcgaatttcagtctactctccgcattctaccactgcaaacatacgatctaattgttggtatggattggctcgagcttttca

SEQ ID NO: 2495 - DNA, 465 bp, Zea Mays
caaaaaagggtgagactaaggacccaaccctgttagaaggtgtgcaacaaagacgacgtaggtcctcgacacaatgtgttgcaccgaccaggaggtaggggccaccttcccgctcaccactgggttcgtccaccccagcagcgtgcggtacaccgtgagcatcgtctcgttgctcactctctacacgaaaagtgcaatcttctttgccgagggtgccatcactacttctggagattatgaccagagaaggggagaagagctatcgtggaaggcaaatgggcactttggcagaaagaaagatgggtgcttaggtgcttgagtactcttattcgaacactcgattgcctatattgatgatctacccaaccgcacatgactcaaagacagcacaagaggtccgagggggaacatgtgtcggttcagcttctaatgcatgaccacctgcgcatatggtgtttgttgatt

SEQ ID NO: 2496 - DNA, 321 bp, Zea Mays
gctgactgaggattcttctgacgctgctcctgctgggacattggtggtggcgcctctcccagaaactcatacagccttggatattcagagacatgtcagtgttcgcccaaaacgcccttgccgagtcaatcaacttgatccttctgctgatgagcagaagaagaaaaagagacgccttcggcgagtatctagtttggatcgggacgttggtccttcagttcctgctgctgaagaagtgcctgtgcctgaatttactgacgttgaccccagtgagtgtgctccacctgttgctgaccccaatgggggtgctccatcttctgc

SEQ ID NO: 2497 - DNA, 516 bp, Zea Mays
ccgagcggagttcttgagtgatttgggggaagtaagaaattggagctctctggtgaacgattggaggcaagacttggtggcttggtgcgtgattaccctacggagcttgcagtgcgttcaatttataatgggcaagagcgatggccggtgaattagacgacgacgcgcggcggccgaagaagacatgagttactggcgcgagactcagtggcatctaccgtggcgacctcaccggcgacaagccagtgctaccgagcggtttctagtgactcaccgcgacggagtaaagcatcaaggcacgtagcccggtcggataacggcgaacgtcgttgatgccagcgcgactaactacggtgagacacgacgacggtgagaacagtggtcggagtttatccccaacgtgatactttacaccgaggagtgtttatctgagtttggtcaggcgtgaatcgcgacgccggcgcgaatccaggcgcacaggtcaccggcggcgaggttctctgaacctgatccacc

SEQ ID NO: 2498 - DNA, 486 bp, Zea Mays
atcctaggccatggcaagtcatccgaacgaaagatcaagggcacactgagtggccactatcgacatgaccgcacctccccaagtacgacccccaaacgcgctcccacagtatcgagggaccagacaaccctattcataaagtacctcattatgtgagcttctagagtgacccgaataccggatagagcgcagcagatataccatactagtgtacgcctacgcacacaatgagtgatgcaggcttgtggcgacaatcaaggcagcacgacgcacaactactccatataactgacctgtgagaccccatgcagtaccacaagaatgtcaatggaagaccaaccggacgggaaagtacgccatgatgggagtacgactatgcacaaccctacggacagcataagaggaacaacgctacccaagggccaccgcccgagctcccccagcagaatagaagtccccactgtagaatccagcccttgaactata

SEQ ID NO: 2499 - DNA, 632 bp, Zea Mays
gctacctccacggtggccagcaaaggcggcgtcgagctccccacggtggaaagctcgccggcgcacggccaaccagcgaccccgcaccctaaactcacgaacaacaaatgctacacgacgcagagagccaatcgaacaaagactgtgatgtcttatcggtgggagaagatgtcagcaggtccgaccatggtgtacggtgggctaaagacggagctcggttgatggcaggggcacgggttcccaacaacgacccaatatctcaagctcgctctccttcagttcaacgttggtgcggctcccacgagctttcctgaactcctggaccgcatgtcgggaacggaacgacggcgaggtcgagctccgctgcgaccggtcccccatctctctcatcacaaccaatggttcggccacggcttggcttacttgatggataagagggtagcagcaccaccatttttataccccatggcatctgaagtccgtgcagagcaagaaacggacgacgaggtttcaggcagattatgctcctgactgttacgacacgggttctcaacaaccagaggatgaggataactctgacgggctaaccccaccaggcggtgatcctaggagcccaggcacggtgagtctca

SEQ ID NO: 2500 - DNA, 347 bp, Zea Mays
tttttttcttctagaacacggaagagaattgtgcattatttctctaagagagaaaaaaggaacagtaaaaaggagggagaagaaccctcttccctaagggaaacactaaaccaaagcaaatagccttccacagctaacatgttctgtgattgtgagacacaaggccaaagaacgagtctaatacaggctaagcaacaaagagcaccaacagaaacttaggataaatcaaccacaacaagcgatccagccagcaaatcctggagtccttttgcaccagcagagcaccataggatgcattcatttgtgattatatgcagtaatattgtgattcttgaactttcaccatt

SEQ ID NO: 2501 - DNA, 374 bp, Zea Mays
gctgtgtgtgcctcgaccccggcgagccgcgtgccgcctagctggtcagcctgcctcgtgtcctacagttgcctgcttgtgtcgtccgtgctgatgcgagaaggagaaggatggagagaagaactaccctatggggcccaccctcatgcaacatgcaacccccacgggtgatcttgtttttcctgttgttatcgtcatgcaacagagattataagctatgcgtgggacccacttgcatgtcttctgttgcacacataggcaccgcatgtagcaaggcctccacgatctgttgcacgtagctagccaattggaactgccccctcataatggatcctagattgtctgtggctactctctgtctggcccgccctccg

SEQ ID NO: 2502 - DNA, 397 bp, Zea Mays
ttttctagtccttcatcccccgttgcggaatcatcccagggcagtacgagtgctatttggaacaataatcatttgcatactttgtttcctgctaacactgtggctatagaccggtatgctgtcccacctccgaccgaccttgcacaagactccggataggtgccacatgctgaggaacctgcgccagacttctcccatgacgtggtcgccaatatggtggcagctggcatggaatccatgtctggcgtccaacagcctgtactggctcaggaaatgtcatcaacagcggtggagccttcataggcaatagcggcggattcattagcatcccctgctccggaccttgcaccatcttccactggtccgttgcatggctctgtgcatggtattgttgtta

SEQ ID NO: 2503 - DNA, 474 bp, Zea Mays
tttgaataaaagactgattaacgcacttgttgttctattccggctgcacccttaggtgacttttgcgcggagtgtcgcacgtgagggtagtctgcgctacctctctcggtgactttggagtggtcgaatgccgaagaccgtcgttgtggtctttttcgacatgttacatcttagtttttgcgggggatttttgcagatatattacatggctctgcctcgttaaaaacctcaccccccgggagaaaaagagtgcgggcctgaataatactgtttggtgaattacaagagtgcgtaagccctgaggatttagacaaaaaaattacggagattgtcaatattccaggaatggtctaggtcttcgtcggatggcgttgttagtctgtatgcgctaggggacgccttcgacttgatgatgaatggaccctcccactttggctccagtttgccctgtgactctgttcgggtggttcggac

SEQ ID NO: 2504 - DNA, 448 bp, Zea Mays
gagctgagggcgcggtcaatttatagagtccgtgcgcggtgatcgcaaatttgggcgctgacgcgcggcggtcggaggtgaagaagaaccaggcacgcgtgagtgcgtgtccacggtcgtggcgagctcaccggcgatgatgggactgttatagggagtcacggtggcgcggtggaaagactcggacacgcggcggacacagagatggcacgacggcggcgagcaaccttatccacggcggtgagcgagtggggatgaattgcggctagccggagtgacttccaagtcaccggcggcgaagatattttgaccccgcgacgttatcgacttatcccgagcgtgaatcacgacgccgacgacgcgaatcacagcggggaggtcaccggcggtgggattcttttgctgcgtccgatctgatccgttgggggcactgtaccatcgtgaactc

SEQ ID NO: 2505 - DNA, 379 bp, Zea Mays
taagtagagttggttaagttagagaagattagcttatgaacagagagatgaagatattagtgctgtgtgactggacataataaacagttaccctcttgttccctgccgtgtgtatgatttgcccggcgatctatcaatactgtggtcgactggtgagtagcacaggacactccctcacgaggcagcagcgcacacggacttcaagcgtctcgtccaacttgcgagtcgctgtaccagtatcgtgcatagggcagtaggcgtgggcggtaggcaataggcatgggcggctgtggttgtgtcctgtgcttgtatagagtagctatcaccggataaacatgtcccgcgtgccctgggtttacgctcgtccctccatcagtcg

SEQ ID NO: 2506 - DNA, 278 bp, Zea Mays
gagatctgtgggatgttggttgaggggtgagcttggggataaaagtcagcctgcgtctgtcgagccctctccttccatcgcatacccacgctcgcgacccctgcaaccgccacatgtcgagctgcaccgttgtgagagagaaaagcgcgggccgcctccggtgatttccgtctgtgcttgcgttctggcctgtgcaagtggccaggggcgtgcgctggaaacttgtgtagctgcgggagccctcaatttgagctgagaacccctggggtctcgggaat

SEQ ID NO: 2507 - DNA, 424 bp, Zea Mays
gaccatctcattcgccggtaggaatcacaagtctgtaaccaaacttatgtgtgcgagcgcgcctcgtcgtcttcatcattcatctcttctgtccaatacgtgctcagactaggaaccaggctagacattcttctcaccattcatgctccagctagaaaataggttcacattcttcccctctttcttattcgtactcaactcacttaatactgagcatattaggctgatcccaacaattccccctctccatattaggccttatctaattttctaatttaaagggccccttttcgtcacaaatgttgtctcacaacgtgctcaaccacagaatcacatttactgtctgactgccacataatttatatttcttatgctgagaacgtataactgatgcacaaaaaaatacatatggattatatataca

SEQ ID NO: 2508 - DNA, 423 bp, Zea Mays
aaaaaatgttttgaaagctgatttgcatgtatatgatcctgatatagtcaatttccatgtaagctggtcctacaaagctaatcttccaccaaggctaaaattaacagatattctttggaggcctaagctgctggggctctaaacctttgatattcagcagtgatttcaaaaccctgagcaacaaacctttgattgatagtccttttgttaactagaggcagggtgccaactcacttagcatacgtcaaagcatccaacaacctgaccagaatttgatatctcccattttctaccaggggtattgtgggcattgaaaacaggcttgagcatgggatgatcctcggcctgcatacctgaccaaggcctacttggatcagttcattgcatccacaactacctcatttgacgagataacgaagatta

SEQ ID NO: 2509 - DNA, 365 bp, Zea Mays
attttgggatgctacactcagcctgcgaatccgcaatttgcttctctatcacttcaatattgtcctgcactacctaatagaattgtcgtgctctatcaatgcttttctaaatgcctcctttgcagattcgtcagggagcaacgccgcaaagacatccaatgatgactctagtgaactaaccccatatgggatgtctctttcagaatttgtggctcggcctgtatcagatgatccagacggttgccttccatgtgtagccattggtgatcttctgcccttgtttgcgatggcgttttgacgaattctaccatgagttcccctaacagaactagtcaagccaccacgcgcagcacatacaatagcaa

SEQ ID NO: 2510 - DNA, 388 bp, Zea Mays
agagtaccataggctgaagctgacgaagctttgctgtactgctgtgctgtgtgatgctctctctgactgacggcggcctgcgacagcttcgtaatggcggcttcggttcgccgcagtccgcggtaacgggtccagcagaccagcgctagctccacctcctgcaacggtcggtgcaactgcaacggacacttaatttagggcgggaaacaagaagagactacagctcgcgttacgtacacgtacggacgtacctacactacaccgctgcgtacgtacgtctgtgatgttggcttccactatctgcgaacggcttccactattcttggccattgttcacctgaacatagttttcgaacacgaacatcctcttctccttgggcatcccaac

SEQ ID NO: 2511 - DNA, 657 bp, Zea Mays
cgcacaaatagcagagagtttaggggtcatttcctaagaaaccagggcccccacggtagatactttacactccgaatgggtggcgagttgattcagaaaaaaagacagggtctctttagaaagattcccaggtcgaaggggtatggatggattctggccattggatcagcacccgatggtttagattagatctagtgcattatgaatccgcggacagcgcaggaccgcccaatcacaaacctacggcctagatctaaagcaaccccgagtcgatcacgatcgtccaatgatggatcaaggatccagatttaatatatcgaagtggtatccgatggcatgatcttgcgcgtcccgctaccaaatcgacggaggcagcacacccacacctagatctaatcctagtcattcgcagagagatcaacggtgggggtgtatcttcttccccagactccacggctgacggcgcatcgccctgcccgacgggacatcaccggcgaggcccccctccagccataccaacagccaaaaccccacataaaacggtgctacacgatgaggacaacgaggcgaaccatatagggtagcgacttaccagaattcgtagcaagagctccctggtcgcgatggaatgcggaccgcggcgcggaggcccaccac

SEQ ID NO: 2512 - DNA, 391 bp, Zea Mays
ggcagaaaaaggctatgaccaagcttatggggttgcagtttcgagtggtgtatagagaagggaaggagaatgttgctgttgatgcactttctcaggtaggccatgcgatggtgatgcattctgtgacagaagtgcaacatgtttggctacaggatgtgttgaactcttatattactgatatggaggctcaagacttattggctcagctggctgttcacagtcctagcgagcaggggctttctttgcaaaatggtctcattcgaaaggatggtttaatatggattgcaaataattcagccttaaggacaaaactcatttcagctctgcatgatggggctgtgggtggtcattcgggcagtttagctacttatcatcgtgtcagacgtttgtt

SEQ ID NO: 2513 - DNA, 688 bp, Zea Mays
gcgcggggaggcgaccccccgatggaggggtcaccatcggggtcaacccagtagaggagtagtgcatggagctagatgtcatggcggtgcaagcgcatggaggtgcaagtggcaagcaacttggaggtgtgcacggaaagggggagcatgcacgggtagagtagagcaccacatggcagtcctccgtgtggaggaggcgcatatcatggcggtgtaggacacgacgtatgggcgcgatatttcgtcgaacaccctggtggcattgttctagtcctcacagtcggtgtagaagcgaagagggagcaagcgaggatgggttggatttggtcaaggcacgacgacacgcttgggtgtgtatctggtacacgaggcggcggtcacgacacaggagcagggcatggccagagacgttggcagtcgcgtggcgtcgttgcgaccagagcacatgtggtcaacggcggcggttgcctatgaggaggcgatccccgtggcactccccagtttgacgcccatcatcagggccactgtttctgcttgaagagaggggaagattagagtagatcgatatgaccgtgcgatggagaagatgtgaggtagaaggaagccaataagggcatttccatcttctcagagagtcttgtatgcgcaaaacgtagataataggcatgaaccaattttttggttgaat

SEQ ID NO: 2514 - DNA, 451 bp, Zea Mays
tagcaatagttggctgctagagcaatcttcctgcgctttgacactcgtggtccgcgtagtgttggtgtgctggggaagcttccctggtaatgcacaagtgctggtggacatagcgtatcctacagcttgggcatactgttcggattagacgggcacgccgcctgctgtatggcctgggcaccgtctgccagcggagtggacatgacgcattaaatgctgaaggggcacatcacctgacagtagggtggacaggcggcgcatcctctccacaataaatgcggaggccgcacggcccagagtccctacgtcatgctccgctcgctggcctacatcatgggcaataagccatgtggtagcattgggccctcggccgagcggggagcggaggcacaccggatagagcccggacacgcatcaacaccggacccatgcctaggtcacggcacttcct

SEQ ID NO: 2515 - DNA, 302 bp, Zea Mays
gtggatgcaaaaggctgatacacttgcttgagaaaaagcacgcagctcctttcttgggggagcgagctctagtgtggtggttgcacagctggaggcctctctcgtcagggctcagaaagtgggtgctgaattattgggctcgtatctgtagtagtgtttggtggtggttgagttgtaagtacgctctgcttctctccacaagctcgaatcaccagatgaaccgcatgtgtagtagtatgtgacatgtcctcactcacctctttaggcgcgtaatctgtcaattgcatagaccctaatctgag

SEQ ID NO: 2516 - DNA, 774 bp, Zea Mays
ctagtactttgttacagagagattaacaagttgctacatagaaatcaaagtttaatgccctgcaaatgaccctgtcagagtgactgaatggggttctgatgatatagtgccacagaaagatctcaggattcagtccccctcaccgccgatgaccttgcgcccagatttgcgccggtcgccgtgattcgtgcttggcacgtagtggatattcacggggaggcaaaaagatctcgcgggggtgaggatttggtcgcgacagaagcttatcaccaagcctgtagccgtgcgacgtggctggatcgccggtgtcgccgtggaagttctggtgacctcagttatgccatgtcgtggctcgttactgcacggtagtaaccgtggcacacttagaattaccatctttgagccattccaccgttgaacgccacgattaagccaccagtgctctcccctctctccggccaccagcgcgccatctcaaattcacgggccactgccctcgggtcctataaattgagcgtgccatcagtttcgctaggtagtcaagcatccaatacaccaactcgtgcctcagatcgtccaccagagctccctaatttgagatttcccccaaatcggtcaagaacaccgcgtgggtgagcacgccgtggccagctctccacaggtccgatcatgccctcctcgctcttgctttagcatccctgtgtgcttgtgatgcttctggacccggccaatcgagctagaacccataggatcatcgggaatgcttcgagttgt

SEQ ID NO: 2517 - DNA, 373 bp, Zea Mays
tgcccttcagcatggaggcagttcggacaagagtctaccgtatgctgaattctcatataataatggttaccaggccagtctgaagatgtcaccatttgaagctttatatggcaggaagtgcaggactcctctatactgggatcagactggagaaagacagttctttgggcctgaacttattcaagaggcagaaaaacaagtccgtataatcagggagaacttgagggtagctcaaaccaggcaaaagagctatgctgataatcgaagaagaccactggagtttgaggaaggtgatcatgtgtacctcaaggtgtcaccacttcgtggaatgaggagattcaaagttaagggcaagttatcccctcgttttatt

SEQ ID NO: 2518 - DNA, 779 bp, Zea Mays
gtgggaaattggatctgcaaactgcatcactgtttttccgcacagcaactttggtaggtctatagtctcttacttgctgctccaaaacttttcaactatgcttctgaatttgacctcaccatttcgctatgaaaatttacttttgcagtgacttgtgtccagttgaatccaaccaatgagaatcaattcatcagtggatccatagatggcaaaatccgtgtgtgggatattcccagatgcagtgtcattgattgggtggatattagagacataataacagcggtttgctatcgacctgacggaaaggtatcagcatgcattctgaagtggggtttttatggctaacttgttatttcagtggtttgtgagattgattttctctgtcttttatatcttgcagggagcagtggtcggaaccattactggaaattgtcgattttatgatgcatcaggtacaaaaaaaaaagtgaaatctctactagcttttcgttaccatttcagtacctctctgcttttacttgaatgatactccataaatactgactataactacatcttgatggatcagataatctcctgaggtttgaaacacaagttgcactcagtggcaagaaaaagtcttctcttaaaagaatcactgctttcgaggtaaatatcttgacgagaaggaaggcttttattgcacagttcacttcatcagtcatttttttcgctcgtatgttctgactgtttattttatttttcatgtcagttctcaccaagcaacccaagtaaattaa

SEQ ID NO: 2519 - DNA, 1267 bp, Zea Mays
aacaccacttttgtaaccatatggctaagtctgattttcagaaattaggttcaactttgggaccttgtaactttcaaacaaaagggatttttctttgggtcaccacatcaatattgtagatctatcataggggaataacttttcttaagagagtaaatatggttgttatgcaaagttaagagaaaaataggagccaatttgggctgtcagtcggtttgctgactgaaatatggtcactagtggtattggtcgaacttgggatcagatttgagctaaatccagaaggaattcgactaggattgctataacaaagataaagaggagctataggactacaactttgctgcagagcctcggataggttgccatggaaatttgagagaaaattgagcccaaacattgactgttaggtgcattgatggcagctcgcgatggtacagtagaccaaaggggatcagatcgccagcacggcaatctcaccgccggcgacctctctgcgcgtagattcatgctgccgccgtcctgatccgtgctcaccagtgcttggactatgcttggggtcacgaaaatattgccgtcgttgataagtgcggtcactaaacaactccgaccaccgtaccaagttgccacgaccactacggataacttcgctggtgaccgccgtcttccggccttgtgccacgtgcctgagtacctccaccgcatcgccgtgaaccccttgtgactctccgtggctcatcggagtgactgccacggtagatgccatagattcacgcgcgccagtgaactcttactcctccgactgccgcgcgtcaccgctaaaattcccggccaccgccctcctgtagtataaattgaccccgccgcgacctccgtaaggtagttaagcatccagccaccaagaattagcctcgatcgttcactagggtgtgcaaattttgaacttcccccaaatccgcacaagaacaccgtgaaaagaactcgccacggccagctcaactcaggtcagtccaagtccctctgttgcttgttctagcgtccctaagccctcctcaagctcctcaacccctttaattgaactagaccgccatggatcatcgagaacgtgctattcctttggtcagtcgcactgtcgccgtggccagagctaaccagttgaccattcttgaaatttaattgggggaaacattcatacggacttggatttggtttcggccgaagttaggaaccagtccttgctccatttggccggtccaggtgctcgccg

SEQ ID NO: 2520 - DNA, 415 bp, Zea Mays
gccgccgtgcaggatcggtcgccaccgccgtacctcggcttcaccggcgttctgctcctagaagagtgggcgggagtagcgcctggggaagttgttcatagcatcgactggatgggagcaccctctgcgcctccgcgattgctcggcagagaagctcctccgccatactaccgatgcgtaccgtgggcagctccctggcgtcgtctctgttcacggtaagctctcccctttcgtacgctttgacacctatgcgcgttggccgatcaggtttgggggcatggctctcgggtgttggcttagccaactccggcgagctctgccaccgtggtgcagggcggcgccgccgcgtgctgtctgcggtaggagagatgggcgggagaatggattgcgagcgttgatattgggattaacggtc

SEQ ID NO: 2521 - DNA, 634 bp, Zea Mays
tttgacatacaattaatattaatttgacaaaatagcaactactgatctattgacattcacagagaaagtagtaccttccaactggcctgatttagagataagcttgtgtgtgtgctcttggtatttatacaggttattaccaactaccgaaatagcatcacacagaaaagggatcacaatgtgtgataatttattaggtgctccaattcttaggttctctcttacacaccatttggcctcataaccaggcaagaaaaccaaccatgcatcaatctctgtgaagttatgatcaaaagcacccgaacttgccatagcagctttaactaaaatatatgcttgatcacggatgttcttaatctgtgaatgcaacatgatataaaccaagggttgcagatacttgtacattgattctggaactctttctgggtccaaacatcctctagattggcctgaatattcaagtaaaaaagataacagggactgttgctcatccatggacagatccaatgggttaggtggtataatcttaaagaagtcatatgatccatcaaaagagctgggcatcaccccctgaaagaaaattagatgttggaaatattaatgatataaactgctaatgaatcacatcaattat

SEQ ID NO: 2522 - DNA, 508 bp, Zea Mays
gccgcctcctcacatttccccccttcccatctcacccatctgcttgtttgatctaccattgctgtgaaattaccaggattggctcctattcgatgcattctagggcacgattgtgcttatgttacccagtttctgccctcctttaattttttatgaagcactgaaattgttagcatgtgggtactctttggatgctcagcaagaatgaagcagttggcaacctggatagatctaactcctaagcatgaagcagttgacaacctagatagatctaatagaattgagtcatgtttttttgtttttaggttgcacagattggatttctttgttcttatggtgttttgtcacgttacaattagccaaatgatgcagtacgcatgcaagcgctacttcgtgctcgaggacaccacgctccgctggttcaagtttgcgccatcctccaagcgtgaggtacccaattgccaccactgaataactacaggcccctccaatcttgtttcattgtttt

SEQ ID NO: 2523 - DNA, 512 bp, Zea Mays
gcgattactgcatttggttatactgaatctaggattcagtgttattgagccaactttggcgtcgccgtgtgtttaatccatggagatcttcggtatggtcgttatacgaaagtgaaagaacgttgattaatgtaccactttgataaggaccgatttgtaagtcattacacgaattagggcgcaaagttcaaccgaactcgggctggcagacaaggtagcaatctaggtttagtgcacttcaccatggataagaatgccaccgctgccgtgttcattgctcggactcacgggcgtgggtaaaaatcttccaagacgtggcacatgtaaccatgaggtggcatcgtttgaccgaagcgtttcacctgggcgctcgtcgtggccttacccgcgcacaagctcgccagcacacatgaagatttttttgaaattctatccgattttggcaacctccctataaattgagcccaagtgcgacttccttaccaccttacgcacctgagtgctagcgcgag

SEQ ID NO: 2524 - DNA, 388 bp, Zea Mays
caggtggaattgggaggtgagattagggctacatggccgtaaaggactatggtttcaccgtgcactaccaattttgggagaggtcaagaggattccacgaatttgggctttaactgggctcactgatgaagatgtgaatacctcgtcgtggtccatgttgctatttatagccacggcggtccggctaacgattagcgatcgcggattgcattgttcacgcatggctaccacgtagagaagaggcacaataagggaaaaacgaggcatgggtgacaccgcggcggaagcgaccgagccacggcgaccgccggtgggatatctccggccacgcatgactgagttcgcgggatggtgccacgtccgaagttatctctccgcgatcaaatcc

SEQ ID NO: 2525 - DNA, 372 bp, Zea Mays
gcaacaactttgttacaggcagaatagcaagttgttatgtaaagatttgagatctaggccctgcaaattaggctgtcaggcgcactgaatagggattccattgtacagtgactgaaagagatcgcagattaacccgactcaccgccggtgatcttgcgccgggattctcgtctttgttgcgattcgggctcagcaaagtaccgtatgtggctcagggtggtaaagatcgtcatgtggatgaacttgagctcctgttcactccggccatcgtgtcccgccgcggacgatcgcgttggcatcaccagcgttcgccgttatccagccaggctacgtgcctcgacgctttaccacatcgcagtgagtcaccataaa

SEQ ID NO: 2526 - DNA, 305 bp, Zea Mays
atcgattggagttgcgcccgtgatttctaggacgcgaacgcgaggtcagttcgagcctataacctaaggagaccgcggctacttacatgcatctgggcaaggcactggggcggcggatgcaaccccaacgaccagcgaaatctgcgcagtcactagcggcggaaattgcgccgttcagctgagaccggttcagcgtcgagcgagtggggaagaaggaaacccccgacatcctgggcccgcatggaagtgaaggaaacacggccgaacagggggtaaggggctgacccgtgggtccaaagcgtcgg

SEQ ID NO: 2527 - DNA, 444 bp, Zea Mays
attgtgcctatatcgattgttctagttttgaggcaaataacatcccacggtctatccgttacctatccatttccatgcaagatcattgtgctcagaatttcgaggaacaaatgggaaaactgaaagaaaagatatacattaacaatttgcggagtttgatgatatttggaaaatacattatgttacatctgctcaatattttaagggacacatttaaggaaataagacgtcttcgtgttctatctatattcatatactcccatagttccttgccaaacaacttttcagagcttcttcatctccgctacttaaaacttttgtcaccttattactcagaaatgtcattgccaaacacggtctcaaggttttatcacctgaaatttctagatcttgaacaatggggaagtgatcgttctttgcctaaggacattagccgccttgaaa

SEQ ID NO: 2528 - DNA, 1654 bp, Zea Mays
ctgtttcttttgatcttctgtatgtttgcttcattatggaaaggggtcgtgtgtttccatgttgcgttttgtgtgtggtacgtacaacgcattgggccgtcttggttcctagatcttttaccttactcacttcagtgtctcaatcatttaacgggcaggtaatttctcgtgaacgcattccgctattgactgctcgccctgtcgagcagattgagctatccaatatccatttagctcgacacagtgaagaactgaagatacacattgggcttgcttgtgttccgtctctctcaaacatcctgttggtgtgctgtgaaggtctgaaggtcacataatccacttggctatatgccggggtgggtaatgtgagtcgggcttgataaatgcagacttgttaacttggtaattagtcaaatgaaactcaaattctttaatgacttcttttggccatttttagcctcagcttcatataatgtagctggacatttgtgcttccttccaaaagttccatatttctttgtttatttaaatcaacgtttttagatgggaatatatagctgaacatcttcaaactgtttacataatatatctgcattgttgttgtgctgatgccagtagaattaacacttaacaagtagtatctgttcattactgagttcatgttttagtgccctttgtaattggcaattgaattgcaattggagttaggcatgtgtaactgaaatgtgcaaactgccacaataaagttgtgacatccagctgacggaaagtttgtcttttcgtgcatatactctcagtaatcatcactaaatttatcaggacttaggagttggtgttctcttgtaagctgccaatttatttgtttcttatgtcaacctatgaataatgcacacttgtcttcttccacaattaggccattattgcagaatcttttctgtgatctattgtatttattattccattgagggtttgattcactggtctcttgcacagttttgcaacaagaatgggggcaaaagtagaacgggaaagttatatgcctggatattatgccacgggggatctcaatttggaaccaaatggtagatggtctccatactatgaggagatgacatcaaatgatcagttatgcaatggcttcacaacaaaaccaacaaatgactattcagaatttgacaaagaaatactcaagcatcaaatacttgaacatgaagctgtgtttagacaacaggtgagtttacccaaattctaaacaacacagcatatcatatcataattaatttttcttatcatctgttttttttccctgtcaagcctcacaacccactcgctatccaggtgtatgaactgcaccgagtttacaaaatacagaaggatatgatgaaacaacatcaaagcaaagaggtatattcatacccaactttggcagttgcatcacatacaaattcaccatcacaagtgccacaaaacggtgcaaagatgatgtggcagatgccagttcctccaatgtccacaacatacaggaaagctattggagagcataatgatacaaaccagtcctccatgaagttccttagagaaggcagtgtgcagtcctcaccaaatggatttatatcaagtgatgttggtccaagaagcagacaaggcacttttg

SEQ ID NO: 2529 - DNA, 646 bp, Zea Mays
ttcgtatacccagactattgctatccctcgcgaaagcagggaaagaaaagaaaagttgctgcttcggccatctctgctacaccgaagggaaaaagatcagggttttgacacaccggcctaggtacattgaaacggccagggtgtcgaagcttgccgaggggacctcttccaccgctgagctggaataccctgctcctgctggtgccaagggagaatcaactgaagtgccgaaagcaatgggataggagaaagccgagccagccgaagcgccctgctgaagccaaggagaaaacggtcgaagaaccagaactggaggagtcgacagggctgccaaaaatcctgagcccgccaccagagccggagttgccgaaggtatccaaagttcctgcaataagtcccaagaggaggaggatggctagcgtgctggacgctgtcttggagtcgacaagggcaccaactccttcctctgcaaaggaggccgccgaagctgctacaactcgtgttgaagtcgaagctgggccctcagtgcccatcgaaacagggcctgttgaaactattgaacaagatactgaacaaggaccttcggatgccactctgatcttggaaaaagaaggcgcatccaaaaaggttaaatctcctactcccg

SEQ ID NO: 2530 - DNA, 287 bp, Zea Mays
gttggtgtcccatttcctgtttgcccgttgactgtgtagtgttcttcagttggagttttatcgtatttggtcatggattacttaggcctagacacgtgagaaaatggcttgctgtcccattccctgtaatcctgttgtagtgtttcttcagttggagttctcaacaaactgtgtaagatctgtcggtcatggattcgttctgttatttgggcgctttttcaccaccaaacaccaccgtttgctgatcagtattttcttcttggctgctcagcatttgtgtgcagttc

SEQ ID NO: 2531 - DNA, 399 bp, Zea Mays
gtttgataaatctactgttgcaaattttccttcgcacgaggttgaattgggggaaaacacgcataattcatcggctacaagttgtcacgaccagtcacaacccctttatgggatgccgatggacacataccctgagcaaccacaacctcctatgcacatcagcaataaattagccaatatgcacatgtccggacagttcgcacgtgagcgcggaccgtctgggccagcaacgaccagtcccatttttaatgaattaccgagatatgcgtccgagccgccacatgctacacaagccctaaactacccagtcagacggtctacatacagcgatagaaggtcctcatacggtcacggacggtcccgccatatggccagacagtccgcgcacgcagtcggacg

SEQ ID NO: 2532 - DNA, 608 bp, Zea Mays
aacaaaaccattcttatttcatttgatatacaattattcagttaaacaaaatataaacgtcgcagggatctaaacgatattaactatagaaatcgaagggtagctaacaaaaaatagatctcgtcttctaccttcagcacgtggccacgatatatggagcggatcgacggttttaacggtgcggacgagctaggcgcagggacggatcttcctagcgatgatgacggtgtttggtgtggcgatggcgatcatagtgacggtacgagctccgcgcagatagcagatagcatggggtgtaacgagctccagcggacatggcgctgatacatataggccggggaaggagagaagataacagggagaggaaacgaaggggtcattgcaattaatggctagtggagagaagaagaaaaatgggaacaacgatttacgatggtggcattctccactgcggtagacgagagggcggctgcgagtggaagagaaaacggaaggccagtgcgtggttagcggcggcgttctcctgtaacgtaaacgtgagagccacggagaggcggagagcaggcagagcataggacggtcctgggccgtggacgtgcgtgtctcgt

SEQ ID NO: 2533 - DNA, 1120 bp, Zea Mays
tgaaatgcaagattcatatcaagacttaaaagaaaagttggcaaggatggagaggacttataatttttaattcaacttggttaactagattttagagtataatacttagtgaattgcttaccttaagggttcaactacctcatgttggtcagacaagatgtatatgattaaaaactgatggcagtctagttagggtgatcagtatgactcatatagtaggttgctcgatacttcagttgacaagcagagaggataacacctattcttcaatgtttaatctcgttaagaggacaaaagcttataatatctatttataaggcatggtagtcgacaaggctggttgcaatgtacttgatctttcagtggttgcagtagttctctagtgaacgtgcaagcacattagttccactaaggattcttggtgaagctagatctaaggtgtccgaaaaacgggcagggtatgaatagggttggtagcatatgtacacaacaaaatgacacataagcataagttgcttacctatgtcttggttatggtgaagctaaatagtaactccaagatccgatagtcctagaatggatccttcaacttgtgtagcttgcggtcatgtactattatagagagaatgaccctaagactctaacaaaggtcacaaccaccaccaagattatgcaagtttaagcgaccaaggattatgatggaacaagcaagattgtaaagggaaaagcataggacgacggagctatactagatggactcaagcactaacactaatggtggccaaccattcaagggtccactagggaaggtcttcactcatggaaaattctaatgtggtttggttggttgtgaaacacaatgctaggtgaaacaatggctatgagggcttgaactacgatagagaaattggcatgcgttctctctatgaatgatagcaagaagaatggaggaagaagacaagttctaggaggaaataatggtgtggtacaattacataactaaagcagtggggtgtcatacacgacgacaacacatgatatgaagcatttccttgtgcacatgggcacaacatggcaaagaggaaggatatgtgacaacatgtggcactaaagttccgag

SEQ ID NO: 2534 - DNA, 860 bp, Zea Mays
aatacttaaccaagaaaagagcccaaacttcaccaaaatgttcttctgaatatttctaattttgtgtaaaatttttgaagtgatttggagttcatctgatttgtatttgaaaatcgaacttaaatttaaatttagaaaatggaaaaagataaaacagtaactcgagtcgacccaccaacattttggcctagaaccatgcctgcgcccaccctcgcgcatgtatctccctgacaggcgggccttgtctgtcggcgcgctccacacatgctcagctgaaccattgatgcctcgacccacatgtcagcctcaccggctctcctagatctaagtcgctaacacaagtactccacctaccatccctaatctagtgccccctctctactcccaggtgcacgatccccgctatcgatcctgtcgttcctcgcatgagcaccgacactaaccccatcacccgacaatagatgtgatggatattcaaggcagcaatttctcccctctttcctcccctaacactgtgcaattcaaggacgtggactcaccagtcattcaaccgaagcaccgtccgcgctgcacatgctgaagcccctgtcctcaattaaatggtgcatgggtataaatggagaccactgacaccctctgctccctcaactcaaaccccagccacccaagcaccctctcctcgccaccagtgctgccattgtcgcttagaagcctcagtgcccgtgttcaggtcacactagagtctccctaaccttcccaccgatgtcaccagacctgccagagctagaggagtctacaacacaacttcttcagagctctaccaacctcgatgatgagcaccatgatgacctgacccccgc

SEQ ID NO: 2535 - DNA, 475 bp, Zea Mays
gattgtgttggaggtggtttcggggttcggggacttcggctgctggtcggatttctcaccggagatccacaccgcgacgtgaaccgggagcttcagacaataaaacccccccggtaagtctccaatcgggtttgttttctcctcctccttagaatagcacgagattcgctagaattgcgccggtagatggtcggaattgtcaaactccggcgtgggattgctgttgtctggggagcggatgcccctgctcggcctcgggcgcggggtaggagaagaactccttgccgtgcgatcggattcgtgcggctgggatttggtttgggttgtgattcggccaaatccgatatccgccgttggatcaaacgtggatgggcgggattataggattgtataccccttcgttcgggccgtcgatctcaaatcggacggatccaaggcgatcgcgtgtatttaaaatgtaaaccgtggatctctg

SEQ ID NO: 2536 - DNA, 654 bp, Zea Mays
acagacactgggagtcgaggatttcatccagtgtacacactccttcacgaggtgcgccatgggctcgagtggcaggtagcccagtggtgtgcacctcctcgcgaggccttttctcctagggcttgtccggctactggttcatgtcccgctgtggcgcggattttgtgcctccgatgaggtcctcggcccgctcatccatagtaatgtagatgtccgcctcctagaacaattgtttggaggtggctggcaccttttggagtatggctcggacgaaggctgagtcattggatccccgatagaagtcttcaattacggccgcctcagcgacttcagggatgcggttcctcattatttgaaatcttttgaggaacgatcgaagggtctcatcattttgacgcctgatggatttgaggtctcatggctacaccgacttatcggagagagactggaagttcgcgataaaccgacgactgaagtcactccaatcatcattgcagtgccgaggtaggtgtcgaagccactgcaacatgtcttgccctaggacaatgggcaagtacacagtcatgacgtcctctattgcccaaacagcctgggcggcggtcatatagacagccaaccagcctcctgagtcgtgcataggctcgtatttgtcga

SEQ ID NO: 2537 - DNA, 432 bp, Zea Mays
aacttgctcagcgggaaccgaagacctgcctttaagaagctttggtatataacaacttcgttttcctctagagcaggggcagtactgtctcctccaactctgataatagacaagtcacgaaaatacctccccctcatggcatcaacttgactttgcttgatggtcgatttaccgaagatagtatggcttgggtgccatggccgatcctcagagtcttcatctccactttctacgtcatagctatcactgtcatcagaatcttcggataaaccctccaggatatccttggtaattttctcagtatttgtttttgccatggattctataaatccagcaatgtaaggatccacaacccttttctcttcaaaaagctttgtctcctcggtcgccttcttctcttcagtcatctttttctctccactcatcttcgtc

SEQ ID NO: 2538 - DNA, 339 bp, Zea Mays
gccagatctttcacggaaaaaccagaagggtcaagctcagtggaacatgaattgtcggtggtgaactaacgaacagaaagaagattatgagtgatgtgagggacaatgagaacgtcgttgaggtagaacagtccagggagaaccgaggcacctactgaggtgtccggtagagtggaaccattcctaatgacgatcgaagtggggtggcaggaatgaggtgggtgagaacgagataacatgcctgctgtggggtggtgttgtaggatgcaccggagtcgatgacctagtcaggggagggtggagccaacgccatgatgttgtaggcggtggcaagggagg

SEQ ID NO: 2539 - DNA, 379 bp, Zea Mays
ttagagttccctccaggccccctctattgcaagcaaccaacctccagccaatgactgttggcattgtggagaccccagtcactacaagaataattgtcctcagttgaagacttccgtgcctacctactccaactcggtgaatggccccaagagtgccccagcacccgcctccaaggaaccctcctccaacagccagctaagcaagacccagtatcatggcagggcacaagtaaaccacgtcgacgctcaagaggctcagcaagccctgggagtagtgctcggtgagttcctagttgaatttactcccgctgctgtactttttgattcaagagcatcccattcattcatagccactggttttgtggaaaagcatggcatt

SEQ ID NO: 2540 - DNA, 627 bp, Zea Mays
ggcatgtgctaggcaacagtagcatcttgccaggcaacaaatagttttctttgtcccgcgttgcaggcacacccacctagcttagctagctcttctgctctgcgtgaatgtatgtatgaccacaaacagccacgaccaaagaaagtaaaaagaaaagcaagaaagaggatggctggttctggttggctagctagcaggtagcagcagcccatgaggccggccagctctgcatgctccaagcattcacttcatttccatgtcaatgtggtggtacagagttactgcacaattcacttttgtttggcaatgcaatgtacagtggaggcttcttctaactgctactgtactagtctacccagcaatggcagttggcgaagtattgttgttgcgatggcaatggcgattggcaagcaagcgaactggacatcctcagattaatgcgctaaaagtagtaacagtactaggtatacctgcgctggggtcgtagaatctctcgatgagcgacaccaccgtgctcttcccggagccggagctgcccaccagcgcgatggtcttcccggcgggcacgctcagcgagaagccgcgcaggatggggacgtccggccgcgacgggtacgcgaagtccac

SEQ ID NO: 2541 - DNA, 349 bp, Zea Mays
gcgacaatggtgaggtgcactggtggggcatagatgagaggggaggagtgcgtgggaggaataaggagagtgaatgtgtgactggagagcgggcctgggcttgaaaggaatttgaaactatggttatgggcacactggacagccaataggacaccgtcccgtgcacaccgaacaacctacatagaggtggtgcaaaactaaaaccaaatccaagcaccagacagtgtacaatacaacgtccagtgcacataggactgtccggtgatccaccagtgtggccgaacagagaaaattttgaaaatcttttcagaattgcacaccaaaccaaatcccaacttataagcacaca

SEQ ID NO: 2542 - DNA, 397 bp, Zea Mays
aaaagatataattcagcgtccaatacaatcacacttcgggattcgaaggccctcggtcgtgaatagtgataaggcccaagcttgcccggtagccttcaactatgtgtgtagctacattggcaccagagacttggtccaggagcacatagctttcaaggtatggccccttgttaatggatgggagatgctgaaggagaccactaatagttcaagtgaaggtagtttaatttatttgaaatatacataccgctacagaagtcagttcggggagccagatgacgaatggctcatggccattgatgcgaccactaacgatttgttgggggcttatacgaaagccgatgacaaagccatgaatattgccttcggcatctgtggaaagaaaatgttgaataga

SEQ ID NO: 2543 - DNA, 368 bp, Zea Mays
cacgtataagtattgtttgaagcaagctccatgtacctaatatggttggtttgcttctcacatcttgtccatgagatttgttggtgttcggtctagcgcgtcactcttactaccgtcatggctgtaacttgcatacttacttccatatattgatgacactgtcctcgctacccccattagatgctcttctccaacacatcattcaccccttgctcaagaggtcttgatgaaggatctcaatcaccacttcttaggcatgtttgttagcaggcgtgatggtgggttgttttgtctcagcaacaatatatatgcaggatattttggagcgagttggcatattcaattgaaatacttattctacccctaat

SEQ ID NO: 2544 - DNA, 414 bp, Zea Mays
attgaacacaagtgtgttcaattgggagatttgaagaggaaggccattacccaggggcagggtagcagcagtgttcgtcctcgctacgttccgccatagggtacaccaactcgtctaggaggaggaccacacccagctcagtacactccacaggggtctccacggacacctcccactcgtcaggctaccaccactggcaccccggcgaggcctacaggacagaagactggccctacatgcttcaagtgcagtcaggttgggcactatgctaatgcttgtccggtggggaattctagtacaccagctcagaacaagcaaaagactgctggtaagggatactctattgccagggttaatcaagtcagcgcagatgctactcctgatggtgctgacatcgcactcggtatgttttat

SEQ ID NO: 2545 - DNA, 984 bp, Zea Mays
ggtggcttgcgttcatcatcgttgtgtgccttcgccccacaactaggcgtggacgtggtcaccccgtcctccaccgtggccctccctatcgtcctaccgcggggcgctggctgctccgcgaaaggctcaagcctggtggtaattcctgagaaaatgagttgatctggggcagggcggacgttgtggcacatatcatgacactggcagaagtttcccctaggcttcccatgtgggggaaattatcccccgtcgtgttggctacgagacactcctggctggggttgcaactcgcctcgctaggtgggcagaagatcccggcctatgatcctgataggaggatgtcaaggaatgaatcccacgcggggtccaatacccctacgacctcggtatgagcgggtcgttgtgagccttgggtcccgcactcctcctgagggggaccgagatggaggtcactaagacctctagcgacgttgggtaggttggcgtcaaagggaccgaagctttcgaggccttggtcatctccccttcattgttgacgacgaaatacagacccccgaaacggatggctgttctgggggtctagaccgtgctgctgtcgttgctggccatccaaagattggagaacttcgtcgaggaacgcgcaagtcccctacctagcacgccaattgtcggtgttcgaactcgctccgacaaataaatttattgtgcgcgttttgggcttcggacggtgtgcatggtgggctcaagatttatactggttcgggtagaacgtccctacttccaaaaatcgatggcttacgctactgacactattgatgatcaaagcttgtagtaggggttacaaatgggcaagagagagagaaaaggctctcaagtctcttattcgtggtggaggtggttataaggtggagtcctagctaagttttggcttggcagcggggcttcagcctccttgtcctcctcctcgtctggggttcatccttc

SEQ ID NO: 2546 - DNA, 393 bp, Zea Mays
ggctggttagggtttcaagaaatgaagattgatagactacatgtccatgtcaacacattagaaccgacgagcaaatgggccttggtttggccatgtgcgaccgataaaggtaaaggtaaaaatattatcattagtgaccctcgcatgctaaatatatcgcgtagagtgcttactcggaaggcttcgaacaaaagaaagaacggaggcaccgggggcaagcacgatcgaacacccgattacgatcacctatcttgcgtacgctggacagtccaagcactaagaccagacagttcgggacaagcatggatagtccggctataaaggccaaacgatccgtggacaactagaagcagtagcgacgtcaaaccgtcataccacaacgtcctaaaatag

SEQ ID NO: 2547 - DNA, 610 bp, Zea Mays
gcagggagcaagctgaatccaggtgcagccacgtcgcctgtttaatattaggcacatgatcattgtcggacgaccaaaaatacgtattctcacgcgtctcctctaagtaatgggatagttccagaaaactttcgtgtcatctttgcagctccaccccttactccgccgctactcccactccccattggcgtcatcccttctccacaccgcctccatgtggacagtctgatcgaacgaaccaacgccatcctcctcgccgtgtccttctcacccatcttctctatcgtttgcctagtctccggcgcacgcatatcagctgttgtggagcttttcgccccctccgctgacgaatctttcggttcgccgatccgcccctcactccgccgccgctcccactcccactcccactctccgagggcgtcatctcttctccacgccacctccatggtgctgcctccatggaacccgatgctgaatgagtatggatgtgcaggtcgccgcaccgctgctggcaggaggcgtttctgtacgacgccgatagtgacgcgacggccgatacagatggcggccatgctgagacgagaagcacaacaacaattagtgtgtgtgt

SEQ ID NO: 2548 - DNA, 416 bp, Zea Mays
ttcacagccgtcggcagccctcaaagcaagatcggggcttcacgtgatcaagcgaaggcgtttcgtggtggaggaagtgtgtgggagttctctgcgacactgcaatttctcgccgtcgacctgcgctctgccgcagatccgctttcgccgtgtatggacgctctccgcgccgagacagccggtaagacctactccagcgtgctcgccatcaattccggaacgcgtagaaactctcggacgttgagatagtgacttagggcgccgaattgttgatcaccggcgatgtttcgccactggccgttggcggcggcgccgtctaacggtggggattggggagaatcacgtgtgtcgtccgatttcaatggacggcgtagattagatgctgagcgtaccgtttcgggcgagcgcgcgcgacc

SEQ ID NO: 2549 - DNA, 442 bp, Zea Mays
gtggaaacctggacggcattacaacattcactaacaatacggccatgttttaattacaaacttttaagcatatcttcatgtgtcacaccgctggtcatcaggaacaacgatagtgtttccctgcatctgtaaaaaaacacgtcatataggcaatatactactcactctgtatcaaatcagaacgtcctcctcgctgctatctccttcttcaacccttcttctacctgaacatatctcttctctccgatattcccttctaggtgctaacatggagaagccgatgaagcgggtgatgaagacccccctaccagcacaaggtcctggagaagaccagatttgtgattgatcttggttctgttgatgttcgtcgtcttcatgggtaagctgaaaggttccttctctgttttgttgtgttcagtttggtgtctaaagaggcatgtag

SEQ ID NO: 2550 - DNA, 657 bp, Zea Mays
cgcgccgcgatccacgccggcgttgtgattcgtgctctatggcacgcagattactgcttgaggtaaaagatcttggcgttgggatgagctcgagccctgttgccgctcagttcgtcatacccacttgcgcggcgacgtggccagacaatcatcgccgtggtggtcgtcgtccttcgcgattgcgccacgccgtgaccatttcaccatgtagctataaccgtggcaagcctagagttactgcccttgagccattgtaccggcgggcgccatgacgcattcatccagtgaaatattccccccaccattgtgatcgtcttcgtctcaaattgaagaagcacatagcggattcctttaaattgagcgctaccctcgctttgcatctctattacacgctcataccaccctcagttagcctctctcgtgcaccatagcccccagtcaccggatttcccccaaatcggtcactcgcgccaccgtgaggcatccttccatggtcagccatttccagctctgttcatccccctatgtgacatgttttagcatccttaaatgttaacgtagctcgtcggccgaactgattgaacgctaccgcgatagggcttcgagaacatcatctcgccgccgcgaaacacctccgagagcgcacttacgttgacc

SEQ ID NO: 2551 - DNA, 387 bp, Zea Mays
aaataatcctctctggaaattgaagttaccgcttaaaattaaggtttttctgtggtatcttggtaggggggtcatcctgactaaagataacttgacgcgtaggaactggaaggggaataagctttgtgtgttttgctctaatagtgaaatgattagacacttgttctttgagtgtcatttcgctcgtttcatttggagggcgctgttagccgcttttggtttgccgatccctcgggatatggagcacgttgctgggaattggttgatgggtttcaattaacatgacaagtccctaattatgacgggggtggcagctatggtttgggctctatgggttagcaggaatgaggtggtttttgatcatgataacccgaaaacttatatgta

SEQ ID NO: 2552 - DNA, 357 bp, Zea Mays
cttcgctccaccgcggcgggcgaaccctaggggatctcgccgtcgttgacttcatcgcatccaacacagagaccgagccgccgtcgccttcagtatctccaccgcagagacaaagaccgagccgtcgtcgcattgatcttctccaccgcagagagaccggaaatcgagcggtcgtcattcctctccacaaactggttagtcctctaccgccatctccttcattttctccgttgcattctagttgtcgtcgtaatcttctccaccgcagggagacttcctcctgttcgcccaactccatttgaaggaagcgccaaataattgcattggaggagctgttttcagtaagtccggaatccc

SEQ ID NO: 2553 - DNA, 643 bp, Zea Mays
agaaaaacatccattgctaggcaattccttgaagctcaaacctaacatttggtcaggctcaagtgccgatccgatactatttaacgaacacccaaacaaacctgatgcagcatcaattaaaatgcgttgtcaaatctgaaaaaagtcccctcaaaaaaagaatatccctaggctcattaatgaatgaacagttcatgtattgcaaatcgtaagatctatctcccataacacaacaagcaaataataaactaatgagtaatgaggcaccaacaaagtatttaaatatcaagagaacctatttaagacgacagggcatatcaaaagaaagtaatcaaccaacaaggcactaacaaatcatttaaatgtgatgatagcgtttttttaagacattggggcgtccattgcagcatagccaggtggtacaaacccaatagaaacgctctagctacgccactagcttatcaatctaagacataactagagcccttcaaaacaaagatgagaaaatagcatgctacagggtcacatctgacaactagacatgtccaaaaatcgggtcgggtcaaggtcgggggacatttatcacggctcatacccaacccgtgcctagtgtcaggtcagcccatgcctccctgtttgacgt

SEQ ID NO: 2554 - DNA, 343 bp, Zea Mays
tgggaacttaccgtgaccacactaggcacagaatagcccataggccgataagtcatgcatggagtactggtaccaaacatgcattctaaagtttgtcttcgtagctcggtcatacgtccataccccttcctcccaggcacgtaccaattcatcgatcaaaggctccatgtacacgcccattttattccccgggtgtccgggaattatcaacgacacaaatatattctgcttttgaaagcacacaccaggggggagattgattgggataacaaacatgggccaacatgtgtacaaggcagcgctcattccatagggattgaacccatctgtggccaacgcaaca

SEQ ID NO: 2555 - DNA, 562 bp, Zea Mays
ctctctactctttatagtttgtcttagctcaatcttttcgtccctcctttccttactatatccataccgatgtcagaccttggaatgtcaactacaagtgatgtcactaagtgcaaagaatacattatgttggcaactccatcagctaaggatcagatggaacagttcaagaaggtgcatgctaagtttctgcaagcaacatctcaagtggtagctagactccaacaagttgatttagcagaatttatagcacctgagcagactaccgataaccatatgacatcaaccacaacatcaccctcgatagttgacttagaaaagttgttacatgcacaagctctgataatacagaaagcatctcaactcacctcctcataccagcaagtgttggcaagtcgaaacgtcactagaaatgaaacaactaatgaacagacaaaaaaggatgcacaccaacacacaaatgatcttggaacatgttgttgttgcgagtactatggaattccttgtcgccagatcagtacaaacgaaagtgaaactacaaaacagaataatcggattttat

SEQ ID NO: 2556 - DNA, 457 bp, Zea Mays
aaagccgaagaggctcgtaatgtacgtgttgcgttggccacagatgggttcaatccctatggaatgagcgttgccccgtacacatgttggcctgtgtttgttatcccaatcaatctcccccctggtgtgtgctttcaaaggcagaatatattcgtgtcgttgataattccaggacacccgggcaacaaaatgggtgtgtacatggagcctttgatcgatgaattggtacgtgcctgggaggaaggggtatggacgtatgaccgagctacgaagacaaacttcagaatgcatgtttggtaccagtactccatgcatgacttaccggcgtatgggctattctgtgcctggtgtgttcacggtaagttcccatgcccagtttgcaaggaagctcttaggttcatttggttgaaaaagggtggcaaatattcgtccttcgataaacatcgacaatttcttc

SEQ ID NO: 2557 - DNA, 748 bp, Zea Mays
tgcgccccaaccaagaaatcgccaaagagggcgtgatgggtgatgccatcgcattgattctcggattcacgtcagcggtgagctctcggggatcgacttggaacttcaccagaccagtagggcaacgctcgaagccgtgccaagtcaggaggagggcgaggtaaagcagaattcttcaccggacttggggtgggccgctctgccgcaccgtgctgtgggtagggctccactcgctgccatacaccgtaagaagacctctgttgagtttgcttttgtctctactatgagtagcgctagggaatcaaagtctgaacgtttgtgcgcaaggatgatgaactccgacgatgtctcctccgtggctagggtcgctccgtcgatagggtgggcgactgattaggtgggggggaaacaattggcatcggacgttgatctcgttacgtgtgggcgagattataagtaggataacgattcacccagttaattcccagtcgtccgatctagatcggaggtgtgtggataggttggccttaattagttttggacccttagatcttgatctgatgtccatgcttgcattccggttcgggcgcggctgatttgatctatgcggtcggatcatgatcgaacgactcagcccgtccgatacccccttcggtgagtaatttttataaagagccactgcccttttgttatatgaacccgcattccattgcaacagtggactgagtctaggaaaattttacacgct

SEQ ID NO: 2558 - DNA, 968 bp, Zea Mays
ttgggatgttacaaacctaccccacttaaaggaatctcaccctcgagattagactggatttgggaaaagataagggtattccctcctcaagaagtcctcactctcccaggtggcttcctcttctcctctgctccactgaactttacagagctttacttctgaggtgcgggtctttctgactgctgaatcaagaatctttactggtttctcacgatattgaagatctttctgaatctgcactgtctcttcttcgaggtgactttctggtgcttgcaggcatttgcggagctaggatacgtggaacacattgtggatgtcggacatggattctggtagttccaggcggtatgctgcgggtcctaccttgccaataatgggatagggacctacaaaacgtggggctagcttccctttgacttggaacctcctgacaccacgcattggagaaaccttgaggtagacgaagtctccttcctcaaatcggagttcccttcgcctgttgtctgcgtaactcttctgtcgactttgagcttcaagcaaccttctgcggatcagtgcaactttctgttctgcctctttgacaaaggcgggtccttctagtgccttttcccctacgttggaccacatgagaggggtctggcatttccgtccatacagggcttcgaatggtgacatcttgatgctggactgatagctattgttgtaggagaactctgcgtagggtagactggactcccaacttctatcaaaagctaatacacatgctcttaacagatcttcaaggactttgttgaccctttctgtctgcccatctgtctgagggtggtatgcggtacagaaatctagcttggtgaccatagctttctgaaggcttgtccagaatttggatgtgaactgggttcctctgtctgacactatcttccttgggatgccgtggagtctgactatctctttgaggtaaatccggg

SEQ ID NO: 2559 - DNA, 500 bp, Zea Mays
cctaattccaagaatggctacccgatttgctctagccacggtgacagcgcggataatcaaaggaacaacgtgttcccgatgatccatggcggtctagttcaatcagaggggtcgaggagcttgaggaggacctaaggatgctagaacaaacgactagagcgcttgaacgaaccaggaataagctggccgcggtgaaggtgtctctgcggtggcggaaacttagtttgggggaaatccaaaattagagctcttgggtatacgattggagacaatacttggtggcttggtgtgtgattatcctacggaccaggcgatgtgctcaatttatagaaggcaagagcagtggctggtgaatttgggagagacgtgcggtagccggagaaacggaaagttactggcgcagtggattcgtgtcttccgtcgtggcaaactcaccggcgatgagcaaatatcgcaagccgagccactgcgacgtgctaaagtgctttagcacgtggcgc

SEQ ID NO: 2560 - DNA, 869 bp, Zea Mays
aaatttatgaccagcttgttgagagcactggcagggcgcaatacttcctcaaccctggatagaacatggtcgctgcagccatgatgcttcagtccatcctcgagcccgacgaaccaaaggcaaaggtaatgtaccagaaccttcacaacctagtggacaaggctatggtgcagcaggttgagatcgatcggcagacacccaccgatgcggatagctatggcacgcgcaccgcgagtgcgctcgtgcacagggacagtgtgacgctcaggggttccatggcgtagggactgctacggtttatggaaggagagagggggaggggatccgtgacgacctgatatgtatatatatagaaagaataatgggtgggagatggttgtcgattttgtcctggatcacgttgggaggcggggtgaggctaggtggtttcagatgtgtcagggtcagaagcacacgtaaaacggacgagttcatcggcatacggctggccgcgaggtgacacatggtcgcgagcgcgctagcgttgtaggacacacaacgcaatggggaagacaagacatgcgctggattccctgccttgtgacaaagcttaggtgggggttacttcgagcaacggtggacgcgagcacacagtgacgaacgacagttctccggcgaggttgcaagctcatcgtgtgcggcatcgaacttgcaagcacgacgtagtctatttgtgcaggggcatggttgtgctctacagtgcataggaactggcgaggcggggttgctgtgagcggtgcagtgagggcgggcaggaggttgcacgcgcggtgcatgggacgttgcatgatgaggcgaggcgaggtggagttgatggaggtgacaatgaa

SEQ ID NO: 2561 - DNA, 450 bp, Zea Mays
tagaattcggcagaggacaagatctcccactgcgaaggatcgatgtcgtatggccttatcatgatagtgcctcagagtttgctagtacctggctgactgaatcattgtattcaatcgttcttcttccagtatatcaacatcctccagtctagtggcttcagcttcagctatgttttcgaagatcagccttggtgccccaaacctgagattagcaggtagtactgcctccgaaccatagaccatgaagaagggagtatttccatgcaaagctcggctaggttgagttcttaagctccagaccacatatggcaactctctgatccacttccctgcgaacttttcattcttgtcgaagactttcttcctgagtgcttccaatatcattccattagcccttcctacctgaccgttggctcttgggtgtgctactgatacatatttgatctggat

SEQ ID NO: 2562 - DNA, 1202 bp, Zea Mays
actcatgctcatcttttccaaaacgctctaaaagcacgcggcaaaaaacaggccaactagataagtgtgaatgttcgtccagagatgaaaaccaccgagcagcccccccaacaaaatgcatcgacgctaccctgatccataggtgcggttctacttcatacatgtcaaagtagtcatggctgcgacggatccataatttggggttttcgccatcaaacacaggaaaattcaacttaggcaaacgaccacgcatcgcgccccccatggttggatatgacagatcgcccacatgctgatggaattccgaagtatgcacagctggagaacgaggcaatgatgaacacatacccttgaccggggtatggaggagggtggtgaccgacccaaaaccatcctcccggtggctcgattcgacgcggtgcccatggggcctgttggctggaactccggcaggttgttgctcgacagccggtggagaaggagcgaggatgcccgccatagcggacgaattgtccactacagcacgctcccaatttttggagatcttgcccacctcgagtcgcaggtcatccatcatcccttccatgttcatccgccaatcttccagcacaccagtggcttgttctagagcccccacgcagcggtcttgtccagtggtgaactccgagaaggtcgcgttccaacgcgactcctgctcggccactctgcgatcccacttggagtcatgttcagagaaacgccgcgacaactcatccaggatgagttgagtgtctggattcatgagaacacgtcggaggcgagcacgggtaaagtaatgctgctggtcgccgcgatccagcgcgtcaacacccacaagccaaggatcggtaacctttgataccacttgttaacgacttgcataagttggaacacacacacaatatctggagaatgcagagacggagaacagagtagttgagatagtacttggaaaggaagaagaactagagtctagagttctgttacagcataaaaaaccctacgcgccgtcgaacccttatttaataatcggctggattactctgtgctgtttacccacgccggcccaaagacctttgggttgcgcttcctcagccttttggcccgacacggcccatctcctgctgttgcagccaaaccttctttgtcatttgccgcaccgatgactgcttcctccgcttcgc

SEQ ID NO: 2563 - DNA, 584 bp, Zea Mays
cagctgaatgcattgactactgaagatttccaaatggaattaactgatgaggtgttgttgcagttggaacaagaggaagaaaaagaggaggcgtgttgtcgtttgtcaatccatgctttatctggcagagacagcagtgatagtatgtgtgtcagatccatagtcaacaaacaagtgatggttatgctcatagattctgggagttctactagctttatcagtgagcacatggtgaagcagttgggtctgactaaggtgccttgccaacctgtgcaggtgaaggttgctagtggggagaagctgctgagtgctactttgattcagaatctggaatggtggtctaatggacatttctatcatacagatatgagggtgttacctttgggagcttttgatgctattctagggtttgattggcttaagcaacacaacccaatggagtgtgattgggagcataagaagttgcagtttgtggatgaaggagttcaggtgaaattgattggtgatgaagtgcaagaagttacttctgtgcctgggatatctgtgttgcaggtacagaaatggattaagggcaatgatgtgtg

SEQ ID NO: 2564 - DNA, 2675 bp, Zea Mays
gagacacatacagtatgccagctgactaactgggttggagcctagcttcgagctgagcatacccaccaccagttggagctttcttgagagagcatttgagagttcgagcactagctagcttgtaggggatgaagcaagcaaggcgtgggagtaacaagctgaagcaatggagcagagcggcgccggcgctgtggctcctgctgcctcttctagttttgatggtgctcaagacaaatctcctgccagtgcttgcacgatgtaagtctcaccgcatcatatcaaggttggacagaaaagatgtgtcagtttttgcttaatttgttacttgtttcactcccgtcgttaccatttcttttcaagaacacgcagttcattggaaacgcaccgtaagttgcgcttatatatatatagttaaagctagcgcagaccatctggttctgatatatgatcacagtgacacgcaattagaagcaactgtgtatatatactaggaatgatcaatttaattttgtccactttattttctcatacaaagcaaatagaatagtgatgttagcttcgcaaataagctaagagaccagatttcccaaagtcgtcataaatatccattcctcaatttgccgagctaagtttgtacacacagaacacttttgcatacttaatctcaattttgacacgactaatgtaatagttcacgtctttattcatggtatcaaaagcagccacttgcatagcgagttagaagcagctgtagaataatgtcaaaagatctggagagaagatggcaattatagcactgtagaataatgtatcaaaagcagctgtagaataatgtatcatcaaaagcagccatatataatcgtttaaaacgttattaccgtcctcaatgcaaaaactaaaatagattgataggaccggtacctatttgacctagtatgtaaaatggatcgattcactcatcaggtaataacgttttaaatcattatatatggttatcatcatacttattgagtgttcggtgtttaggatcatagcagtatagcactgtagaaggcagctaaccatgcaggtgcatgcatgctgactacggccggcattcttctagaaaagagtagcatttgcatggatcgaatattgttattaacatcagatctgaatatttaagataagtacttctgtgtcacaaaaactaaggcaggcctgcccgccacgggccacggtccaaaaggctaaggccggatgggcccatttctatccattactataattgcctcagtatctgctttataaaaaatgttattcttttatgttctatttggaaacaaagttttttttttgaaaaaccacagttttttaaataatacattataatttagtcatgacaataccacagtttaaaataatataattcgaaaactagggtcgagacctaagtttagaataccttaacacaaattcagtatgacagagattttagctacactatttgagaatactagagtatttttccacaatttcacccacaagcacccccttagtgatgtttaacttgtcttcctcgatacatgtattattaacaaacatatgtaccatgtggctttccattgaaatccagattcagtagtcgggtctccacatatcgcggcatcaacacgcggtgcgagtgtgaccagcaacgacgtcgatgccccgaaaggtaattaaatttctgcagaaccaaacgccacgacgacgactaattaatagtacctaggatacagtgccgcctgcacgcgcttgctacctgcattaaattattgtttgatttgcagctgtggctgcaccaatgataagcagcaagctaatctgcaacttgagcaaccatcagtcgaacacgtgcaccatgaaaggcgacgtgcgcatccatggcaaatccgcaactgtatacgtcgtctcggcgtccacctactgtccggaaaattcgacgatcaagctccgcccgtatgcacgcaagtgggaggagcaggtgatgctgctggttcgcgaggtcaccgtgcgttccagttcgccaccagcaggcggcggtagtgcccacgacccaccaccaccgcagtgctcggttcggcacgacatgccagccgtggttttctctaccggcggatacaacaggaacttcttccacgtcatgaccgacgtgatcatcccactctacctgacggcccgagagtacgacggccacgtccaactgcttgccaccgactacgagcccaagtggatcgccaagtacaaggccatcctcgccgcactgtccagctacccagtcatcgacatggacaccgaggacaccgtgcgctgcttccagtcggcccatgtcgggctggagagccacaaggagctgggcatcgtcccggctctctcccgcaacggctacacgatggtcagcttccgggacttcatccgctccgcctactcgctgcagcgggcacgggtgacacccgtgagcaggagcacaaccgggcggaagcctcggctcgtcatggtcctgcggcgcaactcgaggcaactcaagaacgaggccgacgccatcgccgccgcggccggtgtcggcttcgaggtggtggctgcgggaccagacgacgtcagtgacctggagcgctttcccggggtggttaactcctgcgacgtgctcatgggcg

SEQ ID NO: 2565 - DNA, 980 bp, Zea Mays
catagctggtctgaacgtccttcagccattgaggaactactgctgaaacagcctgacactccgcatcaactctgcgcgacaaagcatccgcaacacgatttttagagcccggacgatactgaatcttgtattgcaggcctagcaactttgtgaacaccttgtgctaccaaggtgtgtggaggcgttgttcattaagctgcgttaaactcttgtggtccgtgaggataataaactcagtatgctgaaggtaataccgccactgctgcactgccaatattacagcaaggtactctttctcataggttgataatcccctagatttaggacccagtgctttactgagaaatgcgagaggatgtcctttctgcatgaggatagcacccacaccgactgcactcgcatctgtttcaatgaagaatgtagtgttgaagtcaggcaaggacagtacaggtgcttgggtcagggcgtgctgcagagtatgaaatgcaagggtatgttcattagtccaaatgaaaagggctcccttcttcaacaatgtattcaatggctaagaaatgacaccaaaatgtcggatgaatttgcggtaatatcccgctaagcccaagaagctacgcaattccttgatattggtcggtaggggccatgctgaaatagcttgaatcttcactggatccgtcgatactccgctggaatttataacatgaccgagataagaaacttgttgttttgcaaatttgcacttggatagtttaaccttccactcatccttggccagtaactgaaagacttgctgtaggtggctaatgtggtcctctagagaggcactgtaaattaggatatcatcaaaaaataccagagcacatttacgtaatagtggagccaaggtgtgattcattgccttttgaaaagtgcctggtgcccctgttagcccaaatggcattactcgaaactcatagtgtcccaagtgagtttgaaaagct

SEQ ID NO: 2566 - DNA, 660 bp, Zea Mays
ctggttcaggattatgatgacgacgtctaccattacctctcataccttgtcgattacgtgcaaagcgttgtggcagcggtgcataaacatcgttgtcatcgttgtcgtcgtccacaggagagtgagatggggctggagttgttggtgggggacgagcctccagtacgtccatgcgtgtaacaagtttatcaactcgtcgatcaagctgctcataggatgtcgtcgcagagtcctggtatttttaaaagcttcagtcatcgcgcgcatcatctccttcaattccagctgagagacacactcatcgtcgttaagcttaggccccttgtccttgtccatttgattcattggtcctgtcattgttagcacaaaacagagacaaaaaggcaacaaacaatgtgaaccctacaactatctctcagggtggtggtggtggtggtggaatacaaattatgaagcgtcttaccccgctcttacaacgttcttaccagcgctgcaggtggcaaacagtgaccggtgtgactgtccaacgagcgtgggtgtgattgcaaaggagtacctgttctgctcgagagaaagctggagttctgggaaggctgactaaatatatatatgtggcacacaagtcagtaacagatagcaatgctgaataagtgttccaag

SEQ ID NO: 2567 - DNA, 279 bp, Zea Mays
gattactaaggaaatactagagggcctgtctgaagatactggtgacagtgatgattatgatgctgaaagcgggggagaggattctgaggatcgaccgtggaggtcgagtcatacaatttttgggaaatcaacgattaaacagagtcatcttgacaatatgagaggaaggtactttcgggatatatctattgttagagctggtggagacaacaacgtccctgcccccgaggaagacgaagttgtgatttaccgaagtttcttcaaagctgggcttcggtt

SEQ ID NO: 2568 - DNA, 284 bp, Zea Mays
ggaggatatgttgagagcttgtgcccttcagcatggtagtagttgggacaagagtctaccttgtgctgagttctcacatgataatagttatcaggccagtctgaaggtgtcactgttcgagattctatatggcgggaaatgcaggactcctctattttggaccagactagaggaagacagttctttggacctgaacttaatcaagaggcagaagaacaagtctgtataatttgagagaatttgagggtagcacagaccagacaaaagagctatgctgataatag

SEQ ID NO: 2569 - DNA, 417 bp, Zea Mays
tcgtgggtgtcctctgtccgaacagtcacccacgccagattacagacatgtggttaccggcgaatggaagctggctgttgggatcaatgggcggaatgatcgaaacaacgacgctctgtctcttccacttgggagccatcacaatctctcgggcggaacgagtgggctcgagaattcagaaaacagagaagcggcggaggagaaaagtgagatttagggttcggaactcaagaaggcacgtcggcatgagtataagttggttccttaattcgggcattacctctaaagtgccagatcataactcggaaaagtaaggatcgcaatcgtcactcgggcattacctctaaaatgtcggcaagctttcaagcacacgaacaaaaagcaagcaacggtggttaagtggagtaacttcgtcct

SEQ ID NO: 2570 - DNA, 575 bp, Zea Mays
gatttattgtagttcacctttaaccccgtcgaagttgcaaaagagttcagaacagctctgagaaaaaatagttgtctagggcaagcttccattatcagcagtgtgtcatccgcatattgaactatcggaaaatcttgaccacagttcgcggccaggggtaacttgagcaggtcttgctgtcgcgctttattgatgatgctctgtaacagatccgccgcgagaacaaaaagaagaggcgagaggggatctccctgcctaaccccacgcttgcaatgaaaggttttccctggaacaccattaaggaggactgaggacgtgccagaccgaagaatatccctaatccagctcatccatctggacccaaagcctctatgcaacatcacctgaagaatcaactcatgctcaagagaatcaaaggccttttcaaaatccaacttgagcacaataatctcttttttgaaatatgacaaagatgaatatattcaaatgcccaggccaggcagtcctgaatggttcttcctttgatgaagccatattgatttttgtgaacaagggaagtcatcactgtctataac

SEQ ID NO: 2571 - DNA, 302 bp, Zea Mays
tgcgagaggtcaaggccaacaagggaccccctgtcatgctgctctgcgagaggtcctgtgtccatggtctttttcgtttcaatatcttctatcttcttttgtcattttaatctatgatctctgctggtgtgagcgaaacgtaattaggggattgccgtttttgttccgtagctacctgaccatggccccagttcagcagaattcagtcaagcgctgtttgggaattccacgttcctcctaggcagtcctgtaaatggatcttttgaaagctgcttgagggctatgcagatcctacatgtaag

SEQ ID NO: 2572 - DNA, 459 bp, Zea Mays
cgacgtcgtgctgctgcttgtcattgatgtgttgcaccacgccttcgcttgctgtcgttcccatgtagcttctgaagctgttgtcctcgtcgccggccactgcagccgctgctctgctcacatcatcatgccagattcccgcgtctctgccctgctccgcgtcgcgctcgctgctcgctatgcgtcgcacgccgtcgttgtccatagtaccatgttgtcgtcgttgtacctcatcgtcatttgttgtgtcgtccaccgtcattcgtcaaagcactcccagacgcccctagcctctacgtcgtcatcctctcctccctcggttcaacctcactcgccaatatacctatgaccaaagccacgacggcaaacccctgttatttctcgacgtgaggtagaaaaaaggtccattttttacacgctaccccctatcgtctatggttaattttgagctaacccctg

SEQ ID NO: 2573 - DNA, 870 bp, Zea Mays
cgtgctctgctctacaccgctcatccgccgatcgacggttgagatggcccgagatcgaaacggtacactcttctaatcctaaccgttcactgcgatccgacggtgcacgcaccatcccctaactcctgctcgcaggcgatgccggcgtgccaccccacggcggaggccatggccggggtattaaatccagcgagccacgggcctaatcctcgaatcaaagggggtttctgcgcgaaggacgacgaaataaactactaggatgcggaactcaccgaagaaactgactcacttgggctgtccacggcgcaccaattttccacggaggagcactacgccggtgagaaattcacgatgggcccgatccaatcttggttcaagaaggccacggacaggtgatgttcactctggcgacgccacacaaccgcaatttggcgacagggcgcaagcatagcagagatttcaccgacgacagccgctcgacggtacacacctttgctctgcttcgcccccgacctcacgctacggtggtaatcgcggctgtaggagaaagagggggagatagacgagttcgggggtcgcggcactctatataggcgcgacatggtcagctcaacaacggccacccgcgtgatccgcgcaagccgccatgctcggagtttagctgaggacgaaactgaccgcttgggcccttccgtcagtgattgatgcaagggaatacggtaccgggcccacgcgcccagtcacagcatcacaggaagcgggtacgagcgaggcaagcggcgacggctggcagccgggccccacgcgcaagtgagtggtgacgagggcgcgcgcgtgagtggaaacctgggccgcgcgggggaaacattc

SEQ ID NO: 2574 - DNA, 715 bp, Zea Mays
gcacacaggggtattgaaacgagagcgaggagggcgtgaatggacctgtagagagctggccacagcgagctcacacacggtgaggttcttgactgatttggggaaaactctaaattagagctctctggtggacaatccgaggcacgggctggtgcattgggtgtgtgattacttagcggagctcactagggcaacaatttacaggttccatcggtggtggcggctaattttgaggagacgtgcggtgaccggagagaagggaggtcactagcgcaagtgattcatggctttcagcgtggcctgaccactggcgatgaccagacatgctaaggcgagtcactgcgacatggtacaacacctagtcacgtggcacccaagtggcaggtggccaactccggcgaggttatctggaccggtcgtaaggcaaggggggtacagtggccagggcaaaacagtgtcccgagctcatccccagcgccagatttttcatccgaggattgttatctgcgtttaactgggcgtgaatcacgatactggcatgaatccgggcgtgagatcaccggcggcgaggggggctgaacctgataccttgtttagtttactgtactatcagactttcatcagagcgcctgacaggccgatttgtagagcgcagatctcagatttttatgtagtaactgcttaatccatctgtatcaaagttgtagctctataa

SEQ ID NO: 2575 - DNA, 814 bp, Zea Mays
gggtgaggtccgggaggtcctggcggtcacgtcgaggtgcggatcgtcaatggtaatggccggaatagggctagccgcgtgcgcaggcggtcgggcttgtcggtggcgtgtgcctcggcctactcacagtggtaggttcaatcaaatggcacagggagcttcacgggatgtaaggatgctataggtacaaggaatcgatgaatggcttaccgtggggctcggtctatgtgctacggcgaccggttgaagtccgacgacgtcgatccggcgtcttcggtgaggtattgttcaatcctcggctcggggagcttcattgaggtctggagaagctatcccaagggtcggacggggtggaggatggctggcttggccagtctacggtggctgtggcttgtgcaagatctgaaatatcttcagcacttcaaccaagaatctgctcaatgggaatcaatgcattcaaaaagctattgtaaataaccacctcattttcttcaggagcaggggcggtgctgtctcctccaatcctcacaatagtcatgtcacgaaagtatcttcccctcatagcgtcaacatgactttgcttaatattcgactttccgaagatggtatggattggtcgcaagggcaggtcctcagaatattcgtctccactttccaaatcaaagtcatcactgtcatcagaatcttcagataaatctgccattatctcctttgtgatttttctctgtatttgtttttgccatggatttgtaaaacccagcaataaaagggtccgcaactttcttctcctcgtatagcttctcctcctcagtca

SEQ ID NO: 2576 - DNA, 762 bp, Zea Mays
tttggggtaccacaacttgtgttctgtgtattaccagtcttggggtgctataccaaagtgaaagagctatggatggggaataaacttggtcaagatggatgggtctgttgtcgaggggatttgggtgatagaggggcttaaacagggaggtatgcagagggagcagcagggctgatggagtaaattcagagttagatttagtaaactaaagaggctttattcctctctattgtgcccatccgatgctatggatcgtgacatggatggagataaggatgtcgggtctaacttgggttctagagtttttcccattgaaatatccaattttggactgtctggtgtacataaaaaccttatctgctagttcttgaatgcaatgaactggacatcagaaactctagtggcttcaccctttgataagtatcaaattggtatcaattattctctatccgtaaagtagtgtttacctgcccttcttctgtctgtattcttggacagaagatatttgtgggcagcgagccttatctgtcctagctcctatttgaataactggacaaaactgatattggtactgagaaacaaaccaggttcagtgcctactgtgttgtatctagttgcatgggttgaagcatagatgcagttcatagttaaggctttaaagatctcaccccccccccccattctgaaaatatctcagccctgtgcggttagtgttatccaccagctgaatccttatctgctctcctccccaatctattttct

SEQ ID NO: 2577 - DNA, 599 bp, Zea Mays
ctctgcccgcacggagttgatggctattgcgattgggtagaaccttggtgaagacgaagaagttcagatcctgaaggtgctcgtcgccagcgatcacgccggacaagctatctggctgcgcctgatgaggagaaaagagaaagatacgactccaacggttatcatgcttagaacaagatgctggtccctcaacatcactcctcggtgatggcccggcgagcaccaccctcgaggatgatgttagaggctgtgacgatgctagggttggcggttgtgtgcttgatgaggatgaagaggaggaggaagaagaaattctcttgattcataagaatagccatcgtagcaggagtagtgtcatcccgatgcagaccctatcaggacttgtcagcctctaggggttgttgatgtctccttttgaccatgcgttagaagagattatccctaagaaccttttatcggagccccctgaggttgatagttccatcgtccgctcagaggtcccggatgatgttcctttgccatgcgatcctgtcgggcaagaggtaacccagatagtttctcacgcttcattgaccttggagggcggtctagctcgtgag

SEQ ID NO: 2578 - DNA, 436 bp, Zea Mays
ctttgatgaaggcaggtccttctagggtcttttctcccatgtttgaccacattagagggtttggcatctccttccatacaaggcttcaaaaggtgacatcctgatgctggcctggtaactgttgttatatgagaattccgcataaggcaatctagactcccaatctttatcgaaggtcagcacacaggctctcaacaaatcttcgaggactttattgactctttctgtctgtccatctaactgggggtggtaggcgatgctgaaatctagtttggtgcccatagcttgctgaagactcaaccaaaactttgaggtgaattgtgttcctctgtctgatagtatttgttggggggcctttctcttccgaaggtccacaaaaacatgattaacacatatgtttttaatatgacatagactgttacaggaggcttcggcg

SEQ ID NO: 2579 - DNA, 340 bp, Zea Mays
aactaataaacttttacaaatctacaatgttttgaaatcatactctatatggttcttcagaagattgacagatggtaggtacgtttacatgctagttacgtttacactattttttgttcaccgccatctcatcatgtaaacactaaaaattcagaagtccaaaattgatgtcaaatgaatatactcacctctgctgtcaatttttgtgcataatcccctcaaacccctatgacagcctcatcgacattggccacgtgtggtgagcatggaccccctcaaaacccttcttcctctccagcactatctccatagctagactcctccgatccggcgtgatatt

SEQ ID NO: 2580 - DNA, 963 bp, Zea Mays
tcatgcttggtgcggacccccacgatggcgtgaagagacaccattggtggagggtcggtgtcctgctcggcgtccgccccggtactctcgtggggtctgttctcaccgtgattgaacgtcccggcagcgtcctctagtgtggcctcgtcatcgacgtagtccacggactccaggtagaagaggcattggcagacgtggccacggacgttgggctcgtcacaattgtagcacagcccttgtcgtcgacgttccatctgttccaccggtcttaggcggcagaactgtcgtgtcggtgtagaggataccattatcggtgctaggcccgatgaaagcagtccctgcggttgtcgggaatggcctgacagcgggggtcgtgacgagctcctcccaccatgcgctggaggaaatgcccctaaactggtcgcacgacgttcgaacaccctggccaagtgcatggctatttgcaggttctgggttcgcacaacttaatgtcgatccgtatgtggttggggagtccccacacaaagagcttcgtcttatgggacgtcgacatgttgtgtgcatggcatagcaccgtgttgaagtgctcgacgtattcgtgcaccgccggcctgaagcgcagggtgcatagctcgcagaagccccatgccagcatgccttcgtcctgctcgagggcataataccatgtccgggcagccctagtgaggtggtacgacgccaacaaggttccgtctgagggcagggtatgttggccccagaagaactgctggttgatctatttgagcgggtcgacgatgtcgtcgtacgtcggaaagtcgagtttatataaacggggagtctgggggcggtccctgtcctggcggaggtggcgcagtgtcttgcaacatggtcccctcatatggaacccgaccaccctcggacgagccgtagagtctcaggccatcgatgcctctgaagttggcg

SEQ ID NO: 2581 - DNA, 551 bp, Zea Mays
gtgaatacgtccacaagttcacagaattggctcgctatgcacctaacgatgtcagcacagaagccaagaagatggcccgtttcttgaaagggctaaaaccaaaactcaagactatcctcgccagctaagatttcctcagcttctcgcacctctcaaacaaggccatacaagtggaaagggctagagaagaagaaaagggtcacctcaagaggaagtttcaagtcctctgagctcagtagtaggacaggcaccagagagttcgatcttttgggtttcctcccaaaggaccaagtttcaacaaaccagcagggtctgctccatcacatttcagtcagcagggtcaaagttccctccaggcccactcagttgcaagcaaccaacctccagccaatgcctgttggcactgcggagaccccagtcactacaagaataattgtcctcagttgaagacttccgtgcctacctactccaactcggtgaatgcccccaagagtgccccatcacccgcctccaaggcaccctcctccaacagccagctaagcaagacccag

SEQ ID NO: 2582 - DNA, 628 bp, Zea Mays
gtgatctagggcctcctagcttaatcggatgggtcagcgagtatcaggagcaagtaagggtgctgaaacaagaggacagcggacatgaacggacctaaaacttgttggccacggcggggtcacaccgctcggtgttcttggttgatttgggggaaatcccaaattggggagctctctggtggacgatttgaggtgagggttggtttactgggtgcacaattacttagcggagcaggcggggtcggcaatttataggctcccacaacggtggcatccaatttcgcgaagatgcgctgacggccggagaggaagaaggttactggcacgcaagcttagtggctttcaccgtggcggctctctggtgatctccgggcatgcaagacgcaattcacaacaacgtggtataacgcttgagcacgtggcgcacaacggtaagtggccaacggcggcgaggtccatcccggctgatcgacgagcaagtgggtatggtgaaactcatccgcgaccgagcccgagcctatctggtgccaagatctttactccgccgtgattatcccctcaccagagagcacgaatcgtggtgacggcgcaaatcacggcgcaaaggtcaccggcagcgaggggggct

SEQ ID NO: 2583 - DNA, 762 bp, Zea Mays
cattggtgaccatccagatcaaatcgaacggtccaccaggcgcgccccaaacactgatcgaacgtcggcggcgcacaaccaaggacggcagtgccattgccaaacctcgtcggagttgtccggttttgcaattcccgcccccattccctaattgaactcgtgctacaactctactaggccatggcgagactggagaaggtgttctcaccggcaattgtcaaggcggagaggtcggttcgcggtgattgaagacttcgcggcggcggagcgcgtggatgaggaattccctagcctcccggttctcgccgaggcacgtatggctttccgtgcctaggtacttttgtttgtcggtgagataggtacgagacggtggcgcggaggggagttcgccggggtggatctccacagcaatggcacacggcggcggcgaaatccgcaagctatgcaagcatggtttaggtggaaggtgaaagtgggggtgattccaaaggatggctgcggctcttgtagggtggctgggaggagtcccagtcaactccccatgatgcacggatgatgcggacgccagaggtttcggcatggctgtttatggagacgatgctgacaccatggagccgtgaggtcagcgcacgcggcagtgtggaagaagttgtgtcatgggctgcgcgcgagatgagcaactgtcgagtgggccccaaaaaccagtgagatattgagagcgggcgcgagagagaggcggggcagtgggtctgtcacacccgg

SEQ ID NO: 2584 - DNA, 362 bp, Zea Mays
tgcgccgccgtgataaccaagccgccgtcgagtttgggcgctggggatagaagacggtgttctaaccgttagatctctatccgatggttaggatccgatctgaacgcatcccttcgtgcacctaagcggaaccgttagattgatgtccgacgatcgtgatcgcgcggatgatactctcttcgggatcgatcgtgagtcgttcgatgggatcgggtggtccagaaccctccttacctctttaaaactgccgccgtcggatcacgatcctagggttgtgagcgcataccggtttggtgtgatggcgatctaatctggatcttcagattttgatcggacggctcagatcctccggtaccccttcg

SEQ ID NO: 2585 - DNA, 570 bp, Zea Mays
ccaatccaaccctggattctcccacccacgacgacggcgaacactgtaaacaaatcgaggtgttccagacgattgagcacggtctagctcaatgggttgagccgacaagcatcaccagtgaacaggggtgttgaaacatgaacaaggagaacaagagcgggcctagaaatggcggtccacggcgccgcgacacacggaggcacggagaacctatttggggaaatcccaaattaaggcacggtggtgcacgataggagctagctgggggtgggttcgacgcgtaacaaagaggcggagcagagggtatcttcaatttatagaccccgattgaactgggcacaaatttcggttttgagatcacggttacccggctaggatatttcacagtggcttgctcacagtggcgcgcaagagggaactggtccgcgaatgataaccagctgcttgccacgacccttacgacaaggaggagtggtcattacgtgtcacagtcggagaaacggtgagctccggtgatgccagcgcgactgaccgcggcgggacacaacggccggtccggccagcgactag

SEQ ID NO: 2586 - DNA, 339 bp, Zea Mays
cactgaaataagcaaccgattttccttcttgtaacaaaacagcacctaacccaataccactagcatcacattcaagttcaaacactttctgaaagtcgagcaattgtaagagtggagcatgggttaacttatcttttgaagtgttgaacgcctcttcttgtgggggtcccaagcaaaagacacacctttctttgtgagttcgtgcaaaggggcagtgatggagctaaaatcacgcacaaaacggcggtaaaatcctggaagtccaagaaaactccaaatttgggtgaccgtcgttggtgtaggccagtcctgaatggcttcaaccttgctgctatccac

SEQ ID NO: 2587 - DNA, 491 bp, Zea Mays
agtaaacgtgcagaaaacaattcgagtgcctttgagaatgaagtcattttattgatggtgtatctcccaattacagaatacaatgacgtcccaatagcttttgaaatctagctaggggtaaaacttcctgagatgctctatattccatgagttccctatttctgtgccatccatttgagtaagacgatatgatccaggccgggtgacttctgttactatgaatggtccttcccatagtggtgacaatttgtgtcgcccctcccccgttagaattcggcggaggacaagatctcccactgcgaaggatcgatgtcgtatggccttatcatgatagcgcctcagagtctgttggtacctggctgactgaattactgtattcaatcgttcttcttctagtatatcaacatcatccagtctggtagcttcagctatgttttcgaagatcaatcttggtgccccaaacttgagatcagcaggtagcactgccttcg

SEQ ID NO: 2588 - DNA, 282 bp, Zea Mays
gagttcagcttcctcgtgggcaacgtcgccgaggagctggtcgtgtccgtgctcaacgaggacaagtactttagcaacgacctgctgggtcaggtccgcctgccgctgtcccaggtcatggagaccgacgacctctccctcggcacccagtggtaccagctccagcccaagagcaaaaagtccaagaagaaatgccgcggtatcatcgcagttgcgcgctttctcaacctctccttctttcttcccgcaacattatccacgtggagtggagtacgatgcaaa

SEQ ID NO: 2589 - DNA, 385 bp, Zea Mays
caccggaaaacccacttagctcccaaattccctcttcctctgttcttgctccaccgcaagggactccactgtggtcagcgctcttcgggttagtgtttatcaaattgcttcttgttctagtttgcctttgatctcctattgctctccatgccaactaattgaaattcggccgaagcccgtcaccagaacacacagttgctctgtagaacgccatcgtgacaccatctccgtcgccccacgttgctatccatgcccagtccaaattttagtatgcgcgtcacctctggttggcctgtgaagctttcccaagcttcaatttggtcgttcacgccgtcggttggtcggaacgcttccatccgtatgaccatccgccctgtcaccgtgg

SEQ ID NO: 2590 - DNA, 951 bp, Zea Mays
aattctatgaattgttttcatattaaagctcattttctaatgcatttttctgattttatgactctctggacggggcctcaaatacagagaagtacaggggccagcaggtaaattatcctagactcagccgacagtgacactagactgcgggttcatttctgtaaagctcagggtttctttcgcaaagtcatcggccgaaggggtacgttaggatctgggccgctcgatctcactcctacggcctagattagatctacatttattaaaccggtacgcgataagggctttcagatctagatctaacggccgcgatttaatgaaacgtgatccgcccgactaccacatgatcacagatccacggtggaaatctatccaggtgaaacattataccccgatccgatcagaaccacacatcgcgaaatcgaggcccagggttcatcttcttccctacgttcggcgcacagcagtcaaggcctccaccgcggcggcgatttcgccagtgaacagcgcgcccacgcccacgagaaccattcccaaatttgacagcagcgacacaatgcaaagattatggtgagctcatggatgagtggcataccggtggttaacccactgtaaggtccgcccacgcgtgcagtcgagcccgaggcggatcgtgatcctggcgagtaaccgcgagcgctcgaattaggttgggctgcggcaaattcggggttgtgctgctccacacccggcttcggcgacgatgaagggcgccagcacatagtaagactgttcactgtcgaggcggtggaggtggcaatccgatggcggaatcccgggcgccgccgcaatcgccagttgattatgagctcgctggtgaggttgtagacaaatacgagcgaggagggggaagaaaaagtacacggcttcatttgtacccagtccgggatggcggccaggtcaacccacggc

SEQ ID NO: 2591 - DNA, 590 bp, Zea Mays
aacctggtggcgaggaatttctcgccgtcgtgcagcgacaccatgaatccgccgtgcgccgtggccaagcttcatccgcacctcaatgccggtaagtatacatccattatgatcgcgaggccgcgctcaccgtgtagctccagtcaatttgactgtggggctcgggggagcgcgcgtcagcgatggcctccgccgtgaccctgtacagcgccgccgcttggggatagtgcggtgtgggtgaggtgaggggagagcgatagccgttgatcactgatccagtggacaggatccgatcgcgctttagctcttcgctcgtctgatcctggccatcgagccccgatcggatggagtacaacagataagctctttcgttaaaaattaaccgttgatccctgatcggtcggcccggattggataccggttcgatttagataacttctaatctgggccactggttttggatcggacggatcacagtgcctcgtaccccttcagcgcgactgttttacagaagagaccctacacttgggtataatcaacccgcagtacacatgccgtataaagtatatacgcagtgacccagaattctt

SEQ ID NO: 2592 - DNA, 424 bp, Zea Mays
catgtcaacacccattcaaattgattcagccggtggtaaagttcgagccgatagtgtttgcttgaatgtaagtgtggaaataagggggatagagtttcccgctaacctcatagtaatgggtactcagggaatagatgtcatcctagggatgaattggctagataagtactaagaaattatcagttgtgacaagaggacaattaagttggtgtccccactaggagaagaagtggtggccgagttagtctcacctaagccaaggaaaggaggttgtcatcagatggatattgatagcaaggagccagattcactcgagactatcaaggttgtgtcagagtttccggatgtgttcccaaaagatttaccaggtatgccacctaagcggaaagttgagtttgccatagagtttcttcctggcaccgcc

SEQ ID NO: 2593 - DNA, 652 bp, Zea Mays
atggaggatctctaggccttcggtttcagttacgtatttcagcataggctgactgattccctttttgtaaagctggccttcgactattgcaaagtctctgctcctgtgttgcagccttttggcctcgttgcgatcggacgggtggtaatggccctggaggcatagtgttattggggcccgccagtcttcggccattataaggttgacgattcggtggccgtcggcgtcttgcgttatttgcaagccttcgggattacagacggctggtgtgccgatgacatggtaaaacacgtcggagggcagggccttgcctttggctgctgctttggccaatgcgtcgacctcttcatttttgtttctctcaatgtgttgtagagtgaagcccttgaactgctttttgaggctgcggacaacgatgatgtattacatcagcacgggctctttggctgagtattccttttcaattttactggcgacgaccttggaatttgttctaatgatgcatgtggtgacgcctagggcccatagtttgtgaggaccgaggatgatggcttcgtattctgctatgttatttgtgcacctgtcggactctagagcgaaaccgaggcacgcggcgtatctgtatttgactccgacgggtgatgtgatgatc

SEQ ID NO: 2594 - DNA, 832 bp, Zea Mays
gtcggttacaggatctggtccgctgaaccaagtgcgcatgagtataatggagacgagacagagagcatggaggacagacggcgccgtgacgcagttggttaatggaaaggcggtaaacatatggtagtgggcggaattatagggattagattccacatgcaaacatgcttactctgatacgtgggcgtggaatttatgaatcttacatggggtataatggcgggagttaaagacaatatcgaataagatgttgaaagatatggcataaaacagatacgctataaatgttgcatatatagtatatacagtttggcgtaaaacattgagtcatttagcgtaagtagtgtgttagggttatttgtattacatgtacattgctataatatcggtatggttttggaaattattgaaaatgccctagaaacgtggatgtggttacttgtttagtatagcatctgtgatttcctttcattcgaaaaaaacccatactgcataactagttggcggtggagatggccggctctggacaatcgccagcgatggtaggagatgacgttcgtcttgatccagagacagagagagtagttgatggtaacttactggttacaccacctcctgctctactggggcctgtaatcgacgagatgagcataggggaggaaggagaacaaagggttcgacctccgatgtccaatatttgctccagggagatggatacgcctcaaatactgcactgtaagtccaattgttgtatttgattcttgattgattagattgttatgatcataatccatggtacaaataagattgtcaatgaattgcagcaaaaaac

SEQ ID NO: 2595 - DNA, 553 bp, Zea Mays
gtctcagaagtccccggagggtagaaggccagtcaaccacgacctctccaacccgacgaactccattgtccacctcacccactaaggagtggacacagatcacccggcgaaggaagatgaacattccgaacggggatggaaaagcgtagcgggcgatcaccccgataccatcgccctcaaaggaggacgagaagaagcacactgctacacctactcctttcttccctgacatcctcttcattcaagggagactggagtcgttgcccatctctgacgatgaacccatcgtgatgggggaagagcctccccagcgcgacacacgacgacggaggaactgacgccgaaacgtgcgacgacaccataaagccggagaatgggacccggctcaacctgtctcttgggacgaagcctcacagatgggggagacccctgatgaaagagcacatcgagaatggtgcaactcccgccgccgagaccgtcgtcaagctcaggaacgcgagcgggagctagctgaacaagatgttagactccgacgagagaatccactcctcgc

SEQ ID NO: 2596 - DNA, 478 bp, Zea Mays
gtgcggggaggtgggtttcactttcctctctaacggcttccccttcagctctcaggggaaaccctgctccaatcccggaggcgataggcgtggttttatccgaagccatctgccagggaagagagttactaacatgcacatgcaaattgttttcaaccaagttattttattcattacactagcacaatacaagcataagactactacaggtggagctacatgagagcgttccccgaggtactaccgaattccttctctaaggtgtccccaaactccttgagaaggtcatcaaggcttgctagggatagatcctcggcgtcggaccaatcatctaccctggggggaggtggggctggaggggtcttctttttcttcttctgcatttggcatcctcggttggtggtcttcttctggattttctttttgggggcgagcttctttagtttcttgtcatagtccatcttcaaggtccgataag

SEQ ID NO: 2597 - DNA, 563 bp, Zea Mays
caggggttccgcggtaaaaatctatagacacagagcgcagtgagggtggacagcgggttgattcacagatattccaggggttcttatatatgcaaaacggatggccgaaggggtatggttgtatcttggccgctggattaaaagttgatggctcagattttataaaccaaaggggtataatgcttctaatctggaccctcaatccagagatcgacggcaccaagcatcctattctctcttctattcctggcctttaatcacaagatcaatggtccaggggtcttcttcctcccaagacaccttctctcctccaccccaaccggtctacaccagggcggcgccaggaagctctgggtggtgacttcgcctggcaacacggtcggtcggcccctacttcccttacccgagcgctaaccggtgtaaacagaggagaagaatatgcataacttaatggaaaaaaatcttacaggaatcagtagtgatggtgatgccgacccccaaccatggcagtacgacgacagacgtaaccggcgctagtgagcgcgcccagaggctctgggcgg

SEQ ID NO: 2598 - DNA, 651 bp, Zea Mays
agaaacggcgcgcaaacccgcatacggcacaccgcacacgtaataagtcggaaccacgcaccggctcgtacacaagcacgcgatcaaccaagtcaccaacgggaaatcaagctaacccaccaagctaggcttaggctagcgtcggggcctcgaatcgagcacctgatcgacaggacacgaaagttgggataagtaatggatgggactggggacgggaaatcaccttcggtgttctcgtgagacagcgacgcgtcggcgatggagcagaggttggggtctgcattctcgcggtctccggtccctttgtcttcggcggccatggatgccgcggcggtggcccgatgtgtgattggggacttggggttttcgagcgggcggaggagcaactgaggtttcggccgaggaaggggccgaagagaaggaagaagtgagtggggtttacgagcgctaataaacgagagaggcgggcgaggagccgaggaaacgtggggacgtggggttagcgatgagaacggatgggactgttcgcaaaaccctataaccactttcaaatctatatatctatatctatactacttaattaagtctgtaaaaatagtctgtgattctgtgttctgccaccatttcttgttctgtcattcttattatttc

SEQ ID NO: 2599 - DNA, 497 bp, Zea Mays
tttcgacgcatgtttttgcgggggatttttcagacatatattacatggctccgcctcgttaaaaacctcaccccccgggaggaaaagagtgcggaccagaataagattgtttttgtgaattacaagggcgaattagccctgatgagtcaaacaaaaaatttgcggaggttgtcgatgttccaggagtgctccaggtcttcgccgtttggcgttgtgagcctgtaagcgctgggggaagctttcgtcttgactataaaggggccttcccacttgggctccagcttgcccctggactctgtctgaaccgttcggacgagtacgaggtccccttcgctaaattccctcgggatgactgcgtggtcgcgccatgcttttgtctgagcttggtatttgtttagggcctgtagagcgaagactcggtctccgtcgatgagatcctttgaagttggctcgtccacgtcggggacggctgacgaaactgttcgcggggacccatg

SEQ ID NO: 2600 - DNA, 383 bp, Zea Mays
gagaagccgaagcgggtgagcaatctgacttggaggatgcctcctccgagtactctgagtcccccaaagtcctccgagggggactcgcggcatgcttgcacttgttgtcagcacagcgaggccaaccacgacccctcctgcctctacccatggttggttggagaaggagagaaagaagaagaaagcaacagatgatcgaaggatgagtgaagagaacaacggtgcaagcagactatttatagaggccaggggtgaccgtccacttcctaccacgctcgccgaacagacgcaagtattcaataagcaattcaagccgcctgaaaatgagtcaggcaacaggcgccgcttcgcgtaacacgacaccgtttggaccaaggtcaact

SEQ ID NO: 2601 - DNA, 696 bp, Zea Mays
cgggatttcctcggtgattgaactcagctgcgggtggattgcgaaggcggtgctcgcgtggccatcgaatgcggggttgcggctggaggacctctcggtaaggaaccatccccctgcatactcgccctacctgtccttcgcggcgtagcacctagatccaactagggccggcgtactactcgacgtagcagggcacgacaccacccctctgttcgccatattctccgcatagtgtagatgcgctcggactcgtggttgtgcccctgggcgcggctgtctggatcgccagagatgttatccgccgtagcatagtgccgccgcgggggagtgcatgggagctgtcgggaacgatggccgctggccgttggatggccagggtatggccgtgatctgattcgcaaacaacccatcgtctgaagaaaatcctagccttagatttatgatcggacggatcatcgctgtatgaagtaagaggtgatcggcaccgtcggtttctggtctggtggctactattgtataccgattcgccagataatagatctaatccttaccgtccgtttttaatccaacgtctgaaagcatcccatacccgttccaccgtgcgcttatgcaaaagagccctcgggcttccagagaatcaacccgccatccgaatgcatagtgcgctgagtcttggtactcttctgtattaccccc

SEQ ID NO: 2602 - DNA, 527 bp, Zea Mays
ttgagatctggttgggtgaaaatgtaccttaggctcttatggtctgtgaaaacatgacatttgttcccaatcaggtaatgtctccaaatttttagggcatgcactatggctgataattccaaatcatgtgttggataattctgctcatgcggcttgagtaggcatgatgcataggcgatgactttctcattttgcataagcacacatcctaatccttgccttgaagcatcacagaagatgacgaaattctggtgaatatctggtagcgtcaatactggcgcggtcgtgagtttcttctttatgatttggaagctttcctcacactttggggtccacacaaatttattgtctttcttgaggagctcggtcataggtcttgctatgctggagaatcctttgataaaacggcggtaatatcccgccattcccaaaaagcttcgaacttcactaacgttggatggctgcttccatttggatactgcttctactttggatgggtcctcttctattccttctgcagttaagat

SEQ ID NO: 2603 - DNA, 667 bp, Zea Mays
ctgctcctaagacaatgtagtttgtgggttgcattcaggaggtcaataattgtcgactgcagttgtcggaacctcgctctgacaaataaatttattatgtgtgttccgggctacagacggtgtgcgcggtgggtgcaagatttacgttggttcgggcagaatgtcactacatccggtcatcgacggcttatgttcctgacaccattgatgaccaaagctcgtagtaggggttacaagcaggcgagagaggaaggagacgctcccaagtctcttatttgtggtggaggtagttacaaggtggagacctagctaattcttggcttggcgacggggctccgacctccggatcctccttttgtccgtcggtcttctgggcatcgtcttgtctgaggtcgtccttgtgtcctctgtctaagagaaaggaaaaccccccatgtccgggggtcagcctcctcttttataggctaaagatggaggtcggccagaggcgactcctttaggaaggagccaccaggtgatggtaaaactagaagtcttaccatggcacatggggtaaagtcacgcgtgcttgtggtcacctagttgtctcgtattctttattatggtaaaattggacgccttactatggggtaaagcaattatcacgtggttacataagagccttgag

SEQ ID NO: 2604 - DNA, 491 bp, Zea Mays
attacaaatcctaccccccttaacaagaatctcgtcctcgagatttaggaaggactagggaaaagatggggaaaatctatgcgaagctcttcttctctctcccaagtagctttatcttctccatgatggctccattgcactttgcacgtcttaataactttatttcttgtaactcgagtcaaggtgtcaagaatcttgatcggatactctatgtaagtcaaatcaccctgaacactgagctcttccatcggtaacagttcctcagggaaacgaagacacttcttaagttgagacacatgaaatacattatgcacatcagatagagtagcaggtagctcgagttggtatgccatctccccaactcgccaagagatcaagaatggtccaatatagcgaggggacaatttgcccttaactttgaatctcctcattccacgaagtggtgacaccttgaggtaaacataatctccttcctcaaattccagtggcct

SEQ ID NO: 2605 - DNA, 637 bp, Zea Mays
cggcggggatgatcgtcgaccgatgaacccggaattgctcactggaacccttcgggcccgtggagccgctcgtcgtcgtgggcagttccctctgcgcttccaaccccggtaagattcataccacgtacccaataggatccaagcgttggttagcacctgtcgttcaaaagttctaagcactgttgtgtgggatggccatcgccggccatggccccgtcgtggggagctatcggcgccgccgcacctgtctgcctgagttggggaggtgagggaataggcaagttatgccgtgggccgtccatccggttatggacggtggagattagatttgcggataccgcttcagagtcgtgatctagggcgttcatccagtattcaatggacaggatcatatcggcgataaccttctagctattaaaaaatctactccgcaggatctagatcatagggccgtgattgaaacccgccttcattaaaccctgaccacagatctcggatccaacggctgtagacacgtaccggcttgtttcactctagatctaatcccatccgttgaaagtagatctaacggctcagattcaccgataccccttcgtcgtgcgcttctttcaaaagagaccttatgttttactggaat

SEQ ID NO: 2606 - DNA, 516 bp, Zea Mays
cttggatattcataggcctgtcagtgttcgcccgaaacgcccttgccgagccaatcaacctgattctcctgctgatgagcagaaaaagaaaaagagacgtcttcggcgagtatctagtttggatcgggatgttggtccttcggttcctgctgctgaggaagtgcctgtgcctaaatttactgacgctgaccccaatgggtgtgatccatctatcgctgatcccaatgggtgtgctccatctgtcgctgaacccaatgggggtgctgtctgtgttgctgatgaaaacgagggggaggaagaagatgaagtccctttgactcggaagaacagtcagcaatatgttgccagtggggaaagtagtggagttccttctcctgctctgtctgccctcattggtctacaagaattgtctctggcgagctttgatcagactcttgaagatatggttccagaggatctgttatcagagccagcggatggtgacgcgatggatgtttgtgctgatgtgttcaacgc

SEQ ID NO: 2607 - DNA, 1105 bp, Zea Mays
gctaaacagggcctcgtgttgttgcccctgccatcagtcgcagttgcaccacccgctccgtagtggccccgctcgtagcacccttgaaggtgtaccatcgacaaccacgcactgtctcagagatgctcgtgggtcctatgcccattgaactacccactagtgatgttcccatcacaccagtggtcaaccagtacgggatggccactcgcggtaaggctggcttttgggtgccgactccctcgcccgtccgaagacctatcacagcgcccttgctgatcccaattggcgccatgcgatacaagaagagtacgccactctagtctccaacaacacctgggatctcgttccctagccccctggcaccaacatcgtcactggcaagtggattttccatcataaattcaatcctgatggttctctcgacagatacaaggctcattgggttctccatggttttactcagcgtcccagcgtggattatgatgagaccttcagcccaatggtcaagccagccacagtccgcactgttttgtccttggcactctctcagcactggctagttcatcaacttgatgtgcatgatgcattcttacatggcactctcactgagatagtctattgctctcaacccacatgttttgttgacccactcagcctcatgttgtatgtcggctcaataagtatctttatggtataaagcaggcgcctcgtgcttggtatagctgctttgccactcactcatttagggtctgtcgaagccaagtcagatacttcgttgtttatatatcatcatgggacttacatggcttacttgatgctttatgtggatgacattgttctcgctgcttccagccaggaccttctgcgtcgcattatcactgctcttcagaaggcattctccatgaaggatctcggtaccctccatcatttcttaggtgcggctgttcagcaacattcaaagggcctcttcctttcacaacagcagtatgctatcgatattcttgagcatgctggtatgaaagattgcaagccgtgcagtacttctgtcgacactcatgctaaggtctctgccatgaccggtaccactatcagcgaccccactcag

SEQ ID NO: 2608 - DNA, 334 bp, Zea Mays
gtcgctactggctacccccgcccacaacaccgccatcttcttcctcgctcgtgcccaccgctggtagcaccgccccctcccttatcctcgccttcatggccgcgcggagatggcctgctaccgccgtatttgtccacgtgacgccaccaccggctctgcacctctccctgcttggttccacagcgttgtggaagccgacctggccggatgtcctcgccgtgccacggatgccgcatcccacttcttgctcggcgaccgtcgagcgtcaacacccactccctctaggcgagacagagtcccgtgcatcatccggtcgcggtcgagatccggaagc

SEQ ID NO: 2609 - DNA, 525 bp, Zea Mays
ctctcatttgtccttgtcttatattgttcgttatggcctgtaggtcctcgtttgtagttccaagggtgaggcatttgggcagtaaagggcatgtgtctaatgatcagagggttataaatgtggtgtcccttgctgagagattatgcttcttctaagttgttccgtcctattaggggtgtatggtctaaattgacttgttcagtacctagggttgggaccaagcgaccgaggtgactcaattcgatgtctttagggttatgtttgacccaatcaggggtttgggctagaaacacttaagataggtctatcccggtcgaggttacctggtcgtatctacggtggcaaagattggcttggtctgcttttcgttggggagttagcttggatccatcaaggttgggtcctactcggttgggctcatcttggtcaaggagttaggtcagggttgatcttgttcagggactatcttgggttatgtgtggtttcaatttccaatagtggttcttatgctattttggggtaccc

SEQ ID NO: 2610 - DNA, 395 bp, Zea Mays
taatcccaagtcttgagaagttgcgttgtagctcgacgaaggaagatcaaccagaacaatttgaaaagcatcgtcgggggttaactcagtcccactagcagatatcataattcttgcatctggctcgccgacctccaaggcgacttgcttgctcgaagtcaaaggagtatgcatcgccattaccccattagatcgtggtggagacgacccgacatggacatacatggaggtgtgggaaggagagctcacttggacaccctcggggggctgggttgtagctcgcgccacccaccagagctggatcattaccgacaacaccctcgggggctgggttgcagctcgcgctacccaccagagccggatcactaccggcgacaccctcgggggctgggtaa

SEQ ID NO: 2611 - DNA, 438 bp, Zea Mays
gaatatgagaaacttcataagagttcaaggctgtcccaaaatgagagatgttagtgaagatgaatttcagcctgaacaagagccaaccaatgaggaaaacatttactttgagtctgaccaggagaatgctgccctaatttaaccaatgaggaaaacattgactttgagtataccggccccattactgcacatgcatggttgcttattttattttgctttcgcttatgacttagaactaatttatctttgtgcctctactgccagccagtttgtaacttttgtgtgtgggtagtcccatgagtagtcgacctcacttgtggctgttttgtaatcacagtgacattaattccccctataattctaacaaagtgaaaaactgcaaaagatatgcttagctctagcttattaccactgttcataagatgttcgaaaagaata

SEQ ID NO: 2612 - DNA, 410 bp, Zea Mays
gttcccttgggccctgggtagtgggccgacaatgtctagcccccagcgttgaagtggccatgtgtgggcgatcagcttcgtggattgcaaagggttgcccgtacggggggaaaacttctggtaggcttcgcacgacctcgtgactcgattcgcggcgtagattatagcgggccaatagaaaccttgatggatcaccttggcagcgagggccctaggccccgagtgagaatcgcaagttccgctgtggacttcgcgcaggatctggaggccttcggtctctatgacacatttgagcatgggttgactgatccctttcttgtacagatggccctcaataagtgtgaaatcctggcatcggtgtttgacgcgcttggcctcgttgacatcacctggatggtaatatccttgca

SEQ ID NO: 2613 - DNA, 431 bp, Zea Mays
taaagtgcacagacttagtcaagcgatccactaccacccatatagcatccctgcctcgaggagaacgaggtaagcccaccacaaaatccatggtgatatgctcccacttctactctggaatttccaatggcttcaataaacctacaggcctcttatgctcggtcttcacgcgctgacatacttcacaggcggccacatacttagaaacatcaaccttcatcctcttccaccaaaagtttttcttcaaatctctgtacattttggtttcgccagggtgaacggtgtaaggcgttttatgagcttctctaaagatattcatcttcacctttgatttctgaggcacacaaagatggcccctgaaacgaaccaaatcattctcatcaatggtgaactcacggggtttaccatcgccgaccctctttcgagcttcc

SEQ ID NO: 2614 - DNA, 439 bp, Zea Mays
cagaagggatagaagtggacccatccaaggtagaagctgtttcaaattggaagcaaccatccaacgtcagtgaagtacgaagctttttgggaatggcagggtattaccgccactttatcaagggattctccagcatagcaaaacccatgaccgaacttctcaaaaaggacaataagtttgtgtggacccccaaatgtgaggaaagtttccaaatcatcaaggagaagcttacaaccgcaccagttctgactctgccagatatacaccaggattttgtcatcttctgtgatgcttccaagcaaggcttagggtgtgtcttaatgcaaaatgagaaagtcattgcttatgcatcccgcttactcaagccacacgagcagacctaccctacccacgatctggaattggcagccatagtgcacgccctaaaaatatggatgca

SEQ ID NO: 2615 - DNA, 837 bp, Zea Mays
atcaaaattatagacctaacataggagaacaactttgcttaagaatgtaagcatagttgttaagaagagtttagagataattaagactgaagttggactgtcaggttactgggtctgaattttcagacaaacagtgcaaccactgagactttgagcataaattcaactatgatccagcaagaatctgcccatggctgctatgacaaacttgtagctgatttatagctctccatctttgctgcagagcatggagtatgttaccatatagagttgtgagaaaatcgagcctaaatgctgactgtcaggcgctctgaatgcagttcgccatggtacagtgctctgctgtggatcagattgccagcgctgcgtgctcaccgccggcgacctccctgcgcgaagattcgcgtcgccgccgttcggatttgtgcacggtattggatggataacgccggggaaagggtaactcatacgtggcaccatctcctgagctcgaccggagttattcaccggcggccaccgtgactcagtgagctctcgcctcgctgtcgcacatgctttgattcgcctcactgtgcctcttccttacgtggttgccatgcgttaatagcccacctcgtagccgtggatcgatcaccggaccgccgtgcctatatataggacagggagccacgacgaggtgctcgctgttcttcaagtaagcttgagtacaaccaggaattcgcactgccctctccaccttctcctaaatcgattgcgcacggtgaaagcacagcctcttacggtcctatagccccgatcccatctcccaatttcgcccagagccgtcgcgacaccgtt

SEQ ID NO: 2616 - DNA, 814 bp, Zea Mays
atacttttccacaatgctagtggctatgaaggagtgggatgctccagaatcaaaaagtacggtagcgggagtaaattcaacaaggaactcaccgagtactactcccggagcctgctgagcttcctgggcatcgacgtgatttactcgtgcccttccttggtacggagccttgttctgctggctgacggcggagggcgccttgggggcggatgccgaggtattcttggggccattcaccaagttggagtaggcgggtcctggtggcttcagctgtggatagttgttcttgaagtgacaaggatcaccgcagtgccaacaagcatttgccgggggttggttgcttgccactgagggggaatggaaagagctctgactctgctggctgaatcgtgacggagtgggtccagctggtctactgaagttcggccccttgggtggaaacccaaatgatcgagtcttctggtgccggtcctgctgctgtgcccggagaacctggaacttccttttgagatgccctttttcttcctcctttgccctttcaacttgcatggccttgttggaaaggtgagagaagttgaggaagtcttggctagccagaattgtcttgagttctggcctgagtcccttcaggaaacgggccatcttcctgctctcggtactgacatcatctggcgcgtagcgagctaactctgtgaacttgtgcacatattcgctgacagatcttccgtcttgagtcaattctcggaactcgtcctccttaagttgtacaagtccttggggcacatggtgctcccggaaagctgcttcaaattcc

SEQ ID NO: 2617 - DNA, 602 bp, Zea Mays
caatgtttatgatgccatgctcaagttttagttacagtaacaccatgggtgttacaaatacctgcctctccctgcgagtaaacagaaaaggaattgacatgatctgcaactaccttgtctgcataggagctcactcaatcctccttccaagatttcctctcattccctagcaatagatcaatctatggagcatgggcggccaccacgtcttcatcctcccctatgtaattcctagccggccaccaagtcttcctcctcccctctataattcctagccagccaccacgtcttcctcctcccctatgtaattcctagctgaccaccacgtcttcctcctcccctctataattcctagccggccaccatgtcttcctcctcccctatgtaattcctagttggccaccaagccttcctcatcccttctgtaatttccaggtcaaagggagcaggggcagccatcccccatcccatcccttccaggtgagtttgtgttccttgcgaccatcttctcaccttgggaaccacattcacctcctcccctatgtaattcttaggtcaaacagagcaagggcagccatcccccatcacgtcccttccaggtg

SEQ ID NO: 2618 - DNA, 527 bp, Zea Mays
gtgtaccaccgtactaccatagaagtgcaatttgcctctgatctaggttgtaccgtgtacatgaattgagttcaggattgtatgcagtaatcttagtttttccttgacacagaggataattcagcagatgattaaagatcatagtttagatctgtgaatcaaaatgtcagatgcttccagtggctatatgattaactgtgaagaagaggattgcaataactcatgtaaccaggtgctagaccagacaccctgaattcaagtgctgctacgacaggagccctaaactaagatcatgcgccttatatgagatgcaaacttcacgacatgccaaaatccataatacggcaagcatgagttagatcgtacgttagctttcttgaagtttccaagagtcccaatatcgcagccgaaaccatcgtcgtcctcgtccaaatcttctccgctaacagggccgctgacgctagatgcggcagcgctcccagtcgccgcggcggcggcggcggccgccgcctcgagggggcacctat

SEQ ID NO: 2619 - DNA, 487 bp, Zea Mays
cccctctcaagtttctgtcctctgccggcggctgctgctctagcctccaggtctctccaccgtccaccatcgtcggcgtgcagctcatccttgaagaaggtcgtccctgcccccttctcatctacaatgcacaagatgagctcgtcatccgaaggtcatccctgctcccctccttccccttgtctgcactctgcagttttgcatcctgcacagcacgacagcatggcagttttgccaagaatctgcattctgcgcagtctgccctggccctgctcatctagtgttctatacttctatgttctactgccttacttcaatagttcttagcttcatctccgccaaccagtttccatcagcccagcagtagcatatctagtgcctagtattgacttgacctctatctgttgacatgttcagagtttcatgctgccggtggacgaagaggtgatgacgttgaggtcttattccccgggtccaatgtggttgg

SEQ ID NO: 2620 - DNA, 1443 bp, Zea Mays
aagtttcagatatagtaatcttgagtgcacaattccattcttttatgtgggaagtgcatggatacattaatctttttctatttgctagccttctcccatggagatattatgacctactatatgcttatttgtgatccctaattttaggtatgtgttgggagctgtagaaacatttctagatgctattccgtcagctggatttttccaaggtactcgagcaagttttatcttggtttttatatgaatatttttgcgtggatggtcaatttgtatatgctgaaagacaataccatagaatgaacagttcaatcattctatgtccattgttgtcaacgatacacgtaatgctaacatgctagtcatatagtttgtttgtacatgcactttatgtgcatgttcccataaaaatagctactaccaaatttaaactaaaaaagcctatttacccttggtgctaagagcaataactaaattgagatttgatcacaaatttgttataatagtttggtggaactatggaatttggatgtttctttgacattatttgtcaaatggttgcaattgtggtggaaagggtcgagggaaacctgatgtcatttttcattgttctttttatccaagccagatggatacactattataacgaccaccgttttgttgtatccactagctcaaaaccaatcttaggaagtgcctgggcaacaaataccggaaatttgtggagtttaaaaattacatattcatatttcacatgggttgggataattgaaggtgcaagtataaattataaataatttattgtttatgaaataaatatctagaacattatttgttgcatttgtaaaaaatacaaaaaaagtttaaatcaaacagttagtagcacaagggaacttgtttcttccaagtgctgaatttgtggaaatctaacttttgcagtgaccatgttcttcatcctaagatttgtctatctaacattttttatctgaattaactcgtgtaaatttatttaaaagcagagactataacggtggtcaacaacacattagtaaatggtacaacaaaaagtggcgcaacaactatatcaacaccaagtctgcatgacctccagatctacggtgtgatcgtgaccatattactctgttttattgtattcggaggcgtcaagatcatcaacaaggttgcacctgctttcttggtcccagtcctcttctcaatactatgcatttacattggcgtctccattgcgccagagcctggtgcttcaagtaagcagtccttcgactattagtattttgtctcgttttttttgcattcaacctttattgatgtgctttctacctagagggaatcactgggttgagcatcgtcacacttgcggagaactggggttcagagtaccaacctacaaacgatgctggtgttcctgatccaaatggatcgata

SEQ ID NO: 2621 - DNA, 614 bp, Zea Mays
attggctctgcaccacacaaccctctaattatatcgaccgtaagatcaaatagtgaacctaatactgatattttcagaaacaccgttgatggtttttattcttggcatgaactgtattctggtgcagtaccgtagagaagtttgcaagattttggaggctgcctgtgattatttcctcaaatctgaggcaaatagccatgacagtgacgagattgtgatggtgtcttcaccatgaaagcctacagatgaaaaagatgtacatagtgccatgcacatatgcaagtgcagtggaaacaagtttgcaagattttgcagggtgattgtggtcacatccaaaagctggggaacagacaaccagcaatgatattgtggcaatattcaagaaaagtgcagtggaaaaccacctgtggaatcgcatccacatgaagaagaggcttcagattatggagacattcctgctaagtagtgaatcagtatgatgtgtcatccagtacataaaccatgtgattatagtagttacccagattcccagaacaagataggttatgttgatgttacatacaatgctcaaagcaaaaggaggaactccaaaattctgcgaggaccagtgcaat

SEQ ID NO: 2622 - DNA, 638 bp, Zea Mays
caagtcctctaggaccatatcctcaagagtttgatcaaagttagctagggacagttcttgcagaccaatgagggcagacaaagcaagagaaggaactccactacttccaccgctggcgatgaactgccgtctgtttttccgagttaaaggagcttcattttcttcctcttcatcttccacagtgacaacataagtagcacccccattgggatcagcaacagacggagcacccacattgggatcagtagcagtttgggtacacccattggggtcggcgtcagtaagtccagtcgtaggcactccttcagtagcaggaactgaggtaccagcgtcctcatcaaaactggatacccgccggaggcgtcttcttttcttcttttgctcatcagcagaaggctcaggctgattggttcggctaggacgcctcgggcgagtactgacaggttttgggacatccaaagttgtatcaacctctggaaggggcaccactgccaacgtaccaacaggagcagcgtcggaggaatcctcagctaacagatcaagcatgtcatttatgtccgcatcactagggttcaggggcacttcaaaataaacctgccgttcatcatcaggaatctccccaagcgaagcaaccaaag

SEQ ID NO: 2623 - DNA, 520 bp, Zea Mays
agggtccgaggtgccacgtggtgcccccaagcccccgagtggatttctcccaacaactcctgcccttggctgattggtatacaccattggattattcccgaggggctgcatcggtacaactccttttcttctcctatcagcacaaaggtctttgctcggcgggcgaggcgctgggcctcggtcttccctaggggaagttctccctagaggagatactctaggtagggttcctccagtccaaagctggagcggctcagtcatcgttgccgtcgatttgcatagcctcgagcccgtcggccgggggctcttcttcgtggggggcgagctcggacgtctccttgggcattactgagggcttgaagatgtccctagcaaagacattcggggggatcgtggtccatcccgaggcgattttcaccagttcgtcagctacctcattgtaccagcgtgtgacgtggttgagctccaggccaaaaaatttatcttcgaggcatcaaacctcctcgcagtatgcctccat

SEQ ID NO: 2624 - DNA, 1051 bp, Zea Mays
cgtttgcactaaacccctcgcacttctgtttcttcacaggcccaggtcctcgacggtaaacgatggcgtgcgcgccctccggcaaacttgtaccggccgggatgcgcaatgaccggtgcccgaacttggttaacacctaatcccacctctagcgaccctaatccctccatcaattgcacgaatccggcccggagttcttctgcccacgatgacggcgaacaccgaggacaaaccgaggcgttctcggcaattaagcgcggtctagctgaattggttgagtcgacaagcattcctagcgtgcatgggtgctgaaacgagggtgagaagggcgagagcggacctgaggatggctgaccacggtggagtgtctcacggcggcgacttcgaccgatttggggaaataccgaattcgggtgctatggtgggtaatcggtggcgaggagcggtgctcggggttcgtaacaagctaatggagcaggccagggcatcaatttatagtgattaacaatggtggatccaaatttggggatgaaagctggcggccggagcaaggtgagtcaccggagttcgcataatgtggcattcactgggcaaaaggttacgaccgtcacctggttatcctcctcaacccgcgacgatgtggtagaatagcttaaggagtgtcgtgatcgaggtaaatggcggcacgacaacgacggtcgcgtggacacatcgccagtgcaagtgggtacggtgaagccggctcaatccactccccctccgatcttttcacgtccgcggtaatatcctgcccgagctgaacacgaatcacggtggacagcacagatcgcagcgcggagattgctagcagcgaagttcattgaatctgatcttgttcagttactataccatcgcgaacacccatcagtgcgtctgacagagcaagttagagggctttgatctccaatttctatgtagtaactcactaatccatctgtagcaaagttgttgtccaatgtattagctacaactttgttacaaaggtcttgcgcaaacatccactaaatccccc

SEQ ID NO: 2625 - DNA, 302 bp, Zea Mays
aaaccacatcgaggcagaggcagttcagattcaaaaggatctccagtaccgagaaaagccagtgaagattctcgactcagcagtcagaaggacccgcaactcagaagtgagactctgtaaggttcagtggagcagagatggtgaagaggaagccacctgggaaagtgaggattctctgaggaaggaatacccttaccttttctcgagccccgtctgaatctcgagggcgagattcctttaagtggggtaggtttgtaacatcccaaaattctaacccaggtttgaaaccctaatctacccct

SEQ ID NO: 2626 - DNA, 656 bp, Zea Mays
cagccgtgcacggaagctagaacgtggtcgtgttgtgggcgcgccccgtttttcatctggacgccaaactgtgtactggtgcataaggactccaagcggggtaccgatttggggaacaggagtcggtaagagcagcggctgaggcgtggccgcgtgggggagtaggttgcaactggaccgcgcgtgcggggacgatcaggtgtcaatcaatacaggttgaaggcgccaggtatcccgtgtcaaaaatcattgcagatggacaaacaaacgcccagaaacacgcatttgaagggtctgttgcattgttggctaccgtcccttgaggacagtcatggtcatggagttcctggagttgtgtacatcgtctccttctaggccaaggcccctgttccaaatcttctctgccaagtatgccggcttgtccggcgtgggcagagacacgctcccgttctccaggatggacaccacggacgacatgagcggcctgcggttcgggtcgtcctggacgcacaggagcccgacgtggacgcacagcaaggcttcgtccaacacacagctctccgactgcgagatggacgagtccatcaggtcacttgcgttcccttcgttccatagcctccatgcctgaaaagagagagagagagagagagagagag

SEQ ID NO: 2627 - DNA, 451 bp, Zea Mays
cacgcgtagaggggggcgaggtcagtctacactaatgccttaatagttagtagagattaccacccctattgttatccatagtaggatggtcttgtgatgctttgccctctagacactggactaatggagtagcatggtttcgccagataagcacaactacttgtgccgtatcgaccacaacacatcgcaccacacaacagtcatctgccaacatacgaaaacggacttgccatctccaccaggacaacgtctgaaccgctccacgcgcgccgtttcgtctggttgcggagcgcaggcagcacccccgcccgctgccatggctgatggctgctagcgcggagcgaaatgcctcacctgcccctttcacgaaccacgcagagcgcctctcctcctggacaggagcaccccctgccaacgcccgccacctggcctctcggctccgcaatcccgc

SEQ ID NO: 2628 - DNA, 1065 bp, Zea Mays
cgaagacatcgtctccccaggaaccgcgcatgtctccaacaattccgcaacgaaacgattggaagccctcaacccctcagctgttgtacctaatttacttttcttaacggccacgcctggagccttgtcccatgaggggccctcgtcggccgttggcatcacttgtttcccccagcggacagcaacatcggcatagtcgtcccccgggtagccagcatacggcaaacggttcaactcaaaaacgcggttcaacctgacatttgaaccacggatatcccaacttctcaatgtctccgtcttcggcacatattttcctacaattttcgcggcctcagcctccacttcacgcacaaacacggccgcgttgcgatcgcgcaaatccaccatgaaggttggacttcgcaccagctgaccgccaagtgtaagcatccagcaaggggtcacttcgcccaatacccagccatgcgccaagggccacaccccgtaggcgataaactcctccaccaaatcatgtccgctacccaggcgggcagcatgtcgaagggccccttcatcttcgtcttcctccgccacctcgaatcaagggaacgccacataacagtgtgagcataggatggccgaaggcagactcggcaagccttcgacatcaccaggagccacatagaacaaaaaatcccaccagttaccccatttgttcctagcgcaggggactatctccacaacctcagccaaagtctttccagtcctcggcgtgaaggtgcatgatccaaattgggctattttattccctatcttcatcttctgccaatgcaggcaataattcttggcgaagacctccatagacggctgcccacgaaccgaggccgggacatacttagcaagcgccaccaccgcgttcggcgtcagctggtggacttggacctcaaatcgtcgcaacacctccaccacgaaccgatgtgtcgggaggcgaacatcggcagcaaaaaaggcctcaaaaactatcaactcgccttcaggctcggagatttcctccgcacccggggctcgcccgacactgttacaaaa

SEQ ID NO: 2629 - DNA, 371 bp, Zea Mays
gcacagtcctccccttcatctgtggcgtgagagagaaggggagcgcgtcggagagttgcccgtagggcttgccgctgcgtgcgctaaggggctactgtagccgctaaactgtgaacagtgcaagaggaggggaggggaagggggccgcgctgcagatagtctcacaagcctcactcccattgattggccgcttgtgctaataaacatgcccccacttccgtgaagaaactgcaaagatatgattggtttcgtgtggtggatggatggaatgggtcaccgcctcacccgtcacagaacatcagcaaaacaggttattggttggttttcccatatctctacaactattaagagcaaagtgtagactgcccccg

SEQ ID NO: 2630 - DNA, 370 bp, Zea Mays
cacgcaaccgctactgacaatgctatttttgtggcggcttcgaccgtggctgctgatgacgattcgtttggctctgtgtctaagtgttttgagtctgatgattctggtagttcgattgcgtggacggaggagtcttcagatgaggacttggattattttgtaacgttggatgtggctgcagcagggccttcgccgctcgcggagggttccaaggagctcctgggcgcgagtactgggtataggcggcgaagggaggtggcgaaacagagagtgagtgaattgtcgcgaagtggtaggcgttatcgtagtgagatggagagtggtcgtcttcgcgtggacgggactggtaagcgagaattgttgtcctcgc

SEQ ID NO: 2631 - DNA, 629 bp, Zea Mays
gccgacttccacgtgatcatcgtcccccatgggcacgggaggccgttgtggaatcgacccctccacatataatcgcgtgcgccgctgctaggagtgtcgtctcacaaacgcgttagaacctaagccaagagggagagcacgagtgaaccatgcccctgcgtcaagtaagatctgcgccgccaccgtggattgctaccagcagcgcaactcgggcccaaatctagtcacccaaggcttgattagttgagaaggaagccgtgcgtgggcgcaatcagatagtggtgatctgaagcagtgggaattcatcgctggggttggaaatccgtcacttgccacggccgggactttctgcagtgcatagtgaggtatgtattttgtccagcgcattccccttgtctagggcatcattatagactcctcgaattaagtcgtagtgcggggccgagttttgggccgtctcggccatggcgccgccgtcgtgggtggacaccatcgcggctcggcgaccaagggaggaagaaaatctgtcgaccgttggtttggtgatgtagggctgagatataatcctaagtaccggttcggcctgatcttcttccggccgtccgatgcggatggtgcgtgtagaaagc

SEQ ID NO: 2632 - DNA, 547 bp, Zea Mays
atgtagaaaaacaaaaggaaaaaggcctccagcagccgcgcggcccgcaaaacttcagcgctcccgcggcctgcctccccgcgcgcagcccaccgggccatctgcgtgcatcggcccagcgtgccccctccccggcccacctcgctctcccgcatgctccctattcgtccgcgcgcgcgacggataaactgctcatgcctttgtccctatgtctgcgcgactccattctcctccctccctctcacctcgcgatgccgcccacagcaaccgtgtctgcgtcccatggctacctagcgcgctcgcccgatgcactcctactgctgtgcagccacaccgtcacgttgacgtcgacaccgacgagcccttcttccccgacgagcccttcgtctctggtgagtttcctcccttctctgttctccgtttccgttttctctacatcgtgctgcttagtcatgctcccgcttgcgcgccccgctccgtagcctcgtcgtgccgtccctgctgccgctgcgtagccccgccccacacatcaggccggttgcgcgcc

SEQ ID NO: 2633 - DNA, 627 bp, Zea Mays
gccgccacggagagaagacgatagccgcctgccgtccattctgtagtggacggatgagattagatggggatccatgatggttccgaccgtcaatctggccgcggtcggctcggattaggtaggggaaacgtttctacacagatggatctgagtcgtccgatctagatcagatgagtacagtcatgtctcgagtatttaaaatctaaaccgctgaaccctggatctacgactatgatctgatcaaaggataccccttcgtcgtattaaatccaagccatcggtcacggatcgagcggttcggggaaggttagagtcatgcgcgatcgtcgaccgtggatcttagatcatgtggtctacataggatatcggttctgttaacgaccgatcaaatccatgccgtccactgttgatcgggcggccgaaatctggttataccccttcgcggacgtaactttgcataagagaccccacgaaaaatagaaactaacccgccgtccacgctgtatgcaaagtatttgcaattgagccctggaatttatggattgcaccccaaactccctaatattcctatccgttgtccagagactttaaaggaaattcgaaattaaaatagaaattgattttaag

SEQ ID NO: 2634 - DNA, 466 bp, Zea Mays
cttctgtgttttgatgaagacgacgacggaggcgcaaatctctggtggctgcttcatcataattaccttcttcatcaatcaccgcatcatcgggaagacgtggacgaggtcacgaggaggtggtggtggcggtgcttgttgttgcgtctccaacacagcaagtctgtcgatgatctgggtcaatcgtcgatccagcctctcgtaagtcctaccaaggtccatgttaatgaaggcatcatgcactgacttgtggaccgtctcctccatttgctccttcaggagcttgttgtttgcctcaagatcttggcggctaacacattcatcgaagtctgtagggatccttgcttcttcgtcgtcgtctgccatcgaaacacaaaaataggaaacaaacggtgaaggttatccctaataatctcactacacgctcctctcgggtggaacacaggaacacgcgctaatgtatctt

SEQ ID NO: 2635 - DNA, 335 bp, Zea Mays
gcctcgactagttcttaactacaggagctacagcagcctcttcttttgtacttgttctgctgtctcctctattcacctagttttctctgtattacctctcaggcgattaatctaaattccatggcaaccccttccttccctgtgctgttcactagatgcctatcctgatttgatgagatcttccatatactcacatccttgtttgttctctcctttcttagcttagcttgtgccatctttttataccccatcaattcttaccaacacaacttccaaggcgatttcaatatcaggatttggaatttctggcatatttgcttttgtttgtaaattag

SEQ ID NO: 2636 - DNA, 389 bp, Zea Mays
ccaccgatgtcccagcaggagcagcatcagaagagtcctcagccagcaaatcaagcatagcacttatctccgcatcgctaggattcaggggcacctcaaaatggacctgtcgttcatcatcaggaatctccccgagcgaggcaaccaaggcactaacttcttcagcagagggtcgcactctaaggcccaaactgccatcagtgacaggtggattcgacacaaaaagggtgaaggctttgggaggaggcaggttccaggccgagtatgacactggggcaccaacatttgacaccttgcctctaaggatcatctcaagtcggttcaccaagtctgcagagggaattcttctgttggtaacccgagttgagtcggctagacctcgatacaga

SEQ ID NO: 2637 - DNA, 299 bp, Zea Mays
tgttgaagaatgataccaaatttaactagtcctcaagatgcaacgaagtcttcgagcaactgaaggtactgttgaccactgctctggtattggctcaaccagacatttaaaacccttttgatgtgtactgtgacacatcaggcagtggtcttgggtgtgttttaatgcaagagggccgagttatagcatatgcttcaagacagttgcgccggcatgaggaacattatccaactcatgacttggaattagccgcagtggttcatgcccttaaaatatggcgtcattatctgctgggaaat

SEQ ID NO: 2638 - DNA, 568 bp, Zea Mays
ggttcagtccccctcgccgccggtgatccttgcgctcggattcgcgccggtcgccgtgattcgtgctcggcacaccgtggatattcgcgaggaggtagctttgaacgtgtcacgatctcgcggacctagcccgagcctagtcagagataattcaccggtggccactgtgactcggtcatttccaccgccatatcatccatgcctcgctcctccctcactgtgtcccttctttacgtggtaaccatgcacggacggtgtaatccacggtcgtggatcgctagccagaccaccgcgcctttaaatagccccgcacccacggcgaggtattcacatcttcaccagtgaactcggttgaagcacaaatttgcggaatcctctccacctctcccaaaattggtagtgcacggtgaaaccatagtcctttgcgaccgtgtagccccaacttcccctcctaattccgcctagacccgttgcggcgccgtttttccccttttctgtcaccggcgagcgaaaatcctccgcgctccgtggccagctctgttcctgctctttttaatcgtgtttcagc

SEQ ID NO: 2639 - DNA, 561 bp, Zea Mays
tgtcgcctatggaatggacaggtcgctgcctgccggcggaatggacaggtctcaataaatgcagaggcggcacaccgcctgccagtggaatggacaggtctcaataaatgcagaggtggcacaccgcttgccagtggaatagacaggtggcgcgccttatcctcaataaatgcagaggccgcgtagcctagaggccttacgtcaggctccgcccgttggcttacgtcacgtgcagtaggccacgtggcagcatcgggtctccgcctgggcggggagcagaagcgtacacgataagtccggacacgtgtcggctccggacccccgcctggccttgattaaggcctgggtattctctgtcccagaatcccaggaccctgctgtgagcggcccggatcccacacagaggggtccggatcccatcctaggggtccggtttgcgccggttgaggtcctggaccttacccggaggcccggtctgtatatacaggggtccgacacctccgcatgggggtctgggtccgctggtgatgccccagagtgtgcagctctcttgacacgcga

SEQ ID NO: 2640 - DNA, 568 bp, Zea Mays
tttgggtgagttgccatgaaaactttagagaaaatccaccctaaactttggctgtcaggagcactgaagaacattgccatggtacagtgcccgggaggataagcttcagaccctcgccgccgacgaccaatccgcgccgtgatttgcgctagggtcgggatgggcgcgtgacgtgcatctcctcgcaaagatcttcttgatccgggtaagatcgccgcgatggagcgtgatgattccggccgccacgcggccactaatcactccggccatatccggtcatcagcgccattcatccatgccctcactgatttgaccgcattactgtcgcgacgggacgtggcaagctcgtaggaaaggatagtgctcgacgccgtcgttgatcgccagctaaggccgatgatggttatcaccatggacatggcagtggctcactgcacctataaattcaccgcctcctcaccccctccattcaaatcaaccgagcacagctcttcgtctctaattgcgaagccgaagcacccgctcccaccctcgattagccaccatagccggagaatctcccttttcc

SEQ ID NO: 2641 - DNA, 670 bp, Zea Mays
caacgagaggcacgtcatcggcggaactgccgccataacatccgacatcaccatgccactaggaaatgagacccaacccaacctatttcccgacacaagacgtccgaggtttgggaaactcctgacgaacaggagtttcgcctgcaaggaactcccgccagcgaaacctccgcctcgccttagagcgtgagcatgaagcggctcgacataacaataggacctcttgtgggcaccaacttcctcatgatctacagccggagtccgcccaaaccatgcaaaccccaagctaggtcgggcgtgctggcaaagatagcaaatgatctaccccgtactcctaacaacgagtactaccggtggatcctccctcaagcgacaaaccacctcctaccaccggctcgtcccgacggtgacgcatgtcaccacatcaatagtcgccatgatgcgtgagcctacctctcgattgtgctgtggcaagacacactccagtggctctaccatctccctcaccacttcattgtccgctgggccgacttttctagattatttgtgcaagctcaataaagctttgaatgcactaaaacaagtgcctagatcctagtactctcagttaaatgcaaagttaataggattggagtttacatcatcgaagtctaacacatatctcttcttc

SEQ ID NO: 2642 - DNA, 551 bp, Zea Mays
aagcaaactaaatctaactgctactgactagactaagacactgaattaaaccttattacagactccgactttgtcgatctagggatccaaatctattcgggtcctgcagtctggggtaccatagtcgaagcgaccatggggcggcaaacggtaagggtgctgaatcccgacaggggtgggggaaccaccatccagatagtggcgtgctgcgcactcagcacgcaattccgcaacctccgcccgaaccttgcccaactcgtcaagggcgtggtccaactatgtgttgagcacggcgaccaagttgaccatgttgttcagcctaggattgccctcaccaactggtgaggcaatcacacctccagcactgccggtagaacgacgagggtagtactttaggtcgaggccatcagctacctcgctgaacaacgagcaatactgagaaagtgtccgtcgtgctgcatcttgcatggctgcctcggcaatatccctctcagtaagagaatagtgctctgagaaggcttctgcaccctagagatcatcgtccagacggc

SEQ ID NO: 2643 - DNA, 819 bp, Zea Mays
attttgattaggcgttggaagagatcatccccgaggaccttttattagagcctcctaaagctgacaatcccattatctgttcagaggttccagatgatggtcttctgccatgtgatcctgccggacaagaaataacttgggtagtctctcatgcttcgtcgaccttggagggcggtctagctcgtgaagacgctgatccgagtcacctggctcctatggacatggctgagggatcttcagccttagaggtggctgccacggaggacccagcccccgagggtggtgctgggagcgacccaacccccgagggtgttgggtaggctccccttctgctgcttccatggacgtccacgttggattgccgccagtccaattcgaggaggccgtggtgacacatctatctacagctctcgctggtctggtcactttagaggccagtgatccagacgtcaggagtctaccgcctgctgacgaggctgaggtccctccgagtcgtgcctttgatatcgttgccgttgacatcccctcatcaagcaacgtatcaattctccctggcttgggtcttcctttgttcctcaccaatctttaggtaaatcaacttccgttttttaccattcacgctggcaagctagcttttttgcttatcttttcataattaccggatgttcttggttctgtatctgcccaactgaagttctgtggggctcctatccccgaccaagtttcatctttgatgcagtggaaccctctacttctttaaaaacagatagatgaactcatagtttccttttttgctttcattgctctgctcattctata

SEQ ID NO: 2644 - DNA, 1255 bp, Zea Mays
gaaaaaatagggaggttccatagaaattgatcttccatctattcccaggtctgtcaaagatgtgagattgcccaagtagctcagagtgacaccagagaaatgtgtatcctgtagattcaaagtttccagcgagctcccatggagaaattttggaataagccccgagagttgatcgttatttgacacatccaatactgccagattcttcagttgaaagattttcggtggaaaggtgcctctcaagttattaaagctgagttgaagaactcttaaattgagaaaatctgcaaagaattctggaaccacgccggaaattccattcatttttagattaatcacttcgatagagcggagacgtagaaaatgtcgatggataggaccaacaagcctgcattcctccatgctaagaacctgaagatgaggaacgtattttccaagagttctgccccaatcttctctgccactactacttatgtccacgccatcaaggtagagctctctcagatttgtgaggtttgacaatagtgtctcgaaacttggttcttgtaggaccaaaaggttatagctgtcaaaaagattatacaatgtgtctatttcagcaccatcaatgttatggattgaagaaatatccagcgatatgagactcgggagtttgcctattacaaccggaatgtgtccatagaaacctgcgtaagaaaggttgaggtgtgtgagtaccgaaagcctctcaaagccagccgccggaataggggatccaccgaagtcattcttgctcaggtcgagtcgctggagtgaggtgaggttgaagagcgcgccgtcaagactgtagctgtacaagccacggccaccgaggtcaagaacagtgacatggccggagacactgtcgcatccaacaccctcccagaggcagcagtccgtgcctgcttcccatgaagcaagggtggtggtggagtagtcgaagagaaaggatcgcttgagctggaggagtgctgcagcatggtctggatggcaccaaggagctgtgaggttaccataccaagtggatgaagctagtgatgagcggaggtggtgtatcagtatcaggaagaggggaaggagataactagcacgagccatgcatcattgtctttgcactccagaaggaaagcaaaagaagatagttctatatagtagtactagagatggacacatcccattgacgatgccacccagtccaccgtaatgactttgaagttttcaatgtcaagccgccgaa

SEQ ID NO: 2645 - DNA, 433 bp, Zea Mays
gggcacaagaaaacagagaagtgcggggttatcggtgtaaagtttcccaagactcaggacgctgtttcactggacggcgggttgaaacactgtaaacataagggctcaattacaaaaaggcaccacaaagcggtatcatggatctggggccatccgatcaacaccggacgctccagattaaatcgccaggggtttaaatcggtacgcaatcatgttcctccgatccgagatcgacgctcgagatccgaccatgtcagtgttgcatccgagccctcggatgggcgacacacggaccggattttataagaccacgctacgatcctaatcgttgatccagggatccacggtccaggccgatccaagccgaaagggtacgcatggcctgatccgagccatccgcggctgaatcaacggcgactgtgttttccagtcc

SEQ ID NO: 2646 - DNA, 353 bp, Zea Mays
cgagcattcctctccgcacacggaggtaaaaaaaaaaaaatacagacacaggctgatacgcgccggtggctctaatcattccatgccaccccacccctagatttgcatccagaacaaatacactaataagtaagccggccgaaacgcagcagcagattcccacaatgatgaggcgcatggaaggcggcatttcggcgacccggggggcaagctaaaaagctgggcatccgagcacgggagcatggcgctcaaagcaatggtccaaatcagtaccaaaactaggcaacatgacaagccaacccaacccagcaaacacctgaaaacctacacggcgccgctagcggaaagctcag

SEQ ID NO: 2647 - DNA, 1027 bp, Zea Mays
ctgacttcattaacgcctgcaaatccactcagaagttcgttgcttgataaaggttcttcctttataacttctaaacagggtgtcttgagcctgatacaaaccttacgatctcttactacaaatattcaattctcatgagtctctgcttattgttttgattgattttatatttgtcagtcaaccctaaactttggtttggaaacaagggctccattacttctacatatttgctcagaaagttgttgcttaatcagggctcattccattacatatacctttatcccttccaaatagtgagctcagcttccacaatttgttttccattgttggtagtattacatatttcttcttttgataattgtgcattttttaaagggcttatgaatgttggatgttttctaaatggtatatctaaatgacattataaaaaatcgatccttctcttttctatgactgtgtgcttaattgcaaactaggtatacaaagcaagtaaaagcatgcacatgaaataaatagttgcgactaaaaaaaatacctaccctatgttctaaatttttcgacaattatttttcatgagatgtggtccatggaaaacaaggtcctctacttattgtttttgttgttttttgtagtacattctaaactcctgattagcaacatcggcttcattaacatctacaaatatactcagaagtttactgcttcgtaaaggttccttctattacgccttcgtttataacttcctcgcatggtgcattgatcttgatacagacctttcgagcatcttacaacggatattcaatattcatgactccctgcttattgttttgattgcttttttatttatcagtcaaccctaaactttggtttggaaacatgggcttaattatcgtctacgtatctgctcaaaaagttgctgcttaaacaaggttcatttcattacacattcttttatcccttcctaacagtgtgctctccttacctttttacgttgttagtagtattacatatttctcatttagataac

SEQ ID NO: 2648 - DNA, 302 bp, Zea Mays
ggaaatgggccgacccaggaaggagatgggctcacgtccagattattcgtggcttgggcgtgatcctgttcgcttttcccgcgcccgacatccttgaacaccggggatagctcagaacgattgcgtcgggttctcctcaagataagtgcagtctgttcactattaactaggagataagctggaagagtgtgatcaacatgtacgagggaagtaccctacgatcgtgtatataaggccaagggggatccccatcattttcatctcattagcacctcaccattcaaaagacaccacttgtaaac

SEQ ID NO: 2649 - DNA, 497 bp, Zea Mays
agctcacaatcttcgagaatgcaacaaacctcttacaggccaccagctccaagaggcagagggagaagaagcttcggaggaaggttcagcactcaacccaggagattgttctgcttattctgtggggaggataagggacacacaacaagaacgtgccaagtcacaatccaaaaagcagaaggagatcgctgaagcccaagcatggtagaatcagccgaagcaggtcttgcatactgcctcatcctattcgccatatatccctgaatatgtgggcaaccagcaacccacgatatcagttgcttcggcaaatcattctcaagctgcatgggctcagttaccaccaccatcaccattggcacctaccttggtccataaccagcagctagaagggcatcaccaggcacaacaacagcacgatactcaggaggagtttgaatctcgtacagtcaacaacaatatgcccaaatcgagacatatttactaatgcaacacacggc

SEQ ID NO: 2650 - DNA, 782 bp, Zea Mays
ctcacatgcattactgttctgaaattcactaaccggtagcggtaggatccgtccagtaaagtaaagtaataaatcaatgtagacggactctggtggcggatgtgaagtaacatgtaacattgatagcagcaggacgggtaacagaacgtgaacgccagtacatagacaattattccatacttgcattccacaccacactcaatcacacacagaagtgagaagccacagccagctgcggtaaggcgtaaggaagtaacggcaatactgcaaggtgagatcagttttgacccgctctgttcgtcacttcgtctcccttgtgatttccgaactcccgcaccaaaagcagagcttgcactggagcagtgaagttgcctgactggaatcgctcatccgcctcgatccaaaaaaaaaactgacaaaaacgccggcaaagcgcctcaaaccacacgcacgacatccccgctccgaacggcaccaaccaatccgaagttccgaaaaaacgaaaccccagaggccctgaaccaccacaaaatcctgaacaacacaagcgcggcggcacggagtcacttacaggctggatccgagccattggcggcgcagcgggggcggctgcttgcctgctttagcacctcctcggcgccgttgcagacggcacgcggcacgggggctcagttgttccgcagccctcagcgaggtggcaggaagggctgccggcctggggacgaaggcggcagtacaagaggagggcgttggtgaatcggagactggtcgcagtgaattcg

SEQ ID NO: 2651 - DNA, 535 bp, Zea Mays
aaggcgccctaagagggcacgccattatatcataagtaatagacaccaacatacatggcatagggtattaggtagcaacatgaccatacattcacataaaatgtctcaggtgtgtatcccactgacatgtggggacaatcaacctcagtcgtgggggacctcagccccggagtcccaactgtgacccatatatcaggaaagacaagacaatgcaccatgtcgagcgtatgcctatgtatgagggatagtgatgtggggctcatgacaataggcgaagcgacgccacacacgaccgcatcatgaggctgacccacgggacccacctacacactactatgaagatattagcggtggactcgctacagggacctgtatgacggacagacaggacaacacgccatactaggagtatggctacgcacgaccctacggacgacatcgagcacactacctcaacctggggcaacagaatgccttctgaccaatagagaacaagtctccattgtaaggtcttacccttgagctataaaaggac

SEQ ID NO: 2652 - DNA, 278 bp, Zea Mays
agaggtgtcggataagcctagtgacgctagatcttactgagcgtgtatcttctcttggtcgttgtgctgactcccaatatcttatcctcccatctcgtctaatcagggttaatgcatagcgaatggagtaggttgcgacatagtctgatacgctaccgtgcgtaggggtggacagtgtcgtcccgtctcccccacctatctcttcataccttgataacacacaaggaacgataaagtcataaagaagggtgtctaagcggcgcatttggtcaatagtc

SEQ ID NO: 2653 - DNA, 430 bp, Zea Mays
gtaagccaagggctagaggtcaacacaacgactgcccaaatcaagatccatcttagcagctacaagtacacaacattaccaaccagcaacaagcaagcgaagtgcccctcacggtcaatatagcccccacaacatggacggggaggatgcgtaggaagaggttgtggccaaggtagaggcccccggtaatagagaaaactctattgtgttttccatggcgaagacatcaatcattccacaaaggattgtcgagtaaccaaggaggccaaggatcgcatggccatggtggtccccgacaacaaccaaagggtcatagcccatacttaccaacaacacctcctcgttacgaagacctccatccacctttcccacggtaccaccaaaacttcaacgcacatcatgatagatcccccaactccctcaactccca

SEQ ID NO: 2654 - DNA, 1008 bp, Zea Mays
ttaggtgctagaaaataaaatctaagtgaggtgcttataatcaaacaaagtgtatgcatatgatgagaagacctaggggagatttgggatagataataagaaggggggttacattagggttccaaacctgggttgaaaattgggatgttacaaacctaccccacttaaaggaatctcgccctcgagattcagacggggctcgagaaaaggtaaggatattccctcctcagagagtcctcactttcctaggtagcttcctcttctccttctctgctccactgaaccttacagagtctcacttctgagttgcgggtctttcggactgctgagtcaagaatctttattggcttttcccggtactggagatctttttgaatctgaattgtctctgcctcgatgtggttctccggtacttgcagacatttacggagctgggacacatgaaacacattgtgaatatctgacatggattctggtagttcaaggcggtatgctgcgggtcccactctgctaatgacgggataggggccgacgaaacgtggtgctagctttcctttcatttggaacctcttgacaccacgcatcggggagaccttgaggtatacgaaatctccttcctcaaatctgagttctcttcgtctgttgtctgcataacttttctgtcgactctgagcttcaagtaacctcttgcggattagggcaaccttctcttcggcctctttaacaaagtcaggtccttctagtgtcctttcccctacattggaccacattaggggggtctggcactttcgtccatacaatgcttcgaacggtgacatcttgatattggcctgatggctgttgttatatgagaattcggcatacggcaaactggactcccaatttctgtcgaacgtcaacacacaagctcttaataaatcttcgaggaccttgttgaccctttccgtttggccatctgactgggggtgataggcggtgctgaaatctaacctggtgcccatagcttgc

SEQ ID NO: 2655 - DNA, 696 bp, Zea Mays
tttggaataagacccgcctctaggaaattaaacaacatcatccttaactcttcgccctcaaatagattccgcaagtccccctccccaatacacgtcccggacatcgaggacagtagatcgcgttgactaccacgatctagtcaaagatgggaccgctccatacccatccaccgacgtctcccacttcgtgacatcccgctaatgctctgtttcgacaccacttttcgcctgcgcgggtcttcggctatcaccctggccggggtggcagacacttcgcgcgcatcaggttgcggcggagactccgatgcggccaaatccaacgcagcaaagtagtctaaatcctcctcagaggactcctcaatccacgaaaaagggctcccaaaattatcctcgtccgaagaccacgactcagtttcagaaccctcagacacatttccattaaaagacgttgcattcgcaaccgtcaaaatattagtatcaacatcatcgggggttgcttgcgcaggcccggccgtcgaaacctacgcaacaaccgacctttagtatcacaaagagaaacccaaaacccaacaaccctaacatgtcccttccacctgcgccggagcagacgccgctgcagggtcttcatcagggccagcttgaggcgctgagtgcccttcagctcccgcctccgcgccatctgttcgggtcatcgag

SEQ ID NO: 2656 - DNA, 308 bp, Zea Mays
aagatgtaggttaaaagtttgtttgttgttaggtgggaatagatcatattcgttagaaggttatgatataagccaagtggttgggataagtatgcttgctagaacaagacaagtctctacgaataagacataatcttttgagattagttagatctagtaggatagggtagaatctttttcgagataagatggatctattaaggtaagaaagaatcttttaatataggagggatatagatacactttaatggaggataatctaggttgtttagttatcttatgaattctatttatgcctatacgtatat

SEQ ID NO: 2657 - DNA, 308 bp, Zea Mays
cacggaggcgggtttgggctcgatttcttttgaatcaccttttctccaagttcccttattgatggaaccagtatatcagactaacagtatatccctttatcgatggaaccagctgtgcactaggtacctactaggatggatgtggtctgcaccggtgcgtctaacaaagttgatgaagacacgaccaaacttgaatggcagacaacgagcagctccggtgaagggagtggggaagatagttgtagtgacgacaatccttgtcctcctatacctccaaggaagaaaaaacatcagatgagcttgatgcc

SEQ ID NO: 2658 - DNA, 570 bp, Zea Mays
gaaaaccttagatgcagcatcttcattaggcagtaacaaaaggaagtcttcaggcattgtctgatgaatcgtcatgtccttcactgcatatcaaactggcgcgcaacttcttccacaacttctgagccaaggacctctggctgtgttccggccatagagacaaacagagcacgtcggagagcaatttcctccctcgccagatcatccgagaagtccaaaacgcaggaggagttgagtgcgaagtcaatctccttagaattgttgacaaacaacaaggatggagccgggactaccgctccatcaacaggaaccagagatatgtgccgagggtgatcatccgtcgtcatctttccccttccgcgcttggaacggttccgcttccgcgtggatcgtaagccttcatggcctccaccactaggaccttcagcaggtgcaaattctgtcatcctagcctcctgcggtggggagatccttttccagaccgacttcctctgccatgagcccgaaccatcgttccttaaaggagcatccccctccatccttgtcagacgctgtcagataggaattctg

SEQ ID NO: 2659 - DNA, 612 bp, Zea Mays
agatggttcctcaactgtctccaccactggctcttcttctggttcttcagacaacaattcccatacttcttccatggcgtacaattgagctgtggccacacatttatgaccataactccactttttcgcgcacttaccacacagtcccttggtccgtctgaaacgacgcagagaatccaatttgtccgaagaagaccatttatctggttgtgcaccgctcttcatgatttcctccttctccatcttgccaagagatgatggtgctttgtaagatgttcgtccaaatggtggttatgtacgttgccatttacttgaagatgtcgcttcctcttgcaccaatgcgagagagcaagcagtatcgagagtcgaaggcctttgcaccattacgacagacctaatatcatcacgtaagccgtccacgaatctcatggtgtaatacaatggatcgacattggcttcgtaagctgaaagatgatccacaagagtacaaaattgctctacataatcgtccaccgatcctaattgtcgtatttggaacatcttacgaatcagagattcatgctgatcacagccaaaccactcatgtatttggaggcaatattcagaccaaga

SEQ ID NO: 2660 - DNA, 667 bp, Zea Mays
tcaaaatgcaaccagaccttggaggtgggacccctcctcctagagcgcttaccagggacaacaacagatgtgctagcatcggacgttgggctggtggatcggttgtgcgtctccgtcgtgcccggtgtccccgctgttcctgtctccgtacctatccccgcattggagccatcaacatcgatagcagcagcagaactgctaccgaggaggaaacatcgagcatcgtcttcctcattttgagcttcaagtagccgctcctcggcctcaacagctcgaacgaactcgtcgtccgtggaatcatcatccatggacatagccactggaccgcccggtgcctgctaagtcgccatctcctgctcctcatggaaagcgccgaccacctctagaccttgaccaaagtacaaatccaacaaaacaaataaaaaaccagaaaagaggagactggatctagagaagagaagataagcggatgctcacctgcacagccggagtaacatacccaccgactaggggacaccagagcaaagttggcacaatacttgagcagatcgagggacgtggagacaaacagaccgagatggagagaggggagcgacatagtgagcgagggagagtcgtagaggatcaacttccatcgatgtcggattgggaggcgaggccacgaggc

SEQ ID NO: 2661 - DNA, 467 bp, Zea Mays
cgatccgtcagtaaatacatccataagttcacatagcttggtcgttatgcatctgatgacgtcagcacggaagccaagaagatggcccgtttcttgaaagggttaagacccaaactcaagaccatcctcaccagccaagacttcctcggtttctcgcacctttcgaagaaggccatccaggtggaaagagcacgagaagagggaaaaggtcacctgaagaggaaatttcaagtcctccgagctcaacaataggacagacaccagagggttcgatcttttgggttcccttccaaggggtcaaacttcagcaagccagcaggatccgctccgtcacgtctcaaccagcctggtcaaagttccttccacacccaatctgttgcaagcagtcaacctccaaccaatgcttgttggcactttggagaccatagtcacttcaagaataattgtccacagttgaagacatccat

SEQ ID NO: 2662 - DNA, 342 bp, Zea Mays
aaactaacctttggacaaagatcacacatgttcaccctcatccaaaattcaaaacacttcgacccaattgacaaaggggcgccaaattaaccctagaaggccctggaaaaagttgacacctatccttagacgtttgacacgacttggcaccatttttgtctcggtttggacatgtctgacacagtcgacttcccgccctcatatctctctaacctgaccacatctacccttggaactcacatgaactaggtagctctaggtgcagggaagagatctcccacaggctctagggcaagattcgtacgttttggccgctcagcagagggaagaacacgggcagaa

SEQ ID NO: 2663 - DNA, 384 bp, Zea Mays
gcagtccccgcaccgtctattccccaccggatgcgcgcatggatctcaccgtagtccccgcctcgcagcgcgcatcgatggaaggcgcatcccacagtccccacctccgcacatcaggcccaacccgcatccttgacgaaaactttcattcacctcccatggatgcgccaacctaccatcgacgtcgaggatgccggggctttaagatgtctaaacagatgctccactccattccaaatcctccccagacagcaactgcaactgcaacttcgacctgattctggtacatcttctctactactcatacctgagtatgtacctgttactactcatacatgttagtatctactactcaatcagttcgtgcacacatccataatttca

SEQ ID NO: 2664 - DNA, 440 bp, Zea Mays
ccttattccttgtaactcgagtcaaagtgtccagaatcttgattgggtactcagcataagtcagatcatcttgaacactaaggtcctccattggtaactactcctcaggtaccctaaggcacttctttagctgagatacatggaacacatcatgcacatctgacagatgatcgggtaactccagttgatatgcaacttctcccactcgctttaagatcaagaaaggtccaatgaagcgaggggacaactttcctttaactttaaatctcctcataccccggagtggtgacaccttcaaatagacataatcaccctccctaaactccagtagtcttctcctattatcagcatagctcttttgcctggattgtgcaattctcaaattttctcttatcattcgaacttgctcttctgcctcttgaataagctcaggtccaaag

SEQ ID NO: 2665 - DNA, 463 bp, Zea Mays
gtagtggtgttccttctccagctttatctgccctcattggtctgcaagaattgtctctagcaaactttgatcacactcttgaagacatggtcccagaagatctgttgtcggagtcgacagatggtggaatgatggatatttgtgttgatgtgcctgatgccgggctgtagttatctcgagcagcgtcccgtgcctcatcgaccttagagcgcggtcttaagggtcaggaggctggtctggattgttctgctcccatggaagtgggtgaagggccttcagccttagaggtggctgttacggagagcttggccctcaaggatggcgctagcgcttacccagcccccgagggtgttgtcggggatgacccggctcagatgggtagtgcgagctatgacccagcccctgagggtgtccgagtcggttcttcctctcacacttccatggacgttcacgtagggtcttc

SEQ ID NO: 2666 - DNA, 1043 bp, Zea Mays
gtggtggattacgtgatgacttgcttccggagccacgacccggccatgtccttggcgccagtgctcgacggtctggtgcctgccacagaagacgccacccgggagagcgtccaagacgtcgtggagacggtggccgcgcgcttccagcacgaccctgccgatgtcgagtagttgatacctgcagaaatgaggctagggctccgcttgaaggcggatgtaataacttttggttttgtacaatactcttgagaactattaattaaacatcacttatctgtatgttatttgtcctcgctgtgtgtagcgttaccaacttcttcctggtacttggcccccctgggatgtaggctcgacgtgtcgaggctggatgcaagtttaccttatggaaaattagttgcccggtccccaggaggtagtctctacggtttgagacttcctgcgtttggattgggacctggatctgcacacagcttcgtctttgaagtgttagtagcacacccataggacccatcgtctggtatctaccatcctttgattcatgcaataggacctgcaggatttagtctgggaagccaagccgtatgcccggaccccttgaatcacagttccaaatactaggacacccgtcgcagagtggtggagcgtgcaggcttagggtacggggtcatgctaagcggctacacagctccagaccccccaggagacatgtttctattctctagaaccggaccctaggttgccagacccacaggactatagttccaaatactaggtgcccgtcccagagcggtggagcgtgcaggattagggtacaaaaccaagctaagcggctacacagctccggaccaccccagggagcgagcgcccattctctagaactggcccccaggctgccggaccccctgcctttgtagagaggtcctaaactacaaacctggctacttaattcggatgtcatcataccagcaagggtgggaaactatatgggttggtttgataaaaagtaacagttgtgaactgaagcagaataaaacaatcacaaa

SEQ ID NO: 2667 - DNA, 536 bp, Zea Mays
gacaacatggccggaggaaggtgggtggggaagcgaatgggatataggggatcagagctatcgtatcaagcaactatagcatgagagtggaaagatctcgtatggggctcggtgatcccctagggatcgaactccatagaacatcgattgtcagtggtgaagcgatgaatcaagagaagattctggatgatgttgaggacaacaaggatgttgttgaggtacaaaggactcgaaaggactgtgtcacctacaaggtgacagggagttgacccattaccaacaacaatgaaggaaaggtagggctatggagatgggtaaagagatagctataggatcaggagtggtgtggaacgagacgctaaagtcgggaacccagttggtgggaggaggggcggcgagaagagagccaaggaaggcacccctatagagccaccggggggttagggccaagagtgtcaatcatgggtagtggagaagacaaggcctcgatcgacatggagacaatcatggtactagggaacacaagcagcctaaga

SEQ ID NO: 2668 - DNA, 622 bp, Zea Mays
gtttcgccgcccgccaaagccgcctgaactcgaccaccgtggaccggtcacttcggtccatccccgtccaagccagctgctaggccagcctccccagagtctggtgaaacttcctgagccctcaaactgagtgctaccccgcctgaaacacccgatcgccctcgccggacttcctacacccgccaaagtacgtggcccaggtaagccggcgcaccaatcttcgattccttgcgcgcacagcctctacatcaccttgtgaagctccccgaacaatccagtcgaactctgccgccatgtacaggccaagcccctcgccgccgacgacctcgtcctcccccgcacgtggccagcacgactccgaccacctccggccaaaccaaaggtatcggcgtgttcgccacatcctctcgcttctcctcgacctcacccccggaatgctatcgatggcattgagcggcgccaccatgttttcctcatagaacactattccggccgagaggggaccgcgggttgagagagatagaaacctacggggttttctgtgaacccgctgactcacaggaatagtgccccaaggactcatttgtaagggaaagggagagaagaaacccagggacccgag

SEQ ID NO: 2669 - DNA, 734 bp, Zea Mays
ggaaattccgcttcagtccgccataccggaaccttccatgaacgccctcctctactccgcccgttctccaatagtggaaggttggccaggatccgcgcactgtcgtcatggttccttttcttcgcgcgacatcgacggtggggaggatcggcgcgccctcctctgctccgcccgtctccaatagcagaaggttggggacgatctgcgcaccgccatgcttgcgcgtctccaatagcagaaggtcgcctacgatccgcgccgacgattgcgcgctcagctcctccatccccttccaagcgcgttgatctccaataccagaaggttggatcgtagcctgcgcgtgccctcctccccatgccgatccgccccaccctcctccccactgtccccgtctccgatagcagaaggtcgcctaggatccgcgccgacgattgcgcgctcagctcctccatccccttccattcctgcatcgatctcagcttattctctgcacacctacgactacaaatggggaggcctacagttgatcccccacatctctcccccaagacgcagattcaaacaaggttcgtaaacttttaccagtcgcgctccttaatatttcgttcaacatttaccagtcgctgctgttcaaccgtggagttatggaggcatataccagtcgctgctgactttgcttttaccagtcgctgctccttaaacttttaccagtcgttctccatggagttattctc

SEQ ID NO: 2670 - DNA, 604 bp, Zea Mays
gaacaccacgacggatggtcttgcctcctaggtagccaaggtcgagcgccacttttaggactcctcatttgtcgacccctctagtgcccccgtctccctacaggttcgacgtcgctgtcattgccccccttcacgctcaggcggacagtgtccaaaacatccggttgcttgtctccatcgtccttgattcgacgtccatacagtaagcccgctagagcgactaggcgctcctcatgctccatcactatgccctcaatgaccacatcctcgttaatgtcgcctccctactgcctccgtcttggcacttgatggacagcgtggtcctatcgtggatccttaacatgctcaccgttgagctttaggacatcatccatgagaggggcagaggggcaccgctctccattcctaggttgccctcgacgcctagttccttagcaacggggaagctcaggctctccacctcgacactgctttcctcctattcttctaagggacctatctgtcagcgagtactgccgtcagataaagggcattgcaggctcccttcatgaccttggcgagcccatccccggcaacaccactagggggctacattctgtccaac

SEQ ID NO: 2671 - DNA, 363 bp, Zea Mays
tgagttgttcacctctagggggcaatgaagaggatccctgcgcctggtccctgcagtttcagcaagccatcgaaatacattcgccatacttcagtagcctccgggttgtcaggaacttgttgctcggtccactctgatacgaagtcaactagtgcttgagtcttcactcctgtgcgtggccgaaactctatgtcatgagctctcagctcgcaggcccacttggctattcttccaatggcttctttgttgtgaaggatatcctgtattggaaacccggtgactactatgactttgtggtcgtcaaagtagttatggagtttgcgagcggttagaagtaccacgtatagtagttttggaacttgg

SEQ ID NO: 2672 - DNA, 2393 bp, Zea Mays
gtccgaaataggctactgtagcagccccgaacaagcatttggagcgtttcagggctagttgatggtcacggagggtctgtagaaccaacttgacatgctgcagatgggctgtccagctattactgtaaatgaggatatcatcaaaaaataccagcacgaactttctgataaatggtttcaatatgtcattcatcaagctctgaaatgtagatggggcgttagtgagcccaaagggcatgacaaggaactcaaaatggccacgatgggtgcggaacgctgttttttccacatctgctgggtacatgcgtacttgatggtagccacttcttaaatctaacttggtaaagaatacagcaccacggagttcatccaataattcatcgaccactgggattggaaatttgtcctttactgttttgtcattaagggcgcgataatccacacaaaacctccaggaaccatcaaactttttcacaagaagcactggggatgaaaaagcggaggtgcattctctaatgataccttgctgtaacatagcgtcacactgctgctctatttcatccttcaacaattgagggtaccgatatggtcgtactgccacaggtggagtaccgggcagtaatctgatcttgtggtcatggcggcgagatggagggaggccgtgaggttccctgaaaatatcctcaaaggaatggagcaaagcctccatgagatcacctcctgatgctaaagctgcacactatggtggcagagcaccaattccagtccactgaatgttactgcctcgatataagaatgacatggagagggcctcaaaattccacaaaattgttccgagagtgcgaagccaatggacacctaatacaatgtcaaatccatccagtggtagggtatagaaggatatcgagaaatcagcttctccaataaccagaggcagttgagtgcacacacccgcagtagttacccgatctccgttggccaccttcaccgtcagacctggacgaggttcaacttgaagctgcagctgactgaccacagaatcattgatgaaggaatgtgtcgaaccagtgtccacgagggccactaactgacggccatacaaacaaacagaaagtttcatggtagtgccaatatcaataccggtgagagcatggagagagatgccaacatcatccaatgtttcaccaccctcatcatcttctgttaattccagcaagaaaacccctttgtttgcacatctgtgatcggcagtatacttttcagtacaatggtagcactcaccactagcccgctttgctgctaattcttcactggaaagacgcttgaaccgagggcgttggttgccaacaactgatttaataggcgtactcacgccacgggctgcagggcgcgccgtggagtgtgtgcttacagccagctccatgcgacgctcatatgctcgagcaaggttgattgctgactgcaaattagttggcccttggagttcgacgtctgtcctcaatggctcacccaagccagcggtgaagaggttggtctgttgacgctgtgaaagattgtcacaacggcaagcaacaaggaaaattgacgtgtataatcatccactgttccagtgcgatagagatccttgaggtcagcgaggccattcatgcgcagtggggggccgaacctaagattgatcaattcggagaaacggccccaggtaatgtcgccgtagtcgcgctcgatggtgtagtaccattcagcggcaactccgtcgaggtgcagggacgccatccagacccgttcctcgcgcagtgtcctcatgccgcggaagtagatatcacattttgtcagccacgccagggggtccgattcaccgtcataggacggaaaattgggcctgggccaatgtgagctgtcctcccgacggaaggggccatccccgccgccgccgccgcgcagcccctccttgaagcggccgccgtcgttgggggattttggaacccctgaagatgcttcctccgtgggtggaatttccacgcgggcaaggcgacgatcatgagattcgaggcgtgtgttgatggtggtgatttgggctagcatttgggtttggtgatcaaggatttggcgtagggagtcagcgagtccacgcccatcaggattctgtccagtgccggacttttgggtttggtgatcaaggatttggcgtagggagtcaagcgagtccacgcccatcaggattctgtccagtgccggactcggaagtcatggcgctggctgtctctgataccaaatgatgcggactccctgctttcgatggaggctcagtaggaggttgtggacaagaacgcaggaaataggagtgggaagggggaggaggattcctggtggcgttctggacgctggagagttcc

SEQ ID NO: 2673 - DNA, 1105 bp, Zea Mays
ttaatgtgattggaatgggtcaaaaagaagttaaaacgtgcaagttataattttttctaagattatttgatttatttatatattataaatcattttcctaaattctatttactaaaaacaaggctacggactactgttacaaattctaaagagtacatgggctagtttataaatatccagggcttaatcgcaattaatttacataggccgaggacagtgggttgattctgaacaagccgaggggctctttagcaatttgtacgggtcgaaggggtatcagtggatattgatcgtcagatctgaaccaatggccaagattataacgccataaatccgaacgggtacgcgataacagccgccaggttatgaattcacggttcagatgctcccacgtcactaatctaacccgggccatggatgtttcgatcaatgacccaggatcaatcgttgaaggggtatccctagatccaatatgtgccacccacggtcgatccaacggataccgatcatcagacgaaccggtacccaattaatctaatcctgaccgttcctgcgagatcaacagtccgaatacatcgtccccacccgactacccgcgaacggcggcgcatagctttccccgtggcgtcgccatcactggagtaccgtgctggtgcgcctagtaccccaaactcgcaaccgaattgagaaacacgcggagcaggacaaggcgaacgacttgtatggtttcttacctcagatcgagcgccgggagggactgaccacgcgttgaggcagtcctgcggcggaatccaaaccccgatgagcaattgaggtggcaccaggtgatcccagagcccttaggcgcctccgtgcttttcccccgaggtctacgctttctccgagctggtcttcggggttggaacgatggtcaaggtgagaaccgaccgcggtggcgcgagttcccctcttccccggcaagaagctacgcataaatagtcgcgagggagcgccgagattcccagccgatttctacgcaccgttgtaacaacccggcaaggatctcgggagggtgacgatcctccaaatccgaccccacacgcaagtgaccgaggggaaggccgac

SEQ ID NO: 2674 - DNA, 606 bp, Zea Mays
tacgcaaggaagtttcgggctgatcacctgcgctgtggggcggattgctcaccgacgatcgattcgcaccgctgggccgccagtcctcgtcgatagagcgcgatacttcgaaattggaggtatgatggtggggtatgtattgggggtgtgcaccacatcgcgtagcaagttgtaggttgaactgcggggcaccaagcgctgagaatcgaccgcactggcggtagctccgccatggggtgggatgacgccgtcgtcgtccgtgtccagagggagaagacgatcgcgggccattggatgatccctgagcggtttagatcaggccgcgtataccggttcggttcaacgtcacggaaccgtccgatctaaatcgtgtgcacaggataagatcttaggttattaaatcgggagcgttgcatttggatctgacggctgctatcgcataccgcttcgcgggagatcagatctaatcgtagtcgtccctggttgatctcacggcttggattagtcgataccctttcgccctgtcgtttttgcacaagaacccttagaaaactaagaaaccaacccgccgtccactcgggttttttacttagtcttagaaaactt

SEQ ID NO: 2675 - DNA, 832 bp, Zea Mays
gaggccaacaaacatgctacatcggctcagccttcggaataagacccgcctcccgataattaaacaacaacatctttaacgctttgccttcagacaaatttcgtaaatccccctccccgatacacgccccggacgttgaggatagtaaaccgcgttggccgccccgatctagtcaaagacgggatcgttccatacccatccgacgatgcctcccacttcgcgacatcccaccaacactatgcttcaacaccacctttcgccggcggtggtcttcggctatcacccaaaccgaggaagcaaactcgttcgcaatacagcctgtggcgaggactctgctgcggccaaatccaacgcagcaaaataatctaaatcttcatcagaatactcctcagtccacgaaaacgggctcccaaaatcatcctagaccgatgaccatgactcagttttagaaccagacacatttgcattaacgggcatcgcattcgtagctgccacaaaattagtatcgacatcaatgggggttgcttgcgtaggcccagacgtcggaacttgcacagcaaccgaccttcagtattcacaaaaagaaaccataaacccaacaaccctaacgtgaccccaccacctgcgaaggagtagctgctactgcagggtcctcgccgaccgaagcagtcactgctgcagggtctttgccggccggggtagtcgccgtcgaagggtcttcgccaaggctggcttgaggcgccgattgctgttcagccgccgtccccgcgtcctctgcctaggtaagtgagctttcaaggccaccgaagtcctcgacctcttcatcgttcag

SEQ ID NO: 2676 - DNA, 795 bp, Zea Mays
gctgagttcaacagccccagcccccgagaattaccttgatggagggcattgatagctgcaagcagatcgtccttaatgatatgccagcatgacttacagaatctcccggtaaaaccatccggacccggagctctatctgaaggtaggcagaaaattgcagaccggacctcatcctttgagatggggaggtccaatacacctagatcgcccatgtccctgtggcaagatcccaagtttagtgtgaattctctatgtttagccacccccaacaggttggtatagaaatcattcaaagcttcatgcttctgctcatgagaggtgaccacccgatcaccgactgtcaaactagagatgaagtttcttttcttgctgtagcaagcctgcaagtgaaaaaaagaagtgtttgcatccccctccttcagatatctaacacgggatctgaggcgagccactgtcctatctaaagaagcgagggccaaacaatgttgcttaagcctcctcatgagccataattcttctgaagacagcagcctgctatcctgagccatctcgagtctgtgaaggatttcctttgctaaagccaattgggacttcacattgcctgcattcttgtgccctgaggactgcaaggacctggccaatcttcgaagcttcaaggatacaagctttagagggcagggggtctgaactggctgcatccaagaatcagccaccacatctaagaaatcagcaatcttagtccagaaactttcaaagtgaaatctgcgctttcccttaaaatcttctttgagactg

SEQ ID NO: 2677 - DNA, 298 bp, Zea Mays
gttgaaggcttatcttcctacaagtatatgtagaactaatcgggtgaagacaactgctcaagcaaatgactgcacggtgactactaaatggtttggtttttatcgcatatcaaaatctagcaatacaatatccgacagcttcgagcttaacctgcccccatactcctttacttcccaggtgtgtggcttgaatattattactgcataaaattatgacacattcccacatgatgcttacatttctttacgttgcccaatcaggctgtttgggtgcgaattccccactcagtaaagatga

SEQ ID NO: 2678 - DNA, 641 bp, Zea Mays
cagatcctcctcccaacagcatgaccgagctaggcagaggggtcgcgccattgtcgcggggtcagttgcggcccgaccctccgcacgcttataagggagggaagcagtgctcccgactttgcccttctcctccctccacctccctaaactcgcgaccaccccagttcggccgtggtgaaaacgacgccggagagatcaagatccgcgccaccatagaaattcgtgggttggtaacagttcggggttctctggtgatcggtgaagtattgccggtgctggtaacggaggttgcggcttgaaacaccacggcgcgctggtggaatttcactaattcctcgtcggtgtcgatcggcggaaccgcgtccaccgtcatcgctgcttgtcctcaacctcatcgttcccgtggtaagttggccatggctcagttccatttctggttcgcaacgcatagcgagatttagatcgggttggggggcagtagggctggaaatcgacttcatcggtggcctctctgccgtgtggggcaagcagcgccgcccaggtcgttgtgggtgtaggtgagggggtcctggccatcggatgcaccaggaacgactgcgattagaacattgaaataccccttcgctagatagatctggccc

SEQ ID NO: 2679 - DNA, 816 bp, Zea Mays
gttattcgagcttcacagacacctttgtcgtgccgccgcggctgccctctccatccaggtacctcctacgtcaccatccaacgccccccttcttcgcccatcatgtctaatgaggtctgaaatctgctcgctgctcacggcacgaatttttctttgagttttcgggtagtttaatcgacctgcgagtctgtgcttcgtttcaatgatacacatgatttttgtgatgtctgtttcaagggagagatgcttgcaatggcttatgaaaatgtctttctgtttcagttttgcactatgttctgttgtgcaaacctcttccttttcttgtttggtgaatgactgcagaaccaaactgatagcagtatagcacccagctcctcaggttgtcgtctaatgcctacgcatcattttttgttgggagggggggtcatatttcatatttggcacctgaattaaaaaggaaataattgttgtaccaatccttaggtgtgcaaaatcatggctctattttaaatcgtcaataatactcctcatcctgcaatttgtacaaatggttaagcgaaacaaaacatgatagttttgatagaactacattaccatgcttgtaaactattgaaggaaatagagggttcacaaggatttatgttcaagtttcattcgaataaaaaaatgtaacagccgcctcatagtggagggaaggcttgtgagtaaaaatcaatttataatgatggtgttatatattatttctattgaagcattcatccaagcccctttcaatttagccatggagtacaaggggaaaacgacttctagaaaaga

SEQ ID NO: 2680 - DNA, 591 bp, Zea Mays
gcacaacacaaccaatgcagtctagcgtagcagaagtttctagagtagacgccgagaaggcatggttggacaaatatgctaccaggccgagtcatgagagcttggccccatgagtcgctactatagatcagatcaacattattttaagggatcaatttagaatgatctcgaggtggagggcaattagctacaccaagccatatcccaatgagtacgaccttatccctccaccacccaagtatcgactccctgagttcaccatgtttaacggatcggaaggagctagctctattgagcatgttagccgatacttgatgcagcttggaacagtctcaatatcagatctgttgtgggtgaggttcttttcatagtccctcacagggtcggcctttgtgtggtatacctcgctaggagtagagtctgcccggacatggaatcaactagaagaccagttccacatccactatcactctaatgctactgaagtcgggattgccaacttggcacatgtaagcatgaggaggctgttacggagttcatttaacggtttagggcagttaagaactagtgctactcgtcccgcatcacgga

SEQ ID NO: 2681 - DNA, 1293 bp, Zea Mays
ttggtaacgaaaaggatgggtgctccccagggagacgaactgggatggatgtaccctttttgttgcagctctgcaatctggagttttaattctgccaactctgcgggggccatacggtatggtctctttgcgatgggcgcagtgcccggaatgagatctatatagaactccactcctctttctggtggcattccaggcaactcttccggaaatacatcctcaaactcttcgattatggacatgttttctgctgccagattaaacatcattggatcgttggtgggcggctgggcttgacacgaaactgcttttccttggtgatcggtgagaaggacggtcttactcgcgcagctgatgatacccttgtgcttggttagccaatccattcctaggatcacatcaatcccttaggatggcaagacagttaagtctgccaggaacactaccccacttaagagaattctgacttgggagcacctgagttggcataggaggtctgatcccggggttcgggtgaccaaagggatagctaggggtgtagaggggatgccatgcttttccacaaacttagtggctataaaggaatgggatgctcctcaatcaaaaagcacagtagcgggagtaaattcaacaaggaactcaccgagcactactcccggggcttgctgggcttcttgagcgttgacgtggttgactcgtgctctgccctggtactgagtcctgctctgctggctgttggaaggaggtgccttggaggtaggtgctgagggaatcttggggccattcaccgagttggagtaggtcggcccgggtgccttcaactgaggacagttattcttgaagtgactggggtctccgcagtgccaacaggcatttgctggcggttggttgcttgcaacggagggtgcctgaagagagctctgactctgctgactgtagcgcgatggagtgggtccagatggtttattgaagcttggtcccctgggtggaagcccaaagggtcgagctctctggtgacgttcttgctgttgagctcgaagaacttggaatttcctcttgaggtgccctttttcttcctctttcgctctttccacttggatagctttgttggagaggtgagagaagttgaggaagtcttggctggcgaggatggtcttaagctcgggtcttagtcctttcagaaaacgggccatcttcttggactcggtgttgacatcgtcaggcgcgtaacgggccagttatgtgaacttgtgcacatactcactgactgttctcccgccttgagttagttcc

SEQ ID NO: 2682 - DNA, 371 bp, Zea Mays
tgggtgttcgtgatggtacagtagctgaacaagatcagattcaatgaacttcgcagccggcaatctccgcgctgcgatccatgctgtccgccacgattcgtgctcagctcgggcaggatattaccgcgaacgtgaaaagattggagggggaatggattgagtcggcttcactatacccacttgcatcagcgacgtggccgcgcgacagacgtcgtcgtgccgccgtttacctcggtcacgacatgtcttaggctattctaccacgtcgtcgcgggttgtggaggataaacatgtgacggccgtaaccttttgccccgtgaacgccacagtggttcgcgccggtgactcaccccctctcttcgaccgccaac

SEQ ID NO: 2683 - DNA, 626 bp, Zea Mays
gtttgttctgatgttctcatttcaatactatagtgttatatagtgtgtgctaatgttatgattctagaaaggacagggaaggggagtgtgaaggataaatatcgcccgggttgccacgacccgtttacggtctgtgggctgttataaaggccttaatgtgcaaggcgtgcaggctgacaaactagtcaaacacgcgaccaaaagcaggcaaaaaagtggtatgtgggctcgaagacgcgtgaaccgaccccgcgcatgcagaggacgtgacttccttcccaaagactcgctgacttcgagataagtcggagtcaattttggggatagagagggggttgtaacaatcgtgcggagtgtgtgaataactcgggttctgccgacataaggcagaagaggcacccctatgaaaatcagagatctcctagtaggcatagtcatcttcaataccatcatcagcttcaccataggataggttttccactttggatccttctcctacatcgtggaccggaagggcgccctactccgcttggcggacgcagggaaggaggtctagaggtctcacaccaccacctcgacatagaagaagtcctcgtcgtggctcagggcgacctcggcaacgatcg

SEQ ID NO: 2684 - DNA, 511 bp, Zea Mays
gttggcggcgcagatcatggcgggcagtagaaaccttgacggattacctttgcggctagtgccctaggccctacgtgtgagccgcaagtcccgctgtggacttcgtgcagaatttggacgccttcggtctcggtgacacatttaagcatgggttgactaacccccttcttgtaaagttgtcctttagttagcgtgaagtcccggcttcaatgtttgaggtgcttggcctcattgatgtcggttggatgatagtacccctgcaggaacagggttattggtgcccgccagtcttcggtcatgataaggttgactatgctgtggccctcgctgtcattggttatttggatcccctctgggctgcggacggctggcgtgccgatgacatggtagaatacgtcggagggcagggcctcgcttctggcgactgccttggccaacgcgttggcctcctcattcttggcacggtccacatgctgcaaggtgaaacctttgaattgcctctcgagactac

SEQ ID NO: 2685 - DNA, 528 bp, Zea Mays
gcgaggatgctttcacggcgacggaaaccaaattggggagaatgggaaattggagtgttctaggggatgattcgaggcacgggctgctttactggtttcacaattacatagcatagtaggcgggggcagcaatttatagactccatcagcggtggcacatgaatttgagttagcgcggtggcggccggagagtgaaaagagtactgtcgcgagagctcggtggcatctaccgtggcgacctcaccggcgacgaaccagttctaccgggcggtttctagtgactcaccgcgatggggtaaagcgtcgaggcacgtagcccggtcggataacggcaaacgccggtgatgccagcgcgactaactacggcgagacacgacggcagtgagaacagtggtcggagtttatctccagcgtgatactttataccgaggagtgcttatctgagttcggtcgagcgtgaatcgtgacgccggcgcgaatccgggcacacaggtcaccggcggcgaggttctctgaacctaatccatc

SEQ ID NO: 2686 - DNA, 872 bp, Zea Mays
ttagagttcgtcgtcgctgttcttgctagagttgggtgagacaagcctactcccgcattttggcgccatcgaagaagatctctttctaaatggatccgcaatgcggtgcaggatgccttttcctgatctgcaatgcaggagagggatctaaagcagaagatctctacaacattgaaggtgactgggaagttgaaaacgatagccatgaagtcatcgtagatcaatgtcgcaacccctgcctagcgcgccagctgtcgatgtttgtgatccgatcgcacaccacagggttacccacatgatgcttttgggtaggacattggcattgattgcgacttgatggtacatagaggagcacattggacttgcacaagggtttatacaggttcgggccgcttcaatgcgtaacaccctacttcctgttgaggctatgtactggaatttctctagagtatgaggattacaagtgagctacgagggtgcttaggtgttgttgatgagggctagtgtgtgatggggtgagatgaaatgattttgtaggggtcccccttggtcttatatacacgaccagagatttatccctttacaagttgtgataactatctattctacatatctcctttatcgtggctcgtagtcctacttatccggagtttgatcactcccttagctgagttaacgccgaatgtatagctcttcaggtacgtgcaacttccttacccaagatatcagtgcttcggtcagcgcacaactcggatgtccagtctttgtctccttggatcaagttcacccaacctgattgcagcctaatggtccatcccgcaaagcaacccatcgggaagcccatggtggcccatgatatgtttttgtgttcg

SEQ ID NO: 2687 - DNA, 1029 bp, Zea Mays
ggccagcagtggattccctaggaaggagtcgtaacgcatgagtaaaaccagtgttttaccgtgggtggagccatgcgtactcgtggggctcgaggctgcctggctgtctcgtatttaccgtggcagatgacgtgtgtcagtgatggtcccaggcatcatcattttggatacgccgacccctagcctccatagcttggggctcggcacaacccatcatgtagtgccctgcgggacgtatgcgcactcaggcctagttcgataggccataagtgtgccgcatgccgaggggtgtgcgagccattaatgcgccacagtcgggggctcgtaggtcataagtgggaggcggaccgacgccgttctgtggctcagtgccaggcgtagttaaaaacgatcggctatttatggcgagtcaatttggggcaagcacgggatccactcgactggttcccttctgacacgcccgatctcccttgtcaggtttcgccacgctcggccctaggctcggtgcccctgagttcgaccgaggggcgggtcatttcggggttggcacatccgcctctccaaactgactaaggggccccaacgattaggggctcccttctcagcactctctgactgtgagtcccagtgaccaggggtcattcccccgataattggaaatcaaaagatcaataagtccttagctacctcctctcaccattatcaaaataaatgttgattcaagattcttcagacacaaccacaactgaagcctagaaagagatccaaggtgtctttgtctcacaaaaaagtggaagagccgtcaatgtacgtgtcaggtatcgtaattaggggtatccagaatatgcatctaaaacccgcttaacacctaactacccaaaaaagatcataagacacatcccccaaggtcaagaaaggttgagccacgattcactcgagaccccgctcgacgatcgctcaaaaccccgcctcatccgggcctgtccttaggcaaaggcagcgctcgaggaaatcctcgtcccgcccgag

SEQ ID NO: 2688 - DNA, 382 bp, Zea Mays
atctgttgtcagagccggcagatggtgaaatgatggatatttgtgctgatgtgcctgatgccgggctggagttatctcgagcagggtctcgtgcctcatcgaccttagagtgcagtcttaagggtcaggaggctggtctggattgttctgctcccatggaagtgggtgaaggtccttcagccttagaggtggttgttacggagagctcggccctcaaggatggcgctagcgtttacccagccctcgagggtgttgccagggatgacccggctcagatgggcagcgcgagctatgacccagcccccgagggtgtccgagtcggttctccctctcacacttccatggacgttcacgtagggtcttctcctccgcattctggttg

SEQ ID NO: 2689 - DNA, 413 bp, Zea Mays
taatttttgttctatgtggtttcagcctaggggtattgtaccaaagtggaagagcaatgattggagagtattttttattagggaagaaggggccgttgttgaggaagtttgtgagataaagtagaccaaactgggagctgtgcaatgggacactgatgtcagggaagttgattcagtgtttgggataggaaattgaggaagatttttctccctttcctgtgctccactggtgtgctcgagttgggatatgggtggggtgcaaaaccaaggatctagtgacttcagctctgctgcaaaatatctagttctggactgtttgggagatgtggacagaagagatcatatctgttttgtctactatctgcagatatctactacctgcagatttggaccaagtgatatttgtgtgttgg

SEQ ID NO: 2690 - DNA, 1037 bp, Zea Mays
acggaaatgcagcaaagatggggacggggccgggggcagatggcaccggatccaccttcgcggcgatcgcggcggccgtggcgggtttgcggcgggctgtgcgggcgtagggagcggcatggcggcgggtgttcgtaggggcatggcgtgcagatgtgtggcaggatttgtagggacggcgcggggggtgtgggcggccgtgcgcgtgatccgcggggtaagggaatcggcgggggcagtctacactgtgctcttaatagttagtagagatatataagtggggtataaaacctgctccggtgcaagaaggtggccgactagccgagcacactgtaccttcagtagacctgggctagagtcattgatcattgttacggtcaggttgtctggttgagtatgtgaaagaaggtcaggttgagtatgtgaaagatcttcagtggacctggttgagagtcattgttagttcaggttttgttcgtcgtaggttagtggaaatgcatctttagattgagccttagtttatcagattcaggtttgttaagggaggcattaagcagtgtggggttgactggttgaacgacctatctttcctgtcccttcttcaatccagccttgttggtggcttggggtgagcctaagccacgccgatcaggcttagggccagatccattggcccacataggttccagcaccgattccatcttatacatgctatttgctgagattttgcaatgccactgaagctatttgctgacattttgcatcaagtatgtataattgtatatacggaaaaacaaatgaggcaatgccacacacatcttatgctgccaaggctatttcgtgtcattcttctctaaaatctaaataaatctgtattaatagtagttgccaatgtattagtctagcttattatgagaaaaaaaaactcgttaagaaatggttcttaattttgtccattaaactcaaccactaaagtaggaaagtacaaaaccacataaaaatgtagagctggttggctatgcacatttgcccgttag

SEQ ID NO: 2691 - DNA, 280 bp, Zea Mays
ttttttaggcaatatgagatttgttagagcaaggatagttgatggtaagaagtactgggtaaggaaagacttcatcctggtgggtggatcatgactactttcgtgatccagttgactcttttatcctttgctgatgaggttaatatctttccatcttgggtcttggtgtctccatccgagttaggaacatgtagttaagatagctggggtacatgggtaggtcaaaatcttgtttatgaggttagaatagatggattatgtaacatattaggagtgcatg

SEQ ID NO: 2692 - DNA, 698 bp, Zea Mays
ttcccgttcaaccctggccgaattgaccaaacggtggccacgatgagcatccagtgcataccaagttgcgaaaacggcacttgagaggcgtagaaccttaccagagtgggctgtccacggacgagctatccacggcggcttagagacccgagttgggggaaaatggtgtcgcggcggctctgggcgaattgggggtggagattggggctacacggccgttaggaactgtagtttcaccgtgtatactcaatttgagaggaggggcggaggatgtgcgaatttgggcttggatcatcacacttggtggaggtgtgcataccccgccgtggatcatggtgctatttatagccacggcgacccgaccagctatctacggccacgaataacttcattagcgcatgcataccacatagggaagaggcacagtgagggagatcgaggcatgggtgacaccgcggcaaaagttactgagtcacgttggccgccggtgactaactccagccacgctcgactgggttcgcgggattgcgccacgttcgaagttatccatccccggatcgattcactggatcgcgcgagcccatcctattcaacaatggccctgatcttatcccctgtgttcttcagatatttcagtgctttggatcttcaggatttgtctgaaccgaccaccttccaacctcttgatctcttgattc

SEQ ID NO: 2693 - DNA, 396 bp, Zea Mays
gagggtgccgaggatcttcctggtacgagtactgggtgtaggcggtgaagggtggtgggaaaatagtgtgagggtgaattttcacgtagtggcaggcgctgtcgcatggggatggagcgtggccgacttcgagtagacgtggttggtaggcgagaattgttgtcttcgccgaatggggcgagcataagcgaaggggatcttcgggagctttttgagggtgaggaattgaggataatggtgtttaattacaaggagatgagtatcattccgaaggttgagccgatgtgataggcgatgccctcgccgtgtgtgtgtaataggcgatgccctcgccgtgtgtatgtaattgtaatggtgatgtggcctgttggccgtattcgtacacttgtattgttc

SEQ ID NO: 2694 - DNA, 351 bp, Zea Mays
gtagtttcaccgtgcactatcaatttgggaagaggtagagaaggccgtgtgaatttctggttgtactcaagcttgcttgaagaacagcaagcacctcgccgaggacccaatggctatttatagccgtggcggtccggcgatcacttcgcggccacggacagcatcactagcgcatgccgaccacgtcggtaggaggtacagtgcgggagaacttcggcatgagcgccaccgcggcggaattcactggtctcggtggccgccggtgaagtctccggctggactcagggaacggtgccacgtatgcgccgtttaacttcgactctatccatttcctatcgcgcacgaacccgg

SEQ ID NO: 2695 - DNA, 346 bp, Zea Mays
tttatcaaccaagaagtaaaatgccttgtaatatcaaccaggaagtaaaatgccttgtaaccttgaagtgtttaagtgtgtaacagaccacgatgtttcaagtaccctcagcgaaacaatttgtcacaagattcatctagcttactcttggcaactggtgtagaggccaagctagtggaggttgataaagtattggtctatggaagagaatatgtacatggaatacttatctcggagaagccaaaacacagtatagttgttgcctgtgacagaatggcaaaaacacctcatgtcaaaatggccaaaacactacatgatagaatggcaaaaacactctgtgtgaaca

SEQ ID NO: 2696 - DNA, 428 bp, Zea Mays
cttacaaagttgtgcaatatgcaacaagcattgattatcctaatctgattttgtaagtcaaaatatgagtttttccttaatatagcccacctcatcttcaatagcctaaacgttctctctatcacatttctagctgttgaatggcgcaaattgaacaattccttggcattggatgggttattcccttgggcagcccactcattcaagtggtagcgagtggatcgatatggagcaagaaagcctggtccattggtgtatccaacatctactaggtaatatttttcacttggaatagaaaatgcatcgtcccgagacatggcatcacgtagcacacgtgaatctgaagctgacccttcccatccagctagaacataaacaaacttcatgtgtcgatcacaaacacccaaaacattggtggtgatttgttg

SEQ ID NO: 2697 - DNA, 1163 bp, Zea Mays
ggatgtggaatttccccttgcaaattcaaattatccccttctccctccaaaccattgatagaatattctaactcccttcccatctccctccaaaccatcgatagaatattctaactcccttcccatctccaacctcatctaagccacaaccctaccaatttcctccgtcttacgaaacaactcggttctctccaccgtcacgtgcttatccaccaacgttgccaactccacttgtgtcatcagttgatggtgcgccttttccaccgccaccaacctgttggtgatcacatccagagatgcaaacacccaactccagttgttctgattggtgcggtccttctctgctatcgcttcaagcaggaagggagtctacaccgagggtcgagcttgtggagccgtcacgccccctccacgagaccaacgacgtactcccttcgttcaaaaatcctcatcatctaagcaaataaaaatttccaagagtctatgtcgtttaaggtagggaccacagtttcacctcatcctcaggcgcccacagttcctcgtacgtgttatcccgttgattcaaacacctctatgttccctcccatttagtctcgtaaattacattgcgcgggtgatgtatggctccttaacagagatttttcacggcatcacaaatgcttgcatcgtggaaataaaacggtgccaggtaattggaatttactgcgatgattaaatgcaaaccatgtgaacggagaggcctccttggtcttagtgcggaaggcttaaacgatgaagacttttggatggagggagtagtttgaaggctttgataccacttgtcactgttcaaggcagcgggagccgggagcactcgtctccctgacgtgagccagtgacgggaagaactctcgttagttcgagccaagcgtaggatcccaggtaagattcagataagtatttggtggttgtgattcctgttattcatttcatatccttctcccaatacaaagttgagtatttatactagttacaatgagacccataactccctactaaaccccttctcaactccttaatacggactacaaaccacatagtacttacatcttcatcctagccaagatttgattgcccctaatcaagcacctatggaaatcttttcttcaaaacttcaaaatccc

SEQ ID NO: 2698 - DNA, 451 bp, Zea Mays
gatgctgaagttgtgcctggtccaagtgctgggcgtaggcggcgaagggcggttgcgaagcgtagagtgagtgaggcggacggcggtcggcttcgtgtgggcagggctggcaggcaagaactgttgtccttgccggccgttgcgagtgtaggtgagggggagctgcgaagtctttttgagggtgaggagctgaggatagtgctgaggatactctttgcggaagacttcgatttttcgcacttgttgtgctagtccggttgcacccttaggcgacttttgcatggatactctttgcagaagacttcgatttttcgtacttgttgtgctagtccggctgcacccttaggcgacttttgcacggatagcctttttgaggaagacttcgatttttcgtacttgttgtgctagtccggctgcacccttaggcgacttttgcacggatagtcttttt

SEQ ID NO: 2699 - DNA, 479 bp, Zea Mays
gcgccgccgtcggcacacagtgccaccacgtgctggtcgtcggagggcagtaaaggaggaggagatagcgtgaccatcggatctctaacgaatggccgagattaagagctgagtaaagattcggtcagtagcgatggtgggcgtagatcgccgatcggacagctctagtatacggtagttgttggccgctgatctgcagatatgtggttggtagttgttggggcactatgtcgtgatccaatctaatcctagccggagatcgagaatccaatggcccatatattgcgataccccttcggtcacgtatacttgctaaagagtccctacatttttgcataatcagcccgccgtccatgcctagtcaatagtaatcgcagataggtccatatttttacaccgagcaccctgtcatctctagaaatcgaacccacaggccatttcaatgggaataaataaacggaaaaatgaataaaccgtgg

SEQ ID NO: 2700 - DNA, 1698 bp, Zea Mays
cggaaatacatccatgaattcttctattacggatatgttttctgttgccagattaaacatcattggatcgttggcgggcggttgggcctgacaggaaactacttttccttggcagtcggtgagaaggacggtcttacttgcgcaacttatgatgcccttgtgcttagttagccaatccattcataggatcacatcaatcccttgggatggcaagacagttaagtctgccaggaacactaccccacttaaaagaattctgacctgggagcatttgagctgacatagaaggtctgaccccggggttcgggtgaccaaaggaatttctaggggtgtagagggaatgccatgcttttccacaaaactagtggctataaatgaatggaatgctcctgaatcaaaaagtacagtagcgggagtaaattcgacaaggaactcaccgggcactactcccggagcttgctgggcctcttgagcatcgacgtggttaactcgtgctctgccctggtactgggtcctgctctgctgactgttagagggggtgccttggaggcaggtgctgaggtaatcttggggccattcaccgagttggagtaggtaggtccggatgccttcaactgggggcagttattcttgaagtgactggggtctccgcagtgccaacaggcatttgctagcggttggttgcttgcaaccgaggggccctgaaaggaactctgacttcgctagctgtagcgtgacggagtgggtccgactggtctattgaagcttggtcccttgggtggaagtccgaaggttcgagttctctggtgtcggtcttgctgctgagctcggagaacttggaatttcctcttgaggtgccctttttcttcttcttttgccctttccacttgtatggctttgttggagaggtgcgagaagctgaggaaatcttggctggcgaggatggtcttgagttctggtcttagccctttcagaaaacgggccatctttctggtttcggtgctgacatcgttaggcgcgtaacgagccaactctgtgaatttatgcacgtactcactaacagatcttccaccttgagttagttcccgaaattcatcctccttgagttgaacgatcccctagggtacatggtgctcgcggaaagcagtttcgaattctacccaggtagcatccctgacggccttgctgaaggtatcccaccatgctaggggcatcccagaaagttgatgagcagccaattgaacacgctgattttcggggcatccgatggcttccagtttcctcttgatcgtgcgcagccagtcgtcggcatcgaggggattgctggatccagcgaacgtgggaggcttgagtctcagaaattctcccatcctgtcctgtggtcttccaccacctgggcgctggttctccagacttctagtgaggacttcaataagtcgggtctgattggctagaacttgggccaaatctagtggtagttctggaggtgcggggaggtgggtctcactcccttctccgccagcttctccttctgctcctaggggaaatcctgctccaatcccggaggcggtaggcgtggttttatccgaagccatctgccaggggaaaagagttactaccatgcacatgccacaattttttaacaagttactttattcattacatcagttcattacagcacacaactaccataagttc

SEQ ID NO: 2701 - DNA, 360 bp, Zea Mays
cagtcttgcccctcttcaggatgacacaaacttcttgcagtgatggaaacgtattgttgttaatgtgtcagacatgactaagggagtgaactctcttctgattctcggagcctggatgatctggaagttcagaaacagagtggtgtttgatgggatccccccagtatcactatgattttagatgccactaccgaggaaagggagaaatggatggttgcaggagctaagggtctttcctctctagctgctcccagtaccattgtctgagaaatgttgtatcttttagttgtgcatggattgttttctttatgcttgtttttggcctccataaggaggtcctgtaatcgggtcctttctggc

SEQ ID NO: 2702 - DNA, 1142 bp, Zea Mays
agtaatcactggtcgtcagatcagaagcccacgaccacgattagatctgattcccccgaaccgctggtcgttagatcaaagagcgacgttggagatttaaataatggggatcgcttctcgcccgcccgattgaccataacaccccacaatcaaccttgaggtgacacgcccaggagctgatctaagccgcatgttcaccatcccacggcccaccatgcttcatccgaagcagtaccctgtcccctatcctggccgccccccttgagatcaacggtccgaaagatccttcttcaacctcccgtgcacaggcagtggtgtgggctggcaacgacggcgccatggccgcagccacccagacccgagcaggggaccatcgactatgcttctcgtcgagctatcagcgaggaagacgaaggctagacagatacgagggctctttccactttctgtcatgcaggcgacctcggaccattatgagctgcggatccagggcgagggaaaactccgatgagaaattcccgtccacccacggcatcacgagttccgattcgacttcaattatcatcctcacatgctggtgacgctacttgaccggaatcctgacccccgaacgccatccaccattggattcgcccatggtggcaagctttctctctccctcgatctgtttccctgggttatggtgcttcctatccgatagagaggaagggggggcagcccgatatataagcgcagggatgaggttcctcccaggcggagtccgcacgaacggcgagatccacggcgagttcggtagccatgcgcgcggtggagatctagagaagcacgcaacagactgagcaaggagaacgaccagacggcgggtccatgagctagcgacacagcgcggggagcggctggagggatgggcccggattgtctacgagagaagaaggggaaagagggcagcgctgagcgggtgctatgtgaggctgagcagtgggctccacccgtcagccacacgcgtgagagagcaggccgcacagggtagaagtggagtagttgggccgaggtgggctagttttggcccaactgtaggaatgcttttccatttttttctgttttctctatttttccatagatttgagtttaaatttgctttg

SEQ ID NO: 2703 - DNA, 606 bp, Zea Mays
ccaccgcatcggggacctcgcgacggtggtgagatgaacgacgccgcggcacacacgtcgtcttcgatgccctcggtcgtggatgtgtctgaggtttcgtttctgtttgggcggtttcgcagatcccgacgataaggaagagggtggctgcggcggaggcgacggagtcgacaccaccagcgaatcgtctctgactccgagcgccggaagcatggacgagtaagccaaataacgcccgctctattgtcatctctcaccctctgacctctcccaggttgcctaggctatccagtcacccaacgacctcgtcgtagcctcgtgtctagtgcgctagcggctagctgctagctccagttcgtagtcgtccactcgtcctgcacgctggcatccggcaaggcacgtgctgacccggtgaactgagcggagagtgttagaatagaacaatgtgctagacgattgcttccttcggaatgtttttaattaacctctggtcatggtgtccacgagctgatcacgagctagcgcactggcagcaagatatatggaccattgctagaagaattgaacgtgcgtggaatcgggttttcgatggtatgcatgtctccg

SEQ ID NO: 2704 - DNA, 407 bp, Zea Mays
caagggtgagcaggtatgcagtgaggtacacgactgtggggtcgtcctcaagcagctgctgctcttccaatgcacgcatcctggccatccaagcgggacggtctctatgaaagggcggaaagaatctgagcggggtgtcgaccaattttcttcattgatctgacacagggtcctcaatgccttgcaggcgacgacttggcaggtgtctctgaatctgtgcccagcagcagtgacactccattccacatggtgcggactggatccaatgtatacagtcacgacacacttctctgtgtcatgctcaacgaattcacgaccatcatactatggctgactcctgatttcgaggcgaactgtgcatgctctcagcaacttggggaaaccatcttcattctcgcaaaagccgg

SEQ ID NO: 2705 - DNA, 712 bp, Zea Mays
gttctatttcgtaaaagcacggggactgtttagcaaagtttgcctcgacgaaggggggtacgggttaactagagccgccagatcgaaatcccacgcaccgggttaaatgaatcctttaagcgaagagttacgcaatccttgtcgttggatcttcgaccaggcgcctcgatccacatcggacggccgagaagagttcaggtcgaaccagaatccgggatcaaatctcagcccttcatctaggattgacggcccatattccacccccatcgcccaagcctggtaacggcggcactgccctgtggccacggcggggcatcgccggtgagcctgctggatggcggtcatgtgctctagatcctaatccggggagcgctacacggagacgagatcccaacaacagatatagggttcacgtaccaatggtgaggatgctgatgttctccgaccatggcactagtggtcccgcggcggagcagcggcacgggtgagaaattctagtggccacgaggtccttctccgcccaacgacgacaacgcaagcatcgaagctcgccgtcgaccaacgaaccgaggccaaccatcacgcgctcgttgaggatccacacaggcgcacgatcactctctctctcccttccaactctgcacgccatggttactggattggtacaggagttcgcggcgacctgcgctttatagcccagcatcgactcggc

SEQ ID NO: 2706 - DNA, 518 bp, Zea Mays
gcacgttctcagtcctgcccaagccagagtttgccggacttcgccttgagcacgacgcgccaccacccgccaagccacccaagcctcggccactccggccagctcactccatccactcccagtctacgccggctgtttggtatgcttcgcctgaggcctgtgaagctccccatgtcctcggacccgacagagcctcaccggagacctagaatcacccacgccagacttcttccactcaccggcgaacgtggaccggataagtctctgcaacattctcaatttccttctgcataccacctctacgtcacctggtcgagcctcccgagctaaccaattggaccatcgcgccgtgagcaggccggattactcaccgccgacgagctcacccgcctgtgcacgtagaccggcctactccaaccatccccggagacgatccgcacattggcgtgaccgtcaagacctcccctacaccctcaaccacttcgccggaccaatatcgccgtcggtaagcccctccg

SEQ ID NO: 2707 - DNA, 1086 bp, Zea Mays
taaagactcggcgaaggggtacactaggatccgagccacaggattagaaaccaagggctaggattagatcggccaaacactgaaccagttggttttctaggccaccggattgaggatcgacggtctagattttaaagtcacgcgatcgattttcatccgcccgatcgagatctaacagccgcgggtgaatcgttatcgcgcttctaatcttcaccgttcattagaaaatcaacgccacacgccatcacccccaacccagccaccagtagggcggcgctacacccaaccgcggtggagggttggccggagttcagccatcaggcgcaccagtgccccaatttacaagcccatacgcgctacacggtactgagatcaaggcgaattggtcaagggcacacttacccatagttcggacgccgaggtattccgaccacgggtggtgtggatctgcggcgaccctggcctgccggtgagaaattccgcccaacgcgcttcttcgccgactgggattcttccgcgcatccatcccgtaggcaccggcgagcaccatgggccttatttcgtgccccgaactgtgactggatcgaggaatcgcgacggcaacgtgagttctctctctcacccctcagctcacgcgatgcactcggctttggcacaaacagatgagaggagggggtcgcggccggtttataggggcggggagagcccaggcgtgcacggggcatagatccgcggttcccggtggcggataaggatttagttgcaactccgagcggacaggcgagggatgcggaggttcgctccaatggagacgaagctgacaccggggccccatccgtccctaaccaggcatggcgcgctgagcagctgagaagcggtcccaccagcgcagcccgtgagcgagcgagggaaagcggcgaggccgttgtgcgagcgacggacttggtccacgcgcgggatccacggcgttcgcgcggctgttgcgttcgtctcggagtagaggtaggagacaaccctgtcgattggggcccatacgtcaatgaaacagacgcaagtgaagcggctggagggtgattccgacgagcg

SEQ ID NO: 2708 - DNA, 296 bp, Zea Mays
tgcagagataagcgctatgcttgatttgctggctgaggattcttccgatgctgctcctgctggggcgttggtagtggcgcccctcccagaggctgatacaactttggatactcagaagcctgtcagtactcgcccgaggcgcccttgccgagccaaccaacctgatccttctgctgatgagcagaaaaagaaaaagagacgccttcggcgagtatccagtttggatcgggatgtcggtacctcggttcctaccgttgaagaaatgccagtgactgactttgctgatgctgatccca

SEQ ID NO: 2709 - DNA, 466 bp, Zea Mays
gggatctcggtgaaaaataggaactcgcgctcgtcgccttcctccaagcaaatgctgacgtgttcgcatgggagccatcgcagatgcctaggatacccagggaggtgatcgagcaccatctgaagatcgaccctgacgccaggccggtgagccagaaacctcgcaggtagtccgttgaacggtaggacttcatccgaaaggaggtccggaagctgctagacgctggcttcatcgaagaggttcatcacccagtgtggctggccaacccagtcatcgtctccaaggcgaatgggaagcttcggatgtgcatcgactacaccagcctgtcccaaggacccgtatccacttccacgtatagatcaaatcatggattctacctccgggtgcgacctattgtcattcttagatgcttattctagtttccataaaatccagatgtctagggaagataggaagcataccactt

SEQ ID NO: 2710 - DNA, 1370 bp, Zea Mays
taaatttgtcccttcaaatgtcgctgatgaacccaaacagctactatgaacagctaaaaaacagcggctgcattccaacaactgaccacctttgccacatttcaagcacaaatcttgttgagacaagccctccaaagtatcaatgatgtattgatcctcgaaatggacaaatatttctggagaagcgtccttagactttagctcatttgatgtctcctttgcactttctccacccctatcctgagaagaacctggaacataagtatgacaattatttttttgaatgttcttttcattttccggctcagaaaaacaattggcttctgaagttttatcatgtaaggttacattgcagttttgagacactgcagcagtctgtgcagtcagcccgccatgtaccgcattatttttcatgacgctgcaatcatcatgcagagcttgattagccatgttggtatcgctgaattctaagtgagacttgtctgcattctgctcttccaaagccatcctatcctctgtagcaacaatccctggttgaaggttggtttcagatttacttccttgattagcaccattgcagcttatagaaagcaaaacactggcagattgcaaagtcagatccccatgaacatggtccttttccactagcccaatatttgcagagatatcttccagatcttgggttactttctcacccctatcctgttgcagagcactcaaatgagctttcctgctgtcaagctgtgaaatcatgtttgtatcctgtgctgttatgcactcaggcaaatgctcaggtccagatgcatctgttggtaagacatcgctgattctgtcaaaacctgaagttaccgtggcatgagagctcagtccttcatgaatggaaaccttagatgactgattgctggagccaccatcatttgccccatctccatcagcacagtgagatagacttggagatttttgcttacaagattttggttcaactgtagcagtatggtcatgtttatcctgctgggaaaagggctcagtaatgcttccctgcaaaggtgcatcacagccatctgaagcaagcacagatccaacagacatgttcccctccacaataggaatcctttctgaggacctagtgcctagaccaacagcatcaatagtatcttcttgcggagggacgtaagacctgctttggggcatacatggttggtgaaaaacagaagttggtgcaggcggatccttttggagatttcctgtttcactttcattgactacatctgtagggaacacaaacacaggcttctctatatttacacatctgtggctgctgcgcagtgactgatcattgtcacattgttcagtgtcattgtgctccattt

SEQ ID NO: 2711 - DNA, 378 bp, Zea Mays
ctcaaatgcgaactccaacatatggccaacacgatgacagaaatgcaagcgcagatccatcaagaacgacaagaaatgcagcaacaatgctaagaaatgcgtcaagaacgacaggaacaacaacaactaacacctccaccaccaccagctccgcccagagataagcaccgagtttatgagtcataagccacctacattctctaactcctcaactccactacaagctgatgactggttaaagaccatggacaagatgctcaatatatttcagtgcaccgataggaagaaagtgctatatgcatcaggtcgcctcactggccctgctgcggattggtgggatgcatattgcgcagcacacgctgctgctcacaccattac

SEQ ID NO: 2712 - DNA, 342 bp, Zea Mays
gcggacgcattcccaccgtgacactacagcggaggagagcccgggcagccattagatagcgaccagaccaaaccctaacctaccccgagcaactacgtgcatggatttgactcaccaactcagagtgacatgaccacgcccaaggcaggagcccagtaccacggcgctcacccaattggctcaagcataggatgtttcaaattgagggcacagggagcacgagtgggatgcgggcagcacgacgctcacaagaattgcccttggaccaactgagctttgagtgggtcatcaccagggcagttcacgtggtgtcaagctcgtgttccgaccaaactaaggtcg

SEQ ID NO: 2713 - DNA, 685 bp, Zea Mays
tgatttttcagcaaagctacactaaaaaaattgtctactttggacctgatcgaggcccaaacagaatactattgcgaaaaaggcaacataatagcatcttagttaacatgtaagttgttgtcctatgccaaatagacctcaagttattgcacaaagagggattggttgccatgtttgcaatatcaacatttataggcaaaagagaaatagaaaaaataaaaacaaaacatgaccatgcatcaataagcaatgctttccatctagggtcaagaaaacaaagcaaaccaagaagtcaaaggagcaaaaatggaaagtaaaagcataactatcatgtacgacattccatataaatgctggacacgatcaaatagtggctcaactccctagatctgctagcaacttgccatgcaagatggttagaactgcaactagctctacctttcaatacttaaatgtttgggccacactctatatagacatatggtgctttcttttacaatcaaagtaagaatttaccattaatctataatctccctagaagaaacattgatcaataagtaacactatcatgtcggccgtcgggtactacactcattctaaatagtgggccaacttcatataaagattaaatgagttatagaacggtttgcacacaccattcactggacaataacatgaacattac

SEQ ID NO: 2714 - DNA, 546 bp, Zea Mays
atctatagtgggactagaaactgaaggcacgttcaaatctccaaaaaaaagaagagccaaattagcagactacacaagcaacatcgtctgtgggggagcagcgatactcaagcacgcgcggatctagttgtagatgtcgagggagaaggccacgttgaacgctcagcttggggcagcagagcgaatccttgtgcacgacgacgaagggcatctcggtcgcggattcgggatggaatcaccacctcctcgctggatctttgccaacagtcttcaaatccaccccgagattcccaccgggcaaggaatcgccctctgctgaaggtcacttcccggcctcagtcccaacttcatccctcggacgacctaagtcttctggaatgcaaacctaagtctttctggaatgcaggagatgaagaggtcgggggatcaagatgccaggaacgcgggagatgaagagggaaatgggacgacctaagtctttttggaatgcaaacctcagtcccaactggtcacgtcgaccaatctttcctctgccctcgatgtcca

SEQ ID NO: 2715 - DNA, 490 bp, Zea Mays
cccgtcgtgaacaagggacagactcttgaggaaattaaattcaagtctgagctgagcatcatcacctggtgggagagggaaaaaaaccctgaatcttcgatggatgtcagtagttcagcatgtgaaaattgggaagggtaaaattgaactgagtgattaaagaagtttaatccgtgtcgtcggtccaacatgcgagcggattgtatcgatcagctctgcatgtggcactccagttatagctaattcctcgtgcttcacaggtccgaactccacctaattaatgacaaaactaagctcttgtttcaccgacgaattgaaatctagttatatttggatgatatatgcatgaacgtgttaattgttatttccattatttccatacacgtactatacgtactcgatcttccgggtgttggaatataatgaaaacgagattcgagagaatgcgtaaaataacagttcatcttctttattgcaggaaatattaaac

SEQ ID NO: 2716 - DNA, 1233 bp, Zea Mays
gggctcttgcttaggttttaattattgttgatttttagaaaagcccaattcaccccctcttgggcatcgtgatcctttcacatgtcacctacataaatcttagtcgtcggatattctatgtgcggcttcatcgcttagcaacgctcagctatagtttggaactctcccacgtaccacaccagatgacaagtcgtgatgcttcgagagcttcttccccctccactccttaaaccatgtcatcgtgcaggtgctacctatcgcttggagcatcttcttcttcctactccactcagacaccgacgccttctgtccattcaaagcggcttcgactagaccaccagtccctcccaccagacgccgctgacacgacccacttctaggaactccatactctccctcatcctctcaaacggtaacaccgctgtcgcgtcggcacaggccaaagcactgccccctcctctatgtgttgattccatcggatctccatccctcccctcccccggccaccctcaaacgcacccacgttttgtcggagtggagtggatccgggtggagcaccagctaaaggcccatcaatttcagtggatggatagtggacaattgagggctcggctatcagcaagagaaaggagttagcagacctgcacacgagttgccattaataactaactagtaagttccaagttcactagaattctatatattaagcgccaacgcatatccggtgtctccttgagccacgtcacctccaagaatcttagtcatcgaatcttatacgtgcggcttcatcgcttagcaacgctcaactacggtttggaactctcccacgtaccacgccacacgacaagtcgcgatgcttcgaccttccccctcccctcctaaaaccatgtcatcgtgttggtgctgcctgtcgctcggagcgtcttcctctccccactccactcaaaggtcgacatcttctatccattcgaagtggctccgggtggagcaccaatccctcccactagacgccaacggcatggcccacttccaggaactccatactctccctcatcctctcaaacgacaacatcgctatcatgtcgaggtaggccagaacaccatcccctcctctgtgtgttgattccaatcggagctccatccctcccctcacccgccgccctcaaacgccaacacgttttgtccgtgtggagtggatccgggtggagcaccaactaaaggcccgtcaaattc

SEQ ID NO: 2717 - DNA, 667 bp, Zea Mays
caacgacctggccgggatcatctcgtcgctatccggttgcgcctcaccttctatatattaaggccaaccgcatcttttcctctcccttttccccattgacatcgtgcaagtagagtgaagagatttggggcaccactatcggggtaatctcacatgcgctactcggagctcgagctgcgccgggggcgaaccatggtgatttgccgcgaacccgctcgtgacctcaggttgggctgggcatcgtccggataggggggatttcttgtcggagtaccgtgcggccacaagaatcacgctgctccatggacgacctcgccgctactgcttcatcattgaggttaggcttatcctattcgccgagttatccgtattgttttggtctatttttcgctgtgaactgcaaggccggggaccgttcggagtacaccggtgcgagagccgccgcgacttcatcgcgccgccgtggctgtgctggggaaggaagacaacattggggccattggatctgcttaagacggataggattagaccatggagcaaagttgtctagaccgtagatcttggcgtgcgcggctatgattagatctgccgtaccggttgggggtggtttgatccaggtcgttagatggaaatggggcgcgtatacgtatgtcccggtcattttaaa

SEQ ID NO: 2718 - DNA, 1872 bp, Zea Mays
gtgaattttgtttttgtggcaatagccaattagccatggttattactaactaattctagactttctcgtttgatatatatcatgtgtaagcgatgaaattgtcactatgtaatatattatggtattatacatccaaataattagaatttatacggtattatacatatcaatttttacctcttagcaaatttgaatacccatctttcaaatcctaggcccgccactgcccatgtgcgcccgcccctgccatccacccataagcttgcctccatccggtgtttgctcatgtgcccgatctcatccaatcaccacctacaccctcgaccttcacccacatgggccaacaaatgttttggtttgaaggtgagatttttcattaataacttagtaatttgttagatagttagtaacttattttacttagttatgtagctaattattagtggatccaatggcctttatgtcatgttgtctcgatggctgtgctagaggttacaatggtggtacaattaatgtaatccttgtcagagctatcatctatatcatatctatgctaaaacaactactagagctctgactgctcctataccgttttgtgcatgacacacaaaactcatgctttaaaggattagagatatgctcaattatgtagatgatattattgttgctagttcttccaatgatgtagtaattatattattaaaagatttgaatgatatattttctttacaaaacttgggtgacacattattttctcgaatagaagttaagaaatcttaagatggtcttgttatgtctgaagagaaatatgcttgtgacctattgcaacatgctaacatgtgtctgtgtaaacttgtctctaatctactggcttctaatgaaaaaaattcagcatatgttggtggtctgttaggagttgggacccaaagatagtacgaagtataagggtattgttggagttctttaatatatgatcattactcgaccaaaagtttggtattcaataaacaatgtatgccagtttttgcatgcacctacaactaaacactggaaaactaagaaaagaattatgagatttgtcaacaatactatcaatcttagaccaaagtcaaaattgatgattgacttctcaaacgcaaactagactagttatattgatgatgaggttttgcatattccttgttcctaatttaatttcttggagtgcaaacaagaaatcaattgtttttagatcaagtatggagcctaaatataaagctatggctaatgctacttcagaaattctctaggtgtagtctatttataaggaacttggcattaaggagtacaataagccatgtttatggtgtcataatttgggagccacatatcttgcttcaaattcagtgttccatggtcaagttaaacatgtagaaagtgattatcattttgttcaagaaaaagtagtaagtaaatagtttgagattcggtcgattgtttcaaaacaccaaacatttgataattcgcaaagtctttttctacataagtgatacaaattttttagaacaatcttaacttagtgaagttatgatcgagggggatgttagaaaggaaactatgttgtatatgactttgactaggactctaagtccagatattctagtttgtatctagatgagttaacatgattgtaatatgatcaaacttaataattgtcacattgctttgagaaaatctttcaccatattaaaaacacaaaaaagagaaaaacacaagagaatcattattatccacgtcgaggccgcatgatccaccacccgcagtcaagcctgtgtcgaggcggccaccctgttgctgagaaaatgtggcaagggagaaatgataggagagaga

SEQ ID NO: 2719 - DNA, 304 bp, Zea Mays
gcgttgtgtactttgtatagtttggttttgctatgctggtgtgattatagtcggtcttagcgcagacggtttgatgctgtcgtttctgcttttgtcgtactggttcggctgcgcccttaggcggcttctgcgcggagtctttgcgatagacatcggatttttttcgcacttgttgtgcttagtccggctgcacccttaggcgacttctgcgcggatttgtcgcacgcgagggtggctagcgcttagcctcgcggtgacctcggattggtcgaatatcgaaggccgtcgtcgcggtctgttttcg

SEQ ID NO: 2720 - DNA, 410 bp, Zea Mays
ggaggtagtgcgatagacatcttcattttgaacaggtcgtcgacatggagtgttttagggcatgactatgattgaagcataatatggttctaagcatcatttgcacttcttccatgtgctaagctacattgcccatgtcaaggtaattggcagacaatagcttgatgaccaaatcatgtcgatggtgttcactaggtacaagcctagatgcaaggcatataggttctataccaaaacactgattgtgtccacatctcttgtgatgtggtgttcgattaagggaatccatgggactagaacaaggcgaagaattcattgggcatagtagagattgaaacattccacatcaagttaatgatgtcatcaatctatcatcgagcactagtggcacaataggagaatggtgtcac

SEQ ID NO: 2721 - DNA, 641 bp, Zea Mays
cagggagtggttagtacaatcgtcggagtggcctcctgcgggatttgcgaggagtagtcgctagggcaggttgtcgaagccgagctcaggcgaggcggagtcttctctcgaggttgagaccgtcttcaaacgaggaggagttttctcccgagggtgaggttgtgctcagacgcgtgcatgtcccatctggagttattcgagaacagtagccaacatgggggagcaatgtccgttattcgtgggcgtgtgtcatcatagtcggtgaaagtagatgggaccgcggtcccattgtcctctgtttgactgcagcgtcacgtggagtagatgtccaaatcatcgcatttaacgtgcatgtctcacggttcctgtgacctttagctgaggctgggctaagagctgtcctcctgtccaagacgagctcgagtgaggcagaaattaccgtctcgtgaagaggggccctcgggcgagacaaggatttctcccgagtgctgccttcgcccgaggatcggcttgggcgaggcggagttttgagcgaccgttgagcggggtctcgagtgaatcgtgattcaaccctgcttgaccgcgggggacgtgtcttacgattttttcagcacttgggtattaagcttgtttaggggcat

SEQ ID NO: 2722 - DNA, 780 bp, Zea Mays
gtacttgtgataagcaactttgaactgcatgatgtcaattttaccggtttcctttcttacatctgatctatcatatacatgattatgtattgcttaacttatcgatggttggacaattaatatcatcggatgaactacccgacaattatccggtacctacccgagtagtatccgttatccgtttcttacccgtccgaattattaccaggtcccgtcctgtatccgtcccgaatcttaactacccgtatccggtctcgtatccgagagaaatacattagggtaggatacgggatgaccctgtatccggctgtatccgtcccattttcatccctaccgaagggaagccactcgagtgaattcctcgcctggcccgaggctgacccaccataaatggctggccccattaactacgcctagcaccgagccacagtagaaaattagtctacctcccactcatgacctgtgagccccatggcttgcagcgcactcatgacctacgagcctctcagattgtagtgcactcataaactaccaagactaggcatgagtgcacaggccatctatagggcccacaacacgataagccacatcgagacctaggctatggaggccaggggccagcatggcgtagaggtaataatgaaggcgctagggctccacatctcccacaacgtccatcaaaatgagcacgagcagaaacaaccaggtgaccaaggtgtatacagataacgcggcttcatcagggtgaaacacttagttttaccacatcatagtggctcc

SEQ ID NO: 2723 - DNA, 546 bp, Zea Mays
ggccaactaaagcagaagcaaattaacaactaatatagatcaaagcaattatgattacaaactgccagacaccaaatatgtagatggtctgcactaggaatcaattaaagagcctaataaaactaacaaattgggaggcatttggaccctcattatttatggcacacagtgtttcactattaccatgttccggtccctgcaaatttggaacaaggccacgttttcaagtgttcaccatctcagtatgaccacgacatagtttaggagttaggacaccagcttacggctggcacctcttgcttgcatcatactgcccaactatattgaaatagcaatggattgcatgatcattgtgctcttactgtgttgcatttatcactaggtcacatggcacctcaagttaaactcgaccaataggatgtgtaaacaagatgccagtatgtaacagactcggtgcagttttgctaaaatatttgttaagaagtgtagtttttatgaggattcacaggtggtgtggtgaagcaacacgaaaaaattagattcaac

SEQ ID NO: 2724 - DNA, 883 bp, Zea Mays
cgccgtgaatcgcgcgctggaatcgcggctgcggctccgctggctggtacaacgactccgtgcccttctgggtataaagcatcgcgccgccgtgcctccctaaaccctagcgccgccgttccccgttagccattaacaaccgtgctggcaaagggtgagatccgggttgagcgccgccgctgcccatcctcgatctcgttgccgctaaagcctagaagtcgcggcggggagctcctccatagtacttggagttcacacgtgggagcgccgagcggattcaatcaccgggacaacttggaatcgctcatcgtcgacctcgggccgccgcggaatcgttgggcgccgtgggcagagctcggctcgccacctccgccagtaagaaccaccgccctgtatgcgattcgaatttctctacgtgtaggaccgattggatttaagtttgggggccggaatgatgtgcagccgtttctccgaccatggcgccgccgtgtctgcgttgctccgtcacggggccgagtgggggtgtgttggggagaatcgtcccgttgctagcgaatcccgaccgtccgatctccgtgggcggccaggattagaaggtagcttaccccttcagaaggagagccctgggccgttgatctgtcaaggtacgccccggatcagtggtggataacatcacttcatttaattaaatcagagccatcgaatcccaatccaacgtatagcatctcataccggttcgtaaaccgcgttatctaatcgtggccctcgggaatgagatccaacggccgtgatcccgcgataccccttcgcgggcgcagattaacacaaaggcccctgagttttagagaaatgaacccgccatcctttacactgttccctgagt

SEQ ID NO: 2725 - DNA, 714 bp, Zea Mays
ctgggacattggtggtggcgcctctcccagaagctggtacaaccttggatattcagagacctgtcagtgttcgcccgagacgcccttgccgggccaatcaacttgaatctcctgctgatgagcagaaaaagaaaaagagacgtcttcggcgagtatctagtttggatcgggacgttggtccttcggttcctgctgctgaggaagtgcatgtgcctgagtttactgacgctgaccccaatgggtgtgctccatctgctgctgatcccaatgggtgtgttgtttgtgttgctgatgaaaatgacggggaggaagaagatgaggtccctttgactcggaagaacagtcggcagtatgtcgccagtggggaaagtagtggagttccttctcctactctgtctgccctcattggtctacaagaattgtccctggcaaactttgatcagactcttgaagatatggttccggaggatctgttatcagaaccagcggatgatggtgcgatggatgtttgtgctgatgtgctcgacgtcgggttggggtcatcctgggcagcgtcccgcgcctcatcgaccttggagtgcggtcttgagggtcaggaaactgatttggatcgtcttgttcccatggaagtaactgagggaccttcagccttagaggcggatactacagagaacttggtcctcaaggatggtgttgacacttacccagcccccg

SEQ ID NO: 2726 - DNA, 1300 bp, Zea Mays
ttctttttctaaatagtgaagagttattttgttttatatctatgcaaaatcctagaaaaataaaatcttagaggaactttgattgttgcattcatgccgatacatagtgtttatgagtgcaaaatgttatcattacagatgaaaatatatcgaggatgttcccaagagtttttggaatcttcggaaggtttcttcgggtatgaaatatgaatttcagtttttctaatattaattaaatacctaaaatgtggtagttgtgaaaactataaaatttttggaactcgataatatatatatatatatatatatatatttcttcctctcgtcgaacctattccagatctcgtgccccttttcgcgagattactgaaccgcgtcttctcgcgaacaacatgctgctcgcgtcggcgatcctcctctatcctcgtctttcccttcggcgtccacctcgtcatcttgggcccacgggccggctctgatcgtcttcgtctaattttatctaaccctgtctaccacccatctaactctgtctaaccctatctcgtgcaacttgccgcgcagctgtctctctcgctcggccaagacaagagccgtcgtgaaattgacaaccacctctcgtgccctctcctttctatacataccctctcctttctatacaatcgtacaccctgccatgaaccccttccctcttccttctcacacatgagcagcccacgcgttttcctctctatgcattgtgccttcgtggtcttagggtccacctcgtcgtcttcctcgcgtcgtcggaggagcagccccatcgtcttcctcgcgtcgtcttcctcttctttgattgcctgctcggctggtcttcatgtgtaggtgacaaatcctctccttctccctcgtcttcgcatccttcttcctcgtcactacgcaaacatcatggcggccaaggagctcacaccaaactccctactcacctagcgacgcagctggcctagcccctcaccggtgcggcttggcgtggcccacacagctagcccgcctcgcccccagccgagctcgtgcagccaccctgtgtgacccctggctaggccgatgtctagccgagccttccctgccacgacacacccttgtatggtgctgctgcgcaccgctcagccccgactccggcgagcagacaccaccgccgtcagccccacccaccatagtgcatgccacgtcggcatcgcgcccgctccggtaggccaatccgttttcctactattgccgttcgtgcagtatggaataggaaaaaaaggaaaccaccccatgtggc

SEQ ID NO: 2727 - DNA, 545 bp, Zea Mays
cgggaaaccatgatgaccggagttgtagcctgtcatctcgaccagttccaaagtgagtatcaccatcgtggggaggagacatcagttgtggggagagggaaagccaacgagggtagtagaaccactgtcaccatcgctagaaactccagagcgacgagcgctagtgcgggaacgtgtgtggagggggtgtagctgtggtaaaggtcatcacggggagaagggaagccataaatgaagattggagccgtggtctactgtcgtgactagatccaaagcttctacctccatttgtggggagatgcagggaggggatggctattgcagaagcgtggaaatcgatgatttagagcgaggccatagctaaccattgagatcaatgttggagcgacataggcgacacgagaccggaggagggaagagcggtggcatggggagtgctggcggagagcgctaatagggatcgacatctacttcgatttgactcaaatgaggaacatttggatgtttagggtttagagtttagacttttgtttagaccttgtttg

SEQ ID NO: 2728 - DNA, 1015 bp, Zea Mays
tacaagagaagaggagccggcagagaataagaagaccagaagttgacaaacttttcctgttcttcgagaagcccattttctctcttcttctccactagatagagaaaggggagagagagggagccgaggaggagaagatccctctcaccgtcatctgctggccaatctaatctccgtcgtctgcatctgggtctgctcccgtccatggcctagtgacggaggattgtatctctgtccatgtggatggcgataaattagtacttgtttataggtgttgctgtttggttggttggccttgtctccttgtttgaggaagtggggagaggcggaatcttttgttggatcatggcagttccaatgcggccggtgggcttcgcccccccgtgacatggtgagcagttgaggggacggattatctcctgttcttggctgcttccctctgttctattctggcctggccgccattgtttcagcggatgagttcggggtcggaagtcttgttcttggaggttctcccctctgcttattggccatatgatgttctactcctgcctaaattttgcctgtgcgaaaaatttgtgtcctttttgatgttgtggttttggttggataatagtgtgggaaagctgacaactttcttgattttggtttgataatattatccttgcagtgtgcttgtgatgttgcgatttttcagaaagctctgatttttagcgcttcattatttggaatccttctggctctgtagtttgctgtggtttgtgatctcgtcttcaatattttttgtcgcttgcatttatggcccttcacgccttctttttcttcccattccctgacgtcctacaaatgacaaattacaggtctcttgttgctgacactacctggacttttcttctgcttatgacaaagacgaactgataagctggcattcgtagatcggtttcttgggagatacacatacagaagctttagggtcggctcgtagaatctctcagacaccgtcgttttgcatccg

SEQ ID NO: 2729 - DNA, 303 bp, Zea Mays
agtatgcgggaccatttgtcgtatgcaattaccattagcaggtgatcggattgtttattatctgttacagaactagatccatcaaggttctcattcaataatgtggcttttgctttctccacattttgcttctgtagtataaataaaaagttcatgaaatgtcaaggcacatctaggttgcataaattgttcatcattgaagtcacatgatacctcatcttttggagagagaaatggagatttataactcaggaaagcagcaacggacagaattggtgataaacaaccaaagatagcaccata

SEQ ID NO: 2730 - DNA, 417 bp, Zea Mays
tcggagaggaagaagatcactggtggcgcgatcgtgccgttcaccggtgcagtggttcagagagggtaagcctaagtgtgccacggttactaccgcgtagtgaagagtcacggtgtggcataattgagattgccggagtgtccacgatgacaccgacggtccggccaggtagcaacggctacaggcatggtgataagcttcccctgcaaccacatctgcttccccgcaagatcttttacctccccgtggatatccacttcgtgcccagcacgaatcacggcgaccggtgcaaattcggacgtgcggatcacctgcggtgagggggactgaaccctgcgatatttcaatgcactgtaccattgcgaggtcattcagttggtttgacaggggatctttagaggcattgttcttgaattt

SEQ ID NO: 2731 - DNA, 1654 bp, Zea Mays
gctgatgcggaggccgctgccatgtcggacgtctcgtcggatctcggcggcatccgggcggggcccgtggagcgtgacatcgagcaggtgcatgccgctaacccttctctgggtggatcgatttttcctcccccgtccctggttccactgcgtgtgcaactgagatgaggattggtagatcatcatccaccgcttacgtctcctcccgcgtggcgcggatcgatttcccctcccacgagtggattgaaagatcatcatctatcacctacgtgctctccgcccgcgtggcgcggaacttcgggcgagctcgtgctctttgtgcgccgacctgaaatggtgcttgattacggcggaattcatgggcgttgtgctgtttttcttcttcttatgtgctacaatggagctcagtctggatattccaggccgctattcccctttctctgctgaaatcccgggagctagaatggtggttgacttgttggtcgtccaaccactaattcgggtgtttagaggtcaagctgggactattatacttcccattccctgttttctggagctgaggggatcagtcatcagtgggatgctttggtgaacagcagattcattctgggagcgagggctcttagttgatagtttagttctttcacttgcacgctcgtgcgttctcttgctgtgttggccttggtgctgtgcttgttcattctgttctagctgctacatgacactgaaattgggtgagattttgatggatgtcggattgggtatcatggatttgtgaagaattgtatgaggatgattgttgtggatttgtggttttttggatcaaactcctgtatattttagagaggcatgtccgacccatgccttgcaaacggacagtttaagctgactctaccactgtagtcatatactcctatttttggcaccaaggagggcgatgcagtgtgggggtttggaatcaagcgatgattgatttgtttttttctttatgtacaatatatgtccaacattctgtttgtggcaaacttattagacagagtgaagataaggctgggtcatgatacttgaatacaaccagcatgctttagttgattacgccgacaagtgacaaaatggcattttcatttgtttcttacccaataatgcattcacatttttttttctattaagggtctgcattgatcataccagatgatgtgtaacgtaagagctgctgggcacactgatcaaaactctgtttcagttctggagtttatagtgagatgcttcataagctcccttccaagtgcatctgacaagatgctaataatacaaagcagttaaaaaacaaaggcgatacaggaaaatgtcatgcataactgaaaacatcacaatcattgatatattcttatcaaaccagcaagcttagtggctgtagttgcagtcatcactagaactcgactagtgtgatagggtttcttttggttttattctttgttgtcgataggaaatcataaaagaaatgcacacatatcagtctgatgcttactgaaaaaggttgatatgaagcatgagctgtatggcgtcagcagcaaagcaaaagtagcaaaacaatgttcaatgttccatattgtatattgaaacattagcgctggcacttgcttttgtacgtctc

SEQ ID NO: 2732 - DNA, 603 bp, Zea Mays
ctttgacgagcgtgccttatatcatgtgacaagaataaaaaaacagttatgtcttatatcctgcgacagagggaataattattaagttgtctaattcaccttccccttaggcgtcacctgtcaaccaccacctttgtactccacacctgcactgcacaccaagacaagaaacatgctgcaaacaccacactcatatcatagttagtctacatgaaaacaaggcctatcatctttttacaatcactcaccatactcgaacaacgtgggcagatatcaacgaaatcgtcatagaaagcaaaaaaataaaaacaatttacaactaaaaagggatcataagaaaaggaattattggttcgattcgtttgccttaaatggtattactaccgagcccaacttactgactaaagctgaagcgggtgatcagtgatcacgagccaactgggccatgcatgattatctaagaaaataaagtctcgcttatttcgctacgtccagatggtctccagcaagaacttctctgctgaatcattcgccattcaagctagcgctccgtccgcggcccctacctgctagcttgttccttacgtgacaagtggaacagtg

SEQ ID NO: 2733 - DNA, 560 bp, Zea Mays
aaaagatctaataaaattgtgtggggacaacatcaattcaagataatagcggacatagaagctggagagtatacgtgcaagtgcaaacagtgggaacatataggtttgaacatcttgtcttgattattctaataaaagtgcatatttgataggtttgtttttattgttaaatagaataatatatggcattaacaatataatgattattcttcatgattgcaggtctactatgtgttcatcttttaagagccttcatgcatctacaagtagaaaagataccttcaaagtatatattgcaaaggtacactgtctcatcaagataagatgtaccattcaaaagaattgataagagcttcatgggaaaggatggagttactaaatcatacagacagaaaatgttgctaacgaaaacaatgaaagttgttcgctaggcgtgtatgtcaaaagcagggtacgacaaggcaatggatgtgttgaatgagcttgatggcgttctatgccgattggagtcagacattggatgtaatgagtcatgtgatgttagtgatgatgaggaaaac

SEQ ID NO: 2734 - DNA, 468 bp, Zea Mays
ggcgagttgatttagattcagggtctcttatgaaagaatacgctcgcgaaggggtatggccagatattggtcgttcgatctaaatcaagcgtccggattaaacctctccccacgcgacccggtcaacgagccaaccctaggatccgaggtcaatgcccgagatttggccacgtcgacacacacagcccgccatcggatgagtagcccacggcttggatttatagtgcgaaggaggcaattccctagttaaatctggatcgtccatgtgaagatcaatgacagcgcgtggctcgccacctcaactccaatgcgcggtagctcacgcccaatcccgcgacggatgccatcgccggcgacccccaacacggtgagctatctagcggttcgtcgccccctaaacgaatctgagactatctactcaatcccaatgagttaacgaatgcaagggcagagctaataccttgattc

SEQ ID NO: 2735 - DNA, 714 bp, Zea Mays
atctaatccgagtcacacatagccgatcgaatggccagggggcttcttccctgcgcaacagccgagcatggtgacgcatcctggcacacggcggagcctcaccagatttgtttccccccgatgcacaggtgcactaccaccaacattggcaggcacaaatcgaagggatggataacgcgagacaattggcaaagaatttaccaccgattaggtagcacagaaccctgcccatagctaagtgtgggtccacggcgacccgcgacttcgtcgagaaattcccagtgtgacgcatgctaatcgagtccggcgaggccacgagcaccatcccggtgacgagttgaagctcctagacccgacaccgggaccccgtagatggtgtacacacgtgtccacagtggcggcttcccctctcaatccttctcccctctagctctgatgagttgcgcccaggatgggacatgctcctgctcttgtgagcgaggcacgcccgcgttccgcgaggaaatcccggccattcccaccagatgcacatcagcccagaggtgaaccatgatggcagcggtgcactgccttctctctcttctctttgttcttggtgggggggtgctcgacaatggatcacgtctgtctgcgttgatggccgaaaggggctaggtccaacatataagtcggccccagacgagagcccgcgtgggtgcgatagcggcggggcgg

SEQ ID NO: 2736 - DNA, 337 bp, Zea Mays
ctcgacctgaagtactaccctcgccattcaactggtagtgctggaggtgtgattgtctcaccagttggtgagggcaataccaggctgaacaacatggtaaacttggctgccatgctcaacacagagttggaccacacccttgacgagttgggcaaggttcgggcggaggttgcggaattgtgtgctgagtgcgcagcacgccactatctggatggtggttctcctgcccctgtcggggttcagcacccttaccgttcaccaccccgtggtcgcttcgactatggtaccccagactgcaggacccgcatagatttagatccatagatcgatggagtcg

SEQ ID NO: 2737 - DNA, 645 bp, Zea Mays
agaatatccagcacggggtgaatccggtcgctggccggactagtcgccgtgtcccaccgtggttagtcgcgctggcatcatcagagtcgccgttatccagctaggctacgtgcctcaacgttttaccacgtcgcagtgagtcacagtaagccactctctgctactggttcgtcgccggtgaggccgccacggtgaaggccatgaatcaccgcaccagcgactcattccttctcagaccaccacctcgcccaacccaaattccctggccaccgctcaagccttctataaattgagtgcacccacggcttcgtaggataattacacatccattgcaccagtccttgctccggattatccaccagagcctcccaatttctctcttcccctaatttggttctccgtgccgccgtgtgtcggctcaccgtggtcagcgaactccaggtctgttcgtgctccctgcacacttgtttcagcaccaatacctgccccggatactcctcgaccaactcaatgagctaagctaccttagatcgtcgggaacgcgttggtttggccgttgatcactcggtcatcgtgggcatagcaggttagagcgccgttagtgaaattagttgaggggaaactcttgttagggtttgaatttgg

SEQ ID NO: 2738 - DNA, 520 bp, Zea Mays
caagatctttggcagctctggctctagctctttggttgccttctctttggtttcggcatcgtgttttggcgtttcggctggaccggctacaggaacctttggcaatttagtcagcttttccccaaggatggtgggagcaggttgatctgcttcgacagtgagagatgtcccttcaccaagcttcggcactgtggccgtctcaatgtatctcggcctgtgtgttaagaccttaatctttttacccttcggcacaacagagatggccgaagtggtaattttccttttctttccctgctttcgcgagggatagaaataatcagggtatacgaaaccaatgacgtcaaaaactctactcaatcttttcttgcctctgccttcgaaggccaatgccattgcatcatctttggcccttgtgtaggccccaagcaattcatcactggttgcctcaatactacttaaccattcatcatttggctcatcaaactcgcctctatatctaaaagtatattttaaatagacc

SEQ ID NO: 2739 - DNA, 695 bp, Zea Mays
ctccttcactctgacgaaatgctataagagggctacgtgaggcgaaggcctcaagatggccgagcagccgatgccctgtcacgatcacgatgcagagtcctcgacattcttcgtcgagtctggacaagcagacagttgcgtcaaggcgcgaaggctccaacaacgccaacgaagaccatgcgtcggtccaccatgtgtcagtgccttcgttggcccacctgttagcgtagggtatgtgtccactatttggtgcacgacgcccgtggtgtgcacgacattgtaattactccgtcgagagaaatattctcggaatatagttggtaaccggggttagggtcgtattttggaccacctacccttggacgggcctataaatatcccgcctgcagctggatgggacacacataacaagaagctatagttctccgctattcgttttgccgcgctcctgagctctcacctattctctgagtgtttgggtccacctgacagtgcaaccgcgtgtcagtgctcaacatttgacacccaccgtttgtgtgacgaatacaacaaccacatgactcccaagaacagcacttgtcctagcccaccatcaaacgacgatgacgccagggcctccctcgccgtcaagaaaggcaaggtagtgaaaggggaatggacttaaacatttcctataatcgttttttgtgtttaac

SEQ ID NO: 2740 - DNA, 396 bp, Zea Mays
gaaataagggggatagcatttcccactaatctcatagtaatgggtactcagtgaatacatgtcatcctagggatgaattggctagataagtaccaagcaattatcagctgcgataagaggacaattaagttggtgtccccactaggagaagaagtggtagctgagttagtctcacctgagccaaggaaaggaggttgtcatcatatggctattgatagcaaggagccagattcactcgaaattatcaaggttgtgtcagaatttccagatgtgttcccggaagacataccaggtatgccacctgagcggaaagttgagtttgccatagagcttcttcctggaaccgcccccatttctaaaagagcttatagggtatctggaccagagttggttgaa

SEQ ID NO: 2741 - DNA, 475 bp, Zea Mays
ggaacatggttgagctcgtggccatcaaacttgtcctttggcttcgatcctctctgcagtaagcctaaattttcgtgttgaggcagctggattccttcatgacctacatggtgatgtgtaggtcgttaacgagtgccatgtactcaactatgttgttggatgcagtgaagtggagtgggatcacatacttcaagcgcacctcaagcggggagacgaagatgagtctgacccatgcgcccctcttcctcaccgacccatcgaagaacaccgtccagtactcctgatccatggctaccagcgacatctgtgttttggtccactcagcaatgacatcagcgagtacctaggatttgatggtagttcgagggtgtataatatcccttgatccatgagctcaagtgccacttagtgatcctttcgatggcgtcctggttctagatgacctcgttaggcaagaaggacgtcaccaccgtcg

SEQ ID NO: 2742 - DNA, 459 bp, Zea Mays
gtggaatgggcggagcagaaatgggagcgggaggtggaatagtggaagatggagtggtggaggtggtgggtatggtggaagtggtggatggctctggagcgacaggagcttttgaagtgggaggtggagtagaagctgtggcgaagggtgtagagggagcggaggagcgaggctgagatgcgaggcgacgaacactataggcaatctggtctgaggagatctgcaattggccaccccgctctgcctgctctgccgctgctgtcgctgcaagtcctgcacaggcggctctatccatacgccacttcttccggccttcctgctggtctaggtacactttcttgcccttgacctgcctgaacgggcgaggagggtcctcgtcatcgcctccccctggcgctgaaacattcttcgtccgcaccatcctgacctgagtgctgcataagtgagtgaaaggctaag

SEQ ID NO: 2743 - DNA, 856 bp, Zea Mays
tttctttctccttttctatcttgttactgttaattctatcttgcgccatttttcagttctgacagtattattattttcgtgcaggctaaagatatggtggaatttctcgtattggtaaaccaaataatctgcaaatttaaatcgtcagctagcgccatattggaggaaatatttcctactattgcaagtcgtttgtctgcgatattatcacaagatgcattttcagctggtcctgcaagcaatactgaggtaatgttgattgcctctgtaaacaagccactgtgtatattactttattttctagctgcttatacttaatatacttttttatgtttctgctgtctctatattgcaagaatgctgcttttaaatgtgctaaccttggggatatattacattatttgctattgtttatgtttgcctgcttatgatagtgcaactctagctataacatgtggcaaatgccatacagttcaacaaagcaaatatttcttgcacgactctctaacacactaaaggaacaaaagtgacatgataggctgttgcccaatatacgtccttacctatttacttatttgtttggcatcaattccattagcttaggttgataggtctgtacaggtacagccatacaggatatatttcttttcgtaatatatctccgactcaccactacaggaaatgcgagaactgcaagagctgcagaggacattatacacattcttgcatgctatggcaacacatgatctttctgcagttctccttactcctagctctagggagtatctggagaccataatgcagttgcttttatttacctcatacaaacatagagatatactactgcgcaaggtga

SEQ ID NO: 2744 - DNA, 516 bp, Zea Mays
caaggtcatcatattggttatcgagagtgtggaggtatccatccatgtagacgatggtgtggtcatcctcggtagggtctctgcctgacagggcctgaagtcttttcctccaggcgggggtatttttgttgctgggtggaaagtagtgaaggggggtttcaaagattactctgttgtagttctggcatagttgtcggagggcttttcgggcaacattctggcaagtatctgggaagcggtgtccagtgaaagtgacttggaaagaaggatggttcgggtagtttcggctttctcccaggtagactgccatagagcacttctccattccattctcgagatattccgtccagacatattctggcttcttgcggatccccttgcaaagcgcacaactttgcaacagatgtgggaacccctccacctctgagcagtaggatgtcctaatgaccagagagtcttccatctagaataggaaaagaagggtctgttaatatcgggggaaaggagagaagaatt

SEQ ID NO: 2745 - DNA, 1159 bp, Zea Mays
cagcttcccagtatctaattgtactatacactccttccataggtaagtttataaataaagcttcgttttccatacaatatgattatgctcctttttatgtgaactgcaatattggtcactctatatcagtaaagattgagtgttgcacatgtctaacaatgtgcagtgactgtaaatttgcatcccgcttatccagctgatcaacattgtgattggtttacattgcaggaatttctgtaaggtggactgttatccagagcacgtacttcatttgtacagccttatacaagtacagattcgaattgcatgatgaaatgtgtattttcaaattcatctttaagtgaactcagctaattatatgtgcactcatatacttatttgttttggattataccaataatttatgaggagttgcacccatttatttcctagtttttaatagtgctgcacacttcttctttaggtaagtttataaataaagcttcattttcatgcaatttatgattttatgagattttcccatacacttgcacgttcccatgaaagattcctctcacaaaaaaaacttaaatttcatttaatgtgtaactctctaactcctttcttacatccattgagttatattgcaggttgctagatctattacattttcagacgacgacgacactaggtaagtatatttccattaacattctattcaactcactattatatgcttctattatatactcctatttaataacatttattttttgttaataaaccagtagaaaaaacaattcaaagacgaatgttgaagcgtcacatgaggtataatttataaccttaacagaacaagcttatattcagttatacttaactgttaaaataaacctcatcgtatggtacaaatgttttaccacccaacactcccgaaagttcaagaacattagaatcactagcgaaaaggttcttcaaacttttcttttttcttttaactttgaacatctgttttatcatgacaaatattgtgtgtttaatacattcctcatcaaacaaatttggtgtcatatgctcaaaccaaacccttcagcagtccacaaccctagttctgcaaatccacctacaagacacgaataaggtatttcctttagcactttctacaatttatcaatacgaa

SEQ ID NO: 2746 - DNA, 545 bp, Zea Mays
gtcgaaaggtggtgcttcgggttcgtggttacgtgagggagctgctcgccccacttaatttcttgtcggaccaacggagaaggagagggaggagtaggaagggactcaccggagaggagaacgacgccggcgcttcgcgaattgtgctcgggggaggggaggagagggatggccggggctggtgcgaggaaggaggggctcggggcgagccttttataggcgcgcgagggaagggggagcggtggagcttcttggctccggcgagcttcacagtgcggccattaatgccgcacatcgccgccgaggggacgctacggcggggcggtaccggcgaggacgctggtcaagggggggaggacgaagcggtgccaaacttccctgtgcggcgagatggcagaggggaggacggaggcgacgaccggaggtgacttcggtgaggagacggcggaaggacgacgaagcaactgacctgtggggccatcctgccagagggagcgagcgcgcgagagagagggcggctgacgggtggggacaccttgccagcg

SEQ ID NO: 2747 - DNA, 300 bp, Zea Mays
tggcggctaacacattcatcgaagtctgtagggatccttgcttcttcgtcgtcgcctgccatcgaaacacaaaaacaggaaacaaacggtgacagttatccctaataatttcactacacgctcctctcaggtggaacacaggaacacgctctaatgtatcttaccaagctcttacaagtgtctaatgaaatacaagcaaaggatggtacaatcggaggctggttcgtgatacttaccaagaggtagtgaaaccgcgattgcaaggtcacagctgtattgatcagaagaaagtatgtggag

SEQ ID NO: 2748 - DNA, 1045 bp, Zea Mays
accgatgaaccgaatccaccgccggtttcgccggtgccataactacccctgcgctgctccagctagtgcatcggccgggcgagaacctgtgcgccgctttcccttttttctcggtctctagccatttggctccgcggtcagcgcagatcgtgcgcaactgttgcgcgcaaccgctggcgccgctagctcgacagctcgccccctgcgtccctatataaacctagggcgctgccgttcctctcccccgtgtttgtctacgtggagtcaccgtctaaatctgcgcaggcggcgggtcatcgctcaacgacggcggtcggcactgcacaccatcgccggtgagccatctgccctccgtgatagctttgttgacctctagtattcgggagcgggccgtgatagtaggatgggggcggtcctggggctggcgaacgaccggagttcgcctgccagaccttgggcatgcacaagatagtcggtcatggcgatgggggggtgatgcgcgctagtgccaggcgccggccggaggtagaaggcgcactggcgtaatgttccatcggggaagaagaagctttagccattgatccggcagtgtgtggttgggattaaatcctagtgtaccgtttcggccgagggagtagtggtcgttgatttcgcatcatacggttgttactagatctagaggtaattgaatccggatcctcgatcctggatccaacgaccctcgcagcataccggttcgagtaagcactggtctaatcgtggccatccactttagatcggacggctgtaaaaacgagataccccttcgtgggtccattttacttaagagcccctctgaaatcctgaaaataaacccaccatcctctggcgctattcccagtgccttagaattattaccccgagacccctggactttccaggaattgaggcccaatccagtgcagtttaaaattgaataaataaattggaaaatgaatttttaatatgaaaacaattactagaacttgtaaaactcatagaaattccatttttggtccaaattgag

SEQ ID NO: 2749 - DNA, 744 bp, Zea Mays
aacgtactagcacctgcagtacttctaaaaaaatgccgaagcatctttgactccttgttgttgttacacacttgaaatcgtcatcgccgcctactggaaagcatgaagagtacggtacactctgtaggactgtagagaagtaagtactagtactgttccaattccatggagacttgccggcaggcggcaggagagttggcgcgcgcgtgcagcggtcggcgaccagaccacaacgtcaggccaggccagtacgtagactgacatgctggaggtgctggggatatcgtacgtgcgtgcgtcctgctgatgatcgatttgtccctcttttttgtagtcaaacatgctggagcgctagctggggatatcatacatgcacgtccatgagtccatccaaccaatcggctgctatatctcgtaatagatcaatacaacagtttggttttagtgtcactaccgttgctttttttttcttcccccaccattgggatcttcaattccgtgttcagttcagtatactgctcgattctgtccctctttttttagtcaaacatgtacaaatatcctcggtatcctccgcttgctctcgcccttttcatggcacgggaatcaaatctgaatcaaacacgggtcgatcccaccgccaaacagtggagtagaggcgatctggtgcggcctcgccgcttcccgcaaccgcaacccccatgtgcggttttctcgtctgcttcccctgcagtcagccagctc

SEQ ID NO: 2750 - DNA, 806 bp, Zea Mays
cggacacgtgtcagcaccggacccccgctcggccttgattaaggcctgggtattctttgtcttggagtcccgggaccccactgtgagtagcccggacccctcctgaagggtctgggacccgtcccaggagtctagtttgtacctgtggaggtcttgaacctcgctcggaggtatgggctgttcatccaagggtccggcgttttcccgtgggggtttggacccactgtcgccaccttggagtatatcgtctcttctggccgcgtggctgccacggagctgcccacgtggagggttcgggtgctgtgcggccatggagctacccacgtggaggggtcgggtgctattcaccacgcgactagagatagtcgcgcgggcatcgtgtctttatgttgtagtaaggggtacccctaattcagagtaccgacagtggcccccgggcccgccttaggggaggatatgagcctgcaggtggggccaaagtttgaccagcgattggcgtgctgcttccgtgcgcttgctgttgtaattattgccagcccgccttcgaacacgccaactaccacgcctgtcccctcggctgactgacccgtgacctccgcacttgatgcttttgctgggccacgcgcgggatgcctcgataccgctacattggttttgaaaaattttctgtcttccgcggcgaccctgaggaggcgtggtactgacgcgagcggcggttcgacttctctgcacccaggaaccggcacccaaggaggatgacttgtgggcccgggcccccgtgtcagagactaggctgttggtttcgg

SEQ ID NO: 2751 - DNA, 723 bp, Zea Mays
cgctgactgcaccgtaccgaccaggtgcgcaggcttttttggttcactgtaccaccaagttacgtcaattataactatgtgttatgctcaatcttgttatggtttacacactttttggtgtgcgcatgtttcgtggcatcgggcccacgaaaagatcgtgtccccgcaatctgggcagccgtactagtccccacataaatatcgatattacgctgtcttatgcttccgtttatgatatagtaatccatgtgtcggtccatgggccttcgcgttgatctcgccagcagttacgtgtatcgggcccacgaatccagcaaccgagcacgcattttttcagctcacctctcccgtaacgctcgcgcggcggccgaaccctagctaaatcgccgtcgtctgcttcctctcctccgcgcccgccgaaccctagattaatcgccgctgtgagcttcttctctaccgcggccgccgaacacatagagattctccccccgtcgttccaccgccgtcgcattcaccttctccaccgcagagacccggaatcgccttctccgctgcagagacgctgtcgccttattcttcctcatcgggaagggacccggaatcgcggaggcggtggcgccgccccttcgttcttctcctccgcacagaccgagacctcgatcttctccaccgcggcggccgaacgctgagtcccctacgccgtcgcgagctccatccccaaca

SEQ ID NO: 2752 - DNA, 394 bp, Zea Mays
ggctgggctcgaccaggggtgcttcttcgccatgtcccccacaactggctctcctgacgacgccctcctacgaagtccctccaccttcagcggctcctctaccctactcatcgccggctccgcctctcctcccgctcctagagacccctgtctcgacaccttggtccccgttggctagacgctgggatcaggcttccctcgcggcctcgtttggtaccatggtgctgactttgccccacctctctagattgggtggttgactccggcgcttcctaccacattactgttgtcagcatgttatctcactctcatcctcttcatccctctcatccttcttctatcattgtggggaatagttccacctaggggtgggcgttcgggttacccgaaaatt

SEQ ID NO: 2753 - DNA, 989 bp, Zea Mays
gccatggcggcgccagagctccccccacggcggagccacgccagcgcaaaccactcttagattttggtgcccgatcgaccacacggcccggcgctaaaccatcctaagggcatagcgaacaatcggcgcgacttcttactgaagatcgaagcatggagattcctggtcacgcgagcgacggtgttgctgtggagatcatgacgcttgtgagcaattggggcggcaccagtggtcgaagacggcgaacacgttggcgaggagacgcagatggggacgacatcggacttgaactcgcccatgacgttctgctgtccgcccgcgcgcgttcttggcgaagccggacatgggggcggatccactctccctctcctcttaattctctctctccggcgagggtctctgctccccgaggtatccgcgatagagggtgaatcctcccagtcgtcgaccccggcgtggacgatgttgtgaccgacggcgacagatcaccccgcaaacctctctccctcacggcggccatggcacacgacggaggacactccagcaaggggggtcggtctgcacagctaaatacagaggagggcgaattcgagccgaggaatccgcggcgggtggcgcgcgccgttgcaacagactctcggaggaagcagaggcggatccgagagaaacggcgcaccgacgagctcggaatttgcggtacgcagtgatctcagtgggagaagactagcaaggcagtcccacatgccagagcctgatagcatgcatgcggtgaccagagggaggcccaatctatcggcgaaggcagaccagtgacgtttacacggccaagcgactgaaccacgggaccccatgcatcagttggcgtaaacaggctgactacccggccccgcggacagtgaccgagcacgcacggtaggggaagttggataggtgggctgcgcagtggggaaaccaggatcgggccgaatagaagcagaagtggcccaagt

SEQ ID NO: 2754 - DNA, 636 bp, Zea Mays
gagctcccaagtctcttatatgtggccagacctaaacactatgggactagagttctatgctaaaccttggacgtcacggtgactcgcgccttagctccggcctccgagtcttttggtctggtcgtccgtgtgcgagtacgtgtgttcgacccccttgttctagccgaccccccctctattttaataggccaaggtggaagtcagctatcggtcctagggaaggagctagctactgcgccgtggtaaaacaaagtgttctaccttggtgaaggtttgtttgtccgaatgtgcctctatcatctggacttctctggtcacgatctttatggtgagcgcggcatgggcgacgaagagccccgacaccatcattgtcgtctctgtgccacgccgacctctcgctgtcgtagcctgggtttcagcgtggagcctaaaggcctgtaggtcatgagtagaatgtggaccgactccccctatgcggctcgttgtcagacgcagttaatacggcacaacgggtctgtcctgagccagacgtgaaatccactcgagtgacttcatctcgatccgctcgacccttttggtttcttctcgcccgacccaaggctcggtgcatcaggactaaccaggagccactaccgg

SEQ ID NO: 2755 - DNA, 742 bp, Zea Mays
ctgatatataggagattaactttgttacagtcgaattagggagttgccacatacaaatttgtgaaaaacacccctaaagatgctctgtttgataggctgatgaaggtcctgatggtacaatagtctgacaaagatcatcagatacatcgcacctcgccgccggtgatccccgcgcctggattcgcgccggccatcacgattcttgctcggcgcaaagtagataaccgcgggggagtaaaagatatggcggggagatggattgggtcgcgggtagtagcttatcggagaggcttgggggctgtgcgacgtgggaaaacggccgtggttgtcagaggtcgccgatgaactcgactgtgccacgccgtggtccttcaccacgtagtcgtaatcctggcatgctcagaattactctccctgtgtttgtaggccgtcgagcaccacgacgtgctcgccagtgcaatgtcttgtcaccgccgccctccaaatccattccaaattcggagtaaccatggacaacctctataaattgagcacctcccttgcttcaccccctcataacgaacctagtgcaactctaatctcggtcggtcatccaccatagctcgagcaattccgttttcccccaaatcggttctacgcgtcgccgttagcatctcgccgtggccagtaatccacaggttggttcatgcttctcttcttggtgttttcgcatcccttgagtttcctgttgcttgtaggcccg

SEQ ID NO: 2756 - DNA, 537 bp, Zea Mays
ccgatcagaaaacctctctctctctccattattcgactagccaagtcaatgcgatcaaatcaaacggcctaaaacttggtcggtcttacttgttgtgcatgggagctagcggcctgccagttgttagatttcaatatttcatcatgtttgtttgtaactttgtacggttcgccatgcatatcgtctgactaagccaataataagcaaattcctttcgaccatatatacgcaagctagtcaaataattaagtaaaccctgcattcacagtgtatgaacaggcaaacagctgttgacacatcgatcatgccagctagctagccacacgcaaaaacatgtaatgtacctaacatactgcaccgaatcgaacgatcgaagagagatgcatgggttgttcgtatctgtcaagtgatgaactatctttgacttagccacacgcaaaaacatgtaatgtacctaacatatctgaaccgaatcgaacgatcgatcatgttagcttctaacacgcttcaatcatcaatgcatgcgcgatatccggc

SEQ ID NO: 2757 - DNA, 527 bp, Zea Mays
gattcctgctgtggatttggtgagccggtttgagatgatacttaaaggcaaggtgtctaatatcagtgctcctgttgcatactcagcctggaatctgcctccttccaaggccttcatcagttttgtgtcaaatcctcctactagtgatagcggtttgggccatagagtgcgaccttttcccgaagaggttgaggctttggttgcttcacttggcaaaatccccgacgacaagaggcaggttcatttcgaggtgcctttgaatccgagtgacgcagaaataagtgtcatgctggacatgttggctgaagattcctttgatgcagcccctgctgaaacactggttgtagcacccatcaccgagtctggcaaagctttagatactcagaggtctgatagtattcgcccgaagcgtcctcgccgaaccaatcatccaacttctcctgctgaggggaagaaaaagaaaaagagacgtcttcgtcgagtgtcatgcttgaatcaggatgccagcccttctgctcctgttgctg

SEQ ID NO: 2758 - DNA, 1020 bp, Zea Mays
tcagtttctcgctcagccagccgatattcattgggaagctgtaaaacgcattcttcgatttgtaaaaggaacacttcatactggattatatctccgaaagactggttctactttattgagtatctttacagatgcggattgggctggttgtattgatgaccgacgttctactgggggttttgctattttctttggttccaatcttatatcctggagcgctcgcaagcaacctacagtatctcgttcatccactgaggctgaatataaagcactagctaatggcactgctgaagctatctggatacaatctttgctcaaagaacttcgtattatgcagccacgtcctcctgttctttggtgtgataatttgggagccacatacttaagcgccaatcctgtttttcatggtcgaataaagcatgttgaggtggattttcattttgttagggagaaagtggctcttggagcattgcaggtccggcttatatcatctggagatcagatcgctgatatatttactaagcctgcaaccaaacagatgttggagcgcagtcgtttcaatcttaaccttgtgtccaccggttaagattgcagggggatgttagcattctgttgtatagcgtagccaaggttgttagcatctatgctagattaactcctagattagctcctagacggttttagttttgtatctatcctgtgcacatgctatctatataaagaaacaaagcaagcaccgaggtgctgtgccaccaattatattcttcctattgcattgttcaactgacttgtccgcctcccaaccactgatccaataaatacactaagcaacgcaacaacaaaaaagctaaataaatatatcgactttgttggtctcttcctcttcactcgcaaccctacgctagctgtaatagcgttgaaaggaatccaacaaatcagcacatcgcttgaatgcccaccatggaatttacagcaccatcaggaaggaaggggcttgggctgtgctgtcaaggttccccc

SEQ ID NO: 2759 - DNA, 473 bp, Zea Mays
gggggagggcaacgttttcactcaatatcacaacagagcagcgagggcaacaaaaatgtcacataggctcctccttcggaataagacccacctcccgaaaattgaacaacatcatcctcaactcttccccctcaaacaggtcccgcaagtccccctctccaatgcacatcccagacgtcgatgaaagtaactcgcgctgagcaccccgatccaatcgcagaccaccccgaagacgagacctttccatacccattcagcgacgtcttctcccacttcgtgacgactcaacgatgctctgtttcaacacacccattcttcgcctccgtgagtcttcagctctcgcatcagccttggttgccagcgccttgcgagggacagatcgtgacggagactctgacgcagccaaatccaacgcagcaaaataatctaggtcatccttagaggattcctcaacccgcgagaaaggactccca

SEQ ID NO: 2760 - DNA, 850 bp, Zea Mays
gtggctgcctgggggtggcctggccgcatagaagctgtgggaggggtcaatcgaagaggaaactggctgaagcatcactgattcatcgctggagtatcctcaccgccatggagacgcgcacaagcgtgggcaggaccgtccgcaccgtcaaccgaggcgagaacttccccaacatgcccgtcgtgatcttcgctaagtgttgcacgcttttccttaggagctgggactctggggggctagttgggcagtctccggcgaaagcgctgtcgtctgcgcgctgcgccaccgcggctgagaggcatgaggagggtgagtggtcggggtctgttgatcttgtgactaactgccaagattaaaaccctgaatatcgttttggatgggggtgtggatgtcattgatctgccagtgggtgaatgcaatctgatctcgcgtgaacggtttgatcatgggaatctgagccgttagatgtgcatcgtgcgtgtaagaatcattcacaatcattttaaatccaaccgtagatcctagattgtagggttgtggcttgagaccaggtctttagggatctgatctaatcctgatcgtaggcttgtgatccaactgtcatgatccactcataccccgtcggcctgaaaaccttgcaaaagagctcctctgttttatcaaaaccaacctatggtccctatctatctagaatgaactacaatcgagtacagattaattgcacctgaacccctgcattctctggtaattgtgccttcggtccagagtaattagagatattcgaaatagataaagaaaatgaatataggtatgaaataaatctactaatcttgtaaaatccatatcttcc

SEQ ID NO: 2761 - DNA, 476 bp, Zea Mays
ctcattcttgactgttttggtgaagcttctggccttgtagctaatttgcacaagagttgtgccatcccaataagatgtgaagtggaattactgcatgaagggtgtaacattctgcaatgcaccccctcttccttcccttgcacttacttggggctgcctatatcagataagaagcttagcaggaatattttgatgaactgggttgtgcgctttgtactttcagccatcccagtttaccttttccttgctatgaatgtccctaagtgggtgattaacaaaattgataaaatcagaaaaggatttgtgtggagagggagaaaagaggttaatggcggcagctgccttgtggcctgggattcagtcacaagacctttgaagtatggtgggcttgggattcctaatttacaacacatgtgttgggctctccaaaccaaatggttgtggcttcaaaaaacagatcagagcagaccttggca

SEQ ID NO: 2762 - DNA, 578 bp, Zea Mays
aaagagcttaagcaagagaaggcatccctccaggagagtctcagcatggtggaaggcgaggaagccaacacccgtgaggcctatcggaccttgaagatagactttgacaagaagctaaaggcactcgcccccaaaaagaagatccagaagaagaccactaaccagagatgccagacagagaagaagaagaaggcccctctagccctacctccccccagaatagatgactggtccgacgaagaagatgtatccctagccagcctcgatgatcttctcaaggcatttggggacaccttagacaaggaactcgcaagtacctcgaagaacgctctcgtgtagtcccacctgtagtaatcttatgcttgtaatgtgatggtgtaatgaataaaataacttggttgaaaacaatttgcatgtgcatgatagtgactctcttccctggcagatggcttcggataaaaccacgcctaccgcctcagggattggagcaggtttcccccgaagagctgaaggggaagtcgttagagaagaaagtgaaacccacctccccgcacctccacccctacccttagacctag

SEQ ID NO: 2763 - DNA, 712 bp, Zea Mays
gttcaatcctttttatttgttttccatcaccaaaaggtgattgcgacttcttcccttaatgttatcttttttcagataaaggactacagtttgtgggaactgttgactttcaaattcgttaatccagtgatggacattggtatcacaagacaacttgacttcacagatttacttgagttaccaaatgagctcagagctacctcctgttatgacaaacttctgtcttcctggactgctgaatatcaaaaccaccatgataactcatctctacttagagccatgtctaattcttatggatggacatacttgcgtttgggccttcttaaggtatccttttctttccattgaggttgttgaattgagaaaaggatgttgctagatgtcagctctgagattcatggcatacaaaagtcggcgtccttttgttttcacctcttctatggtaaatagcaaatatatccttttttttgcaaggaacaattaatatatcctacaatgagcagattacacaagtgacctgaaacatattatcatagtattacctgaaattccatgaacgacaacatggggttaattatcttagaacaacaaccttttcatgttattactcttatttcaaagccaagcattcttatattgaagttcccactgattgtctttagtttctaacattctattcatgcaggtattaaatgacagcatcggttttgtt

SEQ ID NO: 2764 - DNA, 524 bp, Zea Mays
gggatcccaagattcggatgataaagcaagcatgattcacaagaaaaaggattaccagatccaggcgaaaggggaggtaggcaaacaggatcagctaggatgatcgacagaaaattctatgaagttttaggggcaaggatttatggaaagaaacatggcctgcatatggtttgcgcaactagtcaccaacaaatttttttttgacacaacaagtgcacaaggagacttgggttggtatagcggtcaagttatggggtgttacaagttgtgcaggtgtaacttcaaggataaaacactcaagggggctagaaaataccaacacaagtaggatttgtttttttaaggaggtttcacttgctaaactcaaggttgtttggaggggaaatcttttcacgagcagaacagacaacatttttttgtaaaaagggttgaacatttagaataccacctagatagcaagacaagcgaaacacatagcacgacctaacaacacttaccaatctgacacgagataaggcacttct

SEQ ID NO: 2765 - DNA, 511 bp, Zea Mays
gccgcaacttcgtccgcaaggttggactcctcccgtatcgcaactcgtcgtcaaggttgcactcctcccatatcccaactcttcgtcttcgcaggtacattcgtaacttccatttctaccctgtctcctcccccatgtgctgttacggatccggtcatcccccatgtactgattagggtttaggttgcatcgacgtccgtggttaatacttccccctgtaatcaagccaatttcagaactgcttactaacgattatcctatgacatttgatgttcagatttcggggagtgagtggtttttccctgttccatcagaagctccactcctacaaaggtgatgttcacatcattttctttgtcccttttactgcttgacatggtgtgtatgttttccaagatcgagttgcaaatatgttcacgtttttgggtaatccattctcagtgtgttagtacttttattagtacacatgttcctagtaaattgtggtacttataccctagtttgttagcag

SEQ ID NO: 2766 - DNA, 751 bp, Zea Mays
agagtctgatcaaaattggccagggacagttcttgcagaccaatgagagcagacaaggcaggagaaggaactcaactactttcaccactagcgatgaactgccgactgtttttccgagtcaaaggaacttcatcctcttcctcctcgtcgtctacattagcaacacaggcagcacccccattgggatcagcaacagatggagcacccacattgggatcagcagcagattgggtacacccattggggtgagcgtcaataaattcagtcacaggcacttcttcagcagcaggaaccgagataccaacgtcccgatccaaactagatactcgccggaggcgtctctttttctttttctgctcatcagcagaaggatcaggttgactggctcggcaaggacgcttcgggcgagtactggcaggcttctgagtatccaaggttgtatcagcctctgggaggggcgccactaccaatgccccagcaggagcagcatcagaagagtcctcagccagcaaatcaagcatagcgcttatctctgcatcactagggttcaggggcacctcaaaatggacctgtagttcatcatcaggaacctccccgagcgaggcaaccaaggcactaacttcttcagcagagggccgcactctaaggcccaaactgccatcagtgacaggtggattcgacacaaaaagagtgaaggctttgggaggaggcaagttccaagctgagtatgccactggggcaccaacatttg

SEQ ID NO: 2767 - DNA, 508 bp, Zea Mays
tgggtgtagtgtcgtgcttctagcatttcttcttgggatagttcttttcccgaagcatgacgaatgatgtagtcagtgcttttgttcgaagcttcgggagcaggagcttcgatcttttcagatgcaatctgctctgtcgttttttccttaggctcagcaggctccatctcggtgggcactgaaggcccagcttcggcttcagtttgagcttgcgcagcttcggtttctgcttgcccatttttggcttcggcctgcgtttttgtagcttcagcaactttctttgtagcagcagggcttaagaccttcgtagtttccagcacagcatccaacacgttggccattctcctcctcttgggagttgcagcagaagcctttgcaccttcgacagttttgtctctgtcggagggctcataatttttggcacttttattatttcttcaatctttgactcttcagccttatcaaccttagcctcgactggctcggctatgggtaccttcagcattac

SEQ ID NO: 2768 - DNA, 454 bp, Zea Mays
gttgaagcgaccacgaggaagtgaacggtaagggtgctgaatcccgacaggggcgggagaaccaccatccaaatagtggcgtgctacgcactcagcacgcaattccgcaaccttcgcccgaaccttgcccaactcgtcaagggtgtggtccaactctatgttgagcacgacagccaagttgaccatgttgttcagcatgggattgccctcaccgactggcgaggcaatcacacctccagcactgccggtcgaacgacgagggtagtactttaggtcaaggccatcaactaccccgctgaacaacgagcaatactgagaaagtgcctatcgtactgcatgttgcatggctgcctcggcagtatccctctcagtaatcgaatatgctctgagaaggcctctgcaccccggaggtcatcgtccggacaacacaccaagcaagtagcctcccactggt

SEQ ID NO: 2769 - DNA, 1104 bp, Zea Mays
gaaagagcttgctgtgcctgggcccaaactccgctcggcccactccgctgtttcccctgcgcggcccaagacgccagccttccatcgcgccgactactgggacccggttgtcagcctcttttctcctcttcccctttctccttctgagcgacttgcgtgtgggcccgtgatgtcagctctcacccaaactccgtgtggcccacttaccagtccatccgtgcggcgcgctcgctaccagccatatccgacatttggaacccgcgtactagtcacattgtgtgagcacgggctctgccggtggcgcgcttgtgtcaacccaatcttcctaggcgttgttgcaatgccatggatgtcggatctgccgtggactgagcttcaatagagtcacgcaattctaggatcctctgcatgccaggcgatgattccgcgcccattgccccttcccccatgtacacgaccgatcaccccctggttggcccacgtacgggtcatgcccacggcaaccatggatgcgaaatccgcgggaatccttgccaacgtgcgctacctggccggattataggtgtataagtaagcgagctctacggccacctcccccacccgttcatgtcgtcgaagaccctctagacaccctcaattgacacggcgacgtgccagtattaccgccatccgcccctccctgtggccaagccttccccgcagcttcaatcggcggtggtctccatgtttgaattactattccgatagcaaatcacgagttggttagggtcgggatgcaccagcacgccgatctggcatgctccggtgatcctccgccgggggagccctaacgtcgcctccacttgtgccggtatttagaagatgagtccctagccgttggatcgggtgggtgcaggtaggattagatcctgataccgattcggccacgttaacccgtgaccgtcgataggagatccaaggttccggatggggtgtgtggtcaggtggccgatcgcccgttgatcctgccacgggtggctgggatggcgtgggaatactctagtttggcaaatctaatctggcgcgtccaattctgatcggacggccagaactctccaatactct

SEQ ID NO: 2770 - DNA, 650 bp, Zea Mays
acggcagccgtaccgtgcttgggctcatgtagcagcccacgtgccgacactaacctagcctgattactgactaggcacagtaaaggcccggtggcccactccccaggccggcaaaaccccccactggcccactcccaagttcggcactcactcacagtctcactctcacaccgtcacacggcaaaggccgacactcccctcaggccctcactcggtccttctgtcgcggcgcccgctccctcgatgactccgttaaccaaaccctagctgccaccctctggtttccagtcccgccgccagccaccgcatcgtgctcgccgctcggtcgtcgcctcgttggtgtggataaatcaccagcagctcacaggatctccctcttctctccctcctgtcatccatggcgggtacgatatggactagctctccttcctcccttcccgacttaccgaacatcaccggtggtctgctccatgcctccgtcgtcagtgtgctcccggcacgtcttgtggttgtggatctcctcccaggcagttaagtagctaaccctaaccctaatccctaagtccctaacctaaatcgcactcagcttctcttaatcctccgtcgttttggtcaagtcaccatctctgctggccagatctccatcttcc

SEQ ID NO: 2771 - DNA, 442 bp, Zea Mays
gccgtgagctgttgtcgccgaagacctgggggaggattgaggagagccgggattggagattgggatttgagctccgccatcgacgtaattaccaccgacgagagatgtgaagcgctcgggattctacgggtgatcgcggacgcttgccaggatcatcggtggcctcgcggcggtggtttggcggctggtgatttcggaattcgtcgccggagtgcaagcttctccgcctgtgcgccgtggtcggggtcaccgtaatccaccagcgaggtaagaagtacctcatcgcctctgctactgtctaccctacgtatagcaccggtcgtagcatagcttaggtccctatttcgcttagttggtgtgcgccggtgaagctgccgccatggagcagggtggaccgcctaactccggcgtggggaggtgaagggctaccctagcctttgga

SEQ ID NO: 2772 - DNA, 416 bp, Zea Mays
cgggaatcagacgacgttgcagtggttgcggtggtggccgtcgaggaagcaggggtggctttggcgagccatcacaatagcgtgcacagctggtactcatgaacaggaggctgagagcacgaagaatagaaggagatgatgtggaccggttccgcgatgctgcgacaggaggctgagagcacgaagaatagaaggagatgatgtggaccggttccgcgatgctgcgatagtaagatttatagagcgagggaaggagtaacggcgctgggcaggtgaaggagaagggcggctgccatttatggcctaggtagaaaccgtcggcgctagaggaagaagaagaggtacgagcgcacaagaaacgggtgcgagtaggggagccgacaacgcggtacgcgggagacaggtgaaatgtggcg

SEQ ID NO: 2773 - DNA, 689 bp, Zea Mays
gctctataatcatagcgtgtatagatgcatgaataaataaggtgagcctatgagctatgcgtttcttccactcctgatacatgccaatcaagtgtttctttgaaacaaccttcactggcatgctttgaggagcttgcatagcccttctgaggttttgcctttgcctttgcctttgccatagccattgctactctactgccattttgtggtggcttcgtaaaaattccccctctcatcccctgattattacagtgcccatgacccctttctctggagggacctttcttcctttaagactagaagttggcgtgtgctttatgcatgaccgcgtgccgaatggatgcttctagtagttctgcatcagaagctcattctgagccttagcaccaagcaacatgttgacgaggtcacattatttgtgtacttgttgctacagtactgctgttggagcaccatattggaggggtagaaggtttggagagttttctcgatcatctctaagtctatggctatctggccacagaaatgtagctgagcgacaatgcgatggatgacagtgttgtaagcctcaactgcattgaagtcgagagtggcccattcatgttgcgcccgcgggagcatcacatgcttctccacactgaaacactcacatagctctgtccacaatatcatatggtctttcacctctg

SEQ ID NO: 2774 - DNA, 484 bp, Zea Mays
aacagccgacgttacctagccagcggggaaagcagtggtgttccttctccagctttatctgccctcattggtctgcaagaattatctctggcgaactttgatcagactcttgaagacatggtcccagaagatctgttgtcggagccagcagatggtggcatgatggatgtttgcactgttgtgcctgatgctgggctggagttatctcgagcggcgttccgcgcctcatcgaccttggagcgcggtcttaagggtcaggaggctgatctagattgttctgctcccatggaagtgggtgaaggtccttcagccttagaggtggctgttacagagagctcggccctcaaggatggcactagcgcttacccagcccccaagggtgttgccggggatgacccggctcggatgggtagcgcgagctatgacccagcccccgagggtgttcgagtcggttcttcctctcacacttccatggacgttcacg

SEQ ID NO: 2775 - DNA, 1842 bp, Zea Mays
gagccatgtttggacccttgtaactcttaatccataagtgctttgcagtgaatcactttagcaaagttgtagggatgttatagtagtgcaagtttgtgtaagggacctagccctaaaaccgtgtggaacctagtgtaaaatgtcccgaaagtgtggctgtcagactgagaatagttctgaaactgaagttcagtgacattttctcaactttggaatccaattgtggctgatccagtgggggtaaggtttgggtcactatgacaaagtggaagcctgtatatcaaagaacaactttgcaaaagggaggtaggtatgttactgcttggaacaggaagtaatagtgacctaaacttgctctgtcagacggtttttgggtgggattcagaatgaacagtaaactgcataagatctcggttcagggaaccttgacgttggtgatctctatgccggtgatctcctcatcgtgattcacgccagtgttaagatacgcgcctggataagagtggatagctgtccacggtgaaaatatcaggggagggggatggatgtggtctctggcgcgagctcatccatttcagccagttgatcccgtggtcggccgggacgccatcaccggagtttgatgttccttgtggccacgccacgtaacagagggtgttaccacgtagctgggagtcgtggcgtgaagccagttactacctgaagccattgctccactacgcgccatggtgaacacgctccagtgaagatcttttctgtcaccaccgtgagcacttccgtcccaaattcgcgaagcaagaaatccatccctttaaattgaggacactccctgctttgcctctctgttacgcgcacagcccacccctcactgccctaattcattcaccacaacccccagtcaccggtttttcccgagaaaggtcggtagcgccgccgtgagaagttccaccgtggtcagtcctgtctgaggtaatcccagcccaactgctatctgttttaatttcctttaggtgtcgtggtgctcactggcttgggaatttgaactctactgcagcagagcatcgagaacatcgcctcgccgttgcagaggaccgccgtagaccgcctacgcgtcgacccactgctctgtctgacccctctcgtcctctcgcccttcgttacggtgtcctggtgagtcactgatgcttgccatgccttcaatttgaactctaccgcgttgtcgtgttcggaacaggctcgtcggaatcttggttccgccattaccgagctcagaggggtttccggtgtgtgatcgtttaagcagtacatggggtagcgtcgtcttggctcagcaatggtgggatggcgctcggttttgctagtcttcgccaccgtcgtgagtccaagcgaggggcagggtggccggcggccgaccgcgccatgtcggggccgtgcgtttgtgaaagaataaaaacccagagacctaagtgaatccgtcagtgactcagccaaacagtggtcaggaccaatactggtttagttttagtgcagggttgttttcgcatgatggccagcacgggcgcgcgggctcccccgctgtgggccggttctgtgcgatgttgggccggtcgggctgattctggcccaggactattcacagatttaccttttcttttatctgtgagcgaagaaattgtggtagaaattgtagacaaatccaaaaatcatgggaccaattttagtgagtgcctaaaatcaatatatctctgataaaaatattaattggatttttaggatagttagaaattatttagtgacttaaaggtgcctttgtaaggactgtttggattttagaaataaaat

SEQ ID NO: 2776 - DNA, 301 bp, Zea Mays
ttcagcgtgaacttggctgtttttgagcgaagtatgtcgtgcatattttgagtggcgcaagtccgttggcttccacgcatagctggcatatgtgtgcaagcgactagtcagaggaaaaaaagtgagtgttagtgccttagtggtgcttaacgacctgtatctgttctaacggaagtttggcaagtgacaacttatgctatgctagtacaagctattaccggccatgtgcatggaaagtgtcggttagatatgccaaaatatgaacatgacacttaaaatgataaccagggagccatttgca

SEQ ID NO: 2777 - DNA, 677 bp, Zea Mays
tcaaattccacccaagtagcatccctgatggtgacgttgaaggtgtcccaccaggctaaggccatcccggaaagttgatgggcagctagttgaacacgctgattttccaggcaaccaatggcttccagctttcttttgatcgtgcgcagccaatcgtctgcatcgagggggttgctagacccggcaaacgtgggaggcttgagcctcaggaaatcccccattctatcttgcggtcttccaccattcggtcgttgattttctagacttcgagtgaggacctcgatgagtcgggtttgattggctagaacttgggctaggtctaagggtagttgtggaggtgcggggaggtgggtttcactttcctctctatcggcttcccctttagctctaaggggaaaccctgctccaatcccggaggcggtaggcgtggttttatccgaagccatctgccaggggagagagtcactattatgcacatgcaaattgttttcaaccaagttattttattcattacaccaatacattacaagcatatgactactacaagttgtactacacgcgagcgttccctgaggtactaccgaattccttttctagagtgtccccaaattctttgagaagatcatcaaggctagcgagggacatatcctcgatatcagacaaattttctatcctgg

SEQ ID NO: 2778 - DNA, 287 bp, Zea Mays
cgtcattttatcagctaatcttacattcagtcagtttcagaaggaatgagatacagccatactggccataaatcccaaaatccctgaaacttggtaacaagcaatcccatgtgtggatataattccaaccatagcagtagaaactaaactagacaccttatccttgagccacaactatgtaatagtgcacttgttgtgtctgtgaatgatgcagatgtgtccagctattgtttatctcatctgtactctgaaatgatctctgcctgtctaggacctttgattcacca

SEQ ID NO: 2779 - DNA, 666 bp, Zea Mays
cctggttctccaaatcactcagtttttgtgtcttaactctctgtgtatgtatttattcacatttcatatacttatgactatgtgactaatacgttctcacctcttatgtcatttcagtgatctcgcatgcctgcgtgcctatctcctgtcctgcctggattctctctctcgtgaggtttccaggtagctatcacttcttttgagatcctattggctgctctctacttctgcttatattttcactctattgtgcaccagtctggtcaggatggtgtggacaaagaacgtctcatcgttagagggaggagacgacgaggaccctcctcgccccttcaggcaggtcaaagggaaagacggtttatcttgaccagcaggagggcaggaagaagcgtcgtacgaacagagccgctcgtgcaacacttgcaacggtagcagcagcagaacagggaggatagttgcagatctcttctgattagatagcctacatagttcgtcgcctcgcatctcggcctcgctccactgctccactgctccctccacaccttccaccactgtgtccactactcctcttcccacttcactagctcctatcgctccagagccatccaccacttttgctatacccaccacctccaccactccagcttccattgttccccctcccgc

SEQ ID NO: 2780 - DNA, 324 bp, Zea Mays
caaatttacgtgagtcgttgagctcgctgccggtacctccgaacgttgcggcaacctaggctctcgacaccagaagacctctgagggaagtgtttcaactgtttctcaagagatcaccgagttggcgcctgctgtcagcgcacctagtgcttccggtgctgcaaggcgagccactgtgttgttgtctgtccgctccatgcacccctagaaaggcgcttgtagtggcgggcagtcagtcggtgcgtagccccgttgagatattcaatgatccggtcattggatcgcggaggtgtcgtgacactagcggggaaggtttattgagag

SEQ ID NO: 2781 - DNA, 347 bp, Zea Mays
gtcacacccacaaaaggtgaggtatctaggctcgcgagaactcaggagctttttggtgaaaccacatgcctaaaaacaattttccacaagtccgcagtagtaccaatctagtgtaacaacatcaacctctctgacgttctatctggtccgccggcctcgaggacttccttcccctcaaataccttggactaccgttgtccatgaacagactcaaacgggtggacttccagccatggattgataaagtctccgcaaagctgagtacatggagcgggaaaaacctttcggcggctggccgcctcacactagtcaatgtggtgctaacctcacaggtcacctatctgctc

SEQ ID NO: 2782 - DNA, 287 bp, Zea Mays
tactattctagtattcacacttaacccccatgaggaggatacccctgctcacatcatgtccttctgcttgtatttggcctaaattgcaaactgtgcatggtcactattcctggttgagataagctgcaacctatgtgtcttctctgctccgtcaatctgcacgttcatgcttacattgtgctgtgtaactaattgtacactgttgggattgtgaggagtgggtgagcagctatatttgagaacgatgaataggatagctgcaacaatggatttgctcatgacagctt

SEQ ID NO: 2783 - DNA, 452 bp, Zea Mays
ggcagtttggagggagatcgtgggggattcctttgtgcgagcgtctgggagtgagcgggtgctcctgagatggctgagatcgacgatgaacaggagagcacggggcggagacggcgctagcaggaagagctagagggcgagggctcgctaggcagagaaagcaagggagactgaccctaaagccaagctgggtcagggtaagaagcgtgcggcctcctggtagctacttgggccgcaccgaagaaacacagcccacgcgacctatgtcgtcatcacgacttgcacatttttatgaccataccggccagccaacatagcttctacggcttataagccttccctctttagagaaagcaatcatggtcaaatgctcctgctaatgtcaaattgaggcaactttttgcgcgagcagacgtgggtccggtgtgtgcaaaactaatggtggctgtcat

SEQ ID NO: 2784 - DNA, 643 bp, Zea Mays
tcaatggtggacacgctagtggcggtggagctatgccaacagggcgtggaggtagatgagctcgtgcatgcagggtcacggtgcgagcgtctgcgtgtggctttggactttagagctagaggcagcctaactacacaccgtgtagctagatgagcggctatgtgtgaaggtgggtggtagatcaagaggggtgtggtctcgccactgagcaagagtgttagaggctagagagggagtgggaaaagccgtgggggaaccgtcgaggcgctaggcacgggcgtgctcgtgtgaatgcactgttaggtgccccgcacgtggagggaggtgctggatcaagagaggacacggtcccgtagtctggcaagagcgctagtgggggatagagagtggtgcaaagcgctaggtgcagtcacgcagagcgggtggtggttgatggctcacggctaggatctaggagcctagaaggagtcatgtgttgtgcatagcgatggagcaaatatcttctagtttggtgggtcggaccaaggtacgacacaagctaaactatgccatatcggtccctctgcccctacgtgtagctaaagtcataggaacccttgtatccaaagaactagctatagttatcaaggagctagatattgtc

SEQ ID NO: 2785 - DNA, 548 bp, Zea Mays
attcaatctgaaagggagcctctacaaatagtggagataatgacttctgtactagtatacagcactgaatggtctcaccaggctgatgagcaccttatcgccagcgaggagccgccctcattgagccatggctgcatctgttgctgcccgtgaatcatagactggatcagcgcatcagatcgtacaccgccacgtggcccattggaacgaactgtgactggactcggccaccggttgtcaggtacagtcacccaagacaatgctggctcaacctcgcgaccattcacatcttctttggtcggtgcaagcggcaattactgatcgtctcacacgcgaaggatgtccaacgtcgccgcctggctactaagtgggtgaaccaatggttgaactgtgagtcctctcgcagtctcgctctttttatctcttcgttcagttgtcagtagtaggcctacgatgaattatacttgtggtgcctgcaatccttagacataaaatgctataacactgatgaaattcaaggtgatctcttcattgagataataaatgcc

SEQ ID NO: 2786 - DNA, 279 bp, Zea Mays
tgattgagcccctgtattgcttcagtaaatgtgtctcaattctagtacagtacttttgactatccgagattcagattctttgcgtgcatcacgttgttgttgtacctggcggtgcccttctacctattgattgtgagacaaggttggagccatgagtggtggtggtggtagtggggcccatgcagcttgtgagtggcttgccgaagcaactgatgtcgtgggttgttgattgcccacatactcggggatgtatggggaatagcaagaagcagtatgcag

SEQ ID NO: 2787 - DNA, 686 bp, Zea Mays
ggaatcttgtgaaatggtttctcctaaccgtttaactccttgtttcttatggtttgatcctctgagataaaattccctgcttgtttgtattttctgtcggagatccatttttcactgcatcggcaatccttttgacctctaaaatgctgggattcatttttcaatactctcatcgattcacatcgtgcagatgagatgagacatcactgccctcttctcaatggtgcaaactcgttggtcttccatggtttgtgctacagctacctcatatgttcgtcagcagccaaacaattttttgatccgcgaattaactggactcactttggctaaagacttcaggggtttcgaatcttccgtgtatgtttgtaacttattgctatatcgttgtggcaaactgtgagagtatggaccgtttctcgcattgtgaactttgcctcttccaagcttgtgagctacactgccgaatttgctttccaagacttccactggaggtgtacatcctactttacctgatgccctcaggtttcttgttaaaaaatgtgatcattgaacaaataaaagtcataaattttgaaggtattaactgcactaaaaatataggtgtgtaattgttttagaacggagctgctggttttcaaaaatatagatgtgcaattattttagaacggagctactagtttccgagt

SEQ ID NO: 2788 - DNA, 475 bp, Zea Mays
gcgggactcgaagacatggacttcgcctagtatatgcatgtcacatggatgaatcgaaatcccaacccatgacacggggccccattggccccagttggggccagaaggcgtagaggacctggacaatagcagggccttcatgcctgttgggggcgtgcctctatcaaaggtcctcaaactgacaaattctagctatcttcaaacttgtttcggaaatggtgggctgagcttcatcacctttgatttgtcaacattgctgatggaggaagcaatagctttgttgttgtggctgaaacgaagcactacgatgtgaccgaagaatacctctagtgacatgaaagtgaagaaggacgaaagagacttgtgcaacatgacttgtgggggggacatgagaatacccttagcggtctctgtaaagtgtgtaggacctagggctattgatgtaattttatatgaaggtgtacatcaccatgtc

SEQ ID NO: 2789 - DNA, 514 bp, Zea Mays
ccatccatataactcagaaatgatcaagagcgtgtgtcatattccggtcggttaggcgttgccacatgcatgcccccacctcggcacctctaacttggcatcggaatccgttaggccgatccgttacaatgcaagttgctcggatcggacggccagggcattaacgatccgagatcggttagcccgcttttggttcctattcatatacagagttgggaattggacggtttggtagctgccccgttggtttggacgagatatggcaacgggtacatacccacctataccacgtccccacacccgtacccgcctaataaaaatacacctgttaagatacccacattcagtcacgggtacaaaaaatccccgtacccgcacccgtacgggtaaatttacccgatgggttacccatacccgcgagaacaacacatacaccaacagtattgtaaatatcaaataatcaacattgcaccatacatatgattatagataagtttgacaaacttcaaagagt

SEQ ID NO: 2790 - DNA, 530 bp, Zea Mays
gatgtcatttgagattgacgacgagtcccttatgtgggggacagatatccctcgggtccactcggtggtgaaaacttcgcccggggccacgtgacattcgcccctctatgacatcccgttgtgggtcgggcaaagggaaacgatggaagtgggccgacctaggagcacgatgggcccatgcccgagctagtcgtgggttaggcgtgatcgtgttgaggtcattcgtctttctcgcgcccgactttctcaaacgccggagatagctcggatcgaaggcgccgggttttactcgggacaatgaaggttgtttgctattaattaggagataagcaaaaaaagtatgatcaacatgtacgcgggaagcaccctacggtcatgtatataaggctaagggggaccccctccattttcatctcattagcatctcacagctcggtagacaccaccggtaagaccgctcacatacaaaggcagcctaggaagtagggtattacgctcctcaaagtggcccgaacctgctaaaaatcgct

SEQ ID NO: 2791 - DNA, 885 bp, Zea Mays
aacgtccatggaagcaaccaaggaggagccgagcttggcacccttgggggttgggttatcctcagcagcaccctcgggggctgggttatcctcagtgacacctttaggggctgaagcaccctcaatcgtacccacaggagctgagaaactctggcatgcaacattaggaaccgaggtgttctcatgaattaggccgccctcaaaggtcgaagaagcatgggaaatcgtccgggttatttcttgctcgactggattactagctgagggggtgtcatctgggacctctgtacggatgacagcaccctcattttcgggaagcttcgataaaagatcttcagggacaatctcctccagtgcatggtcaatggcagacatcgtcaacctctggagactaaccagtcctgagagagcttgaattaggacgtcatcgctgtttttgctacgacaattctcatgaatcaaagggggacttcctcttcatcctcttcgtcctcgtcagtcacacgtccaccgactctggtgccaccacaattctcaatatcatcctcgaggttggcgctcgccgagccatgaccgaggactggggtggtagagtcagtccccagctccaagccagacgaacgtcgaagtcttttctttcttttcttcccctcggcagacacagctggatgacctgttcgacgcaatcttttgcgacaaacacttccaggactgcaaggtccttcatccttgccgaagacgtgcctagctgcagtgctcgccgactcagtacgggtagagtaagacgacttgcccgctagcatactaagaacagcattcacctcagcctcatcagtagtcgtttgcatctagaaatgggtttgtctttcttctttagggaaattt

SEQ ID NO: 2792 - DNA, 452 bp, Zea Mays
cgacgactgtgattcacttgctccgcaacgtggccgagcggccaatagcgtcatggctgtcattgatcccagtcatgccatgccataggctaattcaccacgtacccgagacggtggtgagcagtaagtaagcattcccgagccattgcgcctttgcgtgtcacaacgactgacctcagtgaaaaatctgagcgttgccgtgggcacttctgtcccaaattagcgaagcaagcgatcaatccttttaaattgagtgccctccctgctccgccctcttgttacgcacctagcgcaccacttctcacctcagatcatcaaccatagctcgtgaattccagatttccctagaatcggccggaacgacgtcatgagacatctcgtcgtggctagcctttcctaggtcagcttgtgtccctctagttctcagtttagtacctctttgacccctagat

SEQ ID NO: 2793 - DNA, 340 bp, Zea Mays
agtttgggacactgttcctgtaacaccccaggtgttaccaagaccatggttacatttatgcactaatgactgtgatcacatgtggaagaaaagaagaacataaaaccttggaaacatgggttagctaagagaagttagtggcaagggtttcaaccacacaattggaacaatggtcatgaggacccaaggtgattaaaccctaaggacacctaagagcactattcttccaagccagggatcagtggataagttaaccaaattgccaaagcatgatcttagtccctaaacaagttttagtaaccttgtaacctagcaaaatgcagggagggaacattgcaaa

SEQ ID NO: 2794 - DNA, 659 bp, Zea Mays
tgttactgacttgtgtgccacatatatatatttagtcagccttcccagaactctagctttctctcgagcagaacaggtactcctttgcaatcacacccacgctcgtttaacagtcacgccggtcaccgtttaccacctgcagtgctggtaagaacgttgtaagagcggggtaagacgcttcataatttgtataccaccaccaccctgagagatagttgtagggttcacattgtttgttgcctttttgtctctgttttgtgctaacaatgacaggaccaaagaataaaatggacaaggagaaggggcctaagcttaacgatgatgagtgtgtctctcagctggaattgaaggagatgatgcgtgcgatgactgaagcttttaaaaaatactaggactctgcctcgacatcctatgagcagcttgatcgacgagttgatgaacttgttacacgcatggacgtactggaggctcgtcccccaccaccaactctagccccatctcactctcctgtggacgacaacgacgatgacgacgatgtttatgcaccgctgccacaacacttcgcacgtaatcgacaaggtatgggaggtaatggtagacgtcatcatcataatcctcaaccagaccataatccatttgctaagattaagttctctatt

SEQ ID NO: 2795 - DNA, 678 bp, Zea Mays
gtggacacagatcacttgaaagaaggaagtaaacatcccaagtcggggaaggagaacacaccaagccacctttccgatacctccgccctcaaaggaggatgggaagaagaacttcgtcacaccggctccattctaccctgacgtcttcttcatccaagggatattgctgtcagcgcccatcttcagcgatgagcctaccatgcaaggggaggaacctccccagcatgatgcccagcgacaaagaaacagatgctgaaatgcgtggcgacaacatgaggccgaggaatgagactcggtgcagcccgtgtctcgggacgaagccttggaagtaggggaaactcccgacgaacgagtacatcgagaaatacgtaactcccgcctcttcggtcgtcgacaggctcaggatcgggagcgagagctagctgaacaagacattaggctccagcgagagaaccctctcctcgctcgaaacctgtaccccgatttcgctcgagaactaaacaccccgagtgaagttggagtactggcgcagatagccgacggccttccgtgaaccccagacacgaaaggttaccgacgacttcttacacaggtggccaatcatcttctacccctcgctcatcctgcgaacgacctgtgtcacgccatcaacaaccgacgagacgcacgaaccaccat

SEQ ID NO: 2796 - DNA, 345 bp, Zea Mays
tcatcgtctttcacgtcaaaaagcacgtacgggacaagttggaacgaaaacaagaaagaagaggtaaaaatccggcaggcaacctcgcagttcctaacgaaagtggagtgagaccagcaccccctgaccctcaggccctgaatgcagtgaaaggatgcgacttttttcgcggatgttgttcatgtgcagaaacctggcatttactcatacggcaccaagaaatcgccgcacggtgattcgggtacgggcatgggaccttaaagaattgcacggagacaagacggcgattccagaaaagacacggatgaaggaaatcgaacagaaaccctattgaagatgaacact

SEQ ID NO: 2797 - DNA, 679 bp, Zea Mays
ccacataaaatttggagcaaattgcctccaaacaggctgtgtcaggcgctctgaatcgggttttcaatggtacagtgtctagatcagaacgccagttcagataactcaccaccagcgaccatgcgcccgaattcgcgcccgccgcggtgattcatgccccgcgcagatggataacggcaaggaggtaagaaataccgcactgtggataaactccagccactattctactgcggccgccgtacccgcttgtgtcacggctgctttggataggctcgccggagttagccactttgcgaccttgcgccacgtgccttggttctttaaccatgccgcagtgagtcatcttagcccacccgatagtcgtcggtgagcccgccacggtaaatgccaccaatcgcttgcgccagagcaccccttctctccggccatcgcgtgtctttccccgaattagtcgccaccgctcatggatcctataaattgagcctgccatcggttccgcaagatagttcagcatccaatccacccgctcgtgcctccaattaatcaccatagagccccaatttgggagttcccccaaatcggtccgaaacaccacgcatagtgacctcgccatggctagctcgttccaggtccgttcatgctctttgccctcctgtttcagtacccatatgtcctcctg

SEQ ID NO: 2798 - DNA, 356 bp, Zea Mays
tgggttgtgtccttgtccaccgaagccacacacgcactgctggcaccccgacgaacgcacacgaacctcaacgggggccctcacgatgatggttgaggtggtccacagtggcggcggcgcgcggtattcctcacggctggggatcgtgggtgcagcaggtagtggctttgacgaaggggatcatgggtgcgtcagctggcttatagtcacgaccaggtaagcacgaccacaacggtgcccggaatttcgcgagggctgttaccgtcgcgcgcgattcttccgggggagaaggctttgacttgccgggcccgcgcatcagtgagagggtgagagcgagtgcgagagagagacgcgtc

SEQ ID NO: 2799 - DNA, 562 bp, Zea Mays
ggtggaaccagcctctctgcatcattccacaaatgtcacgcgcagaaccgattcggccggggtctttctagtgcagcagtgctacgaaaactaacggcatcattaccagtagtaccgggggtggtgggctgatggccaccttcttggtcggttgttgcaagctgcagcatgagcaaaatcatgagaagcaaacaagccgtgagtagtacagtgtccctgcttcatgtacaataccgaccaggtcggaactcggccactcgacactagctagtgtccctgcttcacgtacaataccgaccgactggccgtaccacaaaggtcgacgacaggctcgtcacgggatcacggcgtttgggttggatgcgcacacgtctgtccctcccttcaattcctcgccttctgaagatatagacgccgtccatggtcaggcctgtcctgtgtggagtgcaggctctgtttcagcgatgaatgcacattcaggctggcagtaactactacactgaagccccagctgcctcactcactcaggccaccagtgcaggggtactgatttattacctcg

SEQ ID NO: 2800 - DNA, 521 bp, Zea Mays
ggttgtccatgagagcaatttgaatcacaatcacgagcattgaagctattttcaactgaatctaccctatctctaccattatcaccccgaacaaaacaatgatcatgtgaagatactcctttctccaagcatgggcccagttcaacatcagttaagtcattaatttttcttccacgtaatgcacctgctcataacatggtaagacccacgtaactgtaaattactagaagaaatcaaatgaagaatacaacagaaatgcaaagtgaatacaatgcaaatgacttctatttcacaagatcataagattagatcaacatgatccaggatcatgaaagaggtgaagaatagttcctaatgatctacaacaagctgaaatttctgcatttattatgcgctttgtgtccgcacaacagcacattggtaggcagaagcaacaacagcatggtgcaggactgcaggtcttgtattttggatataaaaggtcccctttgacggccttcaccctcaacctcgttgacaac

SEQ ID NO: 2801 - DNA, 567 bp, Zea Mays
attcccttccatactcagagaagctatgataatccagatctgctcaggcacccgatacaaagtaaaataatctaaacacttgtctaaccagatccgtggctcctccatcaaacctaggaaacggttgacgaggcactgcagttgttggtaactccatctcctcgacacacctgttcccaaactcccgattacgaaacaaatttgcatcgtcatacctttgctgcggttctggtggcacaggtcgcggtactcctccccgaaacctgttttcccccaacaaatcagcagactcgagatcgtgggccatctgctccaaccgcaattccgcaaccaccttctccgtcctctccatctgctgcgcgatcaggatgtgctcctctgctgcttgctgtgccacagtcacagccagccccacctgagctaacaactaattttgcacttcctctactcccatcaccttctccgccagtcgatccatcttcgccatcatcttctcccagcgatctgcttcctcctccttcgttgccatcacgtccagtacaaaccgagtttgtactgatggcttgg

SEQ ID NO: 2802 - DNA, 678 bp, Zea Mays
cgtatatatacgtattggtattgcctgtggaaactggagtgtacaagagtacacacacagtacgcgtcagtacgtaggcgctcaagggtcgccagattaatacaactatacaagcaggggagggagggacacagcaggtagcaatcagcaatcaagcatcgtctgccatgcatgatgctgctataaccagctagctagaggcgcgtcgaatacgggccagggcccaggagaggctccgttctccgttttgttgattgattcatcagccgaggcgagctgctggggtgttgttgccaaagtgtaacaccccgtctattcctggaccgatggtatttacttctatcgatgctctagaattatagaccatccctacagactcacagtcctcactcatgcacacacagaagacttttcgttcagccactcatcttaaaattaaaattgctctagaccaaaaaacggagatatgcttctgaaaagaagacacaccttattggtataagtactctattaattaattttattacagaatatcatcgtccaccggagccaagccaggatatcacaccaagcttagctgtcacatagagagagacatgcatgcatgtattcgtacagtacataataatcgtccttagcaacgatattccctgtcatccgcctgtgagagcgatcgat

SEQ ID NO: 2803 - DNA, 721 bp, Zea Mays
tcgccgttcccgctcggggacgacgacggggactgtggccaggtggacctggacgccgaggatttcatcaagaagttctacgaccagctgcgcacgcagcaggcccttgccaccgccacgccggactactgcggcgggtatgcgcgaccggtctctggcatcgcctagaattcaacccacgcatccacacgcgtatgcatatgtaatatatatgtacgtgtccatagagtatttgtttgaacatgcatgatgcatgcatggataaagcatgttcgtttgagagctagctactggtggtagagctagtctagagcttggtctttgtgatatgagggagagattttgtacaacatcatcatatcatgtttgcaagctagatccatgcatgtatagtactcctatatatgtgtacgctgtatgtgtatattttgttgtagtgacatgtatcaattttactgcaagtaaggtacatgttgcaaagacattagcatataagaacactggtgtattacatagtataagaattgcgctcgtgtgtgtggttcctgatgtcctgcatgctggccctctgtccatgccagggacttgtacatagtgttgttctagaaaccactgctacatgtaattttcagacaatctatggtcggtatgctgacaaagatcgatggagctgtctggaatagtggaatcttctactcatgaatatattctagcatctgat

SEQ ID NO: 2804 - DNA, 284 bp, Zea Mays
acctctctcctccccactgcggcttctgaaacagtaactaccgcctgtcgcatcccagcatgacatggcccccacgtgcacgcttcgcgcagccctcgccaaccaaccatcgacctcccctcaccacttcttcctcctgcaactgtcgactccgatctagacaccgacgcccgagtgcctagaccccaaatcgcgctctatcccctccccacttcttcctcccacaaccaccggtagacgttgcacgaggtcctattcttccccttcgcgctgctattttgctc

SEQ ID NO: 2805 - DNA, 713 bp, Zea Mays
cagggcggcttaccggtggtagtagagtttcgatggggtggttgggcgtgttgggagtgtcgtggggatcacatcgaggtatggctcgtcgtcggagatggccgaagctgcccggtccatgtgtgcagacaacgatgatcaacaacggttccgaatttaggtcaacgatgtaggtagagctcgatccgaccggatgggaagcttcacgaggtagtggtggtgctgtgtacccaaggaatcagatggaggtcggctggggaaaccgtcccacgttcaccgatggagcaacttactccagtgagcagtggtggctccggcgtggtagtgagctgggggagtgactggggaggtttactggagctcaaggaccatgacagtgtgcttggatggggctacgatagtgcggttcgctcggaccacgatggccatgcatcagggagaacagggggcggcggtgctcggtccaacggcgtttctggtggccggtgacttaggcacagtggtgggttcgagtagcactccactgaggccatgaggtgagctttatagataggcgtgggcatgggcacacgatcgggccgaccaacgcttcgggcgcggttgggcacatgtttggtcactcactagccttgccagccatggtcgaacacgtggtcgtttgcatctgcccctgtccaaacaatcgtttggcggccctagcatgcatatcttgg

SEQ ID NO: 2806 - DNA, 635 bp, Zea Mays
ctcataaataaggatggatgtaaatactgcccaatgaatagggacctaaatcacgacttgcctgaggcgacaccaggtgggagatgcagttacgactcacccgaggctacccccggacgagagacatagtcacgactcacccgagaccaactttggccgggaaacacagtcacgacttgcccgagaccaatcccgggcgggggatgcagtcacaactcgtttgaggccaacccgagcgagagacgcagtcatgactcgcccgagaccaacctcgagaggaagacgcagtcacaacttgcccaagggcaaccccaggtgcgagacgcagtcacgactcgctcgagattaaccccaaccacgactcacccgaggccaacaacgcatgagagacacagtcacaactcgcccgaggccaaccctagaccagatatacagtcacgactcgcccgatgccaaccccgagcaggagacgcagtcacaactcacccgagaacaaccccggacggtagacacagtcacgagtcacgacaaccccgaacggtagacacagtcacgagtcacgactcacctgaagccaaccccaggcaggagacacagtcacgactcgcctaagcacaaccctagttggaagacgc

SEQ ID NO: 2807 - DNA, 637 bp, Zea Mays
taaaaccaagagaaagaaaaattacattgagtgtgtatgaaagttttttgattgagcccctttgttgcttcagtaaatttgtctttattctggtacagtgttgttgactgtttgagcttcagactcttcgcgtgtgtcgcgttgttattgaatttggtggcacccttctggctgttgattatgagacgaagttggaaccatgagtggtggtggtgcactggtggttgcagggcccatgcagctagagagtggcttgtcgaagctactgatactgtgggttgttaattgcccacatactcaggaatgtatggggaatagcatgaagcagtatgcaggtcttgcttcctgattctgtcgtgcttcggcctcagctatttccttttgctactatatcgtgactaggcatgtcctggttgtatgccccttatcctctacatagaacaagcaaaacaactttctttgttgcgagctgaatcttcctccgaaactttgtcctcctctgcctcttggggctggtggcctgaaggagctttgttgtgttcctgatgattgagagctatgttgatgcctttgagtatgatttccactgccttcgcttgagctgggattatggatcatcctgacatgccttggttgg

SEQ ID NO: 2808 - DNA, 1026 bp, Zea Mays
ccgaattcaaggtctaatgagcgtttccccccacttaatttcaacaatggctacctagtttgctctagccacggtgatcgtggacatcgcggatagctgaacgcgttcccggtgattaagggggttctagttcaattggacgggtcgatgagcatcaagggtacataagaacactcaaatgagggagcagaaggtatgagcagacctgaatcgagctagccacggtgaggctaaaccgagcgggattcttgagcgttttggggagaatccaaaattggagctcactggtgatcgattgagagcaatacttggtggctgggtgcgtaatgaccctatggagctcatggtggcctcaatttataataggcaagagcggtggctgggaattcgagcgatgacgcgcggtggttggagaaggagaggagcactggcgcagtggattggtgtcctattaccgtggcaatctctccggtgatcaacggagagttacaacgggtcacggtgatgcggtggagataccagggcacatggcgcaaggtcagcaggcgaccgtcgccggtgaacttatctgcgccgaccgcaagacaagggggtacgacaaacctcatccgtgtttgaatccgagttaatccagtgcccagatctttaccttatcatcgttatccctttgccagcgaacacggaccgcggcgacggcgtgaatcacgacgtaaagatcgtcggcggcgaggggggatgaatcaggtatcttctttagttactgtaccatggcatacatttccggttgacctgacagagcaacttgaagctagattttctcctaaattcgcttggcaaccaatccgaggctctacagcaaagttgtagtctaacataccatcttcatctttgttatagtataacaaattcttactagatcatgcttagaattgagctcaaagtctgctcaaacccactagcagtccaaattcagacttcaaattgcctgaaagcctaactttgggtgtatttatctccaaattcttc

SEQ ID NO: 2809 - DNA, 1228 bp, Zea Mays
aaaaaacataagaaggtttccaaacactggtttacacgttcggtctgaccatgcgattgagggtgataagaggttcccatccgtaattgagtgcctaccaatttaaagagctcctgccacgaagcactggtaaatatgtgatcccgatctgaaataatagatttaggcatcccatgtaacttgtatacggaggacatgaatattttagccactttgaaggtagtgcatgggtgcaacaatggtaggaaatgagcgtacttagaatatttatccaccactactcagatgctattggcattagatgagcgggacaatccttcaatgaaatccaaagacactacctaccatgcctgatcgagaactagttgtggtcgcagaagaccgagatatttcaaacggtcgggtttggattgttaacagactgaacaaccagctacatagtccttcaccatgcctttcatgttgggccatgcgaacaattgtcgaatacgatggtaagtcactggaagtttgtagtggccatctaaaggactgtaatgcagagcagaaaggactttgtgttgtagcgatagattagtacccaaccatatgcgacctttatacctaagaacaccagcctagagacgataaagaggatgactgtcaggttgcaatgccaactctgaaagcaactgttgggccttgctatcgtttgagtaacccaggatgacttcagacatccactgagacgaactgtaggacatagtgtagactgtcgcatctcgatgaggactgcgtgataaagcatctgcatcaccgttctcaatccctttcttgtacatgattttgtattgaagacccagtagcttggtgaaggccttttgttgctagagtgtattgagcttctattcagacaagtgagataaactttgttggtctgtatatatgatgaactcatcatgttgtaagtaagtgcgccactgatccatagccattaaaatagcgagatattccttctcatacatggataagccccgattcttgacccctagcgccttattgacgaatgcaagaggatgaccttgctggcttaacacaacacctataccatggcttgaggcatctgtttcaatgacaaaggaatattgaaatttggtaactataatactggtgtggatgataaagtgagtttgagtgtggagcaagcatgttcatggtcatgcttccacacatataaggtatgcttttt

SEQ ID NO: 2810 - DNA, 512 bp, Zea Mays
ctgacttgcctagaaggctagaagggtgatgcttaatgtgactggaaatccaggcctcaaaaaaggtatagaagatagcaagactccagacaatatggcacacactgaagatgacttcagatcagctatgtgggttgcagcagtttcttctgtagttgtgtggggtgggggggtgcaatctccttttatgtggctcctatcccaacgtaacaatctcaagatccgagttgttgcagttggcaaacacagatctgtcattgtcactgggtaaaccactgtaattgtcacactagcagtcatctgattcagttcaaccctctgatgcatgtagctgttcatcatgataatagaaacaattcatgtccaaggtggcaatatttatattgtaccgggataaccatcacaataggaattcaaaacttggtcgtaagttcttgttagtagttaacagacatgatgtaactgatccatggtaagatataattctgttgaagtgggtcctgttactcctg

SEQ ID NO: 2811 - DNA, 599 bp, Zea Mays
ctgacaacgttaaccttgcatactgcagagcgaacatatattacaggcatgccattctagaaagcatttttggtgttctgttctcatctggtgccgcctcagcattaacacgtactttgtcaacgcagtcattagcagtcccggtatacgcaaacacctgtcgttaattcagccttcagttcttcagagacgtttgactcccaatcccaagcaagcacgccatcggtcgaccgttcccgttccgcgttcgggttcttcggagaatcaaacgctgcatagccctgttgcgtcggtcaccttgtctagaaaccgtgtacctttgtcctctctatctgatgcgccactgtcacggtgccaagtgccatgtgacatgcacagacaaagaagtacgtagtgcacgttttagctggcacgttagcatcagacctgtgtctttctgatccgtcatcgtcaacgcccccggtctaatgccttgatgagtagttacaccctgttacgacctaacctggccgtctaagtactctgtacttgcttcaaactcttccaattttgatgaaaaataacgaacgctacactccagtggtatagttgtagactca

SEQ ID NO: 2812 - DNA, 543 bp, Zea Mays
atcgggggtgagagttggtgttctagcttcataacaagctaacagagtaggtcgcacgctcaatttatagcgtgcgcaagcggtggcttcgaattcgggggagataagctagaggccggagaggaggtgagtcaccagagttttctaacgtggcatttactgggtaaaagcttacgaccgtcactggttatactccacaacccgcgacgacatggtgaaatggtttaaggcgtgtcgtgaacgaagtaaaggcgacacgacggcggtggtcacgcggccacgtcgccggtgcaagtgggtactacgattgagcagtaacagggcccaagctcatcccccgcacgagatctttaaccgccagtcattatccccgcaccacagcgcatgaatcacgtcgaccgacgtgaatcgcgacgcgagttcaccagcggcgaggtgcgctgcatctgaagatctttttactattgtaccatcgcgaccgttcattagtgcgcctaatagagcaagttaaagggctttgttctccaatttttatgtaacaac

SEQ ID NO: 2813 - DNA, 451 bp, Zea Mays
gcttgaactctatccacttagtgaatttgtcgatagcgaccagtacatgagtgtatcctccttgagccttcttgaagggtccaatcatatccagtccccagcacgcgaacggccatgttacaggtatggtttgcagttgctgtgctggtagatgttgctgttttgataagtattgacaagcttcacacctctggactaactcggctgcatcactctttgtcgttggccagtagaaactagacctgaagaccttcccaaccagagtcctggatgctgcgtgtatctcgcattgtccagcgtgtacctcatctagcagttgcttcccagtagccgaaagaatgcatttcatgaggactcctgtcgcgccccttctgtatagtgtttccccaatgagggtgtagtgagatgactgccttgcgatgcactctgctgcatttttgtcatccgactc

SEQ ID NO: 2814 - DNA, 432 bp, Zea Mays
ttctcatcgcgtcggccgcctgatcagcctggttctgtagccgctgttgccccgtctccaccgcctctaaacgctgatcaaccctctcgagcaccagcatcatcttctctatcctcacctccagcgtttgttccccggtcgacatgacgtccagaaggatgtgtgtctgcaccgacggcttcacgggtggcgctgtcttgttgccgtccaaagatcgaagggtctaataccacttgtcacgcatgtggtcaacggtgcttcgctgccggcgtgagtagtgacagtgttcgtcggcatgaattcgcaagacacaggtatgggtggaattttgtttctattctgttcatagagaatctcagtttgttacaagttggctcatatatgcccgcgccacttgctcaacacatacacagcccatcatgcctcacggcc

SEQ ID NO: 2815 - DNA, 334 bp, Zea Mays
tgagaatctgcacagatgttcaagcagtggctgcaagatccccaagtgtatgtgatcaagtggtcctgtctgtcaaacacaattgacaattgtatagctgacacgcattaatcttcaagaagtattaaaatgcctctatcaaaaacataattgggcaagaagtccttgaggcctgtatcccctaattgtctcctaatagttcgctcataaaggtttaagcaagatataaaaatgagaataagcaattagaaaaatattaagagaagataggcactggatcaggtgtctatgaagtacaaacgaatgttcatacaaagatacaatagacaccgac

SEQ ID NO: 2816 - DNA, 296 bp, Zea Mays
cgtgtcgcaactaaggcattggacaccatgtccagggagcattgagacaatgtagtcatttattttatcagttgtaaggttattaggacataaaatggcgcgtgtagctaagtatgtagggtccatatatctctctaacagatctgggtagacctcggatatgagggccgcagcagcatcaccatccgtgtgtatcaacaaatcttcaggaatcgtaacccatgtaggttcggactcgtctcctcttgtcatggctcgcagagcaccatcactgatatctaagactcatttgctaa

SEQ ID NO: 2817 - DNA, 727 bp, Zea Mays
gatcaatttgactgaatcgcattggcgaccggaggggaaaagggctctggcgcttgatacaggtggcctttcaccgtggcaggtgctccggtgatcaccggacatgcaccgcatgattcaccatgacgagagccagcgctaaggcatgtggtgcgcaacggcgacagctcgacggcggtgagagttatccgagcgaccgacgagctgggggggaagtacggcaagcttagccgcaaccgagctcgagtggatcagacgccgagatttttactgggctatgcttatctgatggccactgcgcatgaatcacggcaagcaatcgatcaatggcgatgggccaccggcgacgagatctttttggcgctggcagtctgatcatctcgggacactgtaccatgacgagcacccatcagatgaactgacagagcgacttggagcacgatttacttcagattttgtgtggtgaccaggctagctctctgcaccaaagttatatacctataatccatcttcaactttgccacaatgcttaccatcaaatagtcaccgaattccattcaaaatcgggctcaaagttcaccccatcatactgctattgaaaattcagtccagggattgcctgacagcccgactttgagggtgattatctccaaattttgcacaacaacctaacttactctcctaagcaaaattgttctccttagataggtctacatagttgatgtgg

SEQ ID NO: 2818 - DNA, 527 bp, Zea Mays
aatccaaagataaagagggtagaaggtgatcgattcagaagaacgctgaagatcgaaccctgacaaatatctgaagaacaccaaaagatccacggcactattgatttggatgaacttggatggatcagtgaggatttgatcgcctgggagtagctcgatacgtggcatcgttccgcgggccgagccacgtgtggccggagttggtcaccggcgaccaccgtgactcgattaacttttgtcgtggtgtcacccgtgcctcgatctacctcactgtacttctcctctacgtggtatacatgcgctagcaaggttatccgcggccgctgatcgcttgtcggtccgccgtggctttaaatagcgtcatgaaccacggcgaggcacacaccgcctcaaccgcaagcttgagaagaacccaaaattcgcactgccttctccacctcctcccaaattgattgtgcacggtgaaactacagtctcttacgaccgtatagccccaatcccatcccccaatttcacccagagccggc

SEQ ID NO: 2819 - DNA, 358 bp, Zea Mays
accaccgtgcggcccgttgaagaaaccaagagatccaacctcggcttctccgacgaacgcaagacgacgatcatcagctccagcctcactaccaaataggaatacatgctcgtccgttttctgcaggacaaccaggatgtattgacatggcaacatgtttacatgctaggagtccccagagagctagccaagcacaaactgaaggtgtaccctcaagcaaagccgatctagcagaagtttcatcactttacacccgaaaaaagagaagccatacaggctgagttagctcgcctcgtagcagcaggtttcattaaagaagtaacgcacactgagtggcatgcgaatcctattcttgtac

SEQ ID NO: 2820 - DNA, 375 bp, Zea Mays
cgcaacattgacaccaaacaagctacaatggcccgtatggagagcggacatgatagaacgccatattaggagtacagcagcgcacacccccacagacgacgccagggggactagagcggcctaggggcaataagccaaggacccccgagtagaatacgagtcccaactataaagtcctcccttgagctataaaagggcagggtattcttccgtctacacacaagcacacttgctgtaacacgctcctgagcaatacaacgatcgatactacactggactcgggtctttgcctaaactagtataaccttggtgtcttatttcccagctcagatcctcatgatccaccattctgagtgagtccgcgcttgcatctcc

SEQ ID NO: 2821 - DNA, 453 bp, Zea Mays
gttgattagtaaatactgtaggggttcttttgtgaactgagcggtcgaaggggtatctacggatctgggccatcggatcaacaccggacggcacaaattagatccgacgtccatcaaccccgcgagcaaccctagccgttggatccaggattcacggttctgatttaatgactcgaaggggtacgccaagattcgatctaggccattccctgcacgatcaacggttgagggccaactttcccctagatctaatcctagccctacagtgattggtcaacggttgctggccttcttctaccccacaggccacagcgtccagacccagctgattgtgcaccatggcgggactgccagcgcttgccgccgatcccctccaaagtacaggtgacccccaggctccgcccgcgccttaccccgccactaccgatttgcagagtaataagattatcccta

SEQ ID NO: 2822 - DNA, 536 bp, Zea Mays
caaacaggtcgtaggcgagtttggctggcctcataatggtgtcaacaagctcctataaaaattttagattttttggacatccgagcgaaaagttatgcccgtttaaaggaaggtacctcaagttatgtttttagaggcacgactagaaaacggcggttagggcaaaaattccctatctgcaatcacagcgattaatggggtggatcgacttgtgatctgtgtaatggtggatgggatagtggtgtatctgcaatggatcgacttgtaatggatagcggcgtatctgcaatggatcgacttgtaatgggtagcggcgtttctgcaatggctcgacttgtaatggatagcagcgtatctgcaatggatgggatagcggcgtatctggcgcgacggcagctagcgagggtagttgatctacgacaaagatacaccctaaaccagcaacacgactcgaccacggacacgaactgaacaaagccaaactgaaaacgaaattgcaaaggctaaacaagggttctaggacagcggaatttttt

SEQ ID NO: 2823 - DNA, 507 bp, Zea Mays
gtgatccgttcaataatgtcattcacggttgagcagaccaactcttatgcaacaacgcgtgattccgcggttagctgcatcttgactttattggcttataatctctacgatgtgtatatgaattacactgaccccactgagttgtgggatgcactagagcgcaaacatgatctctctgaagctggtcgcctgctgtactcttgtgagcaactctttgatttcagcattgatgttgtaaagtctactgttgcttaagctcacgagatacaactgctgagaggagatatcgtaagtttgggatgtgctttggctggcaagtttgtggtagcggccattattgaaaaaatccctgcttcttcgagggattttgccacaagcctgaaacacaagagaagatatctatactgagaatatgaatattgccttcgatgtggaggaaaaagcaagggcaaaggatgtgttgttcacttgttctcaattgctatacacaatcgaaaataagacaac

SEQ ID NO: 2824 - DNA, 405 bp, Zea Mays
gcaaatgttatgagcatatggtcaaacatgagaagaaactgagataacagcccatgaaagatcttgattcagaaaaagattgctgcagggtgctcactcagtcaaatgattacaagtatgagtgttggtgctatattcaatacagctacacaatgcaaggtgatgctacattcaatatagtatgggtattggtgctatcattcagtgtttaccactgttaaggtggacattgaggttggatgattaactattgaagcacacttcaagaatccatacctttattctttatgcaaggtggggataaggtgaccatgattcaacaatgaaaacataatttgagaaattgagcacgctgtagctagtactttgatggattgcagaattggcatcaaaagcatatgaaaa

SEQ ID NO: 2825 - DNA, 474 bp, Zea Mays
gccggtcgtaggagtgatctacatagatttatatgacatacatgtatgtcacggtacaatgcatgtcttacatgcacgtacgtacgtagttattgccggcggtaacagtgtacctttgctactttgcctttgtcttgcttcgtctcgacgcaagcttcacaatgatgccatgtgtcatttctgcttcttcttgctccaacatcaaccagattcaaaggtccaaactcgaaacccgtccgcttatggttttgatgcccaaaccacttgacgtctctttctgtgcgagagtagtgtatctgatatattctttccatgatgtttgccaaataaaactagttctattgagggatggggaattcccactagtttaggtggtcacgaggttaaatacagcttcctcaattttgctttaacaatatagtctttgtagattaatctttttacaccaagtaaggacaaatttaagagcgatgt

SEQ ID NO: 2826 - DNA, 426 bp, Zea Mays
gtacaaggatctgagatcatgatacatcttgttactgtcggggtgcatggagaatttggaaaggtgagcttcatccaatatcttctttctgggtttgggatttttaggaacaaccaatcggtctccaaaccattaaattcccttgttgtcctaatggaagcatttgtacttgtccgccttccgtttgatcatttccttaatgacctgaacacccttgtcaccaatctgtgccatgactatttgctcatgtaaggtgggctccactgaaatataacttaaagcaccgaagtaaacaacttctatgtttagcttgcacaactcatcacacagggtggtgatttttgcatccatattcacacagttacactgggccttctgacttaaggcatctgctacaacattggctttgccaggatggtaatgcac

SEQ ID NO: 2827 - DNA, 1002 bp, Zea Mays
attatgacaaaaacacaggggtaaacaaaatatcagccctaactatagtaacaatatgttgaagtaaaggtcaaaccttgaagtggcaacataagttcaagaatgtaaacaacaccaccatgcttggcagcagcccaggcaagctctggtgtgctggctaaagaatatagtacagcaagagctccatccctgcaaggaggattgcagtggagtatctgaaatagcaaaatgaggctcatcctttctgcaaccatagcctccaaacaaggagcatgcttagtcaacagagaaagaatacttaaacagatttgtgggatgctgctttcaggagaaacatggagtgcaaggcattcaaaaagaggaaccagacgctccttggtagcaaaaacagcagctaagcctggattacttgtaagaagattctgcaatttcaaacgaaatgatgacatgcaattcagtaaatgtgcctcacacagaaaaggtagaaagaaagtactttttcaataaaagcacctgaagtgatgttagcccacattggaggtttataataacttcagaatctccatctgtactttgttttcctgatgaattgtccatttttccttcaatagttgaatcactgacttgatcattttcagaaatagatgcttcaataactgaaccatgttgatgaatcgtctcctccaagttaacggaattccactgttgtactaactctgctataaacttgagcagggcaatgcaaaattcctcctggtcacttatttcaaaatccggttgattgttgtaaactctcaagtatacattaccaacgatcaattctttggataaagcttcataggtgaaagactgtgattctgtcaaatcatatgaaccatcagggccttgactagcacgctgctggtctacaaatttgagaagctcccctctggtggacgaattccatatgatctgcaataaaaggaagttcttttttagctcaaagtcatctgcacaaatact

SEQ ID NO: 2828 - DNA, 508 bp, Zea Mays
tagtaccaggcgggtgaaaagatcgaaggggagcggatttggtcgcggggtgaagcttatcaatcgcgtctgtagccgtgcgacggggccggaccgccagtgtcgtcttggaaactccggcgacctcaattatgccacaccgtggctctttactatgcagtagtaactgtggcacgcctagacttaccatctcagaaccgctgcaccggtgaacgccacgactgagccaccagtgaccttcttcctctctggccgccagcacgccatgcccaaattaggagccgtcgcccttggatactataaattggtgccctagcctgctccgctaagtagttgtgcacccagtgaaccaaccctcaccttcaatcgtcccccacaactcgctaatttgagatttcccccaaatcagtcaagaattccaccgtgtgtgagctcgccatagccagctctccacaggtccgatcacgccctcctcgcttttgtttctgcactcttgtgtgctcttgat

SEQ ID NO: 2829 - DNA, 493 bp, Zea Mays
cttcaaccaaatcgcgcccgctactcaagcgggcagcataccgaagggccccctcgtcctcgtcatcttccgccacctcgaatcaagggaacgctacataataatgtgagcaaagaatggccggaggaaggccagacaggtcttcgacatcaccaggagaaacatagaaccaataatcccaccagttgccccacttgttcctagcgcaagggactatttccatgacctccgccgaagtctttccagtcctcggtgtgaaggtgcacgatccaaattgagcaatcttatttcctatcttcctcttctaccaatgcaggcaataattcttggtgaagacctccacagacggctgcccaccgtaagaagtaactgccaaacatacttcgccagcgcaaccatggcgttgggtgtcaactggtgaacctgcacttcgaacctttgcaacacctccgccacgaagcgatgtgccgggaggcgaaggccagcgacgaaa

SEQ ID NO: 2830 - DNA, 626 bp, Zea Mays
atcgagcttacaagcaataggagaccctaaggatgctagaacacaaacagcgaggtgtctcacggcggcaattttggccgatttgggggggggggaaataccaaattctcgagctacggtggctaatcggaagtgaggagcggtgcactggctttataacaagataacagagcaggctgaacgctcaatttatagagggcgaccgtgagtacgacgaattggacggagaagagctcacggtgatgagagaattagtcaccggagtttatctgtcgtggcgctcactggggcaaaggctcaggcggcagatgggctgtctattgtgacttactgcgacgtggtaacgtctccaagcacatggcatccttgtggcaagcggcgaacgccggcgatggcatctcgaccggtcgcggggcaagtggttacggtgaacagtccggtgataaggctccaactcctccccgcgttgagatcttttacctcaaacagttatccatgcaccactaggcacgaatcgcaacgccgacgtggatcgcgacgcgggttcaccggcggcgagattcactgcactgaagatcttttcaactattgtaccatcagaatcttcttcagtcgttctgacagag

SEQ ID NO: 2831 - DNA, 339 bp, Zea Mays
atcaatagtatgtgacgtgaggctccatgcaatccctgacaaaaacctcgttgtgtcatagtagcgttactcttctttttctcatacggggacatcaattttggtatagaaaatttagatttctttgatggtcgtggatccattgatggctgtggagaaggtggatcccttgctggtggtgtagacagtgggtcaccaagaggatgaggaggagaaggtggtggagccctgaatggtgatgcttgtggtggagacagtgggtcagaaagaggatgaggagcaacatgtgaagtttgaggaggtgctgatggatgtacaataggaactacaggtgatgac

SEQ ID NO: 2832 - DNA, 991 bp, Zea Mays
gttttagcatttatttttgcattaaaaatacttttccaaatgaatttctatattttatcccctaactggaccgcgtgcacaaatgaaccaaaggccaggggcttctgtgtgaaaaattccgagacacaaggttaaactacggtggacgacatgttagtttagcgaaaacagagggtcttatatgcataactgtcgcggccgaaggggtacgagtgtttttcggctgttggatctcagtcagatggcacagattagatcgctacacgctacaaagcggtttggaactgggccatcggatcaacgttcaacggttaagatttaaaatacgcccgatccgatcctgcccttacgtcgacgatcctatggttagcacgagatcaagccgaggcggtgcaatctccctaatctacaccgtccatcccaaatcagacggtccgaggccatctccccaaacgatcccgacggcggcggcaccaaccccttgcacgacggcgccctggactggaaatccaatccgcgccttgaggtggccattttttaattcggcctagctacacgatgccccatatctgacgaatgcagtggaaggtcaagtacctcacgatttgatacagaagaacccgaccacatcaagcggcagacggttgagctccagcaaaggattgcttgcactccggtgagtctacgatcaccgcgatgccacaccagtattctccgcggaaaaacgaagccccggctctgaattccgaaggcgaatgcggcaacggggacgatgttcactggtggcactcagcactccctatggtggctgtggcggctctggaaattaggtcggttgcggacctagtggagctgcgagaagtggcgaggtgggcagaaaatatctggatgaatccatttatgagcctggaacgtgcttggtccacgtgccctcggtttgcgcgtggtggtttacaccgccgcgacaagtctgtgcggacgtccggaggag

SEQ ID NO: 2833 - DNA, 742 bp, Zea Mays
ctttcccctcgctctacattatgtgtttttctaggatatccatccgaacataagggctatcgttgccttgatttatcttctaaccgtatcattatatcccgccatgtcacttttgacgaaacatcttttccttttgccagcaaccaatgccgcattgaaccaacgtcgcttgattttctcactgacatggactccgtccagcttcctgtcttttctcctgcaggtaactcacacaatgtgcacacgtctcctacacaggctgctgctggccagcaacccagtagtccacgtgcccctgtagtcttgcgcctgcagcctgcaaatggacctccaagcgacagcccgccatctagccctcctgcacagcccacgtgctggcctcgcagggaattggttgggccatccttggctgctgcgcaacccacgtgtgctcctcgtgcatactctccaggcgaggtccaagcaacgtctgggcaaactttgccaactcatgaacttccaccctcaacaacgcatgagcgtcctcctgtttgtgttgaacacacccgtcaccagatcaccactccagctgctccaggaggattggctcccatggtcccagtcgtgtccactcgaactggccaccgtactgcagtctcagtctccccgacggccaatacacatcagatggtcactcgtggcaaatcaggtttccgccttgacactgaccggctcaatcttcatgttgcagctatttcaccgg

SEQ ID NO: 2834 - DNA, 1246 bp, Zea Mays
aaaaataattggagctgtgagtcctacaaatttgatgaggtcttcagtgaaagtgcttcacagaaacgtgtgtatgaggcagttgcaaagcctgtggttgaggcaagtcatgcattccagatgccactaattaatttagttgttgcaaaatagaacaaattgaaagatgtagatttgctagtgctgtaacctggagtaacaaatgtttacaatattttgctcatggttgaatcacgataataattaattattatttttttcagaacaaaacctgtcaactttgcttattagtttccttttgtaggcactgcatttctagtatagtgactagaaagttcattcatagtgtattgtgtaataatattttacaagtcaatcatcacttctgcatttccatgatttccttttctagttctcttgcttgacaaactacttcaactaatatttcttttttgcatccccttttatttctctactgagattttggggttgccttgtaagggtccactctttctctaaagatacacatctcacctgcgtgtttgagggaaaaaggaggaggtagtcattgagttacatttctttttgtaagaataaaataactgctgatttacttttgcagagtgtattagaaggctataatgggacagtaatggcctatggtcaaacaggtactggcaaaacatacacagttggtcgacttgggaaagatgacccttctgaacgtggtataatggtcagagcattggagcatatcctctctagcctgtcttttgagacagactgtgtcgccatatcatatctacaggttcttttcccaataactgatataatttgttatttaacttttttcactttttaaattagcgcccgtgaatatttttgtagaattgctttaactttcttatttgatgttattatttgttgatactttgttattgcaaaaacaaccatatttatatgttgctgatcatgtaatttagcttcgaagaattgcttacttatcattgtttatagatgttttgttatcacaatattaacatttacttatatgctaatggtcatgtgacttgtttcaatcatacaactacatattctgttaacctaattgaactggttctggaagaagatagcacacatcatatgacttgcttgaatgttttttgcacggtaaattgttatgttaaataggttatgaattgcgggagggtctgaatattttcatctaattcggcacttaactgcc

SEQ ID NO: 2835 - DNA, 726 bp, Zea Mays
cacaaggttatggtttcccattccaactggacggagggcgtgaggactagccccgggaggatctatatagagcagtagcgacattggagtgaggaggcgctcccttggccattggtgagctcctggaggatgaggtcatcctagaccttgtggaagacgggaacgggaccgaacgagcgatctaagtgtagaggtgatcatagcgctcgttgaggttgtaaagaaggttgaggatgaacgtgcggttggagataggctccccgagatcatagagggcgaccaccatgcctttcatctggtggcagtactcggtgacagatatcttccccccctggacgaaggttcgaaaggcggtgtacatgcttgcgaatggcgtcctatagctcaattgtgatcgtcctgaggatccaggagagtaccacactatccatctgctgccacgatgggatagtgaggcacacaatattggtgaggaaattgtcgtccagggcgtagcggtgcagcatgagggcgaggtcgtgatagcggtcgtaggtagaggaaattgggtcgaggatgatggggactatagaggacgttttgaacacccgctgcctaggcatgaaggttggcaactatgacgacctcgtagcctgaggggagggttgacgactgggggctccggggaggatccatgtagggagagccaagcagatgccacttagccttagccaactgcttggcgag

SEQ ID NO: 2836 - DNA, 444 bp, Zea Mays
tatcttttggcaattcgtactcccttggtcttggtatgctcgcaccttcgtaatcttgcatacttttactttttatataaacgcttacctttgtaccccaatgtctgtttaaagacctttcagtttacatactcttgaccacctttgtttcttcatgatccatgagcggtcattttattttgcatatccttggtaatcttgttgtctccttgtaactccacttggtaattaattttctttacttcaaccattctgttgcaaccttacctatcttacccttgactgttttctccactttaccacctagcgagtcttgcctgaactctatccttatgcttttcattagtatcatctttacctttgacacctctatatcttacttgatgtttgtctcatacctgccctttaaaatcacctctctcccgtcttattctgagagctata

SEQ ID NO: 2837 - DNA, 393 bp, Zea Mays
ggtcaagggactcaagccaggactagctgcgtaatacttcgcaaggaagcccccacactctatggagaaattactacaaaagatggatgaatacataaggagccgccaaagaagggaggaactctatagatacaccaaagtcgccaggggcttcaaaggaagattcaacccaaggcatgtatgatgcattcacaacccgatctaaggtgatgaaaagatagctcaatctcaggccagtcaggttagcaatagacaagctcttagcagcaggcgcctactcagagaaggggaaggggtggatgaagcttaggtggcaggtttaatgctcctcaaaagaagccatttttcttattctgcagtgaagacaagggccacacaacaaggacctgctgt

SEQ ID NO: 2838 - DNA, 578 bp, Zea Mays
gcaaagacaaatccggaagaagcaagtagtattttattttttgtttagcttcgtctagtttcgcctagagatatatgtacgtacgtaaaagaagttgaaaaacaacgtcaggccaagaatgttggtacaatcggcttgatcagctcttccgcaatctagttcgagctctacaaagttggtcggccaagaatgttggtactgttagagatcagctgctaatggcccgggaggtgatattgagactcgaacgggcacaagactcgcggctgctctctccggcagaagcgcgtctccgtgctgacatcaagctaaaatgcttgggcctgtcctcgctcgagcgcaccatcgcgcggctgcgatcaagggtacgccagctctctgacggcgacgcgaacaccaagttctttcacacggtagcgagagggaagaagaagagcctcgccctccatgaactgtgttccgagggtcaaaccgccgtgtcccatgacgacatgtcctccatgttgtaccagttcttcaaccagatctttggcactgcagcggttcgggagcgggcgatcgacttggagaccttaggc

SEQ ID NO: 2839 - DNA, 524 bp, Zea Mays
gggattctatggtttggagaccgattggttgttcccaagaaccccgagctcagaaagaaaatattggatgtagctcacctttcaaaattctcgatgcaccccggcagtaacaagatgtatcatgacctcagatctttgtactggtgaaccagaatgaagagggaaattgctaagtatgtatctgaatgcgacacttgccagagaatcaaggccaaccatctgaagttagcaggcaccttacagccccttcccataccatcttggaaatgggaggatatttgcatggattttatcgtgggattgcccaatacctcccgacaccatgattctatttgggtcatcgtggataggttgaccaagacagctcatttcttgccactgcataccacccacaagacagagaagtatgcagaaatctatattgatcaaatagtgcgtttgatggaattccgaagaccattgtatctcacaggagagcactatttgtggcacgcttttgggagcagctccaagaatcacttggg

SEQ ID NO: 2840 - DNA, 864 bp, Zea Mays
gaagatggtcggttctggcgactgaagaacaatcgccatggaacagtaactgagcagatcagaacgccagctcagctcgccgacgttgatcgccgcccgggtccgtgcacagtcgggaatggataacgtcggggcaggacaacccatacgtggcgccaccgccctagcccagccggagttactcaccggcggccgccgtgactcagcgaagttcgccgtgctgtcgccatacttcgatctctattactgtgcttcgttcttacgtggtagacatgcgtcaataatccacctcgtggccgcggaccgatcccgtacctccgcggctataaatagccgttaggtccacggcgaggtgttttcgtctacaccagtaaagctcagtagaagtcccaaattcgtgaaattccctccaccattcccaaaattgacagtgcatggtgaagatatacttctttacggacgtgtagccttaatcttgcctcccaattccacccgagaccgttgcggcttcgtttttccccttttctgttacccgcaagccaagaaccctcctcgctccgtggccagacagtcctggtaaggttctgcgcttctaaagtattgttttagcacctctatatgcccgtggggctcaccgtggcgaccaattgaccattactagcacggtgttatgggaacgcaagctcgacgtcgcatttctgccgtgcgcgtgagcagggcgttctctgagcgtgcgagccgaattgatggccataacagcacggaatagagtagaatttggttgggcgggggtcagcaggtgctcaggtctcccatggccgtggcgcagcgggggtgtgttcgtcctcgccgccgtccggtcag

SEQ ID NO: 2841 - DNA, 463 bp, Zea Mays
atcggggctatcctgaccatttcccccaacccaatttagctattgatcaactaaggagctctggccacgatggccgtgagcatggcggctatacggtcgtgttcccagcgattgggggcatctacattcaaattgatggcttggcgagcatcactgagctatgagaagacttaaacaaggtttgaatcggacagagctttaccagaatcggctggccacggtggacttgatttcacggtgttcttcgactgatttgggggaagtatgaaattggggcttgctggtgatcggctgggggcaatactagccgtgggggtgcgcaacgatgttgcgaaacgagttacggactcaatttataggcaggttcgtcggtggtactcaatttgagcgaataacgcggcggccggaggtgaagaagaaagcggcgcggtgaatacgtgtctagaggcgtggcggttattcc

SEQ ID NO: 2842 - DNA, 2260 bp, Zea Mays
cctttgtgcagcctgtcctttgccacagtgatattgttgttggaagatgaagacattagaactttactctcacctgactttatattttcagcctgaaatgtatcttttgaactcggggcatcagaagtagagggacccaaaataatctgatttttccttttcttgaaatagagatcagatgttgcggaaggctgcagcaacgtcactttatccaaggaaatgttactcgactcaccaagatgccgcccctgtgcaactagttgatttaactttggcctaacataaattgctttaccagcatcaagggcttcagacttgtgcaaactaataatgcttagattgtcagcacctgagttaacctgcccactggaatcttccttttcagtttcaaggacctgttgctgcaaattttgagacaatggctccaaaacattcacagcacaactgatggatttggtatgaagtggcaaaggtggggtcttgggtctttcaactgaaatatgagaatgtgctgcgtcttttgaatcgacattcctgacaaagttcatgcttctcctcataacaggcttactcaacttattttgagaatctagactagaagaagaatgaagatgatttccattggctggatttctaattagggcattacccttgcggatataagagttttgacttttgctgttcttttttaatggcagtttagggggtaatcctgaagtctgtgaaacatgcaatgacgaattagaagatgatgcattgtcacgacgccatgtcctgttccttgcattctggtttaagcgagggggctctagcaatgaaccaggcaaagctacctgtttagtaggtaccttcaatactgtggagcttgcaatattaattcgaggaggagattttactacagagttgactactgaatctgacaacgccttcttgctatcctcctttggtgctgataccttttctgaagaacagataggaagtagagaagatttgcatgattggtgttccttgttagcttctggtacaatggcttcaatccaggaggataccgaatcaggtgttgtacttgacatgcccacaggatcctcagtacttccatggtaagtgtgatcagaatcaacagatatctgagaagctaagtctcgacctggtacatcagcagattgtgaagataagagaatgggtctactaagattatctataggtttacccactgtgcaataactatatttatctaaaacatttacagaattaatagaagaacctgggcgaacgatctcatcatcaacatccttatttctctcttctgttgccaaaaggactgcttgaggaatactgataccacatagtttgaggttgtgatcctggccagacaaaacatcaatactgccccgctggtcaatatccagcataatatcatgatcctgacagataacagggacaccttcatccacaatctgctctaaacctatcctcccattactaacagcagaagcattatccaagcagctgacagtaagtggtaaagtcaaccaattctgactgcctgcattcattaagtcattgccagattcaccttttcttttgacaacattaccaaattctgtcgttgtcacatcaaatcctaagtttacatccaataggttatggttttcctcaggctgtccctcactctctgcactactgaaatagatattattaccaagtgtcaaagctgtcggaacagaatgctcactgttaccagatacagatggtgaatcatgggaatgcaaggagaatggattgtagtcagcaggcgggtgggatctatgaagatgtgtcagttcggttacttgagatgaagtgctcctccctagaccattattcagagcaccagaggaatccttcataggatcatcaccgaatgatggcagaattgtgctctcagtatttctggatgactgcagatcatgggtatctgtatccactacttccaggggaagatttggcttatgtaaagcagctttcgcatcatgaaaatcaacttgcatgcttctatcctcggttcgacctggtacagcaaactctgaagtgtacaggatgttatctgaagtcccaacatttgtcaaatttaaatccatgggactatcgcatgctacattcagagcaaacttactactaacaactcctgtattaggagcttcggcacattctattatttgaaaagcacttggatccatgggcatttggctttccttctggatattctcaccaatactaa

SEQ ID NO: 2843 - DNA, 513 bp, Zea Mays
taaaggatagggcatacccagcttatttgtatagtggtgtcaccgattcaacccgggttaccaacaagaggattcctgctgtggatttggtgagtcgactggaaatgatccttagaggcaaggtatcgaatattggtgctcctgttgcatattctgcttggaatctgccgccttccaagtcctttttcgattatttgtcaaatcctcctgctagtgacagtggtttggatcttagagtgcgaccctctcttgaagaagttgaggttctggttgcttcacttggagatcttcccaatgatgagaggcaagttcactttgagatgcctatgagtccgggtgatgcagagataagcgctatgctggacatgttggctagggattcttctgactcggtccctgctgaaacaatggctgttgcaactatcccagagcctgagagaaccgtggatactcgaaggcctgagggtactcgctcgaaacgtcttcgccaagtcagtcatccagctgctcctg

SEQ ID NO: 2844 - DNA, 848 bp, Zea Mays
catgggtattcgatgaacttacatggctttggagaatgtgtggtgtgtcctgctcatgatcaccaattgtcctcatgggtatccgttgaggagctccaaccaaacttggatgaactgtgttgctgtcttcaaggattcctggcgccggtaacgcagccgggggagttacatcatgccgaccatctgacctacagggtaatgtcgatgttgtactctctccacactgcaccgatccgctagccatcgccatggtgtatgccctaaccctcccaggtcaatgaactaaagctgcggctgtgtgtaaccctgttttattttttggagttatgctcctggccgaaaccatcgtggccgatattcatggtttgttcaaaatatcccgcgtgatttgcatgtggcgagatttctgtgtcccgacccaattacgattacctgcctattctgttacagcaacataaactcatcaccccacgcgcgaccccaccacaaatccacgatcccggtagacccactcgccacccacaccacgatatgcatgcgtcagatcgttatgcatttgttatcggcaatttaaacaagcataaacgcccaactacaacccgctcgcgtcccggcataccactatgctaatttacgcatccactaacggtaaaatacacatacataaacgcgcaaatcacgcctgaccccaccatgatcccgatgcacccgcgcggcacccctctattccctattacgcatccgtttcagccaaattccttatgcacaatcactgcagtccacacgcccgaccccaccacgtcccggtgcaccgcgacgtcgcatcacgcccgcagacctaccctggc

SEQ ID NO: 2845 - DNA, 490 bp, Zea Mays
gagaaggcaactaaacaagcccacttgcatctcgggggcctggcccagggtggagtcgggcaaccaatcacgccctaagaaaactgagctctgtcggcaggagcttttctgcttcctccacgtcatctcctccactggccacccagctagcgaatcactgctaccgccctccttggcaaatggccagcatccgtgacttctttaaagcgtccagcagtcgcgcgtttctccatttttttcctccacccgtgcgtagagccacagacgcacgcagtgccgctcatcttccagccaccatgtgtcttcagctgcaagcaccggccaataggactagagtagcagctcagcagcacaagttccccttcccaacccctcttctccatggcacggtgagctcggttccagcaacccctctcaaccatgccaggccaagctcatccatggcgctcggctatctctccgcgcgctcagccttcgaccgagcctctcc

SEQ ID NO: 2846 - DNA, 315 bp, Zea Mays
gaaaattgtcgatgcggtggcttaaatgcccgtcggcgtgatgtagtccgacaggtgggggcgcggacgctgaatcatatgcaccgaagatacccggtttgccgaaggatgtttggcggtgctcatgttcgagaaatcggttgacccgggtaatctccaactcgaggtcgccgacgcgcttgtcgatgttaagttggggcgtcagaggtcggtttcggtcttcatcatctcgagcgccattagcggttcttcgccttggagagcggcgacgtcgacttgctgctgttggatggaatcacagcgattggtgaagtg

SEQ ID NO: 2847 - DNA, 1100 bp, Zea Mays
ctacaactttgctatagaacaatggccttgttgccatgtaaaattaggacgaaatccgccccaaacatggtctgtcaggctggctgaagaacaatcccatggtagagtaacagatagaattaggttctgatcccctcgccaccgacgagccgcgcgcggattcatgctatcgccgtggtgattcgcgctcggatcagttggatagcaccgggggtaagtaaatatcacgccgtggatacactccgaccactattttacttcggccaccatacccgagcagaccatggtcgatttggatgggttcgccggagatagccacttcacggccttgtgccacgtgccttggcacattaacctcaccgccgtgactcacgttagctcgttcggtggtcgccggggagcttgccaaggtagttgccaacaatcgcgcgcgccagtaaccttcttctccggccgccacgctctctctcaaattcactagccaccgctcaagcctgctataaattgccgaccccgcctgctccactaagtagttgtgcaaccagtgaagcaacccgtgcctcgaatcatccactagagctccccaatttgggatttcccccaaatcactcaagaacaccgagcggtgtgatctcgccgtggttagctcaccacaagtccgctcataccctcttctcttttatttcaatgtccttgtgtgcccctgatgctccccgagcccaccaattaagctaggaccccttagatcgtcgggaacgtgttggtttggccgttgatcacacggtcaccgtggacagagcgtgttcgagctccgatagtgaaattggttgagaggaaatgcttattagggcttgaattaggtctgcgccgaagtagagcaccggtcgttgcgtgaatcggtcggtgtaggctcaccggagcttggccctgcactgttcgtcgtcgtggacgtcgggctgtgaagaaatagaactaggggatgtttttgtaaagtgtcagtgactctaggaatagtactgtgacctcgcttcaaattattcaaaacgtcgggggcctattcgcaaagtcaataccgcgggcgcaggagcgcgcgcttccgc

SEQ ID NO: 2848 - DNA, 1307 bp, Zea Mays
cgctaccatagcctggtgactgatcaagagcgccaggtgtgtgagtggagacatactgatcagcaaaaggggaagtaagtgccaacaagtctgtcggcatgcccaacggcagcccttctggacccaaacccgttcctagcattgtcccattaacaatctgattctcaagctgagacaccaaccccatgtcacaggccccatcttgaggcttcttagaatcaccatgcaaagagttatcttccatgacagtatcttctgctagctcctccagctgaaaagaatcatttccatgtttctcagagtaatcttcatcctctccttgctccttatcatctccgtctcgattacccatgttatctgtatctgtccacttccccgctatgagaaccttgtcaactttgaaaaaaatctcatataacccttcaccaactactatttcagcagactccggaatatgatttacattagtcactgccaccaaaatacgaaccacccccattttcctagtgtagcgcatatcaactttctgagtagcacccaaaatagtgcctattgcccataaaggaagaaaggagcggatttcaaaaggaaccccataaacattcacccaagccttctgcagataagaaataggctctattttttgattaacctcctgaatcactaagataccttctcctcccaacgtatgaacatatttcatagcaatcatacgttgaagctcaacactgcatgggaacggtactataaagccgtcagcatgcctttggaccgaccaattccacttcactggtataagtcttgagagctctgacttaacgagatcagcagagacattaccttccttcactgtaatgaaagtcgtaacaccatccgacctcggaattgcacccttagatccccaagttgggatttggaagaaaccagactcaccgcccgcaaaaccgcatagagctgcctgcggctttggaccattaaacaccggacactcctcagggacatgattatcttcacaaatttcgcaacaaagatcttcccgtcttttcttccccatgtctgaaacaccgggtgttaacacggcaacccgttttctagccatctcagactgagcgcctctgctattattcataacctccctgtccactgcaccaagtgacgtagcgggcgcaagaaaacgtccaccacatccccgccaagcaccgcgaccacgtacctcccaactacctcgaccgcggaaagacccactgccaggaccggagggacgtccatgtacctgctgacgccgatgatccaccacacgccagcca

SEQ ID NO: 2849 - DNA, 501 bp, Zea Mays
gttcactaatgaaggtattagagccgccagaatcaagtaattgaagcatcacttggtctttaatcaaagctctcagcctaacacattttgagttctcaatgccactcatagcatgtacagacagcatcatctcctcttcagtacttccactgccagtttcaaggaaattcaacacctcatcagatagcatagggccaccatcaccacccttattaaggacaatacaatttaactgtggtgccactgctattttacacttgtgccctggcatatatttctccccacacttatagcacaacccatttactcttctatattctttgagttgtttagccttccataatccccagcagtttcatctagctcctttgttcccataggtatgtttgttctggctgcctgaaactttcttcctccactgttttgtctggtctgccacccttcatgctttaaggctaattgagcagccatagatactgtttgagggaacataacttccac

SEQ ID NO: 2850 - DNA, 345 bp, Zea Mays
tgaagagggaagtgcacagcgagccctacggcgaatccccctagtcaccgccgaccgataccaaagagtgggtggtcacatcggggtgtggcgggagtgttcccaggggcagaagggagaaaggacccgtggcgatctcgagattgctcatcggagtcgcgttttccgccgagccagcgtcccgccgtggccaccacaacccgagcaacgatccaaggtaagagttgccccactcagttcgtcttgatctcctgtacgctcggcactagacgagagttaggattggagcaggaatcgtcgggtggccactgttggcgaggcgagcgactgtggccgcgttcgccg

SEQ ID NO: 2851 - DNA, 731 bp, Zea Mays
tagagaccaagtgggtaagttagttgtcagatgacatgtccacattaagcaaggccatcaaatattgctagacagccatcggtctcagggaagcattcgccatcccatggtgttgcctcttccaatggtgtttcgctagtggggtgctacgatgggttgtggtgcgagtaaacgctagaggggctcattcttggtacttatgcccaatgggacgaccatatgttgtgggcaacatgcattcatgagtttgtttgaactgaccaagcttagccatgatgttcgcgctagtcgtgcgggccacacattggtcacggaggtcatggagcctgggttggctggttggtgatagcaaacatccttttgtcatcttgttgggataggtcattatgttggtgccgcttctccccatgctctcgctagggtcgcaccattcatcctcccatcgaggtgaccttttgctcaattattgaagaaggtgcctaccgccgcctctctagacacctagtcactagcaatcgtcattagctcattgatggttttgggcctgctacaaccaagcttatgcaccagagtttgttggttgtgccgtagatgaatgatccaatgacgtcgaagtcactgacgctaggtagcacattgcatctcctagagagtcacctattgtagccccatagagccctttctagccattctttgtaacttttcaggtccaaggggtttccatgtcattt

SEQ ID NO: 2852 - DNA, 1332 bp, Zea Mays
ccagcgtgttcatctagctgctcatcaactttctaggatggccctatcctggtgggataccttcagcgctgtcgtcaaatatgctacctaggcagaatttgaagccgcctttcgagaacatcatgtgccccaagggatcgttcagcttaaggaagatgaatttcgggaattaactcaaggtggaaaatctgtcagtgagtatgtgcacaaattcacagaattggctcgctatgcgcctgacgatgtcagcacagaagccaagaagatggctcgtttcttgaaggggttaagaccagaactcaagactatccttgccagccaagatttcctcagcttttcgcatgtctctaacaaggccatacaagtagaaagggctagggaagaagaaaagggtcacctcaagaggaaattccaagtcctccgagctcagtaacaggacaggcaccagagaattcaatcctttgggtttccacccaagggaccaagcttcaataagccagctggacccactccgtcacgtttcagttagcaaggtcaaagatcttttccaggcccccttcgttgcaagcaaccaacctccagccaatgcctgttggcactgcggagaccccaatcattacaagaataattgtcctcagttgaaggcatccgttcctacttactccaactcggtgaatggccccaagagtgccctagcacccacctccaaggcaccttcctccaacagccaacaaagcaagacccagtatcatggcagggcatgagtgaaccacgtcgacgcgcaagaagcttagcaagccccaggagtagtgctcggtgagttgctagttgaatttactcccgctgctgtactttttgattcaagagcatcccattcattcatagccaccagtttcgtggaaaaacgtggcattcccacggcacacctagaaattcctttggtcacccgaaccccagggtcagaccttctatgccatctcaaatgctcccaagtcaggattcttttaagtgggtagtgttcttggcagacttagctgtcttgccatcccaagggattgatgtgatcttaggaatggattggttaaccaagcacaaaggcaccataagttgcgcaaataagaccgttcttctcactgaccaccaaggaaagttagtctcatgtcaggctcagccacccgcccaagatccaatggtgtttaacctagcaacagaaagcacatctgtagtagaagaattcatggatgtattcccagaagaattgccaggaataccaccagaaagagaagtagagttctacattgatctaattcccggcactgcacccattgcaaa

SEQ ID NO: 2853 - DNA, 387 bp, Zea Mays
aggcgcagtcgtatggggatggagcgtggccgtcttcgagtagaccgggttggtaaacgagaattattgtcctcgccgattggggcgagcataggtgagggggatctgcagaatctttttgagggtgaataattgaggataacgctgttcaattatagggagatgggtatcatcccaaaggttgagccgatgtagtatatggtgccctcgacgtgtgtatgtaactgtaatttgtattgtaatgtggcctgttggccatttttgtacgcctgtgctgatccggctgcacctgtgggcgacttttgcgcggagtgtagactgacgtacttgtgctattccggttgcacccttaggcgatcttggcacgtagtgttctttcggcgagag

SEQ ID NO: 2854 - DNA, 739 bp, Zea Mays
gtcggcatgagcgaatagcggagtggactcgagtcgactcgggatcgtccaagcgagcgaggggacgcgcacggaggcaagaaacgagggcagtggtgtgactgcgcggatgaggttgagcaggtgagccgacagacaacagtgacccacgtggaggttggatggatggcgtcgatgaatggcaccagcgagggcgagcccacatgaggcgaggagagcaggcgaaaggaatggagggagagaaacctcaccactgcaggagtggaggaggagacgcacgagcggcgggagtaaggagggagtagagatgagggaagaggaagagtagagaggaaggagtgatgagacgtgactgtggtgggagcagaggcggactccgcatcatggcctcagccgtcacttaagacggcgagacggtcgtgtcctggcacgaatggacgcaaccaacaggctttggagacgtggtagtacgcgtgaagcgtgggggtgaggaccgaggacaaatcagatgtggtttagaaaagattcacgtccgcgaccgcagccgtccacacgttgatctattgatgggcaaaacctccatgaagcgcggacagacctccgaacctgagcggctttgaagactttagatactagtggatacatgaatgcatgtttccacactgaaccaacatggcctgctaaggtatgtaactgaaaattgaagacaacagcgcactttggttctgtttgctttccc

SEQ ID NO: 2855 - DNA, 332 bp, Zea Mays
gtaccccctactacagtataaggaagcggtgcccgtatggcgttccctagccacacggtgagcaacacccgaccccaccacgtgggtggctcaaggggtaccacgtggcgagaaaagatgacacatcccaggatatatcagttgaaccggaccaccacgaaggagcaccgaacccctgtacgcacaacccggacccccgattacgtctcgggactcccaagtaagcatgccgagccccttagatggggtccagatccctttgagtaaggtccggaccacaacgaggtcctgggacaggggagaccctggcataagcaagggtctggtactga

SEQ ID NO: 2856 - DNA, 480 bp, Zea Mays
tgtcatcattcacatgtgggacagtaggagtaatatacaattgggtatcctggccatttgatgattgtcgaccacctagccaaaacccaatgttatgttacccataagttttcgagtcaaaaccagttattccattaaacactaataaatgtgcatcctcgcgcggtccgattgacggaacattaattattctgctaccaagatgacccaaacaaaaattgctaccaccagattacaggttatagcaatttcaaatgtttgagtttatatagtaaagttcataatacagtgaccatgagtcaagagtcatcacatcaaacataaacttgaatcaatcatccaactcatactccattcacttgctttagaagaagtggcatcctcgctttaacaaagtactaacttctgaactgctaaattccattcaatccaaccacagaacagtccaatcattctacccagagaagcatttccagattt

SEQ ID NO: 2857 - DNA, 461 bp, Zea Mays
cggaggacgaactccggtgagcgtgcagaccggccgaattgctccaagaccggtgcctagactaagaccaaaccaaattcatgaccagggaagcattttccccaacctaattgcgcgaatggtcaagaggggtgctctggccataggggccgtgaacatggtggctagcccgtcgtgttcccgatgattggggcatctacattcaaattgatggcttggcgagcatcactgagctacgagaagacttaaacgaggtttgaattggacagagctttaccagaaccggccggccatggtggacttggtttcacggtgtccttcgactgttttgggggaagtaagaaattggagcttgctggtgatcggctgggagcaatactagacgtgggggtgcgcaacgatattgcgaagctagtcacgggctcaatttataggcagcttcgtcggtggtactcaatttg

SEQ ID NO: 2858 - DNA, 418 bp, Zea Mays
ccgaggtagtatattattcaaagaatagtcgtgttttctggttggttatgtttctttaagaaatggtgatcaatgcatgtttgatttgtgtttgtggtatgaaggatgtgagcacattgacaattatggaatagacgtggtctttttggtaatgcatggtgatcttctatgccacaatgaccatgcaaagaataggaataaaagatgcaagcggctagaatgataaaaacatgtagcctacggtacatgtaaaccaactattgtgttgattcttggtctgtacgaattagtttaggccttttttggatctatgttcactaacctcactatttggcatgggatcgactatcaggatcattaccagccgccatgggcaaatgcatctcaactgatcttagtggaaacttgttttcagggg

SEQ ID NO: 2859 - DNA, 361 bp, Zea Mays
cgccattttcccatatgtcagtaaagaattttccaccaattaagcttgcttcggccgaggggtcctttgtatcatcaatagataaagtagcttcagcttgggccaaagctttcacatgatcgcaacctgatttttccaagatagccgcaattccccttgcacctgagaaggcgcagacgtccccacgatcatttagaatctcctcaaaggcttcggcctcgctgctgatccattcaattggcccctcgggatcgccccgtacgaagttgtcttcacttgaatatgcgccaacattggcgaagctagtttttatttttcccacacattctatggatttttcataacatctttcttttgaaga

SEQ ID NO: 2860 - DNA, 335 bp, Zea Mays
ctaagccatcagagtgtaaagagtcgcttggcacgctaacagcccccacctggcgtgccaactcacaccaactatcgtggtttccaaaaccaaggagacaataaaatttgtgttcggtgggaggctagcatggactcactctaaatggtgaatcaagagactgaaacatggggtttatactagttcaggcttgcaccctagtctagtgtagtgttgatcatagtattgccctaaggaacatgttacagtgggtgcaagtgtgagaatgagaggaagtggagaactcaagcatgctctcttttccgtctgtttggtcgtcccccttttatagttca

SEQ ID NO: 2861 - DNA, 926 bp, Zea Mays
caggtcccgtgccgagcaaacctgagcaggggaagggtcgatccgacactgttgaaccacgacaagacgtgtcaccataaaaccacgttcgaaccatgagtttggtgcaaaaaggtccttgtcaaacacgacggtacacccctacattcaacctcaggcgtatccccgctgacttgtggggctagccaaccctagtcctggggacctcgacaccggagtatctacagtgacccaagtactggaaaggacgtgacgatataccacaccgagggtatacctacgcatacgggatggtgatgccaggttcatgacgaaagacgaagtcgtaccaaaagcatccctaaaccccaccataagtctaccctgcgagacctgccaagtgctgctacatgcatcaacatcgaacttgctatagggacccatatgctagacggatgaggtggtacgccatactaggattacggcagcgcacgaccctatatacaatgtgaggaggactacaccacctacgggcaacatggccgatgtgaggaggaatacaagtccgtaactgtaaagtcccactcttgagatataagaggataggacctcctttcttgacacatgagcacacaagttgtaacacacctcccaacaatactatgatcagcactgcactggactagggtacaagcttgaaccagtataaacccgctaacccaccgtctcaagctcatcgtttgagtcccaatggttcaccatgtagagtgagtctattagcttttcctccgaacacaaatcctattgtcacctggtttctgaaaccacgaaaaaatcgtttcttatttcaacaactcataaatagattatatgtccactacttaaaaaaatccgtaggcgcatttgatcctagttgtttgtacgtccagaaaatgctgcgtttatta

SEQ ID NO: 2862 - DNA, 416 bp, Zea Mays
cggggggttgggctgcttcctgcctcaccgaccactctgacaactcgggggctaggctattgtgtgccttgctgactcatcgctttgccagctcaggggctagattgttgtccgtcttgccaactcattgcttctttagctcaggggctgggttgttgtccaccttgctgactcatcgcttgcgtcagcttgggggttgggctgttgtctgccttgccgactcatccctttgtcagctcaggggttgggctgttgtttgccttgccgactcatcgcttcatcatctagtgggctaggctgctgtccgcctcactaactcattgtttctctggcttgggggctgtgatgctacccgccttgccaagtcactacttcgacagctcgagggctaggctgctgcccgccttgccaagcca

SEQ ID NO: 2863 - DNA, 693 bp, Zea Mays
ccgcccttcgccacagaggagtacgagggaggtaatggcacacattacccttgattcgagggaggagagaaactttcgtaaataatgggacaataagtatcaggttgtagataacattgttgttcgacgtcccttgttgacgaggacatagtgtcgttcgtccttaagactcagagtgtttgaggtaactttggggacctaactatcttgcaactagccatctggtacctgataaggaggatgacaaaaatgcataaggtccctacctagcgcgccaactgtcattgtttcgagtaagcagtgacgagtaaatttatgtatgtgagtttttggcccggatggtgtgctcgatggatgcactgattgtttgtagtagggggttacaaatgggcgagagagggatgttcccaagtctctgtggggtgtgagtgcttctagcgtattgcatgtgttgtgttcctccttttttgttagagggcctcctctcccttctataggtcaaataagaggggttatggacttgtcgcgtagtgccatcgtggtgaaaaaggagttggtacgcctataaggtggtcgggttcctttttccaatgccatctcctgccactattgttgcagctttgttgactttcttggagaggtttcgtgaagattacgggccacagtgcatgcgtaagcatgcctcaggccttg

SEQ ID NO: 2864 - DNA, 310 bp, Zea Mays
tttggcgaagggttgggcgaagcatgagggtcatttaatgtcgtcgattgattctccacgtagaatagattacttgtatgagacaagataaatatatatcatacattagtaaaaaaatcatactcccgggagtagaaaactgaggaggtggaggtggagatagagtgaacaacgtagctaatggagctgcacccgttatgccgccaagagtctacatgtactgaaaaatacctgtcatcctctgctgatcggacaagcgagtcgcctactcaccctccttctcagcctcccgctcggccctcatcctcgc

SEQ ID NO: 2865 - DNA, 1888 bp, Zea Mays
tttggaactcatttgcatcactagtacaaacatgtaaccttcactatgtaccaacagggcttttaggcatttccttacgagcatgaaattgtttgaagtaatgaagttgctatttacagtttaatgcactcttcttcatgtgacatatttatttaattctatgaaagcttttatggatgatcggtccatcatcctttcctgagaggaacaactgttcattgcaatattctaattttgcaggttaacttgagtgtcgcaattattccaatgtcacatcaatatggttggaactcatcaactgctggcttagttcagtcctcattcttttggggttatgcattgagtcaactaccaggaggatggctggcaaaattgtttggcggaaggtttgtttatgactttagggtaacaaaatcatcttgaatatgtacgaatacagtgtctatgcttatgaaaatactgatctaatatggcatctgcttgtgaagtaggaattgccaactgctatcctatggttcataagctgaacatatccttatttgtgttacccctttccaggacgaaaatactttatattaccattaaaactaaaaacagattaattctgctcaaacttttactcctacaatacatatagtgtctatttatctatttctttttctgattgtaggaaagtgcttgaggtcggtgttgtgacatggtctttggccactgctataattcctgttgtagcaggttttatgccagggcttgtactatcgaggattctggtaaactacttacgaaaagtctgctcagggttgttggtccgaaatttgctctacttattgtgcttgtgtattcatagaatgtagtctgtaaaaaactcgaccaacggggtggggggtattgacagcccctgggtatattaagaagaggaccttctcacgtaggttgagaaaatatgatcttgggttgggagttgggacggatgtagtatttaacaaggaaaatttccagaaatgttggaactttcagaactaagtactgcaaagagatagtgaaataacacattaccatgcagaagcattatgacatgctgatatccataattccatataaattctggagcatccacatttgagcacagtgtctagtcatcacatctcgtttacttgtactttgggtgtgttaacttgaacaagaatattttaccatctttatttgtttgcatttattctttgtaagttgtgttctatgatgctaggtaggtattggagaaggtgtttcaccatcagctgctacagatttaattgctaggtaagatcatatcctagtttggttcctttcttgacatttattgttgggacttcccttagtacaacatgtgtcaattttgttttctacataatggtgtatattgtggttctaatttctagcacaatatggcagcttctatattggtatttccccccatgcccctcttttaatattcagagtatgattttttttccatagctacttgtgcaaaatcatggtggtggctgcatttgtcaatcacactaattttttattataattcaagctgtttcgtatgacatacattttgaaattttgccagagtagttcaaaacttcaggctttcgttggcactcacatgcaggtccattccttggcaagaacgatcaagagcagttgctgttgtttttggtgggttgagctttggcagtgtcttagggtatgttgtattaagatatatggtcatttttatcgaaattaattaaatattccttaattgaaaaaatatacatggtccccactattttcatgatcctttgagcaacaatttacatacttccatgtatgtgctagcatgtaaaatgctgaattcaactaaattggattttcc

SEQ ID NO: 2866 - DNA, 492 bp, Zea Mays
ataacatgaatgttaaatgataatatctagtttttccaaaatgatatgaataccaaaaaaacctttttggctacctaaaggagagctggagagagaaaataggtggactggctgagaacgaggcattggagcggagcagccgcatcggtgcgtcattgtggcgagtcgttgaatatgtcgtgagatggcgttgatgaggcggcaacaggtgggaggactgagggcaggaggcaaggcagcgatagatgtcgatggtgacaagtgcagccagtgtcgtgttgcgacggcacgggaccctagtgagttagcgagagacagatgatgccacggtcccaccaattgcttgcccatctattgatgtggactaggaggcaaagtatcaacattgaatgcaggatcccgacaaggcgatgagctgacgagtaatgaggaggtaaggtggcgctgcagtgggcgagttaggtcaccgactaatcagccagtcgatgactg

SEQ ID NO: 2867 - DNA, 514 bp, Zea Mays
gaggaaatcagtaccagcgttagaacaaccaggcagctcgtcttcctgccctagcaaccaaccagaatggccaagcagccctagctcaagtaggaggtcgtgcatgcttctactgtggagaacaaaatcaatgggcgaagaactgtcccaagaaagtagcccagcaaccgccagcagtcaatgccccagcaagacaaggagcgccacagcaagcaccaggagttcgtggttaggcctacaaccgtggaaaggtgaaccacatggaggcggaagcaatccaggatgctcgggacatggcagtaggtatgtttccagtcgaatcctacccagcaaaagtactattcgatactagtgccacacattcttttgtttctgcatcttgggtataatcacataacatccccatagaaccaatgatcccacctttaagagttaattcagttgggggaaaagttcagtccgataggatttgttcgaatctaaggattgaaataagggggatagacttccccgc

SEQ ID NO: 2868 - DNA, 471 bp, Zea Mays
aaaaaattggcatgtgcatggtagtaactcttttccctggcagatggcttcggataaaaccacgcctaccgccaccgggattggagcagggtttcccctaggaggagaaggagaagctggtggagaagggagtgagacccacctccccgcacctccagaactatcactagatttggcccaagttctagccaatcaaacccgactcattgaagtcctcactagaagtctggaaactcagcgcccaggtggtggaagaccacagaacaggatgggataatttctgagactcaagcctcccacgttcgctggatccaacaatcccctcgatgccgatgactggctgcgtacgatcaagaggaaattggaagccattggatgccccgaaaatcagcgtgttcaattggctgctcatcaactttctgggatggccctagcatggtgggataccttcagcgcggccgtcagggacgc

SEQ ID NO: 2869 - DNA, 815 bp, Zea Mays
ggttctgtcctagcttcgacaatagcagagcgacttagctcagatacggaagtggacaccctcaattagccttggcattttggctatctcaatgcgcttgggacgatgtatcaaaaccttaactttctttaacctcggcgtgctagaagttgtcgaagtagcaatctttattttctttcctagctttcgcgaaggataacagtaatctgcgtataaaaatctgatgacatcaaatactctattcagcctctttttgcttcgagccccaaaggccgttgtcttagcatcatcttcagccttcgagtaggctccaagcaattcatcactagttgcttcaatggcatctagccaatcatcatttggctcatcaaactggctcctgtatttgaacgtgtacttcaggtagattaaaccaccttggctagacctagcagcagcctccttcggcatctcccacccacttgcgagtggccacactctataagcaatgtgttcctggactaagtcccttgtgcctatgtaagtacatactttattaaaaatagcctatcatgcttgtatatcattcctaagggcagtggatggcctcctaatgccgaagcgagaccatataggacgttaaataatccccttaatatcatccctttcagctaggtcattcttcacgtagaaccactcctgcatccaggcccccgaccatctcttccgaaatatcggaacttggtagctcacctcagagcgaggaacgaagctgtagcaactgaagttgttgttatattgctcctttccggtagacttcgtctcataagacaact

SEQ ID NO: 2870 - DNA, 518 bp, Zea Mays
tccgggttcccatggtacagtgatctgaataagatcagatcaacagctcagccctcgccgccgatgggctacgcgcgattcatgccggcatcgcagcgattcatgctccgaacatgtggatagcgcttgggattgagtaagggtcctcgccgtggataactccggccagtaaacaaatccggccaccgtaccgcacacgccacggtagaatcggatgacctcgccggtgatcgccgccttccgaccttgtgccacatgcctgagtacctctaccgcatcaccgtgaaccattgtgactctccgttgatcaccggaatgactaccacggtagatgccacgaattcattgcgccagtgaaactccccctcctccgaccgccgcgcgtcatcgttccaattcccggccaccgctctcgcttagtataaattgagcccgccgtgagcttcgcaaggtcatcacacacccaaccacccagtatcaccctaaatcgttcactgaggaactccaatttctaactt

SEQ ID NO: 2871 - DNA, 378 bp, Zea Mays
ggagaccgaagaagtcgtcggcgctgactcagtctatgttctctgccatggcgacattcaagcatacgagtgacgagcagtgggagaagatgatggagatgttggatcggttgggagatagactggaggtgatgggggcgggtcagcttcgactccaggagcaggcagactgcttggctgcggtggttgcagggaaggccacagaggagagggtccagagaacgcaaaaaatggaaacaacacatgaggtggtgaggtgcatggctagggatatggaacctgaggaactgagttgggagggtcctcgatctagcgaacaagggcgtcggtgtggtcttaatgctcaggggaatggaggtactgcctactcagtgttcg

SEQ ID NO: 2872 - DNA, 359 bp, Zea Mays
aaagtgcaggggctacggggtaaaactcctaagactcaggaaacagtagagagggacggtgggttggtttctgtaatttgtaggggcttatttgccaatcggccgagccgaaggggtatcgggagtctacaaccgtcggatcaccagtttgcggcccagattagatctaggtttttaaatgaagcagtaagcaacgctgacccttagatcagatatcaacggtcactcttctatctaactgagatcgtcccgcgtccatcggattcacgatctacggctgcggttagatgcggccgaattggtatgaaactctaatccgagccgtccaacgcacatccaacggtgcgcatcaggtcttc

SEQ ID NO: 2873 - DNA, 435 bp, Zea Mays
attcttgcaggtttctagctccttcgggagggttttcatacctcaaaaggccatttccctaaaaccctaattcctcgcccttcacgtgttcgatgaaatgcccaaaccagccaaacttgctccaattgaacccaaatttttcaggcaccttcaccacacttccagtaacctacttgccaaatttcacaccaatccgagatcccaggcttaaatttcaccaaaattcccgttttgcgcgatcgttcccgagccgtgtgcccaaattcctttttcttcgcctaaattcaaaccaagcacacacttcactcatattcacctatataagaatcggctcaattccatatcattttgtgcctcatttcgaattccaaacctcctatgtcactatttatctgtcaaacgtcacttttacgtcttttgacctcttgaacgtcc

SEQ ID NO: 2874 - DNA, 348 bp, Zea Mays
cgctcagagtggagtgcattcgccgcgcggtgcacggacggtgttatggcgtttgaccgtagaagatcagtcgtggaaggaaagaagaagagagagagggagccaggggttgaagacgatgtgctggccgtagattgggaaatcaagggtgtagattagatcggggggcagattaggccagggtaaatgcgaaccgttcgatcgtgatcgggcgagccgaggcgatcgcaaaggtttttaaatccgagccgtagaattctaatcgggcgattcctattgattatcggttcatatcccttcgccatctaatctcatccgctgtaattcgatcgtgcggctaggattgac

SEQ ID NO: 2875 - DNA, 661 bp, Zea Mays
gctaactgtggttgtgtgtgttgttatggcctctacacccacatgagcggtgtgatgttgagcaatgtcgacctatgtttgcattatggacattgctctatttgtcagcctaagttcacaatgtagcattgctctatctgtggcctgggctgcatagatatgtttagttacactgagtttgtcgcactcgattttaaggacaaacaaatgcccactatacatgcaatcagatcaagaatcagatgtataacaggcaggggaatgaacgaggtctagggtactcgtagtgaccgtgcagaactccgacggcagcatgggaccgtaggtgctcgacgatggtgaggcagcacggagaagcttggtccaccatgttcgaagaagtaggagacgatagagttcagagcgaggtctgttgcagatgtcttgaacgatggtgaagctcatggagctagagatgggagtggggtgctctggtgaaggcagaatagtcccttgaagcttagcaatggtgatggcgatactagtggcattgtctcagggcttctggtggctgagggttcgggatgtggtgggtaggggtgtggaggggtacgatttatagcccggtgtgctcaatttagatggaagagcaacggtgagggggtatgggtggagattgcct

SEQ ID NO: 2876 - DNA, 439 bp, Zea Mays
attgtgacccaagacaggtggtagcattggtggtggtggcaactgggcccaggaagcttgagaatggcttgccgaagcaatagaggccgtaggctgttggttgcctacatactctaggacataaggagaatagcacgaagcagtgtggaggacttgcttcggctgattctgccgtgctttagcttcagcaatttccttctgcttatgaatggtaacatggcaagtccttgttgtacggcctttgtcctcgccacaaaaaggcagtacaactttcggggttgattgccaaaccttccaccaccaaaacttcttcctcctctacctctcaaagctggtggtctgaaagaagtccattgcatgctcgaagtctgagaactatgatggctatgttgagcattgctggccctatcattgttggtattggagttgtggattgatc

SEQ ID NO: 2877 - DNA, 741 bp, Zea Mays
gaaagatgattactttctataaatggatgattgtcgaatgatttttagaggatcaaccatcagtgacaccaagcgtcgatagaagcttgcacaacgtgaggtctatgcgaccaagcctgttgtgttgcacttcctatgatggctcgagtcaaccatcacatttgatcggctttaccatccggctttaccatccgactagcatcccatagccaggccgatatccgctcattgtcgaccccatcatcgcatatagtagttctccaaagtattgatggatggaggcagtggcctcaacatcatgaatgcagagatgttggatgccatgggcatcaatcgctctcgcattcgactagttggagccctcttccacatgtcaggccagggaagcaggtacctcgcatcgagcagatcgacctacccatcatgtttagggatccgtccaactatcggacagagaccctaacatttgaagtggttgaattcaagggatcctaccatgcaatcctagggtagccatgttacatgaagttcatggctattcccaactacacatatcaagcttaagctttcagggccacaggaatcatcgccattagatcttcatttcgacacgcctacgtgtgcgagatggagagctgcaagctcgcctcgtagatcgttgcatccaaggagctcatggtcatttgtgagcaagtggtgtagaatgcttttgactccaagaagtcggtcgactccttcaag

SEQ ID NO: 2878 - DNA, 438 bp, Zea Mays
tgcgccaaagaggaaaagggtgaaggtccttactcaccgaccacgcttcatcgaaccggcctcagtgcccgaatttggtggtgagacctctactgctactgaagccaaagaaccttctcttactcagaagaatgaagagctggctatattgccgaaggccgataatattaaagaaatagagaccgcgaaaacaaagatagtggaagttacaagccctccggcaggaatgacagtgctgaaggcgcaaaaagacctcacgacgactccgaagaggaaaaggatggtcaatgtactagatgtgttagagacgataaagtcttcaagctctactccgaagaaaattgccgaagctccaaaaacgcaaattgagacgacggcctctgaagccgaagctacaaagcaccaggctgagactgaagctgggccttcggagcccgc

SEQ ID NO: 2879 - DNA, 348 bp, Zea Mays
ttgagaacaggttatagcagataaccagataatagggcagaatcattaaaggatccggagatttggatgataaggccacaacatgattcacaaggaaaatgattaccagatttggaaaggagaggtaggaaaacaagatctgctaggatgagcagaacaaatgctatgaagattcgggacatgatcgatggaaagaaacacggccttgatagggtttgtgcaactagacaccaaacaacaattttttgacgtaacaagtgcacaaggagacttgggttggtctagcggtcaagctatggggatccacaaaccgtgcaggtgtaacttcaagggtacaacacacaaggg

SEQ ID NO: 2880 - DNA, 1159 bp, Zea Mays
cgcggctctaatttataaaaagttcaggggccatagcgtatgaatctggacctaaccgtgatggttttacaactgagatggagtgcgagtttattcttaagaaactcggggactctttagaaagtttgccacggctgagtggcgtgcgtgaatcgggaccgttgatctgccgatctgcgatcgagatccattgtgcggaagtgtatgcctacatctaattctagccgttgattagaggatcaacggtggacgcattgtcttcttcatccaacgtctggacaccacagacgtcgcaactatggcggtgccgtcaccggtgctcagcctgccggtgatctagggccctaatgcgactgcggctacgtgaaatagggagcggagacaatagcagataggataggcagcgtcttaccgtagtacaacgcataggcgatgctggcgggcgccgtactgcggctccacagagaagcgtcctcactggcaactaattgtgccctcctgttacatctttggctcggctatgtgtgaaatacgtgaggcatgctccgacgagcgctctgaatttatacccgaccgcacccctgatcggatagtcaccctgctgagacccatcaacagcatgggcatgaccagctctctctctctccgacctcttccactggttttgatgctccgctcaacgctgcgatctcccagcctcgatacattacgggattgttgaatcgcagagcaccccagccggtatttaaaggcgcaaggaggtaggattgaggcgagaaatccgcactggcgacctccctagacatccgcccaacctcacgcagacaatagcgattctgttacgttaggagtccgtccaggtgggagctcggccggctgttccaaggatcgcgagatcctagcaaagtcgctcgaaggatctggccgttaccgcgacgattacgccaactgactttgagaagagcgcgggcttctgttttgtgctcgcttcggtgaagtagagacaccagccgatctagtcctaggcgtcagcggtggcaaggagattaaccgcgcatagcacttcgggtgatgtcaagggacgtgagctcaaatagagctgttaggaagacgtgccagctcaaataggttgcttccgcctccctttttttgtttttct

SEQ ID NO: 2881 - DNA, 1031 bp, Zea Mays
tcgaggggtgcctcgacttttgatttgtacgccccttcgtcgcctctccacgaggtggaagggggaacacgtcatgctacccttgatgggcgatgagcgtgatgttttcgttgagctattatcgagtaattcgagcgagggtccgagctcctttcgataggggtcggctagcggtccggagacacgccccaaaaagtacatgggggtgactcgcctggtcccgaacctgtttgatagggttcgagggctcgatgcctccctacgatgggacactgtcacgaatcgctctcgggggtctcggatatgtcttagggtagcacaggtcgcaacccgagctatggccatgtacgggcgcacccatagtcatttctgactctgtgttctagggtggttatggagcccttccgaggcgccaaccttcgaacccttgatcagtaatgggctcggagccctagcgtcctgaggcaggtttgccaaaccctgccgagggcctaaccttcgaacctctaaacagtatttcgccttgcctttttccttcccgtggtgagtgggctgaggtagaagacgccttcttctcgttaactattgagggggaaaatgaaaaaaggaaagagagaagagggcgtaacttttgaggcataatgcgaaacgacgctcagtgcgttttttcttggaggaggcacaatcatttaatgcgacaggatgtcctgatcggtcaaccgaccgtttgcgacgcgcgtgcgcgcgagattcaaaacgaccacccactggccattgtgacttgcacctcggtgactccgcccgtccctataaattcgcccgagatggacgcttcggaccattaccttgccgtttcagccttcctgctttacatgccatcctcttcttctgcgcaaaagagctctacgcctccttttcgtctccttcttccgttccgatggctgagaagatcaacgtccttcctccctgcgacccatggcccatctcctctgttaccgacgaggatttggagccattggtggacgccggtc

SEQ ID NO: 2882 - DNA, 372 bp, Zea Mays
cctcatcatggctgaagattggcgggccctaataactttgtatctgcaaggccattaccatccaagtgatatcaatgaggccaagcgcctcaagcaccgaagccgggacttcaccctactcgggggtcagctgtacaagaaggggatcagtcagccatgctaaagtgcgtgactaaaaccgaaggcattcaaatccttcatgatgtccacaacagaacttgcggctcccactcaggacccagggccctcgctgccaaggtgatccatcaaggattttactggcctgcaataatctatactgcgaaccgagtcgcgaggtcttgcgaagcatgccaaaagttttcccctcgctcaagcaacccttcgcaattc

SEQ ID NO: 2883 - DNA, 575 bp, Zea Mays
tcggtcgcgcgacgccccgattccgcaccgcgccgtcgccggaagtttctgcgcagtaaccttcggtaagtacccgccctccatgttcgcatggccgtacacttcatttagtgctagtagaattggtaatgggcgctcgggatcaccgggtatgagttcactggcatatcctccgccgcgctcagggtactgtgccgccataggatagctcgacgggggggagaagatgactgcctgtcgtccgatctgtctgggacgaccatgatcgcgcccaacgtaacgatgcgacctgggctgattcgggtcccttcgatccaatcgggcaaaccagatcaatcgaagaagtcttcaaatccgaaccatagatcgcagaacaaacggttggcgctgcgtaacgcttcgcgggcggccagatctaatctggtgcgcacatcttagatcggacggacgagagcgctgcgtacctcttcgcgggtcagttttgcacatgagtccctccgttattttagaataaacccgacatccacaggaactattcgctgtgtcttgcagattcttgcgccagagaccctgcc

SEQ ID NO: 2884 - DNA, 567 bp, Zea Mays
cgctggccgtggaaatcggctctcggttgccgatctcctccccgccactcgactatataaaccgaaccccgcatcgcaccgagcgcaccatcgccaagcttcaccacgcacctgagagagagtgtgggagagaaaatctatgccgccgtaggttaagccgtgggtaccacaccgacgaactcgggatgatcgatcgggggcattcgcggccgcactgggttggtgtttgtgtcctctctgtgcggtagtaggggaggtacaacaaggaatttcacatcaaggattcgtccgccgccgtcggaccgcctcgcatcgtggtctgcttgtgacccgtctcgatttaaggtaatctcaccctctgttggtccgtcatgatgttgggagcattttgacacctcgccacttgatctgtcgagctccgggcactagatttggtcacgacggggcggcgccgccgcgggctgttcaccatcgtgttgggtatcggctgagggaagaggacggtgccgtggctgcaagatccgaaatgggtggtcaagattagatcgtgaaaatattaagcctcga

SEQ ID NO: 2885 - DNA, 641 bp, Zea Mays
gaaaagtgcaggatgtaaaagtaccttgggtttcctaggcatatgtatgtgccctataagtttccaatgaaacttcctcaaggtttgcctagttctggatgctctcgggcctgaggtttttgagccatggtcacgccgattccgccagataaagggggaggttctggatcatgaagtcatcgcaatttgcccctcccgcctgacatgcaagccggtagtcccctagacgaagacaggggatcaattcccaaacgtactttatgatgttggcagggggccagtagcgatgcagtactggtgcctgcaggatgtgacgattgtaggcccgagatcccaacgatgggggcgctcaagcttcggtcctcatcgaggttgaatcggccctcgcggttgtatcgatggtcattgtcttgctccatccatatttcctcactgctccctgggtcaagcacgctccacgctctccgacccgaccctaggtcccggtggggtgagattcgtgttgtgccttgctcgggcctaagcggttgtcttattggctggtgcagacgtggtgctctggtcagctcccgactctcgatgtcgcgacatggaaccctcggcttgctgccgcacgcgaggttgaggaggcctcatatttc

SEQ ID NO: 2886 - DNA, 465 bp, Zea Mays
aaaagaaaataatagaagttagtgatcaataacattaatgtttcatgatgttctatattgtacccgtgcataaatttaaatggaggtagccaattctacacaagaatcaagttaacaacaatatcattgttattggacatccctgcgagatcaattgcccctgacgaaacaacctaagaactggatgtgctactgaatgtgtatagactagaataatactgtactcaactccaaaccactccctctccccaaaaccgatctgcactgaattgcatgtcttggtgcatccagacaaccaaccaaattacaatactgatcggcactgatctgcactgaattgcactgatgttgaagtaccatttcacattggacaagcttatttaacatgttgcgccgagccaaaccagaaatgtgcctcttctctaaccatccccacccaaactacatcaacctagaaacaaaaac

SEQ ID NO: 2887 - DNA, 814 bp, Zea Mays
gttggaaagatcaggccagccggccggcgagcacagcacagcacagcacagcagacagcacaaactggaaagaggggcgtgaggaaaaggggaaagaaaagggcggaggggggaggaggtggtggtggtggatggaagggggggattgggagtggcacaggagcaggcagttgtacaaggctggcacaggggagaagaggaagaggagggagggagatgagatgcccgcgaccacgagcgagcggaaaggagagggcaggctagtagcgtactactggtactgtagttgtagcagtagagctaggctagcagcactaaatagctagaatagggcggtgagggggcgggggaagaccggtgagcatgggcatccatcggcggcggtgaagtgaagtgaaacgctgctaggtatggcaggcagcaggctagatgaggaccaatgcaagaagatgatgtgagaaagagaggcgagggcggcgcgcggtgatggacgacgacagacagacgtatgtacgcacgcatgcatatcctcctccatgctcctcaagtcagcagtaataaaattaaacacgcacagagaatcagagatgtacatgtacaggccggctggtaatcagtggatcggaggaaattctaatcacccaccgccgtagacgtagacgtagaccgtacgtagtccgctccaccctcgcggtcgctaggattatttggctacagcacgtctgtgacaataatcgtagacagctcacgcatctctctctatatatatacacgcaatttaatccagtgaagattaattactgcgtagggtacg

SEQ ID NO: 2888 - DNA, 675 bp, Zea Mays
gacgaggttggactccagtttcaggtatccctgacggcacccaaggaccgagcacacaggatctggccttgtccagtggcctacggattgatccaacagcagtggcctacggattgatccaacagcagcgtacggtaaatctccgctctactctacgcgtgaacagaacgagaggaacgaagagtttaatctccacggttgctggcgccagagcaaggatggtagagaggaggaggaggaggagcaataaggcctacctcggtgagcaggcgaggaggagaagacggagaagcagacaaggaaatgcaaccaaatacgaggcgaggtggaggatgctcagtacatggacatccatcctgattactaaacttcgctagagccatctaggttgttagaaaaggtcgcaggataaaaatcagagttcgattaaccggtccaaaaaagtgtttttaaatcggtccaacaaatgttctttaggtggggagttggtttgatctttgaccgggtgccatacagaacgaaggttcggtggcgcctgtttcaaagcccactaattttcagcccacgcgtcttccatttttctttctctctttttttatttcaaatttacgaaaaatcaactgcgccattgacgagaaaggaaggatacggtgagaaagattcatcctccctcac

SEQ ID NO: 2889 - DNA, 590 bp, Zea Mays
ggcagcttcggcagcaaaaagtcctatgaagccgaagaaacggagaattattcaagtgacagatgtgatccatcagacaccgccaccggtgatggtgtcaaaaattgtctttgccgagactgccgaagccgaaggcgccacagccgaagctactggagtggaaaccactgaagctgagactggcgaagccaaagctaccggggccgaagccgggaccaccgaagagtcgaacctggaaaccacacttgaggttattgacaatatactcctgaaaatggcggaagaagaaactactgcagctgcggtgagcacggcaactgaaaaggggaaagagcaaattgatgaaatttcggaaggagaagattttaactttcaagatttgcttggacaagagttaacagacgctgagaaagaggagttgaaaaaatatgccctatcttgcggatataaatcaggggctatgctatttggtggggtgaacgaagggaaactaagatgccttcggaaccgtactgaggccaaaattgttagaaccctctccaaaagcattggcttgccgaagctggagactgacttgtgccgttatcaac

SEQ ID NO: 2890 - DNA, 665 bp, Zea Mays
aaaccagaagtcaaggttcaagcatatatgtaagtaactgagattatggaggaatattggattgattgattgagaaccagtacatgtacatatatataagagaggaggacgagaggcaaaaggaaaccccctaagtctatggaaactaatagtacaggattcggactcctgtcccctgattctctctattctaatatagcctaggcccatcggcagaattcccaggccctagccctttccatatacaacagattgtctaacccccctccctcccacagtcgaagcgtccgtggaacgaacgttaagactggacctaaactcagagaacattgaagacgacagtccttcgttgaagatgtcggcaaattgtgattcttgtatatcgataagccaaatagcctctagaggcccatgaaccggcgttcacccagcaacaagcctaaaggccacgaatcagcaccccggccccatagtgcgacggtgagcacgagacagagctagggtttacacacttacacgagccacgagcggtagcgcgggcacgacgatggtgcggcaagcagacatgggctccggctccctccccaagtcggtgagtcgctctgttgtttgctccctcgaccaattgaactcctccacgagctagcaacgggcgacaatgcggc

SEQ ID NO: 2891 - DNA, 494 bp, Zea Mays
ctacgcactggaagaagtggatactgacgtgaagcgccaagagtgtttcttggaagagttgattggaccgctgaactattagttgcagagtcataccttccccaacttccagactctgttgaacaaggcaattggccttgaaagcaaaagaagggaactgtctaaccacaaaaggaagtttcaaggtcagtctagcaggaacacacgcccgaacaactcgcagggttctcagtttcgctctgtaaatcagggtggaaacaactatcagatgcaacgctctggacaacaaggccagagaagcaatcaaactcagaaccagtagaggaacaactcttagaccaatcaaaggtctagtgggaattcgcagactcgtcaaggtggcgccgtgaacacataggccaaaagcaacaacaacgcaccagtccaacccaatggatatttcaagtgcggcgaacttggccattatgctaacaactgcccaaggcgcaaccaac

SEQ ID NO: 2892 - DNA, 558 bp, Zea Mays
atcggactctatattcctattcattttttaaataaatttattaaggctttaaaatattatgaagaaacatttgaatcatgatccattactatccctacttgtggtacaaacgttggcaacactgtagggctattattacaaaattcaagtatcatctcagatttcacccctagataagatgttcaaaaagagaacaaggatcctatataagacaaaaatagaaaatagccttaacaaaccgtagactagttaaacctgctaatttgtaaccactaccccctcgatctctccctaaaatagcactaggcctacacagtaaagtcgaagctaatgtagtaaacccccttcctccctccctctctccagtctccactcccttactcaatactcatcaattcatcatctaccacctagtagtacttcgacgataataactacacccggtagccgacccacaccccctccccaatatccgcgtacttcataatcggatcgtctaatcaaaagccaaaggacaaacaaacaagacgcaatcaggccagcagcgcgagatggcga

SEQ ID NO: 2893 - DNA, 335 bp, Zea Mays
tgcacagtagtattcaggtcgctgtacactggtctaagaaagagcgccacatcgtcagcataaagtgagatctggtgtttgatgaaaatagtagacaggggctgcagcaacccattatcctcagctttgaccataagcgcattgaggacatccataacaaaaatgaaaagcagcggtgacaaggggtcgccctgacgcaaacccctcttatgagaaatgaagatcccaggcacaccattgagcatgatctgagtggaagtggtcataagaagaccactaatcacatccctccacacaggaccaaaacccaaccgctccacctcaagaagaaaagg

SEQ ID NO: 2894 - DNA, 523 bp, Zea Mays
aataccaagatggaagccatgttcaccgtaaggaaacaacaatgggtattgcaaaggcatgtatgctggatgcaagcatgaaacacgtttgaggctgcactctctatcatgcacaagaacatcatatgtgtattccccggtcgtgtagtcgccaacaataatggcagcaatctcaccatttgagggtaggctgtattgtacatcatggcgtgtgttacagcctaacaatctcagtgttatcttttgatcaccctcgcgctcaaggcgttctctcgcgcatcggaacgctttgacaagcgagttgttttcattcaacatatcgagcagcgacgacaccattttagggtctggctggccagcagcaccatcatcggtctcaaaaatgcctagcctattctgggtctcatgctccgtgtcatatgtgtacagttgggcaaattttggttgtgtcccacgctgtggaagtagggtgccaatcctatggtgcaccaccccattaattttgaaaacataaggtgcagtg

SEQ ID NO: 2895 - DNA, 561 bp, Zea Mays
attatgtagacagtaatgtttgaaaagtagagataaactactagagataatctaacactatctacgtcattattctttaaatctttccctataccgcattatgtagtcgtgtcatccagattttatcatctatttttttctttttcagagtggtttcctctaaattcttcctaaattctctctatacggcccacctaactataaaatattatttttcaaatctattcatcgtccaatactaattttttcgctactgacaagtcattgtatgcacaagccgcgaagaggacgtcgtagtgtgtagcgttggcatgctcgtacctgccacagccgcgaagaggacgtcgtagtgtgtagcgttgcagcgctggatggacattaaacttctacattggtaggagagggcggctggcagaaggcgttgtagacagcttagactatttgtaacgttatcttctaaagttttctctataccgcactatgcagccacgtcatccaaattctatcttctaattttcttccgctcgcgacagttacccctaaattctcactctatgtcat

SEQ ID NO: 2896 - DNA, 311 bp, Zea Mays
cgacagtagttgttgacattgagctcgccttgctggaagacctggaactaggcgtcgaggtggagaacacaagtctagtgtgttgctgaggaactgggactcgatggtgagccatgcatggtgtgccgtcttcctgagctcgcggacgatctcctgaagctcgacggtgacagtgccgaagaggcaggacatgacgatgctgttgtgcctgtaccgggacaaggtgttggagaagacctctgtcgagggcgtagcgacgaagcgtcaataacatgaggtcgcaccagtgcgtgtagtaggtggagagggat

SEQ ID NO: 2897 - DNA, 295 bp, Zea Mays
gccatcttcttgacttcggtactgacgtcatctggcgcgtagcgggctaactccgtgaacttgtgcacatattcactgacagatcttccgtcttgagtcagttctcggaactcgtcttccttaagctgaacgagcccctggggcacatggtgctcccggaaagccgcttcaaactccgcccaggtagcatctctgatggtgacgttgaaggtatcccaccaggctaaggccatcccggaaagttgatggcggccagttgaacatgctgattttctggacatccgatggcttccag

SEQ ID NO: 2898 - DNA, 552 bp, Zea Mays
aacgtggtaaaggggtggtcgtcatgacaccactcagcgtgggcggcttgatgggtcgtgaaatggcctgccacgctatcacgctgggggtggtgtggtggcttggttaaccgcctcacccattgctaggcatcctctacggtgtgccccaatggcgcttagtcccagacagtgagaacctgcaaggcacacaatcttttttgctcgatacacaatgtagcccttagttgaaggggtggatcctctggtgctctttgggtggccccacttttcaggcgtcacccctgtcccctacataagtagagagggtgagtgctcaggattggtttcgcttatggtattcttgcactcgagcccttgcttcctttgtcccctagcagcctctagctgcttgtgctttcttgttgtgcctcttcgcctccttgtacccgtccatctttgccactacatgcatggcgttgttccctgcttccctgatccgggagagtcatctccttagtctagagaagaaagggttcatccccttgagagaggcgccagggtggaggttgg

SEQ ID NO: 2899 - DNA, 792 bp, Zea Mays
caaaggatggcgcttggagtggtttattgtggagaatcatggcaagtccctgccccctcggtcagggagaaaaccggatgttcatgctccaagttggactgaatcccccacagacttggagatagctgaggccagggttctgcttgccgaagttggtttgttgaaggagagaggtctgactgctgaagctgtagttgcagactttgtttttaagaacattcagccactgaaggacagagcatacctggcttatttgtatagtggtgtcactgactcaacccgggttgccaacaggaggattcctgctatggatttggtaagccgactagagatgatccttagaggcaaagtgtcaaatattggtgctccttcctggaatctgccaccttccaagacttttttctgttttgtgtccaatcctcctgctagcgatagtggcctgggtcttagagtgcgaccctctcccgaagaagtcgaggctctggttgcttcacttggtgatctccccaacgatgaaaggcaagttcactttgaaatgcttataaactcgagtgatgcagagataagtgctatgctggacatgatggctgaggattcatctgactccgtccctgctaaaaccatagctattgcaactgtccccgagcctgaaaagaccttgactactcaaaaatctgatggtgctcgcccaaagcgccttcgcccggccagtcatccaactgctcctgccgagcgaaagaagaagaaaaagaggaggcttcgacgagtgtcatgtttgattcaggatgccgg

SEQ ID NO: 2900 - DNA, 830 bp, Zea Mays
ggagaggtgaacgccaaagtgaccggccggagcggagaggtaccaacagggggtccagacaaaatcgatggcaccactggagcgtgaagcggaggaggtggagcagactgaaccggaggtactgagataccagaatgctgaagcataagagccatgaatgccctactctcagcctgatcctgaagaagctgctgctgaagcgcatcctgcctgtcctgcatgttctgaaacatcaagagcaccctatcggataaacgggcctgctcggctgccaggtgagcctgctgctgagtgagagtctagagaatcgaagcaagagcagggtccatagcctgaggatgaggaggggcagcactagaactcccagcctcatgatcatgtgagcgtggaggcataggaggcggaggcggaggaggaatcccaaaatcatcatcatcatcatcatcatcagctgttgtaccctgagtgtcaaactgtcgaagagctgcatcctcggcttgagaatcaaacacaggagcagaagctggcacaggaatctcaggcgcaggacggtaggatccaaaaacgaggcgtgaggcctcaagagtgctctgaaatcgagggggctgaaccagctgcgcaaagatgtggcacaagtagtgagcataaggcaactgacgacgagcacgaatcccatccagaacggtgtcctcgatctcacaaatcaggaagtccacaacgtcaaactcagagtgggagaccagggcaccaaggagccaaagctgaatatgagtggtagcctccctgtatcccatcctcggcagaagagtccgtctgatgagctcgtatag

SEQ ID NO: 2901 - DNA, 272 bp, Zea Mays
cggtgcaacggctcaacgattgtaattctaagtgtgccacggttactaccacacagtagcgagccacgacatggcataaccgaggtcaccggaatttccacggcaacaccggcggtccggccacgtcgcacggctacaggcgcggtgataagcttccgccgcgaccaaatccgctcccccgcgagatcattttacctccccgtggatatccactgcgtgccaagcatgaatcacgacgaccggcgcgaatccgagcgcaagatcaccggcag

SEQ ID NO: 2902 - DNA, 292 bp, Zea Mays
gacactgccctggtaaaagccacgatagcgctcgtgccagtgacttcccctctctccggccgccagcacacttccttcaaattggacgccaccgccgtaggactctataaattgctgcccccatgagctccgctaggtaattatgcatccaaagcaccagctcttgcctccgatcgtccaccagagtctcccaatttcccatttcccccaaatcggtcagaacgccgccgcgagacatctcgccgtggccagatgtctacgggttagttcatgcccttccgtgtgatgttct

SEQ ID NO: 2903 - DNA, 581 bp, Zea Mays
tccgtcatctctccgcgaccagcgttctgcgcgtcaaatcctcctggtatgatggctctatcaagttcgcagtgatccccttatcgcgtagaagtgagcggattggagaatagggcattcgttcgccggtttcgggcctctccgccgagtttcgccgcggcctggtggcggcgtcgtcgtgcgcatctgcctagttggggcgataaccgtgcgccctcggatcattggcggacggcgcagattagatattaggatggcatttcgcccaagttgcgtgacccgttcgattccaatctcatgtctatgggtcgatcgtgatcacttaatggtctgggtcgttgatctggcatcctgcgtctgcgggtgagtgtgggagagagtgatggaccaaactaatccgggccggtcatcgatgatccaacggcggagaaccatcgataccctttcgctatgcaaaacttgcataagagcccctggaatatctataaaccaaccccccgtccaccagtactgttccctgagtctaggttattttgcgccagtgcccctgtctttcccagaaattgaggcccagttcagag

SEQ ID NO: 2904 - DNA, 1217 bp, Zea Mays
cagacctgaagttggtctgtcagtcgagtacaactctgaaactggattgacagtgaactaggaccaagtttgagagctattttgagtatgatttagtgagaattgaagtatggtggttatagcaagattaaatctggattataggaccacaactttgttaaaggtggattagcaagttatcacatgaaaattggagatctgggcactgcaaaacgctctatcaggtgctctgaatgtcattttgatggtacaatacacagaaagatctcaggttcagccccccctcgccgtcgatgacctctacgcaaggattcgcgctgatcgcgatgattcatgcaggactcaggcaggatagtgccgggagggtgaaaagatcagaaggggagtggatttggtcgcggagtgaagcttatcaaccacgcctggagccgtgcaacatggccagaccgccggtgtcgccgtggtactccggcgacctcatttacgccacgtcgtagctcgttaccacatggtagtaaccgtggcatgcctagactcaccactttagaaccgttgcactggcgagcgccacgactgacccactagtgacctcccctctctccgaccgccagcacgccatcccaaaattaggagccaccgctcttggatactataaattgagcacaccgctagctctgataggtaatcacgaagctagaacacccgctcctgcctccgattagccaccatagctctctaattactcttttcccccaaatcggttttccgcacgccgtgaaccaccgcgtcgtggccagccttctgcaggttagctcaagcctccttgattgatgttctagcctccctcatgtcccctattgctcacagaaccatccgattgaactagatcgtcttgaatcacccagaacacgttgagttatctccggtttccatcgtcaccatggacagagtgattgtgagctagaactttgtaattgagtgaggggttattgtcgttaggggtagaattaggtgttagccacaccagagcaccggtcattgcgttttccgaccggtacaggctcgccggagccagtgctccaccgtcgtggtcagggatctcgacttgtgaagaaatagaaaagggaagggtctatctgcgattgtcactaacacaaggaaatagtgttacgaactctttaagggtttctcaaatcaccagggtcctctgcgcaaag

SEQ ID NO: 2905 - DNA, 849 bp, Zea Mays
gggggctgggtcatagtttgcgctacccacgtgagtcggatcatctccggcagtaccctcgggggctaggcagtagcttgcacttcccacccgagccgagtcaccctcggcaacaccctcgggggctgggtaagcgtcaacaccatccttgagggccaggttctctgcagtagccgcctctaaggctgaaagcccctcagttacttccatgggaccgagatgatccaagtcagtctcctgaccctcaagaccgcgctctaaggtcgatgaggcgcgggatgacctcaacccagcatcgagcacatcagcacaaacctctatcacaccataatccgctggctctgataaaaggtcctctggaaccatatcctctagagtctgatcaaagtttgccagagataactcctgtagaccaacgagagctgacagagccggagaaggaaccccactactttccccactgacaatatactgccgactgttcttccgagtcagagggacctcatcttcttcctccctgtcgttttcatcagaaacataggcaacacacccattgggatcagcatcggatggagcacccccattgggatcggcagcagatggagcacccccattggggtcaacgtcagtaaattcaggcacaggcacttcttcagcagcaggaaccaaagtaccaacgtcccgatccaaactaaatactcgccggaggcgtctctttttctttttctgctcatcagcagaaggatcaagttgattggctcggcaagggcgtctcgggcgagcactggcaggcttctgaatatccaaggttgtaccagcttctgggagaggcgccaccaccaatgtccc

SEQ ID NO: 2906 - DNA, 584 bp, Zea Mays
ctctaggtcacaaagtcaccatcatccaggtctgggagttctgacggccacccagctcatccacggcgtcgccccgctgctccaccatggcgccgcccccctgctccttcctccacgcccaaccctgctccaccacgatgccctcgcagtgtttccaggcctgcgcatgctcagcctctgacaacgcgctcaccgacgtgttcctcaacgtgtctacgctcatcatgctcaagatgctctagctgttgtggaaccgactgtccggtgccatccccgagggcacattcgagcccatgtgcagcctccgcaagctgcacctcacctccaacaggttctccagcaccgtcccagagtcgatcaccttgtcacgactgctggagctatcgctcgccaacaaccgcttcaagggcctgctgccggacttctccctgccggagctcaggttcgtcgatgtctccaacctctccaaacccatttcagtagggctcagccgcttcaatgaaagcatgtttgcaggtagcagaacgatcgattcatccatcgatttatcaatttatgaaccattgctttgtttgtaagaaact

SEQ ID NO: 2907 - DNA, 1049 bp, Zea Mays
ccggctttatcctttaaattcgggtgtgacacagtcgaaccccgcggcacagagcctagggtcgggcatggcgaaacctaacaagggaggccgagcatgttggaagggaaccactcaagtggatcctatgctcggccgcagactaactggccataagtagcctaccgcacttaaccacgcctagcaccaagccacagcgtggcgctggcccgcttcccactcattacctacgagcacctcgggccacatagcacttatgacctacgaagccctcagactacgacgcatcaatggcccatgcacccctcgccctatgacacacttatggtctatcaaactagacctgagtgcgtagacctcctgcagggcactacacgacgggttgcatcgtgccccaggctacagaggccaagggtcggcgtagccataatgatggcgcctaggaccatcgccacccccacatcatccgccatggtaaatacaagacagataggaaaccatgggccccacgagtacaggtggtgccacccagggtaaaacgctagttttacccttgccttgcgactccttcctaggaaagccattgttggccgacccttctcctagcctataaaagggggaggctggcctgagggcaaaagggaaagaagagagatcggacatgaccgaaaggagagagtttttaggcaatcggacgccttcagacggacacgaacccacaaggacaaacaggaggaggaggagcgccaacgagcaccaagagctagagccccgccaagccaagacttagctaggactccatctagcatcttctaagctccaattccaccccgataaagagacttgggagcctctcctcccactctcgaccgcttgtaacccctacaagagtttgatcatcaatggttccggtagagcaagccaccgatgacttgaattagggacgttctgctcgaaccagtattaatcttatgccctatatgcacaccttccagagcccgaaacacgcacaataaattttcttgttggagcgaggtacgaaccactaa

SEQ ID NO: 2908 - DNA, 525 bp, Zea Mays
atctggattcctgcatgttcctgattacacagctgatcaagaggtcgtctggctacgaaccttgggaatgaccctgcagagtagtaatcgtctggcacagcattatagacagtcaatgcaaggctgggctagcgaatcacttcctgcattggctgaaaccctgagcgagaggcagaatagtctgcacgcatactcggaggcccggcgcagaccgtaaagcagtacctctgttgaccagcagcgtatgcctctttactgtgaaggcacgcataggccgttgagaatttctagcggataaaatgctattgaaaaacaggtataagcagagcacttttggaagattcatccactgcatggtttcgttctgctctttgcgttacgttcggagacagtagtccatactcgtattggtcaggaacaaagagctaggggtggtatcatctagatcactgaacttgtatgctaacattagtccgaacaagttctcttatcctgttaccccggccgcatctctcctgagcttcc

SEQ ID NO: 2909 - DNA, 409 bp, Zea Mays
aaataaattatacggggtcccgttgcaattaacactagagcaggagcaggtattttttattgcatacagtataatattattgttgcaaccacccaccatacaagttgcaattttgcccatacacatcactctgtgctttcaatcacttttttaaatttgtatgcaggatcaggaactacttcaaatgtaccggaagaccaatttggaggaggtgatagtgaagaaatccagttggatctcagtggtggagatcttgatgacagcagagattttatgagaaccccattgtgtggtcatgacattgatctgcaagagggaaatttgaatagaagtaagcctacctatgtcttccatgcttaaaaaatgttttctctcatcttgattatttccattttttcatttatatttt

SEQ ID NO: 2910 - DNA, 528 bp, Zea Mays
ccatgatgtagtaacaaaagaatgtgtggcaccagtatcaaatagtacttttgctggatgggattcgactgaaaacatatctacttccacatttggtgcatcctggattgctttgacctccaagtggttcacctttccatggttgtaggcctggccacgacctcctgatgcctgatgttgtgctctttgtcttgttggggtgttggaagctgattgttgttgaactgctttcttcgggcattgcatcacccagtgaccttgctcttcacaatggaagcatcatcggactcctccttgcgctagggctatctggttgctctgtttggttattggggtaggaaggcgaggtgcctgactactctgcatctgatactgatttcctcccggttggttgtgttgttggtactgctgctgctcctgagggaactgcctctagaattgttgttgatgtgggcgctggtttaggtcctgatatcgctgagggtgattctgcttgaactgctgggatgggttgcctgagaaatgggg

SEQ ID NO: 2911 - DNA, 770 bp, Zea Mays
gtgagggtcgcgtcctctttggcggcgattccgttccagcgacctagcttactcgtctacctcggtgtcgacatcatcccatgacgcagttgtgcttctcgacacggaactcctcctgccgtcgggatcggaacaggaccgggacggtccttgacgggaggtgtgcgaggtacaaacaaccaactcgattcattctgttcgcgatggaagagtggaggaaggaggatgcagggcattgggatagggtgatgaaccggttgaatcgtttgattcagaagttggaagtggtggatgacgtccagtaaacaatcccgattcagtcgaggttagcaacagaggtggcaacagaatggactgtgttggcacgccaaatgaaggaaaccaaggctagggatatggagatgtggcctgaggaacagggttggttggatccacggcctagtgaacgaggatgtcagtgtgggcttgctgcatcgggtgttggaggtatggccccctttggtgttcgatgaaatgcctcacaacagcagcgagactgtggttgtcctgttccctgaagattcagattccttggtgttcagtgaagtgggcctaaaagtggtatgggatgaggagatgcattctgaaactcacatgcatgaaggtttattgaagcggcttgctcgaggtggagaagatttagaagaatcggctagcaaggatgatcatgttgaagttaaagctagtaggcctgacccaccaagtgaggcaactgtggtagttaagaatgg

SEQ ID NO: 2912 - DNA, 449 bp, Zea Mays
gaaacagagaagtcgatttagctaggactagcacgatataaagtaatttgagcagtaacttcaacttatattgaaaacatttgcaaattgcaattcaagttccaaggcatcctatccttcctcaacacgccccaaggcaagctagtcccttgcaacctctcaacccataatacctaaacatagcaacctctctctctccaccctgattgcgcgggaacaacgacgctggaatgttaggcgcatctcgtagcaccaccaacagcacggcgtcgagatgagcggtggtggcgacggcggcgacaaggaggccttcttccactgcctggaccgcgtgccttccggcctgcacctcgacgccgatttcccttccgatgacgaagaagacgacgaggatgacgtccgcgtctccttcacctctgccgccggcgaccagcatttcaagagcttcc

SEQ ID NO: 2913 - DNA, 330 bp, Zea Mays
gtatggcggctagggcgaaacagtgtctcgagcacatcctcaacgcgatatttcttaccccgagcagttatctgcatttcaccgagcacgaatcgcaacgacgacgacgatcacggcgcgggatcaccggggcaatacactgaatctggcgatcttcgtcagttcactgtaccattagaacactattcagagcacctgacagagcggtttacagcgcccagatctccaattttcatgtgataacttgctaatccacctttaacaaagttgtggtcccataattcagctttaatcatgctatagccaccatacttcaattctcactaaatc

SEQ ID NO: 2914 - DNA, 509 bp, Zea Mays
atgaggagcagcatgggaagattgtggaggttatgatggatgtaaaggtactaaagtttgaggaggcggagatggttggggatgagatgacgacggcgttggtggatcaaccaattcgacatcccttcgaggccaaaggatgaaattttttatggcttgtccaagtgtctcgattccttccggcccagggatgtctacatgtcatcctcagatccttggacgaccatcgtaacttctaccctgcaataatcatctggtatgtcgcttccatgaaacttacgtcctaggatcgcaatgcctgttcctactttcttcgtgcaattattgttaatgtcatatcttataaccagtgtgcacgtcactagccttgttatgtcagaaggaccttaataacttcaatagcatgggcttaactaaatatggatgacaacaagtgtatcgcagcttcagagagcagactggtcttgattatgacaacaaaaaactgcaaaacaaattgaacttgctcc

SEQ ID NO: 2915 - DNA, 345 bp, Zea Mays
taactgacgaaccagattagaatagccataccccttcgtgcaacgcgatctgtgccgttgatccatgatcgggtgaacgggagcagatttagtcacttaaaatctatacccttggtgcgggatccgacggaccacgttgttcatcgtttcaggatgacgatcggcctaatctgggtcgtccaatgaggatccgatggccagatttcttggataccccttcgcaggacgccttttccttataagcccctgatatttattagaatcaacccgccgtccaattgaggggcgccctgtgtctcaagaatatttataccagaccccctgtgttttgatttaattgaagct

SEQ ID NO: 2916 - DNA, 528 bp, Zea Mays
ggacttgagagatagaatgtatatgaatcctgccattgcaatcatgcaccagcgctgtagacattttagagcagagctttgtctatggctagggtgatctcctcgtaccctttctcacctcagccaagcctccgcttgtttcagcttaaatatggattttagccactagaagtcgttgtggattgccaaatatccaacttctcgtgggatgccagccgtccgatcggttgcacacggtcaggattagattccatctatctctaactggtacactacgcagactctaggatcaagatccaatggccacggttttaaatagcacagattgcaaggcgtccgtttgatcaccatccaacggaccagatccaatccacgaaacggtgtgctaacatctaatctagtgcgtccatgcaaatcgaactgtcatcgctccgtttgaacccgattgaatcatgcccgctaatatccgatccaacggccaccgccctcaaccttaccccgtacagactgcacgacagcgctccccgg

SEQ ID NO: 2917 - DNA, 305 bp, Zea Mays
cactgttagactagggttaagaaaaatcagagaggtactaaaccactacctagcctgtttaaaaataataaacccctcagtacaccagattagggaaaggtttaccatttaaacttactttgactcaaagttaaagaaaatagaaaagggagtttaaaatgagaaccagggggcaaccacatttttgctagctcacttatttcacctagttcactgaaaaattttgttagaccctctgttagtacaaaagaaatgcactaccttttattttatgaaaacaatgaaaacttagaaaaaccttagaa

SEQ ID NO: 2918 - DNA, 731 bp, Zea Mays
cttgggccttggatcttaaataaagaatttacggaggttgtctatgttccatgaatgctctatgtcttcgtcggatgatgtttttagcctgtaagtgtttggggatgcctttgtcttgactatgtatggcccttcccacttcggctctagcttgccccggaactctattctggtggtccttatgagtactaagtccccttcgttgaattctcttgggacgatattgttgtcacgccatgccttagtctgagcttgatacttgtttagggcctgcaaggcgaggacacggtctccatcattgagatctttagaggttggttcatcgatgtcggggagggctaattggtttgttcggggggatccgtgctttagctcttgcggtgtcattgctttgaatccgtacattaggcggaaaggtgtgaacccggttgctcggcattctgttgtgtttagcgcccatatgacttcgggtaattggtctgcccatttgccctttttgtcgtcgaggagccttttcttgatagcgctgaagatcttgccgttggctcgttcgacgacactgttggattgtgggtggtagacagaggtgaacactgcctaggtaccgatggaactgcagaattcccagaaatcctggttgtcaaactgtttgctattgtcgattgttggctcggacgggacttcgaaccggcagacgatgttttgctagaagaatttttgcgcagtcttcg

SEQ ID NO: 2919 - DNA, 777 bp, Zea Mays
ggtgcctctcagaaggagaaataaacagttaccgcctgattttatccctcgccgaagtagcagattggcaaagcggaggaccccaaatgatgcaaccaggcagatccaaattgacttactaagaacaatggatattgttgatgcggatgaggcattcagcgatgaagctcttgaaaaatatggcaggctgttcaactcccccctgtctgaatcccatattaaagccttggctgctttgttcggatggtcagtgcctgtcgatatccatcttcaggatgtccaggtgttgcctgctgacctaggtccagaggatataatgtaagccatcacccatggttatgtagttcttgttgcccttgtttcctatggatccatcaaaaattcttttttggaatgttagaggtttgaatagaaaagtcagaagggatgtagttcgtgctatggtcaatagtacttgtcctgacgtggtatgtttacaagaaacaaagaagagttctatctctcgtttcatggttacgtctctcctgggagttgttttgatgaatttgtaacgctcccggcagttggcactaggggggaattttattggcctggaaaagtacttcgtgcaaggttattcaatatagaattgacaccttttcagtctcagctcagttccagcatagcgatggcactccctagtggctcactggagtttatggcccccaattggataacctcaagattctattcctgcaggaattgcaactgattcgtaatttgtgcaatggcccgtgg

SEQ ID NO: 2920 - DNA, 1041 bp, Zea Mays
ccggcgcgatcccgcaggcgctggccaactcctccatgctcgagtggatcgacttggagtccaactacctggccggggagctgccgtcgcaggtgttcggcaggctgccgcggctccagtacctctacctctcgtacaacaacctctccagccacggtggcaacaccgacctcgaccccttcttccgctccctgagcaactgcactcgcctgcaggagctcgagctcgccgggaacggcctcggcgggcggctgccgccgttcgacggtgggctcccgcatggactccggcagctccacctcgaggacaacgctatctcgggctccatcccgcgcaacatctccggcctcgtcaacctcacgtacctcaacctctctaacaacctcctcaacggctccatcccgccggagatgtcgcagatgcgcctgctcgagcggctgtacctgtcgaacaatctcctctccggcgagatcccgagatccatcggcgagataccgcacctcggcctcgtcgatttctccggcaaccgcctcgctggagcgatcccggacacgctctccaacctgacgcagctcaggcggctaatgctgcaccacaaccagctctccggcgccatcccccccagcctcggagattgcctgaacctggagatcctagacctctcctacaatggcttgcaaggcccgatcccggcgtacgtcgctgccctgagcagcctcaagctctacctgaacctgtcgaacaaccgcctcgaggggcctctccctctcgagctcagcaagatggacatgatcctggcgctcgatctgtccgcgaacaggctcgccggcacgatcccgtcgcagctcggcagctgcgtcgcgctcgagtacctcaacctctcgggcaacacgctgcgcggcgcgctcccgccgtccgtggcggcgctgccgttcctgcaggtgctcgacgtttcgcgcaacgccctgtccggacccctgcccgcgtcgctgctggtgtccacgtcgctccgggacgccaacttctcgtacaacaacttct

SEQ ID NO: 2921 - DNA, 795 bp, Zea Mays
ataaactctttaattttttagggaaactatcctatcatatttagtacatgggtggatagtaaggtaggaaaataaaccatcgcagataattatattaaatgtaggatagaagtcatccatttatcatggtgatctacatcatcaagtcctatatgtggtttctatatttgggtcatattattcataatattctctataaaaccatgctaggtggagagtcagatactaccatgcggtatgaaaatggtttgtccaaataatctgtgtcgtacactcagaaattcctggtcacatcactgaaagctctatataaatatcaccagattaatcaaatctagttgatttcgagacaagctaaatgtctctatttttactgtcaatcatattgacaattgtgtgacatagagccataacagtatatccaattcagatttcttgactttctcaatctaaaagatacatgtattgttatccctacggtgattctagtcagtagagatatgcgactataccggcaattacctcatttgtcctaagtggtgctataaccaaagaaaaatagatgcaatatactaggagtatcacctatatgcaaataatctagatcaaaaattgtgcatgacctagctctggtaccactaatgtaaatcatgcacgatacacactagcatatctaccatgtttaaccaagattgcatgtaactacagaatcatgcatttctactactagacgcgcaacacagtggaaggacacattgatgtagtggaagtcctcgaatgtccttgcgtaccaac

SEQ ID NO: 2922 - DNA, 807 bp, Zea Mays
ggactctgctacaactgcgacgagccatacgtccacgaccacgcctgtcaatgcctcttctacttggagtcggccgacttcattgacaacgatatcccgaccaacatctctgctgcaacatgtactgatccgggtggatgaactttcgtcgcctctatcccgacttccagctcgtcctctcgagctgtttgtgcagacggggagagatgttatggttgggcaccactataggcaccgaccacaagtcacgggcgggcagagagattagatagggcttatctaatagaagagcgattatctcaggttagttagatatagatgagagattatctcaagttagttggatatggattagaagagatctcagatctcttatccttagatcaagataagcattggcagggatataaatacttgtaagtggtcgtctaatggaatcaagcagaagcaaccattgttgctacctgcgcccagcagcccctctcgcctcctctctgttctgtgcagcacccagcagtacctgcgcccagcagcccctgcctcctctctgttctgcaccaggaacgccccattcacggtgtcccgacgccgggatctccagcccactccatcatctcacccctattctctacgagacatccccggtaggatccacaatcctatcaataggcttcacttgtatatcccacactcttgttcgaaggagaccttactcacttgtataatccccttgtgccctgattaggcgtagtgtggttccgctattgtaatctaaaccttctttcctccttaattgaatggcataac

SEQ ID NO: 2923 - DNA, 425 bp, Zea Mays
gcaactttgaaaggagttacttacgtcccatggccatcactatcagatggtgaagcaagatcctgagatgcgttgaagactcctctagttattgcagatgctgcaaaatgctgagcccccacgagctttctattgcaagatccagatggaaaatcatttgtaacctcacaaatgccagagtagtgagcaggtactggataactatcagtcgatagatcatctgcaaagctagggtgggttggatctattcctgtgtcgatgaggccaatgacaacaccctgtcccgcgaattgtggaccaccttcttgaacccaggctccttgtggcagtccaagaaattcaggggtatgagttgttgctgtcctaactgagtaatccagcatcacattcgctacttcttttctcccggatagcttgtctgcctt

SEQ ID NO: 2924 - DNA, 474 bp, Zea Mays
aggcggaggctcgacggttgaaggagacctgtgtgacggcgacttggacgaaagggaggcctggccgctatggctatcaggacggaagagagatacgacgtagacaggcctggccccgatggcgatgcggcacaacaacggagggatggtgcagggacggcggcgcttgaaaaaaacgaataggaagggagattaaccctaaccttaacctgctttggtaccatgttactaacattcctttagtccttaggacttggtagaatatataggcacatgtaatatgggccacataagccttaacagaaactagttttccatatgctcaattggacactacaagtacttaaggttgtcagatgttcaaactacagatacaataaccctcaactggtataaatgaaatttgacatgcacaaagtagttgatatcatgatgtttagtatttgtaacttggtaagctgcaaatagacatct

SEQ ID NO: 2925 - DNA, 419 bp, Zea Mays
cgaagcttttgaggagattttgagtgatcaaggggacgtctgcgcattctcgggcgcaagaggagttgcagctgtcctggagaaggcggggtgcgatcatgttaaaacttggcccttgctgaagctgatttctccgtggacgacacgaaggatccctcggccgaggcaagttttatgggcagaaagttcttcactgatatctgggaaaacggcagccgagaaatgactcataaaataatgaagaagagcgaaaaagatatccacgactctcgagaagtagcgaagaaagctgagaaagctgtagaacttgagaaacggataggtattgcttattggcttgtagcttcgtcgtttgtttttcgagacttcgaactaattgattttttctatcgcagctgagctacctcctccactggagc

SEQ ID NO: 2926 - DNA, 605 bp, Zea Mays
ggttaatctttgaaaacatagcagaagctgaggctactagactgaaggatgtcgatgtactagaagaagaacgattgaatacggtgattcagtcggtccggtatcagcaaactctgaggcgctatcatgacaaggccatacggtctcaatccttcgcagtgggagacctcgtccttcgccgaattctaacgggggagggacgacacaaattgtcgccactatgggaagggccattcatagtagcagaagtcactcggcctggatcgtatcgccttactcaaatggacgacacggaggttgggaactcatggaatatagaacatctcaggaagttttacccctagctatatttcaaaagctattgagatggcattgtattctgtaaactaggaaatatgtcatcaataaagagacttcaaaggcactcaaattgtttactatcaatccgcattcttacttaacttagggtgaccactataccctactaacggagcaatcggtttaagtcggcgacgacttaaggcggtgtgacatgctcatgcttacttaactcagggtgaccactataccctgctaacggagcaatctgcttaagtcggcaatga

SEQ ID NO: 2927 - DNA, 546 bp, Zea Mays
tataataatgcttaatttagtgtcttagtcttagtcagtcttagttagagttagtttgcttatcatatgttttgatgcttgtcgtgatgaacttataatgaagttggatctttgtaatgattggcaccaaggtgtgggcatcccctgcaacttggtgtagttattaataaagtctgtcatttagttgggaaacccaattatttccacttccctctttatctgagaagctgtgttggctgtgttgagagtcagtgaagatgatcaatggttcagttctatgaagattttcatatatcttcccttatgctgaaagactatggagttagatctgatatgtgtgtgctttctatagatgtctgagaacaaacacagaggtggaagacgtgctcagcaggagcaacaggcaccccaggaggaggcagctcagcagcagttgccaccgccacccccgatgaccattgagcagatgttcctgctgcaaacccaagcaatccaagcaattggccagactttagcagcaatgcagtaggtgcagcagcagtaacc

SEQ ID NO: 2928 - DNA, 1153 bp, Zea Mays
aaacaagtgtgttctggcaaacaagtgtgtatctggcaaagatctgttcttacattttgcggatcaaagaacagatatacaattccagtttagactgaagcagttttagttggtagaaatcctgtagcacttacaagtgtgttctggcaaagatatgttctttgttaaattatcagccgacttgtagtatctggcaaagatctgttatttgatatcaaagaacagatatacatgtgttcttgtattaacagaaatcttgtagcacttacaagtgtgttctggcaaagatcagttttttgttaaattatcagccgacttgtatttctactagtaaggtataggcagtagcacttacaagtgtgtcctatattacttgcatccagttatacatgtgcccaccaaacacgtgcccaccaaatcctggctagttacgtgcagtcaaccaaacaaccacacaaattattacttgcatccactaatacaggcttggcttggcctgcatgagcttatgaaccaggctctgcctagcatcggaaccaaacacatggacagagactgagctttgatcgagccaggacgcaggacgccgggtcgtccgtcgttgacctcggatcggaggacggagggaggagagtcaacgcctgcttgtcggatcggaggacgttcatgaacggaggcacggagctgctgtgctatacaacaaccatccatatcaacaggtgccgccgccgtggttcgccgcactagcaccgcttccattttaaatttcaaaggtggaccgggccggctatgcctactacgctggcttggtttgtcacgaagcggccaaacgtgcatgtcacctcgccgcggcagcggtgcgttcgaatgacgaaaagaacgcggtggggttattatgatggacgcgacgggccaccaacgctgccccggccggggtcttgggtccatcgttctgtttctgttcgatcctgatagtttgttctggcttggtacggtacgggggtggtgcaccggtgcgtgccgcacgcacaccaatcgcgctgactgccggcggtattcgttcaaactcgggaagtcgtcgtcagtcttttggttgggtcagttggtcagcccgcgggccgagatctgctgccgtcgccgcactctgtcattc

SEQ ID NO: 2929 - DNA, 462 bp, Zea Mays
ggcaggtcgggcctgcgcacacgtggtcggagcgcggctgccgcggaaaagatggcgtcgcgttcgcggcgctaggccggcggtcgtagtactgctatcttagcaggcgcggtgtctctcttgtggggtccgctggtcacaggtcgtcttcttcgttgagctgagcagccacgtaccgtacgaacttcttcggcgatagagagatggactgttcggagaaagctgctcggcacctggaagccccatgacacgaccacacggaggttcttcatggggtactgggcagcttgacatcagcggcgcgagtgtagctgctactagtgctagtgctagtgctactgctacctccatctttgaccccccctagctctcgagatttcttgccgtgtgcaggcacgccggccatacgcaaccacaggcctggacgcggcgccgctgccaccgtgaactgccgcacagagt

SEQ ID NO: 2930 - DNA, 366 bp, Zea Mays
taagctctatggcaaactcaacttttcgctcaggtggcatacctggtaaatctttagggaacacatctcgaaattctaacacaatcttgagagcctcgagtggatcggcctctttgctatcaatagccatttggtggcaacctcctttccttggctcgggtgaggctagcttagtcaccacttcttctcctagtggggacaccagcttcattgtcctcttatcacaactgataagtgcttggttcctatctagccaatttatccctaagataacatctattccttgagtacccatcactattaggttagcggggaactctatcccccttatttccacacttacattcaagcatacagtatcggctc

SEQ ID NO: 2931 - DNA, 656 bp, Zea Mays
cgtcgcggtgaatcacggtatgcatgttcggtgatcgctggagggctgccacggtgaaagccactcatcccgagcgccagtacctcttttcccctccagccgccaacacatcctcgtgaaattggacgccaccgccgttggaagctataaattgccgccccgtccgctctgctaggtaattgtgcaaccagtgaatcaacccgtgcctcaaatcctcccctagaactccccaatttgggatttcccccaaatccctcaagaacaccgtgccttgggacctcgccgtggccagtccaattcaggtccgatcctgccctctgctttcttgtttctgcacccttgcttgttcctgatgctcactgacccgttcaattgggctgagctgccgtagatcgccgggaacgcattagaatgtctgttgtccatacggtcaccatggtcagggcgtgttagtgcgccattagtgaaattagttgaggggaaacttcggttaaggcttgaattaggtgccagtcgacggagagtgctggtctttgcgtaatctggtcggtacaagctcgtcggagctctgcacgtcgccgtccaccgtcgtgggcttcggagtgtgaagaattagaagttcaggggtctaaccgtaaactgtcagcgactcaagg

SEQ ID NO: 2932 - DNA, 454 bp, Zea Mays
taatcgatcaacaagacatttatttatccaaagggaatggaatgcaataatttaaaaagctaagcatcgatcggtcatacaacaaaaatcatgacaacaccgacagatactatccactaaccgttgaaaatttaaacttacttctcgcttgccactacatcactcctcaatcacacaaccatcacgagcatccttcacacgattatataatagcgacctaaacatcgtgttacacaatacatacatcttttctcgtcgcgagtataaccacattacggcatatacccgcacacctcaatcaattatcttacaccatcactactacaatacaccacaacacacacgtacatacgtgtccccactgccttctcatgcccaattttagcacaattatttatgacaacgtttatcgactagactagtgaaacactaaccgatcattcgcacatctcgc

SEQ ID NO: 2933 - DNA, 654 bp, Zea Mays
gtcgcggtgagccatgggagacacggccctatctaggagcggtagttggtggcgcagtttggcgctgccgaggccggcgaggatgacgacgctgatgtcggagctcgatcgccgaagacaacactgcatggacgtggcgccattgcggaggcggccaagaactacggtgtgtggatggggtgccggtgtgaaggcgggtgaggacgacgtcgtgtggacggggcaccggcgcggaggcaccgtggcaaccggaggcagggctgcgccgcgttcgagctaaggctgggccggccggtgtggctggcgaacaatggggcaaaggtggcctaggacggcgtgacgtgttttcctgacagctatagcagatttgcgggcgaggacaaggcgaggcagtcacaagcaaagaaaaaacggcggcgttactcataaagactagcttccgagatgtttggcaggtggccgtcggaagttacgcgtgtttgaccgagcttttgaccaagccaccgggagttatgggctgggccatcggaagtgtataacttccgagaggtttaatctgggccatcggaagttaggatttacgttcgagaggcttcaagggccgtcgaaagttagttacttcttacggtttttatctataaccgcaggaagtta

SEQ ID NO: 2934 - DNA, 511 bp, Zea Mays
gtagctgaaatcgatccacatacaccggatcaagatcgcacggaccagatccgatccccatctcccgcaaactggtacgtcacgagttctattggattcaaatctaatggtgctaacacattacgcggagatctaatcttggatgcccatagctcatccaacggttggcgccgcttcttcttccatcgcacataccgaccggtggtaggttcttgccgcggcggcgccctcaacgacgaaccccacaccagagttcgagcaacccttttccctcgcgagcaacgcctaaacgtagctgatagcaatgggattccataggagggtaactcaccagtaatcggcgcccgaagacgtttgcccacagcgcatggtggaatcatgacacagggcggtcgacggcgagaaattagatgtcgtccctccctcggtcttgcctgtgagtgcatccaccgcaagcacgagctcaagcgaaacacatggctccccacaccgacggcgcggcggcgctctc

SEQ ID NO: 2935 - DNA, 347 bp, Zea Mays
attgcgccctgtgttcggcaaatttcaccttcgccggtgctcggtcgtggtggtccaccgtgctcgcgctgtggccagccgatttagcctggtctagttcaccggagtaggtcccagtgtcacccctgcctctactgaagttagccaaggccttagcgcgccttaagtcccgtccccgtggccagaatggctcaccagagttactctggcccacccgaggctttctcaccgccgttctcccctctctgcccgtggattcatggccccttccccgccattgagttcgccgtggcgccctcttcctctatgcccaactttggcgaccccggagccaccctagcccacgc

SEQ ID NO: 2936 - DNA, 662 bp, Zea Mays
ccggtatggtgtatcaactgtgtatcgacatacaagtcaccatagatgctccggtgctgagatccccaagaccagggtcgactggcccctcggggcattggaggcgcacccgggacagttcatggggatgtgcagtcatgttgatagcgacctcccggtgcaccctcggtctgctgcacgtatgtccgatcatagcctaggggtgacgtgtcttgtcataaccagcatgggctcatagcgctgagctttgatctccgcctcatagacttgctcaatagagaatttatcggtcgctccgcctcatagacctgctcggtggggacttggtcggtcgcttcgcctcgctgactttcttagcgggaacttggttggtcgcttcgcctcgtagactagctcgacggggacttagtcgattgctctgtctcgtagacttgcttggcgaggacttggtcagtcgctgctcctcgcagacttggacctgctcgacggggccttggtcggtaaggaggttatgggccctattatgggtacctcatccctaggtatccaacaagtagttttgctgacccccaatcttcatctcttcttggctcaatgtcgtttagatgtgtcttaggtggcctgtcgacttcaggacaaccatagggtcttttctccctaac

SEQ ID NO: 2937 - DNA, 318 bp, Zea Mays
ctggcaaggagccttcaccggacacagtggacacaggtccggcggaggagccctcaacggcttccgagcgcagggccgggtcgacctcagcctcgggcagcaccgggttgacctcggcctcgggccgcgcgtcgttcagatccccaaggtcttcgacatcctcggcacgcgccatctgcagcaacagcacacttattcagcaaacccacacgtacccacattcaaccacatgaaacaaaaaacaagccttacctgctctctcgcccgatcagaccgctccataaccgcctcccggccatgaggaccccacatccgatc

SEQ ID NO: 2938 - DNA, 564 bp, Zea Mays
caagcctcgaccaggatgtaccctcgacgcaacctggctcgaaccaagctagtgtgcgtaaggtcaatactcccaagcggaaagcatatgacaccgacaaccttgccgcttctgatcctaaaagcaagaaaactagcaaaggtaatatactgccttcagtaacattatgacaccagtgtgcacatattcatgctttcttctctgttttatatatatatatatattccttgcagacaaacacagagatcttgacttggccgtggagtctgaacaattatggaatgaggctgaacaagccatcagcttatttcgagcacagacaagtgccactgatgtcattggagagaagccaaattatagcgaatttgatactcggcagcctgtgcatatatctgagcctacagatgttccggcaccacgctttatgcaatatgctcatggggatcttgatcgcttccaacgtcgtatacgcgaacgccccttcaacaaagacattgtgatctcggagatagccgatactatgaaatggtggaaggagtggtttaacccagctccgccaaaaat

SEQ ID NO: 2939 - DNA, 472 bp, Zea Mays
taagacagggactcttttgcattttggcgcggtcaaaggggtacgaggggttttctggccgttagatcgactgcccgcggcatagattagatcggcccatttatcaaccggaattcgctcgcagacgtaggatactgagatcatccctcaaccaccggatcaaaatcggacgcaccagagcgatctggacgaaacggacgaaaccacataccccgagatctacggttcacatgtcaccaccctttggttaaatctcgacggcacatccactgatcaaaggtgcagatctcatggatcaaaccatttactagagatctgatcctagcctttgaccaggggatcaacggtccagagagaccctccagctcccgacgccggcggcgagagcccaccaattccccccacggcggcgccattacagcacatggtccaatgccgccctagcgctccacctccaccgaaaaccttaaat

SEQ ID NO: 2940 - DNA, 1148 bp, Zea Mays
tgaatgttggggtgttgggtggtctccttgtgaatcccttgcttcttagctgcttaacaacataatatgttcatgttccttggtcctccccgcagttgtcataatcagaatcgaaataagaatcaacaaaggatgaggcctttgataccctatttagcctcccaacatccttagtggtccctttgttcttccccttgccacggacgtcatcacaggcataatgggtacaggctgaggagactaaatcagtttcgatcttgacctctgagcgtctggtgggagccctagcttcatcagagctagaaatttgaatgggtgaggaggcaccggcatgagcatccacatcatctgggctatggtcatctaggtcgtcgtccacggtgatggcgcacggcagaggggtgagctattgtgtcctggacctcacggcggtgctgggcttttagacggatagagagtcaaatcgtgtggtgaggtcgtctaggatgtctagtatgctttcgctgtcatcctagttgtcccactccacctcctcttcatccactcgctgagtggcggtggtggtggtggcaagtttgcataggcggcggccggcgagcttgaccttctcgacttgttcttcggcgacagcttttgcgaaggaagaaattagaaccattaagtagattgaagggcgaggaaaaataatgaagcaagaagagacggtcgtacagtacctgggggtggtggcggtggcggattggggctagggttagggttttgggtggggcgctggaggttgcgggtgaagcggaggaggtggtcgttgaggacattcggtgtaggggtggcgatagggagacgacgatccttggggacggcggtgacgggttcatcgatgtcgtcgtcgtcgagatcgccgcagaggtcgaagggagggggagacgccatctagccgcggagacgcccaagaggcaagaggcaaggggacggaatcgtcggttcacacctctctcacttgccgaggagaggaaggagagggcgagaggcaacaacgagcgtgtgtgactctctagtctctacctccaccaacctctttcgccgcggaactacaagtacatagaaggaagtccccgacggcccggaacctcgcgccagtgccatgaccg

SEQ ID NO: 2941 - DNA, 641 bp, Zea Mays
ctattccctaaaaacagaggggttcttttgtgaaataggttctgcgaaggggtatgatctaatacaggccgttggatctgagttccacggtagtgattagatcaggttataggcaaaccggtgtgtaatgtgggtcgtccgatcaaggatcaatggccttgaggtctcctaatctgagtcgttcgatttacgatctacgtataggaatcaagtggcgaggggttttcatcagatctaatccaagtcgttagatgtggatccaacagctcccacgattcttcaacctgccgacgacgtgcacaccgacccagcccccctgacgaacaagcgccccagatccccgcctgttctgagctacaccacgctacagcagaacaaaatcgcaagggaaaaacacttaccgacaatggggtcgacgatgtatagactacggcgctaggtggctcgcggtggcttgatatgtccgccgtgaaattgccctcaatttgccgcaccctgcgcatgattgttaccgaggatcgtcgcaagggggggtcgcgcacgcacccacagcccgaatccggcacccgatcggcgacgtggccgagctaccctggcggtggtggctttgcgcagcaacggcaggggaaggcaccaccatc

SEQ ID NO: 2942 - DNA, 1371 bp, Zea Mays
gtcacatggaccacctccaaaggaacgtccgagcaaggcctaaccgacaagagaacatcctgtgacgaacaatccacctgacaactgacccccaaatcctctgtgagatccaatgccaaaactgaagggtgaccaggcgcctccagctctgcaaccaaaactttcgggagagcgagggcatcaactgatcccaaatacatagccatatacatctccaaatctggagggtaatcaggcgcctccagctcctcaaccgaaacaaccgggagagccggggcatcaactgatcccatcttcaccaaatcctgatcaacagcctgaacagacatgaggttgtcatccacgtgcccagaacgactgcgctgacctagtcgcaaatgaattggaacctgaacggaaggcgtagggcaccccagccgccccacatgatgctcatgatcactatcttcgtcgactaagcccgaatggggtggcaaaggagaatccacaccggaagctgaaattccatcagaatgaagaaccaccatagaaacagggaacaccaacgtgcgaggagcctaactcccgtcctctccaaagataaccggctcttcagcatggagatccaccaccgtcggtagcagctcaggcgatcggcaccagactttcagtctgagaacagacatgtcttcctccccgactgagctaggaaatagtccatgaatcaaacagaaagcaccaagcacagcctcagcagcctcaattccccagagatgtgcaggaattccacgaagctcaacgccaaagggcaccagcggcagcgactgaccacttccaatagcgaaagcctgatgagaccaccttcgaatatgcaacctgagcggaggggcatggagagattgcccccaaccacctaatcagccacgacaactgaggggaagaagacgaggaaagaatttggcgcagcacgacgtatgcagagtgaccctgcttcaaggcaaaacctcgaggcaatcgcatcacgcacctccacggcgtagccagaatcctctcggcctacaacactgacgatcagtgcacgatggagttcctccttagcctgatcaattcttccacaacgctcgacaaagcataccgacctagccaggccgaaggcaggcgaaggaggcaactgtcccccagcgcccgacttcctcttcctctgaccacgatgagttctcttcttcgcaccttcaccagcagcagtaggaccagacccgcccccagccacacccagaccgcagccaatcttctccgaagacttcatagccataggccgccacaccagattgcgtctggggatgggaggggccgtccgccggcgcgggcacacgcccacacggtgccctggca

SEQ ID NO: 2943 - DNA, 429 bp, Zea Mays
cattatcttcgtcgtctgaattaccaggaggtacattataggtgtcacgtggctgcattttgacaaccaagtgccaacctttgatcagattgtctttgacaaaaaagacttgagaagcttggctagctaatacaaatggctcatttgtccgaagtagacatttaaagttgacactaacaagtccataaacatccttctttatccctcttttcttattgaatatgtcaacccacttgcaacgaaataatggcacacgtcttcccccaagaaattgaagctctattatctctgttaatatgccataatattctgcattctcactaattgtacttccctctgccgaaacaacaactccgttgttctgtgtgcaccaatttttgtcacgactctctatgcgaaatctgaatccattcatatcataacctccaa

SEQ ID NO: 2944 - DNA, 750 bp, Zea Mays
ggctcctctcgtggaagttccaccagctgcggtggcggctagagttggccgtcgttctataacccctagaccggcaccatctctatgtggccgggtcaggcccccaacgcctcccgtcattcagctccggtattggctctcctgattacgtcatccgcctacagcatgcctccatatggcgtgccaccttcgacccaggcctgcctcagctcccacctacgggaccgtctaccataacaccatggtcctcatttcgctgcaggttgggagcctgccaccctctcctctgcatacaacattatgacgttggccccactgccttctgaatgggtcatcgactccggtgcatcctatcaccccactcccaccacaggcatgctctctcgctcacacccacctcctcccacacaccctacctcgatcgtcgttggaaatggttctactcttctggtcacctctgtaggtgcctcgatactccctggaccgttctacctcaacgatgttctcgtagcccctcacatcactcacaatctcctttctgtctgtaggttcaccaacgacaattcgtgttccattgagtttgaccctaccggtatttctgtgaaggatctagccactaggacccctctcgcccgatgtgacagcgtcggtccactctacatgctccagccatcgtccaccagcgtgtctccacctcccgtcctggtctccaccaccaccaccaccacttggcatcattgtctcagccac

SEQ ID NO: 2945 - DNA, 2287 bp, Zea Mays
ccggtgcttgcaccaatgctgccttcagagcctcaaaggctttctgagcttcatcattccacacaaaaatttggtccttcttgagcaggttagtaagaggtttgctgattatgccgtagtgagcgacaaatcgacgatagtacccggccatgccgagaaaactcctcacctccttgacgttgttgggaatgtgccagtctcgaataacctgcaccttttctgggtcggtggcaatgccttttgcactgatgaggtgtcccaagaactcaagggtggtctgtgcaaaccgacacttcgatagtttcagtttcagctgatgatcctttagcttctgaaacacttgtttcacctgaaggacatgctcttccatgtctctgctgtagatcaacacatcgtccagaaataccaccacgcacttcctaagaaagggggtcaaaatcttattcatgaaatcctgaaaggtggcaggtgctcttgtcagtccaaagggcatcacacggtactcgtaatgtccgttgtgcgtctggaaagctgttttgaattcatcaccttctttaattcgaatttgatggtacccagacctatgatcaagtttggtgaagatcttagccccacatagctcatccacaatttcatcaaatattggcatagggtacctatttttcaccgtatgggcgttaagacgcctataatccacacataaccgccactctctgtccttcttcttcaccaacaatacaggagaggcaaacgggctcgagctatgttgtatgactccttgctccaacatttcaataatctgcttttcgatctcatttttctgttggggggtgtagcgatacggtcgaagtctgaatggttgggctcccgataacagtggtatcgtgtgatccacttctctgggaggaggcagtccagcaggtttgtcaaacaactcatggtattcttccactaactgagccatttcaaaaggtatgttctgggactggcccttgtcttccacactcaactccaatatgtgttcccaggcctcttgtttaagaatccaatttaactgcaccttggataattgatggcaggtgctcaactttggaaccaccccttgtaagcgtacaactcttgcttcatattcaaactccaaccacttaccaacccagtgtactttcatgggactgtgggcctctagccagtccattcccaaaatgatatcatatccactcaatggcagaaacttgaagtcagtatggaaagtgatccctccacacaaccactggcagtcaggtacaaagtatttgctccgaagacacctcccatcagccacttttacttgaacaggttcgagtaggctctgaactccagtcacctttcccatcagatggtcactcatgaaactcgttgaactgcccgagtctactagaaccagcagctgttggctttgaattaacgcccaaagacgcacggttcggttaccctcacttccattgactgcattcaccgaaatggacaacactgcttccccatcactatcaacgccaccctcagtcactaacttcgtttgttcctcttcttcgcctgtaactgttagagcccacatctcctcaactaggtgtaggggtacggtgttagaacaacggtgtgcatgcccccattttcccccacatttgaagcataaccctttagcccttcgatatgccttgagtgcagttagtttactgtcctccagcctgcttgcagcagcagggtaagcagccctgttagtggtagctgacaacgatgatcccgccattgttgtgcccttctgcagcggcttggaaaattcccctccatcttgcctccgatgttcacggcgtcccgaatgcatcagcacgtcctcctgcaatagggcgagggagcaagcagcatccaagttgtttggtcgttgaataacaacaacagacctaacctcctccttaagaccatctataaacctcgcagtaatcattgctggagtaagttgaccctcatgagccaataattgatgtaatagcacatcgaactgctcaacatactcactcaccgaattggtctgatgtatgtggtaaaattgcctaatcaacatgctatgctgatcacgaccaaatctatcatttagacatccacaaaattcttcccaactcatctctcccaacctattctccactgactgcaaccaaaaagtagcggttcccacaaaattcatgatagccatcctaatccacatccccctagcgactgaataaaaatcaaaatacgtctcacacctctgccg

SEQ ID NO: 2946 - DNA, 550 bp, Zea Mays
ccatgattcactttaccaaaacgatatccaaaatctattctgagtcgttgaacgggagatcaatgcctcccccttcaccaacccctgctaccgaaaacggcggcgacgccatgctcaggtggcggagcatcaccggcgcccacccaaatcggtcccagcgcaccttaataacaccaacaaaaataggtgcagggaataccgctaatacgtgaagtacgaactcaccagtgattggtggtgcgaagtcgcttgccacgacgtggtatggtgtgcccaccaatccagagctccgatgagcaatcgacgatggtttgggaacacctgcgcccccgaatcactccgtacgccttccttgtgtccactgcttcctcttgaatggatcgtcggacgaattctggcagtgtgggcgagcgacgatggttgcggtcgggtgcttctcctatggcagcaacgtgccctctctctgctatggtgatggtgttttctagatgttttggtgtgaccggacgagagggagctctgagatatttatatagtcacaagaaatcgt

SEQ ID NO: 2947 - DNA, 573 bp, Zea Mays
gcatggagagaatgacacaaaccacacgaatcttgacaagctccaaaccattgaaaacaagcttcaaatatgggtaaataacattcgctgccagaaggtaaggtttatacgcttttttatacagacagattgaaatctttatcgaaaagaaaattagtatcttgtatctgcaagtttcgatgtgctgctctcgtatgttgaacagatgcagatcatctctagggaggtcgagatgctcaggaacaaggttagttcagtatttgctgctctgttcctacaagaagctcaggtctagcaatttccgtcgccaatggttctttgcgtttccgttttgcaggaagccacactgcagactgtcaatggcgtgcttcaggaaagagtactgcaaatctgcatgtcctttctttaaagaacactctctgacttaatcttgtgcatgtagataattgagcggaatgggattctgaattagaacaacacggcgatgacaccgcaagcaccgttccagctaactatggagagtaactactgtttgtagacaaagatgccattctatcaatcttacctttcgtt

SEQ ID NO: 2948 - DNA, 628 bp, Zea Mays
gaaagaagtgatcataaacaaagaagtaacaagcaaaagacaaataccttgaagatcaagcaacatatttgctacaattgtcataaaaaaggacacctgtggaaggattgtcccatgggtaactttgctaagcccaacttgtcaatacattcaaatatgcttaggagacccaaatttgactcttttgctagaaaggtgacgagttcaccacattctaggacaaaggctatttgggtgcctaagtccttattggctaaccttgatagacccatcatgaggtgggtaccaaaatataatttaaagaatttgtaggtacccaaagatgatatgaagctttggacatattaggagaggcatcgttgaatacacaatcatttctatggcaccacaaggtccaagcccaaaggatgatcaaagagtaaatccttcttctgatgagactgctaaacaagtctgaaatctactccaccatgtatcaaagagttagttcgaaggctacgacgccatggccgctaaaccaactctttgcagcatggcaaaccaatattgccttgagaagatgcaacccacctataagtggtttatagtttccttctcctggtcacaaagaaggcaaagaggagcatga

SEQ ID NO: 2949 - DNA, 369 bp, Zea Mays
acgagatagagatggttagtggccttccgatgcaaagcatagacgacagatacgtggtggatggctattgtttgaggcatttggttcattaactcatctgtttcttgtagttggatcgtacttaaccaaccctcgtgcatgacacaagacaatactggacaccggtcaactcatgcatggctcatgcatgctgcatcataaatcactgcatggcctctgtttggtaattgttgaggcatgttttcttctctatcagttcattgtgcaatagccagagacatctgtatggttcgatctatccatgaattatgtgttcaatgtgtgtgcctaagacaaaataaaagggcatatgttcagtggaagatgttg

SEQ ID NO: 2950 - DNA, 395 bp, Zea Mays
aggaactcaccgagcactacccccggagcttgttgggcctcttgggcatcgacgtgattcactcgtgcccttccttgatacgtggtcttgttctgctggctgacggaggaggacgccttgggggcggatgccgaggaattcttggggccattcaccgagttggagtaggcgggtccttgcgacttcagctgcggacagttgttcttgaagtgactgggatcaccgcagtgccaacatgcattcgccgggggttggttgcttgcaactgagggggcatggaaagagctctgactatgctggctgaaccgtgacggggtgggtccagctggtctactaaagtttgggatgacgtggctgttggagaggtgtcgctgccctgttcatgtgatgtcgtg

SEQ ID NO: 2951 - DNA, 537 bp, Zea Mays
gcagtgtaaggggcggagcctttcctgtgatggttcgccacgcacagggcgtgagttcattggcctctcgcgtgtgcgtgagcgtatcgactagatgtagacctcgagcccctgaataatgcatgtggaccgctagaaggtttacgcagtttcaggggcgaacccatttctgtgatggttcatcacgcaccgggtgtgagttcatcggcctctcgagtgcgggtgagcgcatcatccacatatgcgtggggaacggatcttcttctggtctttgtgtagatctcctggcctatcgtgcccatgcctcgtctatcggggcagagcgcatgagtaggttgcggcgtaggctaaagcgctaccatgtgtagggatgctcaggcgacgtcgtcttgtcttcttcgcctatcacccttcacctcggtaccccgcatgctacagtgggggccatgatggcagcagcctacgcagtgcagactgcagagagtcaaaggtcccgccttggtaacgtgcgagccactgtgcagcccatgtacttcg

SEQ ID NO: 2952 - DNA, 371 bp, Zea Mays
gcctccgggttaaggacaccttcactcgtcacccgccacgaaaaatgaccccctactcggaaagccaccctgttattgacgaacaaagtcggacacgcaaaataaaaggaagagtacgacttcatgcaataaaagcaaagtgtttaggcctcggcggccacaggaggacgctcgcacatccaacagaaactgatccaacaagagttaggcgtcgccttgggaaggagccgcgccttcagctccgtctccgccttcggtgaggtccatctcggcttccggcgacggcgcaggggggaggatttccgcctcaaaggtggtcgccagcactgtgctcggacccgcggcgaccgcgtcgagccgctggacttccg

SEQ ID NO: 2953 - DNA, 821 bp, Zea Mays
ttttggatcacttggagcgcatatacaattgctgagatgtatgtgtcgacacttgtagcttttaaataacacaattctccagttgacatcaagtcattttcttatgtacccttatgatttctcgtgaaatcccaaaacgagaattaagggttccgataacctagcctcatcagtgcgcactgagctaggttgtgaatgtcttccattcataggataattcatatcctctaggtgtccaccaacgctaagttggttaccaacgaatagttggtttgcatttactagctcataaggtctagccttcagctgcttgcaagcatcttaatcccaatttgtgaccatacttctccccctcttacttacaacatcattgtaatagggagttgagtggtgttccatgtaaccactctttctggcacttccatgtaggattaatttgagtgacacctcatagtaaatgcacatggcagtcaatttgcaacttcttgcaaatcattcgaacctaaaggtttagttttagtacgtgatcctgagcctgaatgcttactgcattcattataatttcctggcattctttttggtacttgatatctcccctaatccatggaaaaactcatgattcaagctagcgcacgggccgtaaatagattctcatgaagagattctaaaacttaatgatcgacggagaatgaattctcacttagatccccagctttttgtgtgcccatacatatacgctgcggtggtgagattgggaacatacccaatgtacgcatgggaaatctttcatggattcccacatactaaaaccataggggaac

SEQ ID NO: 2954 - DNA, 1024 bp, Zea Mays
tgggtcgcagcctgcatcgcccattggagccggatcaccaccggcagcaccctcgggggctgggttgtagctcgcgctacccacccgagccggatcattgccggcaacaccctcgggggctgggtaatcgctggcgccatccttggggatcgggttctctgcagcagccacctctatggctgaaggattctcagtcacctccatgggaatggagcaacctagaccagcttcttgactctgaagaccacactccaaggtcgacgaggcacgagacgctgctcgggataactctaactccacatcaggaatgtcaatgcaaatgtccatcataccaccatctgttggctcggacagcagatcttcaggaaccatatcctcgagagcctggtcaaaattttctatggacaactcttgcagacaaatgagagcagacaaagttggagaaggaatatcactactccccccactgactaggtaatgccgactatttttccgaattaaggggatttcatcctcttcttcctcatcctcgtcaacaatacgaacaacatacccattggggtcagcgtcggccagattgcacccattgggatcagcatcatcaaggtcacacccattggggtcagtgtcagcagggtcacacccattggaatcagctcctgtaaaaagttccactagcacttcttcagcagcaggagcagaagggccgacatcctgattcagtcatgacactcgtcgaagcctcctccttttcttcttcttcccctcggcaggagcagttggatgactggccgggcgaaggcgctttgggcgagcaccatcagatttttgagcagtcaaggtcttttcaggctcggggacagttgcaatagctatggtttcagcagggacgaaattagatgaatcctcagccaacatgtccggcatagcacttatctctgcatcactcgggtttataggcatctcaaagtgaacttgcctttcatcattggggagatcaccaagtgaagcaaccagagcctcg

SEQ ID NO: 2955 - DNA, 371 bp, Zea Mays
gatatctgtcagcattttcttccatatatcttcgagtttatatgactgagatatagaaacccatgcacggcagtcaaagttgaacccttcatttttgtacacattattggcaagagtgctttttccaatgccacccataccccagacagcaatgatttgaagtgatggatcttcaaattttaatgaactaatcaaggtttgcttatttttatcaattcctgcaagctcctcatctctgattgagtaatcgtgtccaggaagatacatttccttttctgtttcatagcttcctgcaggtacatcagtcccgccatccaagggtttagtccagcggtctttactttcagatagttgtataagctcttgcttta

SEQ ID NO: 2956 - DNA, 323 bp, Zea Mays
ccgaacactcagacatcgggcggtgtttcgacggtgaggcatccgccgtcgtgggtgctcgcaccgccgtcgcagcggagggttgggagagaaagtatcatggtcgttcgtccagaagcgggtggcggtgattgagtatggctgagcgcatggtcggattgaatcccagccgctagatcaagatccaacgactgccgtggcataccggttcgctagcaccacgatttaatccaggtcgcctaacgtagatccaatggtcagattaggccagtaccccttcggctctggatttttgctaaagagaccctgaggttaaaagaaat

SEQ ID NO: 2957 - DNA, 316 bp, Zea Mays
tgccgagtgcgggttagagcgagcagaagatttggccttagcatgccaaacaagctcaacaacgtgtaacctttttgactcctggggcttaggtggtcgaccttgtttgtaccagccttctgtactaggccgatcataggtggattccagtgctccggacggtccaacctgtgtagttggacggtctggtactattcccggactgtccgatcgcgccggacatcgtctgcagcctttgtgataggctctgtgtgactatggacggtccggcgtagggtgccgaacggtctgacggaggacggacggtccgagatca

SEQ ID NO: 2958 - DNA, 506 bp, Zea Mays
ctaggctagtggggaagtctatcccttttatttcaattcttagattcagacaaatcctattggactgaacttttcccccaactgaattaacccttaaaggtgggatcattggttctatggggatgttatgtgattctacccaagatacagaaacaaaagaatgagtggcactagtatcaagtagtacttttgctgggtaggatttgactggacacatacctactgccacgtcctgaggatcctggattgctttggcctccaggtggttcaccattccatggttgtaggtctaaccacggactcctggtgcttgctatggtgctccttgtcttgctggggcattggctgctggcggtagctgagctgctttcttgggacagttcttcgcacagtggttttgttctccatagtagaagcatgcacgacctcctacttgtgctggggctacttggccattctggttggttgctggggcaggaagacgagctgcctggttgttctgacac

SEQ ID NO: 2959 - DNA, 618 bp, Zea Mays
attttatatgaattaaagaagttctaacaattatttttacataaaaatcattttataaatgattttacaagttttattcactgactggactggacactaatttcagagaagttcaggggtctaacacataaaacgtcttaagactcagaatcaagccagatggacggcgggttgattcataaaaactttaagggcctctctgcaaaatcgttcggtcgaaggggtatccgcaaacctcggccgttggatcaccagccgagggcacggattagatctggagtgcgccgaaaatggtacgcaatcctggctgtcagatcaaacatcgacggcgcagacacaattaaggcgtggtccgatctacaccgcacatccaccgatctgtggacacgatccgatcccacgaaaaggtactcccaaactaatctctaccgttgaacgagagtcggacgaccctgaggtaaacttcccctgagatctaatcttacccctccgtttaacatccgacggcttagcttcactcgacgcatcagcgtggatggatacgatcttaaccgttgactcatggatctggggccctggcttgttcttcttcctgcgcaccacaggacagcacctagc

SEQ ID NO: 2960 - DNA, 499 bp, Zea Mays
ggaggatagtgaccagagccggatggcctggggtcaccgggagtgggtccctgacccgaatagggaggaggaggatgaggaggatctgaggtgtagtaggggtcatcaaactcctcggcctcatcctccggggtaatgaatggcacaccaaactcctgttggtgccactcattaaggtccatggggaaggtaggggttggaggtggaggggacccgagagggagaggatgacctgtctcggctgcataacgaagaaaatcctcatgcagccggtcagtcatgcgacgacgcatagactcctcgaccgcccgggtgcggcacatggcgaagacgccaagaaggcccttggccagacgaatgaaaagtctctggcctcgaccccgtccctggcccggaccacttcctctcccgctgtggtccatcagacgtgaggcagcggcagagtgagaggaggatgggtgatgtggaggctgaggaggtggctcatcagaggaagcag

SEQ ID NO: 2961 - DNA, 451 bp, Zea Mays
ctctcccccaagtagcttcatcttctccatgatggctccattgcactttgcacatctttataactttatttcttgtaactcgagccaaagtgtcaagaatcttaataggatattccatataagtcaaatcaccctaaacactgagctcttccattggtaactgttcctcagggacacgaagatacttcttaagttgagacacatggaatacattaagcacatcagatagattatcaggtaactcaagttggtatgccatctccccaactcgcctaaagattctgaatggtccaataaagcgaggggacaatttgcccttaactttaaatctcctcattccacgaagtggtgacaccttgaggtacacatggtctccttcctcaaattccagtggtcttcttctattatcagcgtagctcttttgtctggtctgagctaccctcaagttctc

SEQ ID NO: 2962 - DNA, 451 bp, Zea Mays
aaggtgaaggtccttactcaccgaccgcgcttcatcgaaccggccacagtgcccgaatttggtggtgagacctctacggctactgaagccaaagggcctgcccttacacagaagaatgaagagccggctacaacgccgaaggcaccattggccaaattgggtgatccgaaggtcgataatgtgaaagagatagaggtcgagagaacaaagatatcagaagttacaagtccttcggcagaggtgacagtgccgaaggcacaaaaagatcttacagttaccccgaagaggaaaaggatggtccatgtactagatgtactggaggaaataaagactacaagctctactccaagaaaaacagccaaagtttcaaaaacgcgaattgaaacaacacaaactgaagccgaagctgcaaaaagtcatgccgagaccgaagctgggccctcagagcccg

SEQ ID NO: 2963 - DNA, 471 bp, Zea Mays
caaaaagttgctctctgggctcggtatggactacgaaaaaatcgatgtctgtgataataattgtatgtttttttggaaggagacccgcgggtgagaagaagtgtactgtatgtggtgagcgtagattcgttgaggttgaaaacgacgatggtttgaccgttacgacgaatattgcacgtaagcagcttcgttacatgcctcttatacctcggttgaaacgtttgtttatctccaagaatacagccagacacatgaggtggcacaaagaaggggtacgtgagaatccaaatgtcatggcgcacccagctgatacagatgcatggaaggcactagatgcttttgattccagctttgctgatgaagtgcgcaatgtccgcttcggtttggcaacagatggtttctcgcctttcaatctaactgcaacgtcctactcatgttggcccgtctttgctgttccatacaaccttccac

SEQ ID NO: 2964 - DNA, 332 bp, Zea Mays
ggatcattggttctatggggatgttatgtgattctacccaagatgtagaaacaaaagaatgcgtggcaccagtatcaaatagtacttttgctaggtaggattcgactggaaacatacctactgccacgtcctgagcatcctggattgcttcggcctccagatgattcacctttccacggttgtaggcctgaccacggcctcctggtgcttgctgtggcactccttgtcttgctgggacattgactgctggcggctgctgagctgctttcttgggacagttcttcgcccagtgattttgttctccatagtagaagcatgcacgacctcctact

SEQ ID NO: 2965 - DNA, 602 bp, Zea Mays
cggataggaagatatgcacatgatgataaaaaaatctagaggacacaggcaatactttgtacctggtggtggtggttgatgaccaaactgcagtagcagtggatgtgggcggcagatgtcgtcacgtcagtgtcaaagaactagcgctggcagagaggcagggacctagcagcgggggagtggaggagccgaacctagctgtgcagccgtcgaggattaagagccgtagtggctgggacctagcagcgggggaggggaggagccgaacctagctgtgcagccgtcgaggattaagagccgtagtggctgggggatctacgtccctggcggcggctaggcgatctgtgtcctgggcgccggtggctgggggatctgtgtgcctatgtctgtggcggcgcatttggcggcgagacgaggaagaaaccaatttgcgtctgttttttatcgtctggaatacgcggtgaaggaaaaatttggcgccagattaattttcgggagctctcaggagttggaatactctagctaaatatattgataaaatggggtaggatagaaacttgataaatttattaagttcatttcaggagctgttggagagcaga

SEQ ID NO: 2966 - DNA, 490 bp, Zea Mays
cgggcaataagggcgaggacggacctataggtggctggccacggagcgacgtctcacggcggcgcatacaaccgatttgggggggggaaacgaaattctccggctatggtggctaatcagaggcgaggagcagtgctctgtgttcgtaacaaactagcggaacaagccgaggcatcaatttatagagggtgaccatgagtaggacgaatttgaacggagaagtgctcgcggagataacggaatgagtcaccggagttcgctaacgtggcattcactgggcaaagacttacggccgtcactggttatcctacacaacccacgacgacgtggtgaaacggcttgaggagtgacgggaccgaagtaaatggcggcacgacggctgcagtcgtgtggccacgttgccggtcatgtaggtacgaccactgagttgtaacagtgccccaagttcatccccgcatgagatctttcaccgtcagccgttatcctcaca

SEQ ID NO: 2967 - DNA, 950 bp, Zea Mays
gtcctcggtgttctggctaatctaaaatgagcataagcactattttcgggagtcgctgacacttcgcagaaaggccctcgatcttctatctcttcacaggggaaggtcctcgacaacggcgcgcgttgtggagctccggcgagcaccaagaccggccaaacggaacaagggctggttccaagctttggccgaaaccgaatccatgccccaaccattgattcccctaagttaattgcacaaatggctacccaaatgtccctggccacggacgcagcggaagtaatcaatagaaccgtgtgttcccagtgatctacggcggtttagttcaaactaaagggccaaggagtttgaggagagcttagggatgttagaacaagactagagacaacatgatcggacctgatttgcactgaccacggcgaagtgttcttgcggcttgtttgaaccgatttggggaaattgtaaaattcgcgctcgttggggatcaactgagggtaattcttggtggcggggttcttgactaccctacggagctagtggcgcactcaatttataggcgcatcgagtgacggtgaagaattggccgaggggtgctggcggccggagaggggaggcgagctcagtacggggaaaagtggctttcaccgtggcagtggctccggtgatcgtcgggcatgcaaccggtgagtcacggcgatgtggtggcgaggtttggacacgcggcggacatagagacgacacaatggcggtgagcaaggggaggagtaccgcggctgaccggggtggcttccagctcgacggcgacgaagatctttctaccccaaagcgttatccggttaccagcgagcgtgaatcttaacggcggcggcgcgaatcttcgcgcaggaaggtcaccggcggtgaggtcgtcgtgctggcgatctgatctatagcagatcactgtaccatcg

SEQ ID NO: 2968 - DNA, 711 bp, Zea Mays
gggaaatcaaagagcatgaacggacctgtagcacgccggccacggcgagcttacttcgcgcggtgttttggactgatttgggggaaatcccaaattggggttctctggtgaacgatttgggacacgagtgggtgcgctgagtgcttgaataccttgcagggctaagggtacgctcaatttataggattcatgagcggtggcccgtgaatttgagatgtcgtggtggcggtcggagagaaggggggacactggtgcaagcaattggtggctttcatcgtggcgagctcaccggcgatcaccggatatgtgttacccgagctatttgcgacgtggtaagacaccaaggcacgtggcgcacgatcattgagcggctagcacctacgaggatgatcccgaccagctacggttcaagtgggtacggcgggcgcaaaggtgagcgagtccgagctaatccgagcgccaagatttttacccttcaccgttgtccatctgcgctgggcacgaatcaccgcggcgggcgcgaatccgggcgcacgatcgctggcggtgaggcatctgaacctagcgttctgatccggacactgtaccatcacactacctatttagtcggtctattagagcaacttgcagggagatttgttcccaaattcatgtagcgactcgatctgctctcggtatcaaagttgtagctctatgatccagctacaaatc

SEQ ID NO: 2969 - DNA, 498 bp, Zea Mays
ctgggaggcttgatattcccagacctccaagctgaagaggacgacataccttgccccaagccaccaaacagtgcccccctctagcttccttttttcctctccaaagaaagccctttcttattttatcaatagcatctagggcccaatggggtatatcaattgccattgcaagatacacagtcatacctgtaagaacatgttgcactagaattctcctacctgctctggtcatcaaatcagctttccaattagggagttggtcagcaaatctttcaacatatggctgaaactgctgcttggacagcttgtgcaaggatagaggaagacccaagtacttgcaaggaaaagctgcagtttcacaaggtagcaaactttggacttccaatagagtttcctttgagcactgtatggggtagacattagatttttgcgcattattttttagaccagaagcactgccaaagagctgcaatatatctaaagtaatggagatttcat

SEQ ID NO: 2970 - DNA, 552 bp, Zea Mays
catcccctcgccgcataggagagttcggcaccgccccgtcctcgccgcttgaccgcgtccttgcccggtaccgcccccgccgtgaggtctcgtcgtcgtcgctgtgcggcattaatgccggcgttgtgcacctcaccggcgcccaccgagctccgccgctcccattcccttgggcgcctataaaaaggtcgccccgggcacctccttccccgcaccggccttatccaccatcctcctcccctcgcccgagctcaattcgcgaagcgccaccgtcttctccctttccggtgagcccttccccctcttctccctccctctctgttggtccagcgagcgattaagttggcctaccggcttcatcacattgccgcgaacttagaacaccactcccccgccccaatccctcgccctaagctcaccgacggcgatccccaccgcggagctccgccacctccccgcggacagccccctcccggccccctttagccaaattgagcccacccctaggttcgccagcccctccccgtgctaaggcacctccccgttgtccaa

SEQ ID NO: 2971 - DNA, 320 bp, Zea Mays
cagtggcagccggtgcaagaccaccggctctctagtcaaacataggtggggttggctggaaattagcgtgttgtcttccccccactggttatgtggtgcattgccacttgccctatatggttcataggtttgatcgttcctttccggcctactaggtggggccggaaagctttcctaggctctggatcttgaattaatgggctgatgcattgcatagtgtgatgggaagggttgctgggacgggtgaggattcaggtaacaatcctcctcaaaaaggtcatgtgtgcggactatccggacattggcctggactgtccgtg

SEQ ID NO: 2972 - DNA, 581 bp, Zea Mays
cgagttgcttgattgcttctgcggatgcgcttcccccatcctcacccaaaacctaccggcaaaacctacagcccttcgtctcccacacgcactctgccactcatctctaggttgtgtacgatcatcagcgagaggagctccctcgcttatttgtctctgaaacagacatcattgcttcaggtattctccaggttgttgctgatgcagaatctatattttttggtgcttgaatttttatctctttttactaaattgacatttcatctggattgctcttacccaattgctgctttacaaacgactgaggaacaatctgtttattgaaaatacggaggagattcgatacctttgtattatgtaggcttagcatatttatgtgcttcccaagtccaaacaatcacgatcatctgtaattttccccacaaattcttaaattttatgaaccctaaaattcgtggatttgacttgtttataatattatattttgtgcacccccacattaattattgtctcatataaaggtgattttgtatagttagggaatgaagggagattccagcagacaaaatagcttagaggac

SEQ ID NO: 2973 - DNA, 858 bp, Zea Mays
caccactccggaaacaaaagcaagcagcacagcatctaagatgaacataagaagcaacaggactgacattgtcaagtactatataccacatgctttggttccaaaaggcgacaaaacttcaaaggcgaaatcttaactttacgatggccctacaatatattacctgcaagcaaacagaagcacgcagccaagtttattttccttcttgaggttcagctctcgcttagtactcgacttcccagcgatgctggtggtagtcaacagactcctgggtgacattagggcagtctgacaaattgactctcttcagcttaggcaatgttgatgcatgtaagatagccagtaacctgtcagtgatcaaggggcaccagcaccacgttaaattaaactcctcaagttggtgaaatcctacaagcataaggatcctgatttggacatcactgattccaatacgattcaaggtcaacttggttaggttggggcaagactctctgaggcacaccacaaagttgcccagaacgttcgggcactcgtccaatataagttcctgcagagctccctggcatgaacgagctacagtgcaaacatgcgtgtctggaaaatggtaggattgcagttcaacctttctgatcccattgtagtgcaggatgtcacataaaatgtgttccatgtgataagcctgaacagatgctggaaagccaacaagcctaagctccttaagccctcgacacactatgttgacccattacaagatagttctctcacagtgctccgttctgatcaccttcagcttgggacactcacaggccacagctacagcttcatgaagatcacgtggcgtcattatgccaaaatcac

SEQ ID NO: 2974 - DNA, 566 bp, Zea Mays
cgggccacatactgtgctatctctttcttcatccctttccaccagtacctggttttgtggtctaggtacatcttggtggtccctgggtggatggagtaggatgagttgtgagcttcgtcaagtagaacttctcgtgcctctctttttggtacacacatatggtttttgaacaaaaggactccttccacatctgtcctgaagtccggaagttgttccttgcgagctttttccataagacctgatgtcttagtgtccaggcattgagccttgcatatgaggtcttctagcattggcttgacttctaggctgccattgtctcccagacatgcattcaactgagcagattctttcttccaatcttctaagaagttggttcctttcttcccgaaaggtttttggctgagggcatctgctaccatgttggccttctcggggtggtagtggatctcaaggtcataatatttgatcaactctagccatcttcgctaacggaggttgaggtctggctgagtgaaaatatacttcagactcttgtgatcggtgaagatgtgacatttgttcccaat

SEQ ID NO: 2975 - DNA, 469 bp, Zea Mays
gtaatatatctctttttattatctatcatctcttctcttctcttatattaaaacttggtgcgattttccaagttatggggcggtccacctcatcaggaaaatcgtggccgttcggatgggttggatgtcttgctcggtcgtccagtccgcttgtttctctggtcacgaggtcgccgtccccttctctctcccatacttcgtgcttccctccccctcctgatcctctgccgccatcgctcggctcgatgcctctactgcggacgtgctcccactcatcccaaacatcgccgcatcctgtccccctccctctcggatcctccgtcgactcttgttgatgcctctgccaccgctccgaggagagccacggcgatcggatctggatttgttggtcctcggcgaggcgattatcaccgccgcacgcaatgcgcgaagcgaagttgcccccctctgggtccttattcgctggtcg

SEQ ID NO: 2976 - DNA, 599 bp, Zea Mays
tagtagtgccatgtgtagagcaaatagataagatgtgagaggttatagattagaggtaagatagattagagcaaatagatattatacacggcccaacgattcaaactagaacctgctagttgtctaccatttctaattagtggcactgtcttatggatccggatgtctaccatttctaattactaattattatccaaacaatgccagttgaagtgtcatatatattgtcatggaacaacaaacgatggtggcctgctagctgctgggacaaatctacaaaacatatcatcctttaacttaatcaggtgattgcatgtggcttaccttcttcttgttgtggacctttctgacttctttgcctccttgttttcaccatcaaggtcgtcggcgatgacccaaatccagcaatggttagggtttaggggtaggcgagagaaatgtggatggggcgtgttaggtggaaggggcaagagaaatgcggatggcaatgagatagagtgggatgcagcgagtgaagtcggcgacgacgcagctcatcgacgcgatgagaggtaagggggcgggggtgaggtacctggtcgaggaggtaggtcatcgat

SEQ ID NO: 2977 - DNA, 591 bp, Zea Mays
ttccttttctctgcaattgccctcgatcctttcctccacccgatgcgaatttctttccccattcacgagcgctgtctatggtaggtggctggatcttcaatcatcggagatatccgttgttctagagtcgattcgccccagctttgtccctataagaaccacccaatcccccatcgtcgatcacacgcattgacaccctctcccgtgctctcctgccctctgctcatgctcaccatcgccgccgcaccgccattgctcgtggccaagtgcctttgaagcttctctacccacgctaaggctactgtggtggagcccaaagattgttgctgcttctccgcatcttccccgactcggtccagccctacagcatcgcttcgacctcactggagccccaccggccgtcgttcctcattgtcagccgtccccaccgcctcagccccccttggtaaggcctcagtcgcatttgcctttaccccttgctgctacctaagccatccccagtcaatctagcctcccggagctccgtatcgaccaactctagcgagtcgttggccgtgtgccaccgtgcgccatgcctcctctccctccccc

SEQ ID NO: 2978 - DNA, 682 bp, Zea Mays
ctgaggtgtcaccgcttgcagtttgggcccataagagaatcgatagaatcagaagatccttcctctggaaaggagaagaaaacgccaacgggggccactgcctagtgaattgggcaacattcataagaccgaaggacttggccggtttagggataccagaccttgataaattcggcagggctttacgcctacgttggttatggcaggaatgggtggacgataccaagcattgggctggcatggataccccgacggacgacactgatcgagcacttttcactacctcaacaagggtcgtcgttggagatggccatagatgtcgtttctggcatgacgcttggcttgatggagaagcgtcatgccacttagctcctagcatatttcgatatccaggacgaaaaacggatcggtgttcatggagctccgggataaccactggatcaacacgttgcgaggacgaatcatcactgcaacctagatgcaggagttcatctccctttggatcagaacccaggacacccaccttatgcctggcttgagggactccattctatggagatggacggtagacggaacatactccgctcgctcagcttaccgtgtccagtttagaggctcctttaggcctttccggtccagcctaatctggagagcacatgctgaaaacaagtgcaaggttttc

SEQ ID NO: 2979 - DNA, 705 bp, Zea Mays
gggaaatctatgtgaagctcttcttctctttcccatgtagcttcgacttctccgaggtgactccattgaactttacacatttttatcaccttattccatgtaactcgagttaaagtatccaaaatcttgattgggtactccgtataagtcaactcaccttgaacactgagctcttccattggtaactgttcctcagggacacggagacacttcttcagctgagatacgtggaacacattatgcacatccgatagactatcaggtagctcgagttggtatgccatctccccaactcgcctaaagatcaagaatggtccaatatagcgaggggacaatttgcccttaactttgaatctcctcattccacgaagtggtgacaccttgaggtacacataatctccttcctcaaattccagtggtcttcttctattatcagcatagctcttttgcctggtttgagccaccctcaaattctctcgaattatacggacttgttcttctgcttcttgaatcaattcaggaccaaagaactttctttctccagtctgatcccaatatagaggagtcctgcacttcctcccatataaagcttcaaaaggtgacatcttcagactggcctgatagctactattgtatgagaattcagcataaggtagacttttatcccaacttcctccatgctgaagggcacatgctctcaacata

SEQ ID NO: 2980 - DNA, 679 bp, Zea Mays
gatgaagctcacctttcaaaattctccatacacccgggcagcaataagatgtatcaggatctcagatccttatactggtggaccagaatgaagagggaaattgccaagtacatatccgaatgtgacacctgctagagaatcaaggccagtcatttgaaggtagcaggccctttgcaaccccttcccataccatcttggaaatgggaggacatctgtatggattttatcgtgggattgcccaatacctcccggcaccatgattccatttgggtcattgtggatagattgaccaagtcggctcatttcttgccggtacacaccacccacaggacagagaagtatgcagaaatctacatcaaccagatagttcgtttgcatggaataccaaggactatagtatcggacagaggagcacccttcgtggcacgattttgggagcaattgcaagaatcacttgggacccatgtaatacgaagctcagcataccatcctcaaacagatggccagacagaaagggtaaatcagattttggaagacatgttgagggcatgtgtgctacactatggaaaggattgggacaagtgtctttcattggcagaattctcctataataacagctaccagtccagtttgaagatggcaccttttgaagccttgtatgggagaaggtgtagaacac

SEQ ID NO: 2981 - DNA, 395 bp, Zea Mays
gggtagtgcacggttgctgccggtcaacctcgcaggatggaccgtccgtaccgtagccgtgcgcgggtggcgccgctgcgtacatgcatatacacacagacacactgaacttcggtcccccacgtaggccgacacaggccgcgatgatcacgccatcattgcctgttgatttgctctggccccggcctctccctggcagagcgtgccacgtgagaagggccgggggcggggagtgggcgtagtaccgggctgactgccctgtgggcgcagctagctagcctactagtgcgctactgcattgctagctagctaggtcagactctcaggtcgtccagtccagatgagaggtgagagctgagcacgctcgctgcctctccgtcttgcctttctgcctc

SEQ ID NO: 2982 - DNA, 843 bp, Zea Mays
atcgtcgatgcggtcttttcgacattgctttagttttttgcaggggattttcacgtgtatattacatggctctgcctcattaaaaatctcacccccgaaaggaaaagagtgcgggccggaataaaactgtttggtgaattacaagggcgtgttagccctgaggatttaaacaaaaaatttacggagattgtcaatattccaggaatgttccaggtcttcgccagattgcgttgttagtctgtacgcgctgggagacgacttcgtcttaacgataaatggtccttcccactttggctccagcttaccccgtgactctgtctgggttgtgcagacaagtacgaggtccccttcgttgaattctcttgggacgactgtgtggtcgcgccaggccttcgtttgggcttggtatttgttgagggcctggattgcgaagacacggtctccgtcgatgagatttttgtaggttagctcgtcgacatcgggtactgctaaagcgcttgtccgcggggacccatgtatgatttcctgcggggtcatggcctccgatccgtatagcaggcgaaagggagtgaatccggtcgcccgacactcgatcgtgtttagtgcccagactgcttcaggtaacagatcggcccatttacccttcttgtcgtcgaggagcattttcttgatcgccgtgaaaatcttgacgttagcgcgctccacgacgccgttggattgtgggtggtacactgaggcgaaggcaagcttggtgccaatggagaagcagaagtccctgaagtcttggctgtcaaattgtttgccattatcaactgtgagctcggacgagactccgaatcggca

SEQ ID NO: 2983 - DNA, 593 bp, Zea Mays
ggaagccgttacctagagggaggccctcacgacagagtaccaggccaagctgagtgctctggaccagactctggaagcccagcgggcccagcaggtgaaggccgtggaaaggctccagaaatggcagcaagagctcgagggcaaggccagcgacgtcgccctcgccgaggaaaaccttaaggagaaggagctgtccttggacatgcgggagatggacctcaccaggcgagagacaaatctcgccttcaaggaagaaatgctcacccggcgaggcgagttgctggccgagcacaagctcgaagcagaggaaaaagagaggaagatggaggagcagatccgccagttcaatgcggcgcaggcggcgccgggcccccaggcattggaggccaccagaaaggccctcgaggacctccaagaagaacatcgtgccggggtctagcgcattgctgagtgggccagcgaggtaagcacgacactggtgccactagggatgagccccatcccagtgtcggagccgctagtgtcgatttccgatgccctaatggtgctggactctaccaccgattgcctctggcgcctggatcagatcctcg

SEQ ID NO: 2984 - DNA, 316 bp, Zea Mays
tagtcattttcatatcttctagaacattttttggcaaaatgtgaacacacgtttttatgagtgaatagtcattttcatatcttcgatctctcactaatattttcatccctaaggctagtacggtcgttttccatgaactatgtaagactgttttttcatgatcaaacattgttcttcatgtcttcaatctgtctcggtaggactctttttgcatcacgttataacacattttcatcgtcgaacaacaatttcatatctcatgtttaccatccatattttggtccctcgaactggtaagactatttttagactcttg

SEQ ID NO: 2985 - DNA, 540 bp, Zea Mays
ccaacccaaagtcagtgctctgtaatgtttcactcgactggataagtgaaggctgaaatgaactagggtggtgagacttggttcactggctaaagactatattgcacctgttactggattgattacaaccaacatttccccctgcccattcttttgtgcacactcttggatgagattcatcacccctatgttatcttctacgtgttgtttatgcactgctgcttagtgtccatgctaggggagttgttggcatccccagggtccctctccatcgtgccctagccgagctcagtgacatctctctacctatcccttactcaaattgttgcttctgtgattcttgctgtctcaaactctagttagtatccactgcagaggagtggggtagtacttctgttccagcctgtgtaaacccccttctcagtcaccatgagtgatctgctctagttgatgtgtgccaacctctgtggtgaccatgccacctgatttcctcaccttctcgtggccaggccatttcgagcccagaacgtagttgcgccg

SEQ ID NO: 2986 - DNA, 509 bp, Zea Mays
cgcggagttaatggttttgtgaaccgatgcggtagtgactcgtttgcctgatttagctaataaacgctgtctactaggagctaatgccgacaagttgattgattggtcccctacctaatccgggaacgttgacgggtggacgacttttgctccaatgaaaccaaaaggacaaaatgtcgaattcgaggcaaacgcgattgcatttttttggtttgtatttcgttggtttcgccagcaaattttgcctgagcgtacatatgtctgacactaggcttaaattagtagcgtggactttaccataaatttggtaggggtatacattaatacatcccagcaattccaatccgctcaggtatttgaactcgcaaactaaccggtagagttatcgaaaactagtccgaagagttatcgtcaccgcatggattacaaagtttttacacccatgtcctacacgcagagtaggtacgcgtcgccgtgtccgtatgtttcacgcgatccaatccagactg

SEQ ID NO: 2987 - DNA, 619 bp, Zea Mays
aagcaccggtggaagagcgccgctcccacaaggtcgcgcacctccaacagaggaaaaacaagaccggtagcaccggcccgctaggaaggacaaaaggcacaaactctctagcggcaagctcatcggagtgggtaacgccggcgcaaatccttccgctgagcgccggcgcattccatccaagcaagtggtataccatttcgagcactcactcagtttgggtgtgctcgggatgaagtcacaaggccatggcaaactacggcaacgcaaagcagaaaccttgaaggcaaaggcgcacagagagctcgaagatgaaagggcaccgcgagtgggagagaagcaagacatggctgctactcgaagggtgaacccctttttaaaggcagatttccccgctcgtgccccgaagcgtcacgagcaaggtctccctcgatgcgcaccagggttcccatcctatgacatggggctaggccccacatgtcatacaggctggcccgaagcgcgaagaaggcgaatcgtcgcacagggagcgtgcaaccgccctgtggttatacgcccttccatcttcgccgcaaccagcggtcaagaaggtgaaccgccgcacaaggagcgtgcaaccgcc

SEQ ID NO: 2988 - DNA, 970 bp, Zea Mays
ctaattcaaaagtgatctcttgaatgaaaacaaatggctagagagggatgaataacctatagaaatttacttacacaactaataattacaattatagcaaatataaaagatatacgaaagcgattacttgctctagttttactcaagattattttccttaaataaataaatagtgggaaagggatatgtatgaaaaagataagctatgtactaaataagatatgcttgataagtggatgagctagcaacaagtatatgtaaaagggaggatactttgggaagtaaatcacatctggcaagatatgatatgatatttatcctcgaagtttagttgcttcctcaatgtggcaaatctaaaccaaatgattcatgtgcttaattcgtataacaagccaagcctataaagggtggcgtaagcattactctaacaaggcactccagcaagccatgatatcactaggatgtttgcgaatctcacgtggggttgaccacaaaaccccttacaatatgatgatcggagtcaacaacaatcacaaaaatctttcaatgatcctccgctatctcgaagccatataggtggcaacaaccaccaagagtaataagattctcgcatctcaatatgatcactagtatcactagatgcaaaaactctatgcaaatcactaaagatcactcccagccccactttggataaatcactatcactggatgtgagtgaaaaagtttcctttgggcttactagggtgcatatcaagttgagaagcctagattctcactgcaagcccacataatctctacttataggatcctaatggccaactagccgttggaaccattcttgtgcattttgcaaggttgtcggaccatccaacacgtcaccattagaccaaagctcaaggtctgacgaccatagatcgtttcatgtgtactaggcatttgaatgttaccattgttaccaccaacttctatc

SEQ ID NO: 2989 - DNA, 569 bp, Zea Mays
aggatgggagtcttcgtctgggcaacaaggagccaaggtatagacccaagcgcaaaatgcttctgcagcatgcatgaacttatgtatgaaacgaaggccatgggaaaagaatagtatcacaacaacttcggttgttatggatttgtcgcccgtcccaactcaagctacccagtgccaacattttagaaaagatggccaagaaattggatgaaggaatggttttatgtgaagaacgacttggtagcgagggaggatgttaaggaggttattatgcgccccatttggtcccgcttcggcctccgaaggccaaaggttgagattgacgaagccgccgaagcatgccaaaaggcatttggtactgtctgctttttcattagtacaagagatttaatccaagagcatatagccttcagagtatggccgcttgtagaggactgggaaatgccgaaggagaatgtcaccgagtctagcgaaggtgacctggttcgactgaaatacaccttcagatatggagataaatttgatgaaccaaatgacgactggctgaaatgtatcgaagctacaagtga

SEQ ID NO: 2990 - DNA, 886 bp, Zea Mays
attttatacaagttattttgtgcctagaagttttatacacaattagtaacacatctaccacaataatcttacccggcatacatatatatcgatgcgctcttcacatagtaatttacattttaacttgggcatcacattaacactactaatttttacccgcgaccgtaaccatacatatttagactacaacaagcaaatcatcgtgattacgagcttaaccaacccatctaacacttcggctaactagagcaacggtatagcccgctaaataacatacacgtcggcttgcctattattatcactatctaaggcacaacatacaccacaacatttttataaacatacatattcacatgtatattcatacatcgaccaaatcatacgaactgtaaaccactaatctttaactcgaaaccatcatgcgcttacttcccaaatcatgaacacataacgcgtattgacccgactcaagatatagaagaagcgatgactactttggcatgtcaccacatctctaattaagccaaaacaatttctacttatatcgaccgaacattcgtgtcgagcacaccttatattaccttgtctcgcatacaaccatgttgtggcgtgcactcgagacactaccgattaacttaacgcaattacctctacaatgcacttcgatatacacgttcgacatcacagtgcttcgacagaccccacacttccaatctacttgtcgcatccaaacacaccacattcccactgcattctcatgaccaattttagcacaattatttacgacaacatttatcgactagacaatgaaacactaaccgatcattcgcacatctcatcttaaaaacactaatcacatgtcacataatttatatcttcgatccac

SEQ ID NO: 2991 - DNA, 605 bp, Zea Mays
ggtaggcaagcctttgtggtgagctaaaccatgggataaatacattgtctttgtgtgatgaattgtgttgctcatttgattagttagggtttgagaagctcattagaatctcgagcgaagggccaaatcagaagccacgacacaaatgggtgcgcatctgatgcagccagaagaaaaaaaagattggcaaagtcagtccttttgctctgccatgaactaagtaaacgcccaaacaatcctcacagattactcgggggctacatcatactgatgcacttgtgcgcacccatggattttgatcccggcaagaaagcctccgactgactccaaggagttgcacaaaggctcggtggctgctgtcaggcacccaggaatagggcacccatggtgaggcccataaacctatttctagtccgctcgtccagtaagcctgctaggcggggcgtatgaccaagtccctgcagagcaagtctgtgaggcggggcgtacaaccaagtccctgccgagcaagtctgcgagacagggcgaacgaccaagtccctgtcgaccggcgagcaagtctgcgaggcagggcaaacgaccaagtctgcgaacaaccaagtccc

SEQ ID NO: 2992 - DNA, 348 bp, Zea Mays
gtctgacccgtgggctcacaaagcagcgagcagatcgggagcgtgggtgcggcatcactttaatgacgagtgggccagccgagtcagtggtcatggcagggcacgtgtgtcgttcaggcgctagccggtggagccaacgtgctagcgcaagctactaggcgaagtcagctgcgagcggcctgggatgtagatgtagccatccggcttgctccacactacagcttcatggccaaaatacggatgccagcaagacatcagctacgtaaatacctctccacgtcatggcgctatggccagcgagtaggccgcgtagtggcccattcgtccaatgttgtgggccaaaggtga

SEQ ID NO: 2993 - DNA, 354 bp, Zea Mays
tgttgccaggcaacaccagagccaggcaacaagctcaacagtgaaacttctgaactccgaaacgtaataaactccgtcctcctcgtcctcgatccgtctcctcagctttcccataaccctgatcaagctctagccaattttgtttgtttcggacaccttctttcgttggccgatcgagctggagatgcgttatgcgtgtcgcattcagaatcaggaccgtgtggttcagtataaaatagaaatgtcatgtgtcagattgactccgaaccccgtatgctgccagtatgatcgatggctaaccatgcacgcttgccgcgtgactgtgactgaagcggaccgaactctgcaggcagg

SEQ ID NO: 2994 - DNA, 477 bp, Zea Mays
taccgaccttggtgaataggcccgggtcgaacaggacacctaccctgaggtcaatcgacacccggttcagacccaggcgctaagcgacaaccatgcaacacaggtacgacgccgaggcccgacgccacacaaccacgcctaaataagataactcatcttgccttattgattcacgatattatctccccctacagggaaagaatcggtgggcccacgccaaacccaaactatgaggaagtttgaccgaggccaaaaacttggagtttgatggccatcccgtgaatggtttgcaaccactcccaaaaccctagagccaggggcaattatgaagtgggcaccgattggctagtaccctagcgtacgagcaccaagggcacttctaaatcgtgttcgagtcatagggaatgtctggctcatggtttatcgcgaagagaggtagtgagccattggactcggtcgaacgaggttagcaactat

SEQ ID NO: 2995 - DNA, 733 bp, Zea Mays
ctttcataaaagtatgcattatgaggtaaaataaataatgctaaaatgtcaataatggttgcacctatattggagttttagtgtgcatttttagtctgaaattcaaaacttaaaattgaaattagcatgaaataaaaaatgaaaacaaaggaaaaaagaaaagggaaggaatatatggttgggccaaagtccatgattttggcccacaatcacattcccctcgcgcggcccagggtgtggcacggtgtcgaccagtgggccccctggctagccacattgcgcgcaagccggctcgcgcccttcatccgccgaagcactgacaaacgaggcccacttggcagtgtctcgtgactactgtggatcttcccgaactcgccagtggaaaagccccgttgcgaccacatgaatcccggggatttcgttcactgctcctgaaccgacctatcgggagctatataagctaaacgccgtgacctctatttcccttcctatcactatgaaccaacaaccctagagctgaatagagagagaggagtgaagggagaagccaccgcgatgctcctcggatacacgccggcgacgagctcttggagatcgactcgcaacttcaccagatcgctagggagacgctcggggccgtgccaagtcaggagggaggccgggtgaagcagaattcttcaccaggtcgttgtgccgcaccgtactatgggtagggctccactcgtggccatac

SEQ ID NO: 2996 - DNA, 842 bp, Zea Mays
gctgaccacagcgaggtcacaccgctcggtgttcttgagtgatttgggggaaatcccaaactagggagttctagtggatgattcgaggcacgggttgcttctctggttgcacaattacatagcggagcaggcggggtcagcaatttataggcttccacagtggtggcgtccaatttcgtgaagatgtgctggcggccggagaggaagaaagttactggcgctcgggattagtggctttcaccgtggcaagctcccaggcgatcaccgggcatgcacgatgtgattcactgcgacgtggtcaagctctttagcacgtggcgcacgacggtaatcggccaacggcggtgaggtctatctgaccgattcgacgagcaagtgggtacggtgagcttagctgtgaccgagcccgagtcgatccaggcgccaagatctttactcgcccacagttatccgcatgtcatagcgcacgaatcgcagcggcttgcgtgaatcacggtgcgacgttcaccggcggcgaagggggatgaacttggaatcttgttcagttactgtaccatggagtccctattcagtgcacctgatagaccactttgcagggcttagatcttaggtttttacatgacaacttattgatctgccagtagcaaagttgttgtccgatgatccagctacaatcttgctatagcaatcatagccaaataatgactaaatcacaatcaaatccaagctcaaagattgcctaatctcactgtcagtctgaattcagacttaaagcagtctgacagcttgactttgggcacatttttctccaaatttttcatgtgaccatggtttaattccta

SEQ ID NO: 2997 - DNA, 511 bp, Zea Mays
ccacggtaggcacgggtgcagccgaggagccttcaccggcactcgaaggcggttccgggttgacctcagcctcgggcggcgcgccgaccagatctccaaggtcctcgacatcctcggcacacgccatctgcagcaacagcacactcattcagcaaaaccacacgtacccacacaaccacacaaaacaaaagataacctttacctgctctatcgctcggtcagatcgctccttaaccgcctcctgaccgtgcggaccccacatcctatcgaagagtgcccccgctgactgcttcgccacagggtatttggccttgaaaatttcacgttcaaagttctcgtctgattggtcgaagaccccgtagtgtcggcacccctcgcgggacaacgcattcagggtcccctcgcaggtgacgagggaggcgaaggacatgaaaccctgcacaatggtcgggagcaccagcagctcctcctgcaaccattcgaggaagcgaaggcctgcctcttggtcggg

SEQ ID NO: 2998 - DNA, 460 bp, Zea Mays
gtggatccaatccttgtctagctggacagagtattatttttggtggactgggagcagttcttccccaatgttctgctccaaagcactgcctcccacgactctggtcattgccccttaattttgggccttcatgacaacaaatcggggaaaagacgcttccattttgaggcattttggccaaagttagaggggttttatgaggctgttcagactgcttgggaatcggttgagaatgtgggcgtgtccataccaaactctttttctaaaattgcagaagacgactaggagtctacaagcttggagtgataaacaagtgggccacataagatcgcagctgatcttggctaaagaagttttgcacagattggagatgacaaaatgttaacgcctgctgaaatttggttgaagaacagactcaagaagcactccttgttactgtcctctttgaaacgcactatgg

SEQ ID NO: 2999 - DNA, 558 bp, Zea Mays
atgccacatctttgcgcagctgattcagccccctcgctttcagagcacccttgaggcctcacgtcttgtatttggatcttaccgtcctgctcctgagattcctgtgccagcttctgcttctgtgtttgactctcaggccgaggatgcagctcttcgacagtttgacactcagggtacagcagctgatgatgatgatgatgatgattttggggttcctcctccgcctccgcctcctatgcctccacgctcacatgatcatgaggctaggagttctcgtgctgcccctgctcctcctccgactatggaccctgctcttgcgacgatttctggccaacctggcagccgagcaggcccggttatccgagatgatgctctcgatgtttcagcgcatgcaggacaggcaggatgcacttcagcagcagctacttcaggatcgggctgagagtagggcattcatggcccttatgcttcagcattctggtatctccgctcctccggttcagtctgctccacctcctccgcttcacgctccaatggtgccatcgattttgtcaggac

SEQ ID NO: 3000 - DNA, 895 bp, Zea Mays
tgcacgtgctagcagatgctcaaactgggcatatgcacaagatatgtgaagtgtaagtattttgaatcagttttaagcatttcaaagagatgttcaccacaaagacaacactaagcatatagtaagcaggaaatcaactaagtgtcactcacaagtgaacaaggtgaactattgtaccgatgggatggtagttagaaagaggtggcaccaaaacccaaacctgatttctttcaaaattttcaagctcctcatgcatagcattaacccagttaggatcagataaagcatgtccaacatctcggggctcaaaagtagcaagaaaagctgagtgagcaaaatgagaaatgtgttgtgacctagagcgagtgactcgctcatgaagctccccgatcatctgctgaggtgggtgacagtgctgaatatgttgtggagcctcccttgaggaagtggcctccccctcaacagtagcttcaactcctccagtctcagcaggagctggctcgagcggaccccaagtggtggaaggagtggggtcgggtccgtcagccgtagtagtggaagcaggttcgactggggcgaccggtggagttggctcgagagcaacccaatcggcatcgtcgtgctcctcctccataaagatggtctgtctcatctgatctggacctgcaagctcaaagacaggggatggacaaggtgcagtctcatcgaatgtaacctcacaagtctccataatgcggttagtctctaggttaagaacacgataagcacgagaatgtaatgcataacccagaaaaaccccatcagaagaccgggactcaaacttgtccaaattaccctgttttagcccaaagcatctgtagccaaataccctgaaatgactgaccttgggtggccg

SEQ ID NO: 3001 - DNA, 423 bp, Zea Mays
gtgggaggctacttgcttggtgttccgtccggacgatgatcttcggggtgcagaagccttctcagagcactattctattactaagagggatactgccgagccagccatgcaagatgcagcacgaagggcactttctcagtattgctcgttgtttagcagggtagctgatggcctcgacctgaagtactaccctcgttgttcgaccgacagtgttggaggtgtgattgcctcgccagttggtgagggcaatcccaggctgaacaacatggtcaacttggctaccgtgctcaacacagagttggaccacgcccatgacgagttgggcaaggtttgggcggaggttgcggaattgcgtgctgagtgtgcagcacgccactatctggatggtggttctcccgcccctatcgagattcagcaccctta

SEQ ID NO: 3002 - DNA, 298 bp, Zea Mays
gcttgccatctcagagctgctgcaccggtgaacgccacgactaagccaccagtgaccttctttctctccggctgccagcgtgccattccaaaattgagtgccaccgcccttggacactataaattgatgcctcagcctgctccgctaagtaattgtgcacccagtgaaccagccctcacctccaatcgtcccccacagctccccaatttggaattttcgccaaatcagtcaagaaccccgccatgtgtgagctcgccgtggctagctctccacaggtccgatcacgccctcctcgttc

SEQ ID NO: 3003 - DNA, 484 bp, Zea Mays
gtttagttatttttttcttgactacgtcatgggttggtattaaaggtcaaaccaatacaacaatttaaagtggcaatttagcaaaagaactacaggattagttcagtcataggcatcaagagctgaatgaaaatgcaaggaggtgaatagtttaaggtccttggggtaccaatggaagggtaacataaggtcaagaccatcccccacccctcgcccaacacataaaaaaggttagggcatgttatcaaccagatgaaggtagaaacagaaagggtgccgatttgtcagattccacaataaattagcaaaagatattgatcccacaagggcaaaaaaactaacaattgaagaccatagaagtgtgaaaatacaaaatacatagagtagaagggtggagtagacttttaatggcaatagaaaatatgtgagcgagtgaacaagttgtcaacttgtgctgcttaatcaaaactatccttaacgatgt

SEQ ID NO: 3004 - DNA, 751 bp, Zea Mays
gtagcccagagggcctccaaatcaccaacgacactgagggccaccgcatagtcaacctcatcatgaccgaagactggcgggcaccaataaccctgttcctgcagggatactaccatccgagcgatatcaacgaggccaagcgcctcaaacaccgaagccgggacttcgcactcattgagggacatctttacaaaaagggagtcagtcaacccatgcttaaatgcgtcaccgagaccgacggcgtccagatcctgcgcgaagtccacagcggaacttgcggctctcacgcagggcctagggccctagccgctaaggtgatctgacaaggcttctactggcccgctatgatttgcgccgcgaatcgggtgacgaggtcctgcgaagcctgccagaaattttctccatgcttgggaaacccttcgcagttcacaaaactaatcgcccacacgtggcctcttcagcgctggagcctggacattgttgagccgctgcccacgacccaagggaacctcaagttcaccttcgttgccgtcgaatatttcaccaagtggatcgaggcaagagcagtatccacgataacatcgaagaccgcccagaaattcttctggcaaaacattgtctgccgattcggagtcccgtccgagctcacagttgacaatggcaaacaattcgacagccaagacttcaaggacttctgcttctccattggcaccaagcttgccttcgcctcagtgtaccacccacaatccaa

SEQ ID NO: 3005 - DNA, 479 bp, Zea Mays
gcaaaggtggagaggtcagtgcgaatttgactcgatttggtttactggtatgtgggtgatgaccgagcctcgccgcgaaccatgggctatttatagccgcggaggtccacggtgatggcacggtggccgccgattaaccggggcctgccacctccccgttttaacgccacattgccaaagccttttaccgtggccgccgacgacctatcccgaccgccgtggcatcctcatcgtcggcgtgatttttctgaagaccgtgaacagtgcaccagattcagtaaaaagcttatctgatagaccatcttcagatcaaaataactccaattttcatatggtaccaagacttaacatctgcagcaacattgtagagctacaaaccagctacacttcatttataggaattgaactcagttgagcactaaatcagggttgaatcctaggccaaagatggctctgttactctgtaagcctgaagttca

SEQ ID NO: 3006 - DNA, 1234 bp, Zea Mays
gagatggctagatattaccaagtggtgtatgctctttatgaagtgctacaggatgtaacaaataaaaacattgatgatcaggtgatgtcttgtaattgtcttgttagatatatgctattttcctatttctttggtcaacttcacaattttccactctaggtgttgcggtgtgcagacatggttgaggaaaatggtcgtcatttcaagaactacaagtacaacattattcccctcaattttcctggttcttccgaggaaattatggaacttccggaggtctagcactcatcttttataatactattttacttgtttctgaaaggctgaagtaagtttgatttttgttaccctgtaaatgatgtagataagaggtgccattgatgcaataagtgacatagatggccttccaatgccagacatgtcttctatccaaaggcatgaggataaatctatccaagatctaattgaatatctttcactagcatttggatttcaggtaatttcgtttcttatccatccataatctggcatcggtatgttcaagggaggtcttcattcttaccctgcatttgtttgccaaaaatcattatattggaaccgaatggtgtgtttatatgtcttttgtgcagaaatcaaatgtagaaaatcaaagagaaaatatggttttgcttctcgcaaatattagtacaagaactgctgcccaggaagggcatcctttggtaagctcaatgctacttggaagacattgtttgagacatttttttatatttcaagtaatgtttatgcaaaagtcactacacctttaaagtgggtgtttggtcgcgcgtcgtccccctccccacgcgcctagcgagtgtcgtccgctccccgcacgcgcccgcgaaaaatccaaaaatggagcgcactcgctggggttcaaacaatggtcgcaaggaacgagcgttcgcctcctaactactgcagctcgtgttggtttgtgccatataaggatagatattgtaaatatcacatttaagcaatgtctacctatatgatatatagaaactgtagtgatgcacaacaactaactagtaatgtttttgcactggtgaactacacattttgatataaacaaatatgatactgatctagcatgttattttcaggttgatacagtgaatgaattgtggaaaaaaatatttggaaattataagtcatggtgttgctatttgcatattacttcaagtatcatgta

SEQ ID NO: 3007 - DNA, 573 bp, Zea Mays
ctttggagcatatgcctgcagacaggatcatctgacattcactcttacaatcgatagaaataggatcattcggtgaggcaatacaacaaacaggtggctggcacacatggtaccacacgacatgagcaatagagcatgagggactcactggaaaggccatctcggcggtgtctacctccagccgtgcctagatgtcatcgtagaactggtactggactgcctcctcccagtcctacaatcgctcccatgccatcaccgccgaccgagccggagtggcttcctggacgtgcactgatgttgtcgcggaccgggggaatacgggtcaaacgaacccccgtgcccaacactccgtagagtctccatctccactactgtcacttgactcgtcgcttgcacctggcggcaggctgcatcttctcatctcccctctctctggcttgctcgaggctacccttttcccacgcgggctagttggtcagtctcgcacccgggacgtccctatctctatcagattcagaccgcaactgcttccctatctctataaaattcagaccgcaattcgaaggccgcaac

SEQ ID NO: 3008 - DNA, 343 bp, Zea Mays
gttaacctccgcgacgtcgaactggacgttctcagtgcggaagttgtcctcagtcccgaatgttactgggagtgcgatgctcccaaggggatacaccggttgagggcccactccggagaatgggcgagagggtcccagtcgggatcctgggatctgcagctgcttgaacgcagcgtgactgatgacgttgagcccagctccaccatcaaataggacatggtgtagcctcatgttggcgatgacaggggcggtgatgagtggtagtatgccggcccctgccatgttttcggggcagtcggatgccccgaaggagatagtggtgctccgccaccgttgatgtggg

SEQ ID NO: 3009 - DNA, 670 bp, Zea Mays
ctaggaaatttttggtaagcctacaaacccgtgcatagaacccggaaccacccctcggccatctgcaagcataaatacagggcccgactgccccctcctcaaccatcatagcgcatgtaccaccattgtgtggggtcaaagacggagagaaagtgacgagaccgccggggaaaagctctagccaccatcatccaccaacgaggtaagagtcccttccaaggtttcgacgtgttgcccgccctcataacagcgttttgtttggtgttggctcccctgggtgtggttatggatcccatccatggcgcccctaaggtgggtcggccaccaccgtcttggcctggggtctaatgatggaggggaaacaatggtgaccgtagatctgttgatgaacgcgcgggattagggtttcatcttaccccttcgactggatggaaccccgtctgtcgatctcagatccaaagactatcaccgcgtaccagtcactttaagggaggcctaatctacacccttgacgggggatcgaacgactcagactgagcacagattcttatcccgcgccaatctaatctgggtcgtctatgttcgatctggtcgcccataatagaccgtaccccttcgtcgcgcaccttttacatgaaagccctcaaagaaactcaaatataacccgctg

SEQ ID NO: 3010 - DNA, 567 bp, Zea Mays
gtcgttgttggtatggtcacatcatcctctcccccttgaaaaagagtcgtcctcgactctaaatctggaagtggaaggagtggggctgttgtcaacttcattttcagctcctcgaatgtcttctcttgtgcctctccccaatggaatggtacttccttctttgtcaactcattgactggagcagcaatggtgctgaaatctttcacaaatcgccggtagaaaccagcgaggccgaggaagcttcgcacttggctcacattttgtggaggtttccactcacaaacagctttgatcttttcctcatccacctccatgccatgagctgaaacaacaaaaccaagaaaaacaaccttgtcggtgcaaaaggtgcacttggcaaggttagcatgcaagcattccttccttaaaacaacaagcacacattttatatgttcaatatgttcatcaagagacttgttgtaaatcaagatatcatcaaaataaactacaatgaacttgccaatgaaagccctaagtacatggttcatcgatctcatgaaggtgctaggcacgttggtcaatccaaaa

SEQ ID NO: 3011 - DNA, 432 bp, Zea Mays
ttagaatatggtgcagcagtgttaggattgtatatgccctaagtgacagtgtgtagatgcttagatagagcagtggtaaaaagaaagagggagaggtaaaagaggaggacaacatgatgggccacacacaccacagctagcttatgtaaagtagacacgcacatccatttcactgtgcggcaagactcgttgcacggggcttagcgagcacatcgtacgacgcatctagatcagcgtgcgtcggcgaatcagaggaggcaaatgcaagccagaagataatgcgtgcggcgtgcatggtctggtccggagactcggaggcttggcgttggctagctcgtcgtctccaccaccggccggcccggtgagacggatcggaggagcagcatctccgtggtggggccgccgtgtctctcctcccacaccccaccccgg

SEQ ID NO: 3012 - DNA, 598 bp, Zea Mays
cctagagtcccgcgctcgcgtccgcctccctagcccatcttcggcccacgtttacacgctcccgcgcccctccctcttgcttccaacccggccccacatgtcatcactcccccctctcgagcttacatttggccgcaccatcaccgccgactccatcctcctcctcgatgattaccacagaaaattaggcgttgcccgttgtacatgtgaacatgcatgctagcaccgtacttcatctctgtggcatcatgtgaccattgtatcttccatccccaccccctgttcaccgccactctcccccactcaccagagtccagctagccaccgtttcctctccccacgcggatcaccaataaaagggacacccagagctcctctccagctcccctcccctcccctctcttcccttgagctcgattcgagctataaccaccgctgcctcatctccggtgagaacctcactaccctccctccttcccttggcacttagagtcaaattaagccatccctattgctttgccagcttcacacggtcaccattcacccattctcgaccctgatcaccttccatcaccccatcggtgacctccacaccatg

SEQ ID NO: 3013 - DNA, 1859 bp, Zea Mays
gcaaaagagaccgacttggtcttaacctttggaatccagcgcacagttggcccaatcaccaagccacgacgacggaatggagtggaaggtctgtttctgccgctcgaactgatgcaatcccccggacctccacgacaccgcgaagaacgcgcccagccagagagactgcgatgtctccgggtgccatgacgcctagtctgctggaaatcctcatcatcatcgtgaccccagtcgcgtcgaacgaagtccctgcctctgcgatcctctgatctctctctcttttctccaactgaatctggcaaaccatagctccatacaaattctctgcgtggtctacgaccagggggaccccctctaacatcccttccttggatgaaggaaagatcttcaacaacttcaatgtggttgcgaatggtgtacacatggccctcctttagatcagctggtgagtcatgcattgccccaactagaggaagaggggcactagaaggagggagctccctatcaggaactgtgaccgttaaacagacctccttggggatatcacaaggatctgagcaccaagcccaaagatcgaaggacctagtgcgttctctacgcctagagcgctcctggacatagtgaatagcgcagctcctgcccaaagccctagcagccacatcttctccccaacagtgaactggaatcccctcaaccctaaccttcactctgaattcaaagcaagttttcctggcataacactcttcagaccagtccccaaagtgaaaaacccgaccacgatatgagaccgacctcctatccagagcccactgcttggttcttgaatcagcgaagatgataaagaactgttcaggaaaatgcttgacaagctgatactgaccgtgatgaagatcaaaagaatccctcagcatatcccccgctgccagcacatccacctcatgactgttcccatcaaaggagcaaaccaccgccttactgattaactcatccctgcgtcgacggatcaaaccagtcgcggtgatggcgcagacagcccttgcagaccgagcccttgggtctccggggtagcgagcatccattgcctgaccactctggacaacctgaaggtaagacttccgttgcagcaaggaggaagtgggaggtgcttgcacaggatgcaactccagccccttttgaagagggcctgagagaggattcagctgttgatggctcgaggagaaagggctgactctctgagttgaatacccgtctctctgaattgaatgcttgagtgaaacaggtaggtcacgaaatgaatgagatcttctctgggaaatatctctaggacaagacctagccctgtgtccggtctgcagacattgccagcagcgaaccggcgctgagcaaagaaaggcgtagtggtcagacgccagacagttgaagcattttccacttaatttcttcttaaaaaaactggtgttcttcatctctctatgctgtttcagaggcaattctccatgagaatcaagactcttcctccaccagaattttggcttgaccagtgaccagccttcatcaaagatcgacgaagcacctgccttcaccttccagctgcacgacctatggaaagggcgacacgaagtgaccgtcggtactgttccgccgaactccccacgccgatgggacaagacaccaccagcaccaccagcattcaagccccgcgaagcattgaagacgtgctcatccagaccccacttcaacttctcagatgcagagatcctcttttgcgaaatccgctccgccagatctgcctcgaggaccaacccagaacaaccgtccttgctaccaccttccccagaagccgcaaccagggaacggag

SEQ ID NO: 3014 - DNA, 359 bp, Zea Mays
atcccaaattggagctctctggtggaggatctgaggtacgagtgggtgcgctagatgcctgaatacatagcgaagccgatggcacactcaatttataggctccaggggtggtggcgtgtgaattgaagctggcgtggtggcggtcgaagaagaagaggagtactggtgcaaacgcttagtgtctttcacggtggcagatgcaccgacgatcaccggatatcgatttcctgagtcataacgacgtggttaaaggcatgagatgtggcgcagttgcggtgaacgacgcggacttcggtgatggatgtaaggccacgtcgccggcgcaagtgatcagaaacaacgaggccatagtagtccga

SEQ ID NO: 3015 - DNA, 364 bp, Zea Mays
aaggattccactgcatcagagatagagcttgttcgggaacaacagctccgcaagacctcaattgggcggatactccgtcaacaaaatcctgcggtcatagacagatgagcagaagaaaaataattcgctagtatgtatagagcaaaaggccaattcacctggagattagaaaggaatagtggaagacctaaggcaggaagagctggtgcatggcttgacgatggaagatcagtaggaacaacctcgagagcactacccggggtgacctcgacccaccagtagacagcaggttcctggcgtctggctcgctgacctctaaggcgacttggccagttaaggtcatagaagcatgtgctgctgtcac

SEQ ID NO: 3016 - DNA, 538 bp, Zea Mays
cggagggtgggctttggtaaagttcaattggccggctccgagagcaatagaaagccaaagacaagctagaacatgaatcaatttggtaggtactgacccgaggagtgctggccacagaggggtccttcactgtggtgctaagaacagggcggaggggatttgtggactgtgtgagttctccagtgagattgagtcgattgcacaagtgctcgtgtgtgtgatgtggtgaagaagcagtgctcgggctcaatttataggcagatggccggagatggatgaggttcacggagttgtaaacgcgctggcgagctcacctgcgcgggcagagccacggcgagggtccggtgaccgccgattaaccgagcagcgccacctcaatactttagtgccacatcgcagaagatttttaccgcggccgcagacccatccccagtcgcggtggtggtcttatccccggtgatatttttctgaactccggtgaacagtacgccaatcagcccgatttcaaacggcaatttcttcaaattttatgtgacaa

SEQ ID NO: 3017 - DNA, 910 bp, Zea Mays
ggaacagcctccctggagcctgacgccaacagcaggggtgaatgatattcgtccccggtggccgactgcaacggagagattcgcttccacactgattccttgcgcctggacatctggaaatcacctccttgagaactagatccttgcatccttgttaagcgctgccacaccggtacgcggggactttgacgcgcacggtgcgacctcgctgtcttctccgtattcttctggtacgagcacgctgaagcccggtggccgagaccgtggcacaccaaacagcgtgtaggtcgtctataggcagcaacgaagtgggagggagacagacagttgaagcatctacctcggagatcctttggggaccatcgacgaggatcagatgtagcacgtctagctctcctatgcaccacctcctgccaatcaccttcaggttgagaagggagcactagcgatccagtctgccctgttggacgcctgcagcccgccttcccagccggtatgaaatggtgaacgaccttcagtggagaagaagaagcgtccacactcgatagggaaggttctggtctcccaccaaggacgagcacaacatccttataggatcgggataccgtcccagagccgccggaactcgaaggggcagggctggcgtccttccacctctgagactttgcccgcccaccctggggagccaaaacggtgtgcactgaagagccagaggcctgaagggatgggaggtttgaggaggtggtcgccggtttcgtgatgaagtccggcgagatggggtggtggtggtggccgttggcgtcctgggtggaggtggctgggctggggaggggagacgaggggttgggcgtgggagacgaggagctgggtgtgggagacgaggagctgggggctggacgcggggtgggag

SEQ ID NO: 3018 - DNA, 438 bp, Zea Mays
gcatcagagatcgacactggcagctccgacactgggatggggctcatccctagtggcaccagtgtcgtgcttgcctcgctggccgactcggcaatgcgctcgacctcggcgcgatgttctgcttggagatcttcaagggcctttctggtggcctccattgcctgggggcccggtgccgcctgcgctgcattgaactggcggatctgctcctctagcttcctctccttttcctctgcttcgagctcgtgctcggccagcaactcgcctcgccgggtgatcatttcttccttgaaggcgagatctgtctctcgcctggcgaggtccgtctcccacctatctaaggatagctccttctccttaaagttttcctcggcgagggcggcgtcgctggccttgccctcgagctcttgctgccatttctgcagcctttccacaacc

SEQ ID NO: 3019 - DNA, 439 bp, Zea Mays
cttgtgaagaaggggaatcaggccattgttcaggttctgattcagtggactaccaagaaagatgaagctacttcctggcaagactggaatgtggtggccaaaatgtttcctgagcttaatgcatggggacatgcacaatctgaagagggggcaggtgtggcaatccctggtgataactgagtcggtaagtccgtagtgttggcttgccagctgttttctggttgtaatccagttggaatatagggcttatggccagtagattgtagtaatttggcttatggccggtagacataaaagggacagtctgtaaccgtgtgcgaaacgagaaaggaataacagaaattccaaccacttcttacctctcttgttctggaggcgagttcctccctgcgcgggtggctcacgtcgacggggatccatcctcggcggccaggggcac

SEQ ID NO: 3020 - DNA, 1112 bp, Zea Mays
ttcagctagtagcttccatagcccagtactaaaatatccaggaaacattatcggcaagattctttctatcaaaatatggtaattgtaactcttcaatccaattagtttacccatgtcgagattaactacacgttttatatttgtcgtataatgatctgggaacttcaatgttgttaaccatacaagtatctcttcttgttctttcggtttcaaacaatagggagctcacatccttttctccttttcacttgaattgcattttaactcgaggtgcaggagttcacaaagaagggttaagtcttttctttcttggatgttattctttggattgttcggtgaagtcgaagccatgtttatgatgctttcagcaacattacactcctgatgcatcaaatctatgttatggggtaagatcaatgccttcgtgtatggtagctcttagagaaaggatatgtatgtccagttgtgttctttattgtacccttcgaacccacctccttctgccagttttaggtcacgatgttgtctcatgatatcttcacctatttgtcgcttcggaggcccatctctaaccctcatgcctttccaaaatgactttgtatcttttctaaaaggatgattagagttaaggaaacgtcaatgcacatcaaaaaatgtttccttttttcgtgttttaacctatatgcttacgactcactcatacatatcggataacacagcctaccatggacacaccacccgcaccaaatgccatatgccaacagataatgaattgaccatagatatgtcacttgtagattaaatctacaatttagatggctatcataagcctccaccccttgccacaacactttcagctcttcgatcaacggttgtataaatacattgattttagtacaaggatccttagggcccggaataactagagcaagtagcgtgacctcttctttcatggatttggtaggagggacattctagggcatcatgaaaatcggccaacatgagtacggagtggaacttttgctcaaaggagtgaatccatccatcgacaaagcaagtcgaacacttctagggtcccttgcaaattctggatcaaaatggtccaatgtctg

SEQ ID NO: 3021 - DNA, 681 bp, Zea Mays
gttatcatatggaaatcagagatcaaagcctagcaaaatgctctgtcagacagactgaatggagtttcgattgtacagtaactgaagaagatctttggtgtgttgcaccttgccgccggcgaccccgtgcctggattcacgccagcgatacgattcgtgcccgttggtgcacgaataacgcctcgaggtgaaaagatcttcaacacaaatgagattgggagttggccgtcgtactaactttccttatcgccggtccagataacctcgccggagtttgccgcccgccactcgggtgccacatgcctgagaggtttaacacatcgcagtaaacctgtgttgcaagcccatccatcgccagaggctttgccacggtgactaccacgataacctactccggtgactcttccctctctccggccgccagcacgccattccaaaattaggagccaccacccatggacactataaattgagcataccactagctccattaggtaatcacgaagccagagcacccgctcctgtccccaattagccaccatagctctctaattcctctcttcccccaaatcgggtttccgcaccaccgtgaacgtcgtgccgtggccagctctctgcaggtccgttcacgccctcctcgctctcggttgaacacccctgtgtgctatagatgcttatcgg

SEQ ID NO: 3022 - DNA, 475 bp, Zea Mays
tgggggacgggggctggaaggtggtgcttcgggttcgtggccacgtgagggagctgctcggctcacttaatttcttgccggaccaacggagaaggagagggaggaggaggaaaggactcaccggagaggaggacgacgccggcgcttcgcgaattgtgctcgggggaggggaggagagggatgaccgaggctggtgcgaggaagaaggagctcggggcgagccttttataggcgcgcgagggaagggggggcggtggagcttcttggctccggcgagctacacagtgccgctattaatgctgcacagcgccgccgaggggacaccacggcggggcggtaccggcgaggacgctggtcaaggggaggggaggacggagcggtgccaaacttccctgtgcggcgagaagacggaggggaggacggaggcgacgaccggaggtaactgcggtgaagggacggcggaaggacgacgaag

SEQ ID NO: 3023 - DNA, 536 bp, Zea Mays
aaggaagttgagcaccgttggcaacctgtactgtaaacttggtggtcaggggtaggacgctaggtaactgtgaagccaaacaggagctgagaaatggatgagaactaccagagttgaccaatacacgaacagatttgtggttcaacactccatccaagcaaaatgtacgaacaccaggcactccagaaactgcagctgtagacagaataatgaatacttgttcttgtgaagagccagcatcatctcccatatactaacaatcctcctccaactaaaacaactcaaaaatttattgaagtgcattgagttgaatgtacttagcacaaagatgatccttggaccacttttctgcacatttgatgcacaacccgcgtgcgcgacagtaggcgtggatggttgcccattcgtcatccaccgacttcgaacgctctgaatcaaaggcacaacgatcgtcgagtggtggaacttgtggcttttcctgcttccaaggtggaggaggcagaggtaatggagaaggaaccgccactcgagacacc

SEQ ID NO: 3024 - DNA, 923 bp, Zea Mays
caacttcttcttttctaggagcagtttttgcctctcatttttgttcattgaatccaacttcttttccttagttgtaacagctgttttgtacactgaaaggcgctccaaagaaagatctcccatgcgtgtcatgaactcagaatctgatgaagatgtgtccactgatttagtcctcttggccttttccttcgaagaatctcgacccagtggcctcttcgatgtgaagctagatggtacagattcttctgcatccacatcgacagtgttagaatgggtgggattagcgttgccatgctgattttgttgccccatgtgtttgtccatccattttggttggtccttaagtatggcccaacaatgtaaaaagtggaaaggcttcttctcaatagctgcaaacctagaggctgccagtgatgtctgcgagaaaacaaatggttacagcaggaacatacttgtaaatacctacaatacttatgtgaaaatgttacattaaagatgtaccttgtctgcgtcagtgagtccactaggattctgtcggaggactgtcatcatgtaaccagcaaaagtggaacactatgttttgatagtatcccatctactcatcaaagattttgtggacctttcgggcaatgttcctcgtcttgagttgtatgcttcagtaattcgactccaaaatccttgacgtttctgccctgtgttaataatgggatcgcaactgacagcaagccaagcatggcataccctagtgtcctcatcagcagtgaagtttgctagcattgttctttgagttggctttttaggaacagctagtgttcttgagccctcggcttgcccatcaactggaaattcagaatgttgagttcccataggcagctcgtcaatctggctaaggaagcttccatattgagacatcacctggttcc

SEQ ID NO: 3025 - DNA, 404 bp, Zea Mays
cctcaacggagcgtagcgttacagagctgagagcgcgcagggcagccgccaccatgggacctctccggcgtctgcgattggaggccaagatctggacagggagcttcaccgacacccacctcgtgtttgcgtgacctttcggggtggggaatggcgggactcgtcgggaattcgtcgctgaacctggtggcaccgccgcggagccgccggtcaccatgggcgggggtctacgccgcatgagcaccggtatggaagctctcaccatgatcaccattttcccctctatgcgatccagtcgtcggtaggatagggggcacactgggtggggaacgagtgtagctccggcggcactgccgtcgtgcggggaccgcggctcgccgtggcgctcgcctagggaagaagaa

SEQ ID NO: 3026 - DNA, 698 bp, Zea Mays
gagacaataacatcatgaggaatgcagcagatattcaatttctgaaagcataaatgaatatgcattaatacacaaagtatatatatagttataactaaggatactatatttacatacaagggatatttattagaggcttgtaaataactagtctacaacactaaaaaaataaacagcatactttgagataataatatacataaatgtaaagtgggggaaaatacaaaattgattgggcaccaaaattaacacatgaataaacagaaatatatacatagtacctcagattttctaggagtcttctgtttaggagagctttttttgtaatgatattagactttggactgcttttcacactcggaacttgtggggaagggacttttatcttctttgcactgtttttttctgaaggggaaggtgaggctgatcagaattggcgctttaaagatggagcatccatgaaatcgtcatcggacagtgtggatggagcagaaggaggatttcttttaacacgacaagctagggcctttctacgaaaacgatgaactggagctggttgtggctcagtctgcttctggttatgtggattatcatcttgatgagctgaactgctagatcgagttcgtctggaaatgtcaactgaaaaaacctcctgacttgactcaatggttagtctttttggattagttggagggcga

SEQ ID NO: 3027 - DNA, 606 bp, Zea Mays
tgtgcattcgaggcattagacttcagcgataatcagattgaagggcagttacctagatctctagttgcttgcaaagatttagaggtttttgatatcgggaagaatcttattaatgatgcatttccatgttggatgagtatgcttcctaaacttcaagtccttgttctaaagtccaacatgttcactggggatgtggggccatctatttcagaagatcaaaatagttgtgaacttggaaaacttcgaattattgatttggcttcaaacaatttctctggattattgcgaaacgaatggtttacgacgatggaatccatgatgactaaagatgtcaatgagacgttggtcatggaaaatcaatatgatctacttggtaaaacgtaccagttcaccactgcgatcacatataaaggatctgatataagtttttctaagatattgcggaccattgtccttattgatgtttcgaataatgcattttgtggccctattcctgagtcaattggggaccttgttctactcagtggactaaatatgtcacataataccctcattggaccgatcccgtcccagcttggcatgctacatcaacttgaggcactagac

SEQ ID NO: 3028 - DNA, 364 bp, Zea Mays
ccaaatacttacaggggaaaggcataaccttacaaggaaatgtgctcctaatctccccaagctctggatcgtcacactgaataggagtcatactgcacttgctcaagtttgtgaccaatcccgaagcttctccaaaaattctaaggatttctttcaccacaatcacttcctcacctcttggctgcatgaacaacactacgtcatctgcatatagggagaccctttgcccatttctatttctcaatagaggctgcagtaggcccatatcactagcccacgagaaaagggaattcaaaacatccataactaagatgaacaacataggagataaaggatccctttgccttaatcctctttggtggca

SEQ ID NO: 3029 - DNA, 489 bp, Zea Mays
ggaatggcgaggcaaagcataggtaggcactgaacggacccgacacagcctgatccagttaattggtgttgctctcgttctccctgttcagatctaagggttcagtttggttgtctcaggcaacaacggtgtcacgaacgcgacatcgaaggtgaaattcttttcgcgttcaactaatccccctatgtcattcgatgataatcccttgcttactttggtaatggtttggctactgcacatagactattgttactctgaatgttgcacagcgtcttcttcgaagaagactgggttgattcggctacaacatttaaatgcagctaacccttggtgcttctccagtagtccagcgcatgtgcttcagttatttgtacacgaacttttttgttggctgttgtactcatgccagttgcagattgaccatgcagagtagtgaatagcgaggatggctgatactataattttctcgccatttggctgctcataggc

SEQ ID NO: 3030 - DNA, 616 bp, Zea Mays
attccttgtgagatccgctagagagactacgagttttcgacgccatttttcctcttcgggtgtcgtgtgatgagcggtgagggcggcgggggtgctgcacgggtgttagatgacttagatccgaggtttggctctgctatcctggttcgaacgtggctaaatcttcctgtacgaaacctagctgctcagcccgccgtcagataagctccagtccacagtcggatttcaactcaaattttggccgtccgacaacatatatgtttgctaaatcctttaacgccagtcagattctgactcgagtttcggccgtttgacaagatatgtaactgcgtactttgatgccaatgagcttgctcagtcctagtaccgtttaaacctgtgaaaccaatcactatgatgttggtaatttaattatcgcattttggtgatttaccccttgtttgttagaagtagcacgcactggtttaccttcgttgattcattgtcagcatcaacgttttaaatagctatagccagatttagcctctaagaggactggaggctaatctaatcctagtgctagatgctacttgccgctatttgctagattgagcctgctaaatagcacttaatttag

SEQ ID NO: 3031 - DNA, 301 bp, Zea Mays
caaagtgcacactcgcaggtgcaggggcactcactgagctagccttctcaagcaaagctaccctagcgtctctctctgctagctcggtctgcaagccaggacaaatggtacatgcacccaacaagctagacctagatctcaactagccgtgctcatctagcaaggtggcatacttgctatgcaaactggtgatatttgacatgtgtagagcgcactcatgacatttagtctcgtcggacaccacaacttaagctttagaagactcaagttccctaagtgtgctcccgtacttggatctaaa

SEQ ID NO: 3032 - DNA, 286 bp, Zea Mays
gttaagcgggcccatgaggaagacgcaggcgaggagtacggcggccccgtcgttcgcgccaagcggacgaggatgggcggggacggggataaggtatggttccatcgatccattgcagggacagtgcaagcggccgggtccggcgacggacacgaagccgaggaagagaaggccttcctggtgccgagcgccgcggcgttcccccacggcatgtccgccgccgccgcgggcccgtcgctggccgtggccaagaaagaggagttcagcaagtcgccgtccaactcgc

SEQ ID NO: 3033 - DNA, 326 bp, Zea Mays
ggataatcaagggggggctaggagattagggtttctaaccttgggattaaattttgggatgttataactagccaccaagtcgtggtcacaccttgcagccccacgtgccatggagacaccagcacctccgttgagacatcgtggctccgcggcgcaactaggtgcctagacttgaccgactaactgtcattgcgtgtccgtcgtccgaggcttcaatccaccgtagttagggcgtcaccgcgtgccaggacagacaaccaggggcaaggtcccatcgtgccaatgtccaagcctacccagctagtggccacccgacctggcctccc

SEQ ID NO: 3034 - DNA, 444 bp, Zea Mays
ggatgctgaagttgtgcctggtccgagtgcttggcgtaggcggcgaagggcggttgcaaagcgtagagtgagtgaggtggatggcggtcggcttcgtgtgggcagggctggcaagcaggaaatgttgtcctcgccggccgttgcgagtgtaggtgagggggagttgcgaagtctttttgagggtgaggagcttaggataatgttatttaactatagggagatgggaatcattctaaaggttgaaccgatgtgaggtgtggtgccctcgctgtaagtatgttactatagtttgtatgatgaggtcgtgtgccttcgcgcatccggctatgtctatagggacgttgtgcgcttggtcgggcgcatttattatgttggtctggttgcgcctgtagctggtctgtgcgcggatggtttcttggtgtagacttgtgcatggacgtaatg

SEQ ID NO: 3035 - DNA, 635 bp, Zea Mays
cacgttagtagaccaggaggcgccaccggtacgacggcgatgaacgccggtgagccctcctgactcacgcactcgccctaatcccataatcgaacgcggatacactatgtgtacaccaatgcgaattacatggagaagtccttaccgtgcgccacacaagcaggagcactgaccacggcggagggcggaattgcggtggttcctctacttcggcgagaaattgctgcgcaactgcccaagttctggggggtaaggtcatgacaccattgggacacctctatgaccctcctaagccatctatcgaggatagagcgactctggacgcaagccgtcgacggcgctcctccgcttttctctcttcttgccgctcctgagctccgactgcgtcactcctctcccgatctctctctcacgctcggtcgcgggtagcatgcgttgatgggaggaaaagacggcaacccaagcgcccaatcttatagccccaaggaaggccgggcgaggattccgccggagcccgccatcatcgcacgatcgttgcggtgaacctgtagagggggagatggtgctagggaagtgtggggtgacgcctggtcatcttatgccccactttccccgcgagaatagctactatccgc

SEQ ID NO: 3036 - DNA, 402 bp, Zea Mays
caattatcaagtgcaacgctctggacagcaaggccaaagaaataatcagagtcagaaccagcaaaggagcaactcccagaccaaccagaggtctggtgggagttcacagaatcgtcaaggtggcgccaataacacgcaggccagaagcaacaaacgcacctgtccaacccaatggctgcttcaagtgcggtgagctaggccactatgccaacaactgcccaaggcgcaaccagcagacaccccagaaaagcaataaccaaagaaatgaccagaacacccccgctcgtggatctgcacaaaacaagactccacagaaccagagtagaggaagggtcaatcacgtcactgcagaatcagtgcctgaggatgccgacatagtgtatggtatgttccttgttaact

SEQ ID NO: 3037 - DNA, 524 bp, Zea Mays
cggcggctctgggtgaaattggggttggggattgaggctacttggccgtaagaagctgtgctttcaccgtgcgcaatcgatttgggagaaggtggaggggacagtgcaaatttaacttcgactgagcttcactggtggagatgaaagcacctcgccgtggctccttgctcaatttataggcacggcggtccggtgattgttttgcggccacgaggtgggctgttagcgcatgtcgaccatgtaagaacgaagcacagtaagagagatcgacgtatggcgacagcgcggtggacaacgctgagtcacggcgaccgccggtgagtaactccggccgcatgcggctgggttcgcggagtcgtgccacgtacgagttacccaactccggcgttatccgttccctactgcccacgaacccggacggcggcggcacgagttttggcgcagagaggtcgccggcggtgagtcggtctgatccactttggttactgtaccatggcgcaccttcatcagtcacctgaaccgac

SEQ ID NO: 3038 - DNA, 801 bp, Zea Mays
gccgtctactggacgaccctgacgccgcctgccaacggattggacaaggcgcatttaatgccgagagggcttgtcgcctgtcggtgtagtggcaggcggcgcgtcccctgcgcaataaatgctgaggtcgagcggctgcacgggccttacgtcaggctcggtccattggctcacgtcacgggcctcaggccaaggggctccatctgagcaggaagtccccctcgagaggtggacacgtgtcggcaccggatccccattcatgtcggggtctcccaggtctcagagccctgccagggcccggtccctaccctaagggacctgagacctacccgagggacccggtatgcccttttgcgagccccggtcccattagtacagaggtctggcgcccttctgcggaggtcaggacctatcgatgcatcctggggagttttatctcctcttgccacgcggtgctcctaatcccacccttgtggtgggctcaggtgctgcttctcatgcgaccggggggggcgttgcacggcaatggcacctttatactgtaggaagggggtacccctaattcaaggtaccgacagtggccctcgggcctacctcaggggagggtgcgagcctgtaggtagggccaaaatctgtatcctgcgtagccatagcgcgactagggcatcttcttagcgcacgtcgtactatctcagcgcgcgcatgctgttagtccgccactggccataccaaccgacgtgttggttttcgcggtcaactggcgcatggcccccacgtatggcggttcagtcatgtcccccg

SEQ ID NO: 3039 - DNA, 524 bp, Zea Mays
tattgatcaattcctagccgcccatcccgtgatctacgaccacgattttaaattacaagatttagcagtacgcgtttgatctcagatcgacgacccgcgtccatccaggccgaaatagtacaccattgatttaatctagatcgttgatttcttgatccacaaccatgacttcttcttctacctcccgactcggctgggcaacgacgcctcgcctcagggcaatgtccccaccggaaccagacgaagggcccccggacgcttgcaacacggcgacaggggatggcagccccccaagcaaactcccacagcaagcccccaaaaccaaaacccaccgctgctaaattatgcatgggacatggtgattatgagggggggtccataccagggatgatcagaacgatgcggctgaccacggtctagcggaaatcatcgacattcaaacgacacccagagctgtgatccttctctagcctccgaatttgacggtcccagctagcttctgccacggtttggtgatgtcgaat

SEQ ID NO: 3040 - DNA, 394 bp, Zea Mays
ctgggtgcatgaataaacaaaaggccaggggctactctacaaacgttccaagacacaggctaaccaccatatgaacggcgggttggtttattagaaatccaggggcttatttgcaaaccgcagagccgaaggggtatccgcgaattctggctgttggatctgattcaacggcccagattaaatcttcataactctgaacccgtacgcagcaccaaccgttggatcgagatccgaaggtccggatccatttaaccgaacagctcacctatggtctaatcatatccgttgaactccagatggatggcttagatctcggcttcaatgtgacaacaggagatctaatctacaccgctcagcaagcgatcaacgactcccatctcgtcttccatctcag

SEQ ID NO: 3041 - DNA, 710 bp, Zea Mays
cacgggtagaggctggaggccaagcccctccagcagctgcacgaagaaagatgggatcggcagggccaacccgctggagagtttggaaacaaagaacacaaactcttcggtggaaaggtcgccgagaggagagacaccagcataagtcctcccggcaaataccggcgcattccatccaagcaagtggtataccatttcgagcactcactcagtttgggtgtgctcgggatgaagtcacaaggccatggcaaactacggcaacgcaaagcagaaaccttgaaggcaaaggggcacaaagagctcgaagatgaaagggcaccgcaagtgggagagaagcaagacatggctgctacccgaggggtgaacccctttttaaaggcagatttccccactcgtgccccgaagcgtcacgggcaaggtctcccccgatgcacaccagggttcccatcctatgacacgggggccaggcctcacatgtcatacaagctggcccgaagcacgaagaaggcgaatcgtcgcacaaggagcgtgcaaccgccctacggttatacgccttttcatcttcgccgcaaccagcggtcaagaaagcgaaccaccgcacacggtgcgtgcaactgccctacgattatacgccctttcatcttcactgcaaccagcggtcaagaaggcgaaccgccgcacaaggagcgtgcaaccgccccacggttgtg

SEQ ID NO: 3042 - DNA, 527 bp, Zea Mays
cgtccactaaattactccgaccaccgtacccgagctagccacggcggattcagatgagttcgccggtgacagacgcctcacggccttgcgccacgtgccttggcacatccatcgcatcgccgtgactcgcattaaccctccgttcatcgccggggagcttgccacagtaataggacaccaatcgcgcgcgccagtaacttcttgtttctccggccgccgcgcgtcctcgtctaattcaccggccactgctcgcggactctataaattgagcgcaccgtcgggtccgtagggtaatcacgcaccaagccaccaagtcttgcctccaatcgttcactagagagctccaattccttacttcccccaaatcactcaagaactctgctcggtttgacctcgccgtggccagcgcgcctcaggtccgctcatatcctctgccctcccgttttagcgttctggtgtgcccctaatactccctgaccaactcaattgagctaggatcccttagatcaccgggaacgcggttgact

SEQ ID NO: 3043 - DNA, 525 bp, Zea Mays
ctgcgcttgtgttggagcgggtcgaggtgttgggtaatgtggtggtgccttgccgcggttgagcgccgccgtggcaccacgcggtgtcgtagtcaagaatttgagctcgatgttaggatttgtgcgttaggccatgtgattcggggtggtcatggcttcgttcaccctgggtctgttgtgagattagaacctagagtcgcctatccatgtgccccagttgggtttgcggtggtgctctagctcactgtcacagtggacggagggaagaagaagacgagactcagattgttgatacgatgatgggcggaccagattagtggagcgcaacactatggccaggtgcaatggtgtccgtagatcatctagcgagcgaacgagattaaaaaggaagaaaacgattcaggtacatgaatcgtggtctggatctatgatcctacgggcacaactacttactggttcagtggatggatcttagccattgattgaacaatgtgcggtcaagatcataatagagacgacgttgac

SEQ ID NO: 3044 - DNA, 452 bp, Zea Mays
cgcaggtgggtcccggacctccatgtgtgccatctgaacccccgcatgagggtcccggacctccccgtgcaccatctgggccacagacaaggaggtcccagggcttcaagccctcctacgctcttgttccccgctctgggctcaggtagaggtccgaagctgccacgtggcccatagacacgtggcacaagccttcggctagaagcaagctcgttgcccacactcaatgcgagcggctaaggcatgccctgctatgcacagggcatggacaagctttcgtcaggccgcgcaggtgtgaatgaccgctccatgcgttaccgatgcggacaattgtgtgtcaacgccgcgcgtaggacttgtacattgcgtcgcgtgataccgaggcatacgattgtgtcttggcgctgcgtgtgtggacaacaccatcatgagcggtcgtccgtgcacgttag

SEQ ID NO: 3045 - DNA, 333 bp, Zea Mays
ccagaattcccatgttagcctacagtgcacgattacccgccgcgctagatgctaaccgaagctgagaccacgatgaattatggaaggaagtactcactcgtgattgagttgatgacagggcagaccacggagcgaagcggctctgccgtggtacgcacgactggcgaggatttgccggtgacctgagtcccttcgagacgatggatcctgatgttcacccttcacacacctaactccttctcccctcttatgcaaacttcaggttaatcggcgacggaagcgaatgccccaatcgccgtcgcgtctctcacttctctctctcctgagtcgcaa

SEQ ID NO: 3046 - DNA, 407 bp, Zea Mays
ggaataataggtgcgcaaaatcgaagtcttttccaaaagactcgccgtgcagaagtcggctacgagcgcggccggatcaacgaaggcgcgcagccttatcatacaaattatggttacatatacacagcgagggcatcacatattacattggctcaaccttcgggatgatacccatctccctgtagttgaacaacattatcctcagttcctcaccctcaaaaagatttcgcagctccccctcacccacactcaccccaatcggcgaggacaacaattctcgcttaccagtcacgttcacatgaagacgcccactctccatctcaccacgttgacgcccaccacttcgcgacaatccactcaccctccgtttcgccaccgcccttcgccgcctatacccagtactcgcg

SEQ ID NO: 3047 - DNA, 594 bp, Zea Mays
ttgtactatcttcggaggtgatgaatgaggaagaagttgatgaccttgccgaacttgaatgttcggtgacccgggtgagtgacttggcagaggcgggagctgaagggcatacaacacctccagggggtgctgctgaagaccctgcggcggcggctgcttcggcgcaggttgaagggatgcaattggggatgggttggtggttttgatttttgtatgatactgagatcggttgctgcgcaagtttcaacgtccggaactgtgcaagcaaaccctgatgatgttaaaattaatgatgttttgatggatgcgagtgcgacgtttcttaatggcaatgtgtcggagtgatcagattttgggtcgtggtctttggaggatggggaattggggagccctttctcgtgggttgacgaatcttctgaagatgacttagattattttgcagcgttggaacttgctgcattggagtttccgctgcgattcgcccctcacgaggtgctggtgacctcaactgatgtgggcgcaggagaatcgtgaaggcggaggatgggcgtgtcgaaatagtgcatcaatgagtcttcacgaagtgtatgaaga

SEQ ID NO: 3048 - DNA, 408 bp, Zea Mays
gcttacggctcgacgtcgcgtcctgtcgtcgcagatcgacgatgcagcgggggcccggccgggagcggtgtgactagtttcctgcaaagccagttctcgtccgtgacgaagcgcgaggaagaagttggatactgtaggcactgaccgtggagcatgacagtgcaaacaagttccctcattcaattcgttctcgtctctctattatcctcgcaacccaaaggcactagcacatcaacgtacacacgcatacctctctagtatgagtatcctctatcgtctctattctccatctatcgtttccccttttgctattcgcagcgctcaagctactttacccaaatcaacaactatgttttggtttattattcctcgattacttcctccaaactgaacccaaggacactaccg

SEQ ID NO: 3049 - DNA, 789 bp, Zea Mays
cggaatagcacgacaggagcattaatcgaagtcttttattcaaaagacagcgcacccggaataacgttaatcgaagtctatcattacaaagacactccgcacaaagccgcccacgtacgcagccggaacaatacaagtgtacgaatacggccaacaagccacaacaccattacaattacacacacacggcgagggcatcgcctatcacatcggctcaaccttcggaatgatacccatctccctgtaattaaacaacattatcctcaattcctcaccctcaaaaaactcccgaagatccccttcgcctatgcccgccccattcggcgaagacaataattctcgcctaccaaccccgtctactcgaagtcggccatgctccatccccatgcgacggcgcctgccactccgcgaaaattcaccctcacactgttttcccaccacccttcgccgcctacacccagtactcgtaccaggaagatcctcggcaccctccacacgcggtgaagtctccaccgcagccacatccaacgcaacaaaataatctaagccttcatccgaggactcctccgtccaaggaaacgaactcccagactcacgtcggactcaaaacattcaaacatagagctaggcgcactatcatcggcgggcactacaactgaagtctccgccgcaaaatcagtattgtcagtagtggttgcttgcgcaggcccaaacgtcggaacctgcgcagcaatcgaggttcagtatcacacacacaaaagttcacatgcaatccctaacccctattcc

SEQ ID NO: 3050 - DNA, 1075 bp, Zea Mays
tcaggtcacactacacctgtgctcgcacagttttgtgccaggctataaggtatagaatctccatggggaatcacgccttgaacgggcatcgcaagtagaagttgatgacggtgaagatgttgataggatggaccggatgcttgaggatctgcagcctgaattggccccagatcatcatgattcacctacaccagaggttcagaagttctttgacatcagaatagcctattcatgggcacaccgatgtgaccattctcgaattcgtgacccgactgatgtcaatcaagcccaagtttgcattctcaatcaattgttacaaggagctcgtggatttgattatcaaggttcttcctatgggtcacaagatgcccaaagacatgtaccagtccaataaaatgcttgaatgtcttggtatggagtatgagaagattggtgtttgctaggacaactgcatgatcttttggaaggaacatggtagagaggagaagtgcttaaaatgtggcaagtcgaggtacatggagcttgtaaacgaagatgggggagaaggtggtgacaaaggttgtacataaacagcttcggtacatgcctctcactcctagagtgaaacatttgtttctcttgaggaagaccactatgcgcatgaggtggcacaaagatcgtatggacaaacaagatgggttaatgatgcacccgtaagatggtgatgcatggaagtcccttgacaacattgatccagagttcgccagtgattcaagaaatgtttgtattagcttggcaactgatggtttcacgcctttcaatatgaccgttgtatcgtactcatgttggcctatcattgccatctcgtacaaccttccacctgctctttgcatgaaatatgagtttatgttcttatgtcttgttatacctaggcctgagaaccctagcgtatgctttagtgtgatgcttcaaccactgattgaagagttaaagaagctatgagaaggagtggaagcctatgactgcttcaagaagcagaaattcaatctttgggttgtgtatatgttctcggttcatgattttatggcgtatggta

SEQ ID NO: 3051 - DNA, 293 bp, Zea Mays
tgagacagtcatttggggttgcggcaacagatttcagggtccctttcaccattaccgtcaccgtgctcagacatcgtctcccgtcgtcttcatcgcggctggaggtttctcgcggctggagatctctcgcggctgtgagttctcctcgtcctcctttcccatccatctctctcccctctgttcttcctcttaccgtcgccggatgtgagtttagggtttaggtgagttcagttccatggatttggatccgtttggcatttcgcaggacttcgttgctcctctcaactcccccg

SEQ ID NO: 3052 - DNA, 497 bp, Zea Mays
cggttcttggcatgttctgcgggaggcacgcaacggccggatcatgtcctcccaccctatagttctttctgaacgcttaaatgaggatgagctgaatgctcatgtagagtcatgtcatgtgtgtgatggtccccgatcgagatcagagcagcgtcatggattctctacatatgcgcgcggtgcgacggagacggagacggagaggcatgcatggaccgccatgctataggcacgtgcaaactctagctccccgtacgtgcccgaaaaggtggtgttgggtggactggagcctggagtggtggacactatggcgacggatgcatggagttggacgcccatgcatgtgttacgtacgttggacagtcacatgcactcgcgcatccgcagcggagagagagacaaggacggggcatctgttctgttcagaggcaggcccggccggcacgcaacggcaagcgaagcggccggagaggaggacaaatcgaactcgaagacgg

SEQ ID NO: 3053 - DNA, 966 bp, Zea Mays
tatgcatccacccgttccaccgtaaggctatagatattacagctatacaattttcatagcagtgtatcatgttattgctgttgttgtttcagtaagaaaatgtgagattcatagagagtatgacaggtatgaccagagaaagtaaaattcataatgatcataaatttattgtccagccaatgcaccgtcggaagtgtacataatggtacttatgttggaaaaacatttctacaagtcataatggctggataaggatggtactcatgttgcaaacaagggcagagccacagttcaaacaatgttctgagtttgggcaaattacttcgtaaaacaatgcctgtggaagcgatgatcctatgatttcagcaagattattatactatgacatcaatgccagattttcaggatccattgcagctaaacaaaaactatgcaaggcataaagtctgaataagaatactcattgttacttccaagcttctaaaagcacacagcaagatccactcggtcacgcaactcagtgattgtaaagcttgatcagcctgactatggagttatagataagctagaaatagatagcaaactcgtttatgtgaccaaaatacaggattatcatgcaacgagcagatgaccctagaaaccaaatcagaacatgttcaggcaagcaaaacatcacacacttacacttacagccagaggcggacctggtaaagggcatgggtgtacacatatacattcaataatgtttgcaagagagactgtaggttagtaggaataatacatgtatacacttgtaattataaatcagatacgaatacagccaaatagtgtaggttagggttagcgaactcaattccgcgcagcaggaatgggagagcatgtggtgtgcatgcctggcggtgctcgtcgccggcgaagggcccgactaaggcctggaggcgaagacctggcgaagagaccgatcaa

SEQ ID NO: 3054 - DNA, 1427 bp, Zea Mays
cggtcgaacaccgtctaacccaagtctcgtggcctgaatttggttccatgattcgtgaacgctttggcaaggatcaacatgaacacttacttagacagttgctgcatatacgccaggtcactagtgtcactgattatattgagcagttcgcacaacttgtagaccacctcaatgcttatcagtcacaggcagatcctctttactataccaccaaatttattgatgggttgcgtgatgatgttcgtgctactgttttagtgcaacgccctcgcgatctcgatactgcctatgttcttgctcagttgcaggaggaggtgcacgacacgcacaagcctcgcgacaccaagacgtatgccagaggtgtaccgcggccatatgtttcttcgggcgccaccttggacatcaaaaatccatcctcagccaagctggacacatcgacatctaaaccctccacggttgaagatagattgactgcattgtatgcttaccacaaggcaaaagggctctgttacaagtgtgggctgcaatattcccgtggccaccgatgtgctgattcagtccaacttcatctcgttgaggaagtttggcaatcccttcaattatctgatgaagaggacagtcctaattcacccactgctgaagaggccaatatgatttccttgtcacaggctgccacagtgcgtgctgacgcccctaaaaccatcagatttctgggccatattgggggaatggacattctgatactgctggactctgggagttctgtgtccttcatcagtcagcgagtggccgatcatcttccccattgtacaccagtatccaaacctttgctcgtgcaagtggcaaatggtggacagctatcttgtgatagagagctgctcaatactacatggtacctcaatgaatatgagttttcttctactctgaaggtgttggacctcaatcattatgacgtaatacttggtatggattggctctcacgttacagcccaatgtttattcactggtctgctaagtggctaattattccctataaaggttcttcaatcaagttatggggcatgggggctcctgatgttcaatgtgcagcaatagaagtctgtgctattgagactcttcctgacaaagatcaaactctggtgcaacagctacctcaggaacttcagcaattattgggcacttatgctgatttgtttgaggtccctcaaggtttaccaccgcagcgagaatgtgaccatcgcatcccactcatcgacggagctcgtccggtgcaactgaggccttaccggtatgcgccagctttgaaaactgaaattgaaaaccaggtggcagaaatgcttcagtccggcattatccagcgtagcaaaagtgctttctcatcatcagttattcttgttaagaagaaggacaatacctatcgattttgt

SEQ ID NO: 3055 - DNA, 368 bp, Zea Mays
gccatgccggaacaggaggcagcggtagcgccggcgaggctcaggaggtggaactcggagtcgttggatagcatactggagcaggaggcgagagtggcgccggcgaggagcacgaggtggggttcggaggtgatggacgccatgccggaacaggaggcagcggtagcgccagcgaggctcaggaggtggaactcagagtcgttggatagcatactggagcaggaggcgagagtggcggcggcgaggagcaggaggtgggactcggaggtgatggacgccatgccggaacaggaggcagcggtagcgccagcgaggctcaggaggtggaactcagagtcgttggatagcatactggagcaggaggcgag

SEQ ID NO: 3056 - DNA, 554 bp, Zea Mays
tagtaggccatcgttttcccgaacggtgattattgttggctgcgctgctgaagaaaggtgcggtgcgtggagagtggagactgcagtgtcctgctcctgcgggcggttttagggggggggggggcgtttaggaaggaggcccaatctactgtctagtatagcaggctactaaactactaacctgcacgctatacaacggacggatgtgtggtcgctgttcagagaaggtatcgtcgtcaacagccgaattgataccgctgctagcacaccctgcactctgcactgtgcgtgtcctcccaagtcacgtactcacgtcacgtgacgcttgtgctgctcggagtgctggggaccctcgggtacgaatcacgtactatccgaaacccggtggagtttatgtatcccaggctcccccactagtactagtagtagatttgaatcctgtttggtttctgcaggatctgcccgtctgaaccagtagctgccaaattagtgaactcaattgctgagctgagtctgtgtctgagtgccgcgcccaacagtccagtccagtccag

SEQ ID NO: 3057 - DNA, 396 bp, Zea Mays
gaaatactaagtggttgggaaggcaagacattcaatatagctagtggagggggacataaatacccaactacaaaaactagtcgttattgcacaacataatctgtgggcacaccggatcgatgctaagctggcaaactccaaatacaatgttctctaaaagattggttcggtggaccaccggatggttcggtgcccaattccagatcaagcacagcaaaggtctctctgatagaacggtccggtgtgccaccggactggtccggtgaccagcagagaccccaatccattttctaagtgtttttttgaattggtttttaatccaaacttcttgtggacctatgtgagatacctagcactagttttatgcatgggtacactaccacactacatgagcca

SEQ ID NO: 3058 - DNA, 332 bp, Zea Mays
tgagccttcttgaaaggtccaatcatatccaatccccagcatgcgaacggccaagttatgggtatggtttgcagttgctgcgctggtagatgttgctgttttgacaagtactggcaggcttcgcacctctagattaactcggttgcatcactccttgttgttggccagtagaaacccgacctgaagaccttcccaaccagggtcctggatgctgcgtgtatcccgcactgcccagcatgaacctcttctagcagttgctttccggtggctgagagaatgcatttcatgaggactcctgatgcgccccttctgtacagcgtttccccaatgag

SEQ ID NO: 3059 - DNA, 551 bp, Zea Mays
ccccaacactagagactaactaaggatcactgactaacatggagaaaacacgacccacaacattgttttaagccagcaactcatcgacttggaggaaagatggggccttggctccaatcaaggaccagagcaccgcctcttccctagccaccctaagggttgtgaccaagctaggattacatccatcaaagacacatctattcatatgcttccatatggtccaagcacctaggattactaaagaattgaaaccctttctcataagatcagatgcccgagagctgctagacttccaccacgactcaaaggaatcctcgtgagctggacacagctcctgcagccccactgaactaaggaaatcaaaccagaactgcttggcaaaaacacatttgaccagcaaatgatttatggtttcatcctcttggtcgcacaaggggcactactctggtcggtctagtcctctttttctgagcctgtcagcagtcgagcacctattatgttccacaagccagataaagaacttgcacttcctaggagcccaagatttccac

SEQ ID NO: 3060 - DNA, 704 bp, Zea Mays
gatagacacataaaaaaataccgaacaatgtccaaatggttcttgtcctttgggtaccttgcccttgtcagctcttgtcagtgcttgaataatattcctatcaaaatatttgatgcgtggtgttccacgtttattctgaggtgtcgctgagtcatgaagatgatccaaataatacagctgcaaaaatcataacatgaatcattgtgagacataacaaagcataatcaacatgtatatggattttgcataaaaaatatggctacatataacagacaaaaaaaggatatgcttacaagaatgacgatggaacatccgtaaatggttgtagaaacgtttgtaacgctcctagtatgccacttcttggtagcttggcataaatcattgaaaataagctggcactagtccatctggtggaaacaattcatctcctcagttaaaagaacctcatggttggttattccccagctggcagtagggaacaacaacctattgaacagtatcaggaagaaggatctaatgcttagatcatcatcagaccctttcctcagacgatcttgaagagctgcaaccccaaaatcttctttcgataaaccaagttcagcccttaaattgttggcagcaatagcttcatcaatgcccaatgccgttcctccaccagcatttggtaaccccaaaataaggtgcaccgcatcctttgtaatttt

SEQ ID NO: 3061 - DNA, 780 bp, Zea Mays
gcccactataccctcattggggatgcactgtacagaaggggcgcaataggagtcctcatgaagtgcattcctttggttactgggaagcaactgttagatgagatccacgccggacagtgcgggatacacgcagcatccaggaccctggttgggaaggtcttcaggtctggtttctactggccgacagcaaagagtgatgcagccgagttagtccagaggtgtgaagcttgccaattcttatcaaagcagcaacatttaccagcacgacaactgcagaccatacacgtaacatggccgtttgtgtgctggggactggacatgatcaaacccttcaagaaagctcagggaggatacactcacgtactggtcaccattgacaaattcaccaaatggatagaatacaaacccattgcttctctgacttcaaccaaggcagtggagttcatacaagatataatattcaggtttgggataccgaatagcatcataaccaacctgggatccaatttcaccagctctgaattctttgatttctgtgaacaacaaagtattcagatcaaatatgcatcagtagcacatccaagggccaacggtcaggtagaaagggctaatggattggtactggaagcactcaggaagaaagtcttcgacaagaatgaaaagttcacgggaaaatggatcgaagagttgacgtatgtagtttggagcttaagaactcaacctagtcgagctctgcatgggaatacccctttcttcatggtctacggttcggaggcagtg

SEQ ID NO: 3062 - DNA, 686 bp, Zea Mays
cagaaaccgagctcaggaacacgcgttcccgccaactcatggccgaactaggtaaacgagtgccaccgtgagcttcacaagcatacagagacatgaaaacaatgtttgatttggacggtgtcttaccagaatggattggccacggttgagctgctcttcgtgatggcggagaccagtttgggggaagtttgaaattcaagagttcaggtgaatgattaagggtgggagcgggtgctatggcttcacaaagaactctagttttacttcgcacacttaaattgagagaagggggcagaggtagcgtgaattcttggttcggttcaactcactgtgtgcgggatgttcatacctcgcagtggatcacgggctatttatagccgcgacggtccggcgatcacttcccagccatggataacttctttagtgcatgcctagcacgtagaggagaggtacaatgaggtaaatcgaagcatgtgtgacagcgcggcgagagctcactgagtcacggtggccaccggtgaataactccagctggactcggggtatggtgccacgtacgcgttatctaactccggtgttatccgttccttaccgagcccaaattggaacagcgtcggcacgaatcgcggcggtgagatttttttggcgctggcggtctgatccatttcgggacactgtaccatggc

SEQ ID NO: 3063 - DNA, 533 bp, Zea Mays
ggaaagcgagggcttgtcaggccctgccatgccatgtgccgaggctggctgtggagcctcgaccatgcatctctagctagctcgatcgatcaatggcctccggtccgatcccggcgtgatcatgcatgcgttgggaaatgaagatgtgacgatgatgcagcgggttggagcaggtagcgcacctgcgggcaacgcaaagctgcctagctagaagctagtagagatctaaaggagctcctggattgccgttatactttcgtttggctgcgtgcgtggaagcttttgagttggtattccaattaaggaaaggatcatttgacatgaacgacaagggcttgtgctgttgtgcagctgcagcctcttgctgtcgtttcagtttcacgcatacaacaaagcgataagcgagagatgtcgcgggcaggaacaactggactgctctgggcttccgccccctaggctcagacgcctgaaagaaaggccaccgagcctaccttactgggcccgcttagattacttcctgcaaaaatagtgat

SEQ ID NO: 3064 - DNA, 440 bp, Zea Mays
ggacaatccataatcccaactcaagcgacgacaggggaaatcactctcaaggccatcagcgaagctcctaatctttagggacgtaacaaagtacttacaggccactagctctaagaggcagaggaggaagaagcttcggtggaaggttcaactcccaacccagaaggttgttttgtttattctatggagaagataagggacatacaacaagaatgtgtcaagtcacgatccagaagcagaaggaaatagctgaagccgaagcaggtcgtgcataccacttcgtgctattccccgtacatccccgagtatgtgggcaaccagcactccacaacatcagttgcttcggcaagccactcacaagccgtatggaccccgctaccaccaccacccatggctccgatcttgtctcacaatcagcagccagaagggcaccgccaggc

SEQ ID NO: 3065 - DNA, 842 bp, Zea Mays
caccaacttgctcttcaatgtctgataactgacctcgcaatcgctagaccagatgaagagaacacccttctccaagagtctagtcagaggcttatcaatgctggaaaaatttggtatgaagcgtcgataatatccagcgagccccaagaaacttcggatttcagagacactagagggtctcttccactccaccacagccgcaacattcttgggatcaaccgcaatgccctgttgattaatcacgtgtctcaggaaagccacttcggacagccaaaaggcacacttcttcaacttgccatagaactgattcttccttagggcacccagaacgagacggagatgctgctcatgctcggcctcggtctttgaataaatcagaatatcatccaggaacacgaccacaaagtcatccaggaattcatgcaacatcctattcattgcttccataaaagcagcagaggcattagttaagccaaaagacatgactatgaactcataatgcccatacctggtgcaacaagcggtcttctcaatatcctcctcatgaatccttaattgatgataacccgagttcaaatcaattttggagaacacctgggcacccctcaactgttcaaagaggacctcaatacgggggagcggatatttattcttgattgtcacttgattcaaagcgcgataatccacacatagccgcttgcttttatccttcttctcaacaaacaatactggggaagcccatggagacctactaggcctaatgaaacccttagccagcagatcatccaattgccgcttcaactcaacctgctcctttggggccattcgatacggggccttat

SEQ ID NO: 3066 - DNA, 351 bp, Zea Mays
cacctcaaaattttggaaaggccttcagcaagcgatgggcaccaagttagatttcagcaccgcttatcacccccagtcagatggtcaaacggaaagagtcaacaagatcctcgaagatttactaagagcctgtgtgttaacattcgagagggattgggagtccagtttgtcgtacgctgaattctcatacaacaacagccatcaggccagtatcaaaatgtcaccgttcgaagcattgtatggaagaaagtgccagacccccctaatgtggtccaatgtaggggaaaggacactagaaggacccgactttgtcaaagaagccaaagagaaagttgccctgatccgcaagag

SEQ ID NO: 3067 - DNA, 576 bp, Zea Mays
tgaacttcgtaaattgcgagggggcacccatccgaggtgatgaggacatcctccactattacccgttggcaaagacgcaattggcccagttggcccaattgtagtcgaacggtgaccgtgtgagcctcagatttatcccacctcgcttaacttgggaggaggaagccactttaaaatggagagccacccttccccattggactactcttttggggcgattgggcctttcccttagttgggtgtgcttaatgaactgttgggctccgggcaaccctaatttgttgggcctcggccaaccccacctgggctaggtgtatcatctggtatcagagctagggcccattttaagaaggtgggaatgatgaggacatcctccactattacccattggcaaagacgcaattggcccagttggcccaattgtagtcggacggtgaccgtgtgagcctcagatttatcccacctcgcttaacttgggaggaggaagccactttaaaatggagagccacccttccccattggactagtcttttggggcgattgggcctttccctgagttgggtgtgcttaatgaac

SEQ ID NO: 3068 - DNA, 578 bp, Zea Mays
gaaccagtagaccatacgtgacctctggtataggggaacaatctggcgcttcaagaagtcactaattgtatgcatcgatgtataaccacccactgccagagtctcgatcctgtctagcatggggtcgagctctaatggtaggggtgtttggttctctagtgcttgcgatcgagggtgggcccactagatggcagcttaaggcgctcgttggcctcaatgctagcaaacacctagtcattgcgctagtcttcccacctcccaccggcaaggctggggatgtaggatgtcaacggttttgaccttgtctagaagtagtaggcaccaattgcgtccttgctctttccagatccaaccagtacataaaagaggcagaaaagagagatgtgtggtcatacgaccatgaacatctcgcacaggtgaacaaaattcaccacctggaggatggagagaggcgtgcaaggagcaaggatgcgcgaagacgaaggggcacatgagcttgggagagaaggcgaatgcaaaatggtaaccactatctgcggcggaagcctttattaagtttgactcacccatgtgccccg

SEQ ID NO: 3069 - DNA, 709 bp, Zea Mays
atttggagttcatatgcattttctacaatttaaacaagttctaacatttatttatgcactaaaaattgatttctgatattaatttctgattttcgatgctctctggattgggcctcaaattccagaaagtgcaggggctacggtgtaaaatatcctagacacagtgaacagcaatatgggacggcgggttgttttttgttttagtcagggtctctttagcatgattaccaagccgaaggggtatcctggattgccagccatccgatcatcaatcgagggctcggattaaatcatgggtggtcatgaagtcgtcatctcccgaccaaatcctagccgccccatcctgaatctacgggtgagattttaagtgggcgagattgatcagggatcgctcgatccaaacccacggcccagatccattcctcgaagcggtacgtggttatctaatctgaaccgttcatttatggatctagggtcgctctagcatcttcaacctcacgctcgcactctccggcggcggcacgcccagactacagcgacgagggacagccgcggcagcgccttcgccgcatagcaccacatgcccaaggtcaagtgttcgctacaaccttacgtcccgagaatggcttatgcgcagttcaaagtgagcacaacatggggaaaactcaccaacgcagaggcataaatgaggccggacgaagacgacgtg

SEQ ID NO: 3070 - DNA, 329 bp, Zea Mays
gtggcaaagtctgacagcgggtgtgagtcggcaatgttgtcggcggtgctggcgaagcatgggttgaggccgcggaggatggtgcagcagcagggagggaagcgcaggatctagagagctgataccttgtagaaagggaagaatggagtgaatcaccacacacccattgagggtggggagcctgtcatatatagccaataggcatgcatggaaggtacatgtatgggaggctattccctgtacaaggaaacagtcctaggctatagatagaaagtaatcctagactatacaagacagctagccaatctaggggattacaatcaatcgct

SEQ ID NO: 3071 - DNA, 702 bp, Zea Mays
agcctggactcggtgttgacatccgacgcagtaaggtgggcctccacgtcagcacggatggactccgacaggttggagaggcgccgatctgcttcagcgacgtgggattcgaggccgccgacccgagactcccacttagcctcgagcgattggaacctcttgtccagttcggcgaggagcgaacgggtttgattctctagtgctagggtgagatttgtctcagcaggaggagtgtgcgacatgtttgtggcaagggatcgaccctctgataccaatttgttagctacctatggaaggaaggaagaattctgggaaggatacagaagggagggagttcaggagaaggagaagaaggtagacgaggatggcatttccatagagttcagatagtgttcattacaagcataattcctgaagacagacatcatctcctacatatacttcacacacacggggacccaccaggcagactaacagatagataaacccaccacacagagacctgcatcaagcccactccggaccactcgtacggacattaggacgacgcttgcgagctcctcggtaagtggtttcctttgtgtgcaccggcaacggaggtgtaacataagggctctaggatcacctggtgccacctcaattgctcgttggggtttggattccgccgcgggaccacctcatcgcatggtcagtccctcccgg

SEQ ID NO: 3072 - DNA, 429 bp, Zea Mays
tttcgtagttcagggtacttgttgcttgggatctcagctgagatcaaaaggtcatactgctcagggcatgtgagcttgtacttcctctgcattatgagtagaaaatgggcatgcggcaaaccccgcttctgaaactccacgacatagacgtaggctcgaaccttaccaagaatatcctgtttagtcagcctatgctttaactcctgtagctttgcatgaaagacacgcactacaagatccggacgatcttgcggtgtctgcccagggagaagctccctccttatctcatcccagttagggttacatgtcatggtaagaaagatgtctggtttaccaaacttgcgcaccagagccataacatccatataccgacgtctcatgtcacgaggaccgccaataaacgatgttgacaacacagttcgcttgcca

SEQ ID NO: 3073 - DNA, 354 bp, Zea Mays
tcacagtactgcagcgcgtgggttcagttgcatacaaattggagctaccagctgagtattcagtccatcctgtattccacatctccctgctcaagaaggctgtctcgcccattcatcagatcagcagcaccttgcctgattcatcagctacaacgcagattcctgtccaggtgcccgacgccagaaccatctcccgtggcggtacatctattccccaggtgcgggtgcgctggtccggttgcgacgacgcgctgggaagacctcgacgccattcgccaatagtttccccgatccgctgcttgggggcaagcagcatcgcaagagggagggaacgtcagcaatgctccatcgctg

SEQ ID NO: 3074 - DNA, 733 bp, Zea Mays
actttcaaatcctctttatctgctttaacaaacactcctgcatcaccagcataaagagaacagtgaagctttgtcgctcgtggtagaaccctccccataaccccagcatctgccgccatctcaatcatcctctgtagcgggtccatagctaaaataaacaggaacggggatagcggatctccttgacgaacaccacgcatgtgcctgattgcatttgtttgttgaccattgataaggattttggaggaggaagagcccaaaattgtggcgatccaattcctccacttctgagaaaaacccaaggctcttaaaacctctaacagatatgcccagttgacggagtcaaacgcttttgagatgtcaagcttgacaaaaagcgctgactgtttgctcttatggagtttctgaacaactttttgaacgtagaggaaattatcgtgaattgaacatttctgaatgaaagcgttttgggctgtggagacgatctcgttcattcttggcgcaagtctatttgctaaaatcttggttaagattttcataaaactgttgatgagactgatcggtctaaacatgtcaatcatgtcagccccttccctcttttgcaaaagcgtgatatttgcctcattaacaagatgcaggcttttgcatctatgattatagaaatcatgaatagcattggatagatcatccttaatcagctcaaagcaacacttatagaataaccctatgaacc

SEQ ID NO: 3075 - DNA, 326 bp, Zea Mays
caactcctaactcactcgcgtgtgctcgtggacgcagcctgtttcgctgactcgtggggccggatcgtcaggaccttccttctcgcgcggactccgttagaacagaatgcagagcttgcgcaacaacccccgtgccgtcagcctcactttcttcgcgcgtgcgcttgggctgatcgcaagtgttgatcatctatccatggctggtggcccccattgcatcagctgcgtctcctcaaccagaacggactgacggggtacaacctctccggagatcgcggtgttcattgcaaccaagcttggacctaacacctggatgcttcccttta

SEQ ID NO: 3076 - DNA, 345 bp, Zea Mays
tttagacacagctgatccatttaatattgttacgacctgatacgacactatttgaaataggcccatgttggactagcccgcaagtgccgatccagcctgatacgattatattaagatatatatatttacaatgtatatccttggtatataagaaatgtctttcctataacacaaaagcagatgagttgtattggccagcaccttccctctataaggcgcatggtcgaggcgctgcagaggaggcacatagggagggaggatgcacaacgattttgacacttagggctagtttgacaactcaatttttctaacaccccgtttggatcattggaattgaattccatt

SEQ ID NO: 3077 - DNA, 293 bp, Zea Mays
tgttgtgcttgcgtcatccacagggcatcacatagtgggcacctaggcggtgtgaaacctgcacagcacatagtcctccctgttcggcgccctagtcggtttacaggcaaagcggtggattctcccatgtcgtttgtggtgggctcactgtttaggcaccattctggcttcttgtgcttgtgcataaatagagaaggaaagctctctgggctggctacgcttaccgcattctcgcattcaagcattcgccttcccttggaagcctccctattggcgagtggcgtgcatttatg

SEQ ID NO: 3078 - DNA, 713 bp, Zea Mays
gtcgactgtgagctcggacgggactccgaatcggcaaacaatgttttgccagaagaacttctgggtagtcttcgacgttattgtggatactaccctggcttcgatccacttggtaaaatattcgatggcgacgaaggtgaacttgaggttcccttgagctgtaggtagtggcccgagaatgtccagcccccaacgttgaagtggccatgtgtgggcaatcagcttggtgaactgcgaagggttgcccgagcggggagaaaacttctggcaagcttcgcacgacctcgtgacttgattcgcggtgtagattatagcaggccagtaaaatccttgacggatcaccttggcagcgagggccctaggccctgagtgagagccacaagttccgctgtggacttcgcgcaggatctggatgccttcggttttggtgacgcatttaagcatgggttgactgacccccttcttgtatagctgaccctcaataagtgcgaagtcccggcttcggtgcttgaggcgcttggccttgttgacgtcacttgggtggtaatatctttataggaacagggttattggggcccgccaatcttcagtcatgatgagcttgacgatgcgatgtccctcagcgtcgttggttatttgtagaccctctagattgcggacggctggtgtgccaatgacatggtagaacacgtcggagggcaaggcttcgcctc

SEQ ID NO: 3079 - DNA, 568 bp, Zea Mays
atggcgtggaattaagctgatacttcacgaataggtttatatgggtgaatatgagtgaagtgtgtgcttggtttgaatttaggcgaagaaaatggaatttgggcactcggctcggagacgatcgctcgaaacagggaattgagtgaaattgaagcctggtatatcggattggcgtgaaatttggtgaatatgttactggaggtgttgtgaaggtgcctgaaaagtttgggttcaatcggagcgtttttggctggtttgggcatttcaccgaacacgtgatgtgcgaggatttagggtttcggtgaaaaggctatttgaggtggtgaaaccctcccaaaggagctaagaacctgtaggggatttaatggagcactagggcacacaaccatgcactgggattcacaagatttacacaagaatttgaaattggcacaagaggtgggaaggagttcactgaccagagaaatagagagagggaagacgatggagggaggtgctcaccgagaggaggaggcagaggagcctacgcagaagagggtcatgggagcacgacgccgtcgatcaccgc

SEQ ID NO: 3080 - DNA, 360 bp, Zea Mays
ctattactccttggactttatattttgatggatcggtttgcaatgaagggcaagggattggcattgtgcttgtttcaccaagtaatgtctccttcgacttctctagccgattgaaaacttattgcactaacaatcaagccgaatatgaagcccttttgtttggcttggaacttttaaattgtatgggagtaaaacatgtaaaggcatttggtgattctcagctggtcgtccaacaggtgttagaagaatatcaatgttttgatggtactctaaatagctaccttgaaaaatgttggagcataatccattcttttgacgaattcagtattcggcatatctctagagttgagaatcatagag

SEQ ID NO: 3081 - DNA, 271 bp, Zea Mays
ggagacatcgcgatgctctacgatctatagagatcataccttgtagagaaaacatgcgaaaacctaagtcagtcccctacctggcgcacctgcctaatcctatgaatgggggctactgtaacatcccaaaatcctaacctagggttgaaaccctaatctaccctttcccctccttttcatcctctaattccaagaactcccttagattttctttcatcatatgcatacaccttgtttaatcacaagcacctcacttagattctattttcca

SEQ ID NO: 3082 - DNA, 381 bp, Zea Mays
gtgagtgagtggtggcaataaaagctcagctcgcgcctcgctatcagcgccaccaactctactaaattgaaagcatttccgttccatgcattatgatttctttgttgcaatatcaatcggatgccatacgtatcattcatgcattcagggctgtacaaatacacttaaaataggccatgtgcatgctccgcatgcctcagccggtatctctgaagatgactgaaaatctctccctcacctaccgtacccgtacggctgtgttcgtgtgttgcctgcctcaatcgatcaaccagttttgaggccattagttttcgtctttttctgccaggatgcgaactgtggaaaatatgtgttccccgcatggtttgggcaggaccgaaa

SEQ ID NO: 3083 - DNA, 383 bp, Zea Mays
agttggtccaacttttcgattttatatgggtgttcaactgagcctcttatagccctcgttttatccgcccgccgctctggaatgtaatacactccgaatttgatgtgaacacaaactctgtgaattccgacatgtatttatgatccgctgtgctggggctgccttgtgcaccgaatcagtgatcgggcaacgtaatacaaagagggagcgcttgatcatctgagctggttttgtacagaatgtcaggtatagccaggtgctcgttgtcgttgcttcagttttaacgagtcggtcatgcaatgcagctaacgttctggcatcggccatgctctgttgcagagagtaatgtggatagcatccagatatctgttagtaacgatgag

SEQ ID NO: 3084 - DNA, 1257 bp, Zea Mays
tcctcgacgagaaattccccattgtcatccctcccccaacttgctcgggactaagaggctttgttgttgttgacttcgacacaactaccagtgttattaaaaaggcgcttaagtgctaaagcgctactgaggtggtaaagcgttgtaacgtttcacgaatcgacgtaaagcgctcgttttaagcgctaaagcgccactttttagcgttaaaacgctctagaccgtaaaaaggccacgttttgtcgcttttcagatttccaacccagccaatttctcctaacctaaaacaatgacgtccttctccaaacgtcacggacgcgccccagccatcacggaccacgagtttgctccgtcctcaagcgtccctgggcttcgctgcctccctcccctcctccctgcgttgctccctgcgttggccatgctcgcttcttgtcctgctcaggctcggcgtcgccgctacctccctatgctgctcggcgctcgccaccatcgctccgtatctggctaacagccctgctcagcgctcgtgctcgccactccagtgctctagcttgttgtctctgctcgttgtccctttgccgttcacgctcgccactgcctccctttgcttcccctgcccctgctctcatccttctccccttcccgattgatctgctcacattctcctctgattttggttatgatgatgaagcaacaaacaatagtgttggctatgatgatgagcaagacaaagtcaagaatgatggtggtatagatgatttggatgatggttattgagatatgatagagggagattgaataacgcttgtgtgcttgcaattgtggacattgtattctactttagttgcttttgtgctatgtttgtgcctttgtggttgtggacattgcatttcactttagttgtttttgtgttatgcttgtgcttgtggactattgcacatttcattccactttgtttgtgagtgtttacttgctagttgctattagttgaacacagggccgggcctagggcatgtgcaagccgtgcgctcgcacagggcctcaaaaattgagggccccaaaatttagcagatgtatatattctagttttatgatcttctacacatgttaatatgtagcacatatttttctttctaccatacctctgcgctgaaacgaaactaccgagcgctgcactaaagaataaatcttcatagaatcttaacatatctgtccgcgtgaacaaagttctctaaattaaagctactaaattcatat

SEQ ID NO: 3085 - DNA, 578 bp, Zea Mays
ccctgatcaggtccccgaaagtcttactcatcgcccgcacaaatgttggcaaggcgttcttcagaccgtaaggcattacgacgtagcagtaaagcccattcactatcacaaaagtggtatgcttcctatcttccttagacatctggatttgatggaaaccagagtaagcatctaagaaggacaagagatcacatctggaggtagagtccacgatttgatctatccgtggaagtggatacgggtccttgggataagtcttattaaggctggtgtagtcgatgcacatccgaagcttcccattcgccttggggacgatgactgggttggccagccacactaggtgatgaacctcttcgatgaagcccgcgtctagcagcttccggacctcctttcaaatgaagtcctgccgctcaacggactgtcttcgaggcttctgactcaccggtctggcgtcagggtcaatcttcagatgatgctcgatcacctccctgggtatcccaggcatctgcgacggctcccatgcgaacacgtcggcatttgcctggaggaaggcgacgagcgtgagttcctatttttcc

SEQ ID NO: 3086 - DNA, 1938 bp, Zea Mays
tgaccaactcagctaaaggacctttcacaaacaagatatttcatttcttttaagaaagggggttgtttcttaaaataagttagcagttacatagcaatactgaaggaactagaggcatgtacaatcaagtgccaattatcagggtcaggtgaactaaaaatatccaaatggatgtcaaagagcaaatacaagaccatagcagtatagcacagaaacagaacttactggtacagatatgacaattccacggaataagcaatagatctttctctgctgaagataacctactactttgcagttccaaggaaattttggatttatcaagcaacctacagtttccagtaatgagacagaaggcactgatgtgcttccaggtgttgtcaaaagttggctgccccaatcatgcctgccaaaacatataacgatgtcacatgttatgttgttaacttctgatgcaggaaggctgcactggggggaggggggcattaaagacacaagaagatagttttaaacatgtgttcacaaagaaatgcccaaagaagaataaatgctaaaacagttttgcatggttgaacttacctcttttgatagactgcttgcacacagatgagagtaattttttttactctgtgagcaacgagaggttgcagtgaggagccattcacaccagtaaagagagttacaacatctcctgcaacaagaaaatatcaatacagccaatgctacaaaaacaaggagaacaaatatagaacatcaagatgagaagattgtgtccgagttaaatgcaagtcgtaccaaatattaaactaactagaatcctctaatgcttgaagagttcaaaaatgcaaataacataatgaaataacaacgtctagagaaattaaccgtcatatcattgatcaatgttacttgaaaaaaacacaaacagaaggatcatttttttacatacagaatggttgtaagtttatgacaaagtaacagcagaatcaaatagggataagataattaataaaattaacacatgtctgagaaacagcggtgaagctttatacaagcttgtgggtgcagatgcacccacgaaaaatagaatacaattgagtagatcgatttttcaatatggttacggttcaagtctacgtgtctataaggcaggcacacacccctgtaatttgatctatagcttcaccactgctgagaaatgtatatatagtcaaagcctagcgagtccacatgtgagggtaaatgggggcagggcgcaatatttttgttaagtacgaatgttagctaatactccctccgcggggatttacaggcgcacaagcgattttcatcaagactaaggagaaattaagtagcattaattctcagctctgaatgctgataaacccttcgtttcccactctgcagtgcaggccctgcaggccgcacgttccaactccctgcaaggcgacatgcatacgctccccataacacccaggcctgtgctctcccgtgactcaaaagcccacatgtcgaagcaactcccacacgggaagactgaacatgagcgtcagcaccagggcatgcaacaacttgggcacctgtgaatctcggaagcatttccagacccagtgtgcctctaaatcctggatggagtaaaatttaaacagacagcatatttgctgataatgtttgatacaaaattaacccagagcagtgggagcaaattcctcccagctggcattcaacgtatatcagctcttcaaaattaactttcaaatgcatatctgatccagaaaatcgatctcaattggatgtatcctcttctactatttcaagttttctcatgagtacatcaaaatcagaactatagcacacacctgaatgccttaattgtctttttccttcccggtccttatattgcaatactacttcaatagtaactggtttgatacttca

SEQ ID NO: 3087 - DNA, 386 bp, Zea Mays
gcggatccgttggacctcgctgcagacgtacgggaccccagcgaggcctgaatgtggtcctccgtagcatggtggcggggcaatccgtcgtgggccgccctgtatcctggacgatgctcccgtgcaagtcatctctggtgagaattccctcacagccgttaccttcatctcctctctgcgtatcgtccttcggaatatagttttgcatctaggagctccggcatcggttgtcggcggatgttccagccgtgatggccgagttgcgccatcgggatccatgcgtgtaggaaagaaaagacagctaggaggtggaagaaacctggccaaccgttcgatctgatagggacgcgtgagattgatccgcaatttaccccttccgccttaaa

SEQ ID NO: 3088 - DNA, 712 bp, Zea Mays
gccagttcttgatcactgttactttcgcagggtcagtggaaatacccccagcactaataacatgtcccagaaattccaacgtatcttgaccaaaacgacacttggactgcttaagctttaactgattttggtctaggatttgaaaaacctgttccaaatgttggacatgatgttccaaagtatcactgtaaacaagtatatcatccaggaaaaccactacacacttgcgtaataatggagacaatatgtggttcatgaagtcctggaatgtggctggggctcctgtaagtccaaagggcatgaccttgtactcataatgaccattatgtgtttgaaaggcagttttatattcttccccttcttgtatctgaatctgatgataaccagccatgtggtccaacttagtaaatattgtagctccacctagctcatctgtgatctcatcaaaaacaggcataggaaacctgttttttacagtgtaggcattgagcctcctgtaatcaacacataacctccactctccatctttcttcttgaccaagagtactggtgaagcaaagggacttgaactctgttgtatgatgccagactccaacatttcctgaatttgtctttctatctcattcttctggtgtggagtatacctgtagggtcgtaaccagaaagttgttgctccaggtaataggggaatagagtgatcaaatggcctctt

SEQ ID NO: 3089 - DNA, 427 bp, Zea Mays
cgcaaatttatggtggaaagctctagcgttagggattatgttgtccatgtgggccattgttatcaaggtatgtttcattagtctactctcttccctggtcctataaattttccctcattatttgatcttgacaagaacaagcatgtcttcttggaaattccaactgaggtttttgagagggtgtcactagaaagacatggtgtgcccactgaggagatttagctgccacgactacatcatccctggggccagcaggatgcccatggaggcagtagcacatataacttcagcacataagctatccatgaagactaaacttatgttattagcatttttgttgttgtttctatcttacttctagagggggcatcgttttattggcttaaacttatggttgcgagccatggctcctaaccctatggaatgc

SEQ ID NO: 3090 - DNA, 417 bp, Zea Mays
cagcttcagcaaatgcaggcatcggcacttcctcatcagcaggaacagaaggaccagcatcctgatccaagctagacactcgacgaacacgtctcttcttctttttcttcccctcagcaggagaagtaggctgattggctcggcgagaacgcttcgggcgaacactgtcagacttctgaatatccaaagcttcgctagcctctgggatgggcgctaccaccagtgtttcagcaggggctgcatcagaagaatcttcagctaacatatccagcatggcacttatctctgcatcactcggattcaaaggcacctcaaaatgaacctgcctctcgtcgtcaggaatttcttcaagtgaggcaaccaaagcactaacttcttcgggagagggtcgcactctaaggcccaaaccgctatcac

SEQ ID NO: 3091 - DNA, 952 bp, Zea Mays
gtatcattatattaagaagagaagaaaaaacatacaacaaaggaggtttatagaaaccccgacaactccacacgaccccctctaagcttttagactaaggacaatggctgcccaaagaggggaaactagccccttgattgaccagaaaaaaaaaacaggattcactcattggttggctggagcgctaggatgctagaaagtttccgggctccggccaaactccaacgttggatctcatccttgacccaactgaagacctcactaatgctaggctgaatttcatcgaagacacattgcttacggtggttccaaatggtccaggctcccaaaacgataatagaattgaaggctttttgcactggtacagtaattgctctgtttgctccttcccaccattcgtcaaagcaagaactgccatgttgaggagaaaggttctggagaccaactgtcttaaggatcttgtaccgaacctgccgggagaagacacaagaaactagcagatggttcattgttcttcctcttgatcacatagcaagcatctatgtgggtgggggcaaacctcttttagcaagccggtttgcagttcaagtctccaacacctgccaagtgccacaagccacattaggaatttgcacttccctggtgcccaacttttccatatcctctcccatggcctaaattgtgttgatcctaaaaaaatctcccataagctgatttggcagaatatattcctgaattagagtgctgccaaaaatgtttgtcctccacttctggttgtagagtccaatcagcaaggatgtcccacaactttagggattctgccaaaattgttactgtaagtgctccttttatgtcttgcacctacttcctgttagagcatcatagacactcctttttttggtccttgcagagatcaacttagctaaacgaggtgttagttgctgaatacttt

SEQ ID NO: 3092 - DNA, 526 bp, Zea Mays
tgtggaggagaagacccaacgtgaacatccatggaagtatgagaaggagaacccgctcggacaccctcgggggctgggtcatagctcgcgctacccactcgagccggatcatcaccggcaacaccctcgggggctaggtaaacgcaagcaccatccttggggaccgagttctctgtagcagccacctctaaggctgaaggattttcagccacttccatggggacggagcaatccagatcagcctcttgactcctaaaaccgcactccaaggtcgaggaggcacgagacgctgctcgggataattctaacttgacagcaggcacatcagcacaaatttccatcatcccaccatctaccggctccgacaacaaatcttcagggaccatatcttcgagagtctaatcaaaatttgccagagacaattcttgcagaccaacgagagcagacaaagctggagaaggaacaccactactctccccgctggctatgtagcgctgactgttcttccgaattaaggggatttcct

SEQ ID NO: 3093 - DNA, 992 bp, Zea Mays
ggggagcgcaacgaactccgcttcctgcgtgcgcaactaacgacgcgcgtagctcacgcggctcggaccgacctttcccccccaaatcagcgcggagttcggaacccacacggacgccgcgctataaaatccaggtcgcagtccttcaaccctcaccgttgtagcaaccagagagaggcgagagatgaggatgccgctattgctgggctctggggtggggcatcgagggagatcgtcggacttcgtggagttggcgcgcgtcgttgcgggggatttggagcaacaggagagaacccgccagcgctcctccaccgcggtgccgcatcgcaccgtcgacacacgcgtagaccagcgtcggggcccccatgtcggttcctggagcttcatcgggcctcgtggtggatgtgtgcgtgcttgatttgggcggggtggaccgtgactatggcaatttgtcgccggaattggcactccgccgtgttgccgcacgtcgtcgtggctggttgtccctgcttcgccgtcgtcagtaagtttctcctctgtgtgatcaccatcatcccctccctgcgttgcaccggttgggtaggcaaactacgctctggtgcgcatttgggtgcggctccagcgaacccgccaccactgtcgctcgggcgccgccgccctgggcgctcggtgtagaagacagggcttcggccgttgatcccctggtggatggctctggtaggctctaggttacccctttgaccgagttgaattcgcgccgtgggatcttgatcgtgcgggtcagagcagatgaagcctcataaaatctggaccgttcatttataatccaaggatcccgagccgtaccggtttgcggtgatgtgagatctaatctgggcccttgatcagtgatcgggcggccagatttcactcagacctcttcgtgtggcatattatctaatgagccctcggaattctgtgaaataaacccgcagtccccactatggaaatcc

SEQ ID NO: 3094 - DNA, 515 bp, Zea Mays
gtgtacaccactggtggataaacattaagggacctaaggtttaatactttgcaggggggaggtcgttagagcttctgctgtctagtacatcctatcaacaaccagcaaccaaggttctaatgcacacaaataatccaaagcccttgggcaattcagtaggaaggggctcttggaccctagctgtgtacttccaccacatatctatttctatctgaagccataccaacagttgaaacacagcaaggagggagcaatcttcttcagatacgtttgggactagccctgaactgctactgtttgcctgaacaaacagcttcacaccgctacatctctaaacttcttacagcaacaagggaatcattcttaatgaatctggatctccaactgaccttctatcaatttgtcacaaggatctaagccttatcacctttagatcagacacaagacagctccaaaaacctggagaaaatcactgaaccaaatcaacagttgactgaattacaactgcagtccac

SEQ ID NO: 3095 - DNA, 497 bp, Zea Mays
gaggaggcgcaacaagcacagaaggagacaagctagatgatgttgaagggacggtggaggatgtgaacgttgagtgtagtggaaaagaataggaggacgtgatagaggggatggtggagatggaggtggaggcaatggtggaggtggagaaggcgatagttgtggaggtgagggatgtggaggtgatggtgatgaaatagaaataggggagacaaggtggtaggaagaggtggaaccaagcagagaaaatcaacagactcagaggaagggaaagaagaggacaaatcagtaggaaagaagggacgtgactcatcaaaggtcacatcctgatatactcaaatgcaacaacgatagggtcccaacaacgatatcccttatgcctagactcatatccaaggaaaacacacagattggatcatgagcttcatcctctcatgaggctaaagaaggacaaaggcaacacaaccaaaagcacgaagatgagtatactgcggtgg

SEQ ID NO: 3096 - DNA, 536 bp, Zea Mays
gacccgccgaccagtgagtgcgctgaggaaagagcctcagatcggtggggcccattagtcagtcagaagagacaggtgcgccaaccctggaaggacactcccccggtcgaaccctgcggcaccgagcccggggccgaggatggtagagcctaacaagggaggatgagcgtgtcggaagggaaccactcgagtggatcccgcacccggccccggactgacccgccataaataattggccgcattaaccacgcttattaccgagccacaatgtgggcgccggtccgcttgccactcatgacctatgagcccctgaactatgacacattaataactcgtgcgcccctcgtcctgtggcgtacttatgttctatcagactagtcctgagtacgcagatctcccgcaaggcactacacgacgagtcgcgccgagccccaggctacaaaagctaggttcaacatagctcgaatgatggtgcctgagaccatcgccgaccccgcgttatccaccacgataaatacgcgacagcgaggcagccc

SEQ ID NO: 3097 - DNA, 827 bp, Zea Mays
cggaaaggggagcgggaggaggaacagtggaagctggagtggtggaggtggcaggtatggctgaggtggtggttggcgcaggagtgactggagtgggcaaagtgggtggtagagtggtagcagtggtgggagtggtaggtgcggaggagcgaggccgagaggcgagacgtcgaatgcgataagcaatctgatctaaagaaatccgcagctgatcacctctctctgcctgctcagcagcagcagctgctgctagagctgctcaggctgctttatccaaacgctgcttcttgcggccttcctgctgctctaagtagaccatcttccccttgacctgcctgaaggggcgaggagggtcctcgtcatctcctcccctggcaccgacacattcttcgtgcgcgacatcctgacctgacgactgcatgtgagagagagaagctaagcacaagaagataacagtcaataggatgacaaaagaacggatagctacttggaaatctcacatgagagggagagagtccaggcaggacaggagacggctcacaggcagacgaggtcattgaaatgacagaagaggtgagcacgtattagtcacatagtcataagtatattgaatgtgaataaatacatacacagagtgttagggcacagaaatcgagagatatggcgatcgagaggtcaaacgacgcgaaaacggcgtttgaacgtgaaatagtgccatagggggttcgaaattggaaatgaggcatgaaacgacgtggaattgagccgatacttcacgaataggtttatatgggtaaatatgagtgaagtgtgcgcttggtttgata

SEQ ID NO: 3098 - DNA, 910 bp, Zea Mays
ggaggagacaatgccatggcggggacctgagcttcaggcggatccagtccttgcagttgggcttccagggttgcaatcctggcatgggcattctctagctccatgtgtatcctgtagagatctagggtggcactgtccaggtcggtgttgagaccggccactacaccagctagggtgttgaggcgatcctcaccagcttcacctgggacgatgctggtgtggcttcctccacgaagacactgaggaagatgcctgaacctcgtgttctgcagctgctgccggtaggtgtgactgagtgaccacagggtccgacgggcagcatcgctgaccgaggcagcgtaggtggacagtggtgtcagggactcgtgagcagacagagtcctgaatcccctgtcacctgcatccatcaccctgacgtggatgcgagtgatgtaatagcaagcccggggaggctcgctcactcgccttgtttcatacagggggtggacgtaggtgcctagcgcgtgcagcacttcttgcagcaggttggggaagtgctccgtctcgaacattgatgtgtaatgttcgacaataggaccgaacaccatgaagttatcctgctgggcgtagtcagcttcctcgtggacgtgttcgtctccaccttcttcgtcgtcgtcatcctcgtcatcgtcgtctccgaagtcgtcggggtcgtctcctccgggtgcaggtgcttggaaggctggtgcatatggtgctgacgtcgatgacccagctgcgaaggctagggattctgccaacggggtgggggtcagcagctgctcctccgagctgtcctccaggttgactacattctccactcggatgggagggagatccgccggaacttcctcgactaccactgggtagaccgggatctgccggggctgag

SEQ ID NO: 3099 - DNA, 321 bp, Zea Mays
caatgcctcgttgcctgggacaaagtgtgcaatactcgaggcaatggaagccttggggtgaaggacttagacaccctcagcgcttgtctcctccttgaagttgctccaccccctacacactacctcaactcgtcgtgggcgctctaggttcgcaagcatgtctgcttacctaccctgtccgacgatttgcatgggaccaggacatcacaacctataaagtgaaagacgggtgcgccatggccctctggttcgacgagtagtgcggtgacggtgaccttgccactcagttccgggcattgctccctcactgctccaagcggg

SEQ ID NO: 3100 - DNA, 314 bp, Zea Mays
cttgtcccattggtgtaggctcgtctcattgggtagaccttctcttacactagtctctagtaaggttgctcggaagagacttggtcgtgtgccccacctcacaaagttacccaacagggacttggtcgtccgctcagcctcgtgaggttactcggcaaagacttgatcgtcttcctcaccttgctaacttactcgacagggacttggttatcggtgccgcctcgtgaggttgcttggctaggacttggttgccctcccacctctcaaggtttcttggcagggacttggtcgtccgctccgccgcacaaggttgc

SEQ ID NO: 3101 - DNA, 370 bp, Zea Mays
tgtggaccgtggggatggacacgactgtgatcgtggcattggtgtatctcagtgatttgttttctctatatgaatatacaacagcaaatgctgagcagcaccaaaaacttgtctctctcgtatgttgtttgttctctactgtagggagtgtgtagggtgagagaccctgctgagcttgctccaacatctgtttttttgacatgtctctctcgtttatcatgatcagcatagccctggattacaccaccatcaataccattatcatgatacatgttcacatgcaaaattctccaagcaagcttttgtaatattgctatatcagctggagagttaactgaaagagcacttaatacatagagtggaacatttc

SEQ ID NO: 3102 - DNA, 687 bp, Zea Mays
agtctatacgcgttaggagttccttaaattgtgcttcacatatagtgtatgattgtgtttatgacttgaatagatgccttcgagtgaactaataggttcctaaggaaattaggtgtaaggtgtttatcgtgacgctttatcccgaaaggtgttaagtcggcgcataaataagagatacgtgtattttgtgtagtgtggattgattttgagtgcatggtcgcaagaaacgaattagtgcgcatatagacgaggaatgagtgggatgaaatggtgacatgccttcgtagtcatcatgtcgtgtgttcgtgacctaactgaaggtcgtagagaaaggtcgattacatgtgtgttattattgtcaccttgtggttctgtatgaattgcaaggtgaagtagtaggctctctgtgtgatgctagatgtctaggtagacgttcgtgaattgtggtgctcggaccgtcgagatgaaggttaagtcggtcgatgcctattaagtagttaaaatgattaatggaataatcttggggttaaaactagaaactagtgttctcgcacccgtttgggatgttgtagcccaattgcgcatggttatgatcgcgggtaaaatctgtagtgctcatgtggtgtctaaactaaaatgcaaactagtgggtgaaaagcgctttgatatacatgtatgccgaaattg

SEQ ID NO: 3103 - DNA, 1089 bp, Zea Mays
ggttaactctcatccactcgatctgctacggacggcccagattagattggatcacatctgaaccggtatctaacctccaccattcgatctaaaatctacggcgctaggtgtaccactccaacttctaatctggagcacccggacacgatccaacggtcgaaacgaatcggtcagccacttctaatcacgtccgcacagttcaagatcggtggctagcgcgcatcttcctcactaggacacacacccggcggcgccgtacacccggctcgacagagcgccatcgccggcaactcccaaatcggtgcccgaacgcataatacacgaattaaataggtgctacgcagggagaaggtaagtgcaaacgctagggacgatctcttaccggctaatgatgcgctaaaattcccgtccgcggtgacccgtggatctacgacggtgatggagctacggtgagtaatttctgctccacccgttgcccatagctctaggaaccgaagctcgcgcatcaggtactcctcgccgacctccccgaagcgccctggtcaagctccgcggtcaccaaccggaatcgcacgatgcagatggtccaaaatatctccctcacggtgacgagcacactgttgtatcaatggtcaccagccctagcatgcatttgcgctctatcccgcagcagatgaagacttcgcacacgagctcctatttatccgtcgcgaggtgaggcagagtggccggtaacgagaatcgtggcaatctccacggagctagtggcaacggttttgcgcatctgtgggaaggtgaagacgacaccagaggctgggacccacccaccagcgccatagcgaccgggagcgcgcgtctgcaggaccaggccaggaaacatccggagcccaaggatcccgattctctgttactcggttagcgctggatgcggaggggagattttgtagcgaacgggataaacccgacaggtatgacccaccaggcagtcagaggattggtccaatcccgcgcgcgtgcggatgctgacgccctggggccacttgccagtgcagagggaacgcgaacgcttcagtgcgactgacagagaag

SEQ ID NO: 3104 - DNA, 556 bp, Zea Mays
acacgctacggcgaaaaaaggttcctcttctgagcctatagcttgtgctttcttgccccccattcacatgcaagcattaaatgctttcacttttagtataactaatctaagagtcaatctaacatcaaacttactatatgcataggctttcttattagactatctccaacatatatcctatctcatcctttattttaaacttcactctgtaagaagtgtaatctatagtgtgaatcatttatcttacatgatctgctctggacaaccttagctcctcgtgacgtggaaacaacttagagccccacatagtcgctggaatacagtgggggaaactgcactaaactacgccacatcggaccttgaacagtgtcggtctgatggtacaccagactcttgtcagactgcgctgacagcgagccatcctaacggagtgtaatcctgaccggtgcgccgtaccgggtctgtgtgaactgtactgccgccacgtcagcctagccattggagttggagatgattgttgaacctgtcagttggttcagtgtgccaccagaccggg

SEQ ID NO: 3105 - DNA, 482 bp, Zea Mays
ctcctagagaccacatatatgtgtctagttgtgatccactccgaatccttcgtacttgtcccccttttcatttaggacaaggttgttcagctgagcatatatttctgctgcgttaagatgtttaggcgatcctttggtgaccacggtgttctttataaagttcttcttatcactcctaaagggatgtttcctgggcaaccggcgtcgatgacaatcgaagtaagtgatctttccaccatgagcaagacagaagcaatatgtatctgaacgacaatatggacatgtcaatctaccatgtgtactccaaccggtaaaagtagcatacgccatgaagtcatgcaccgaccacaaatacgcaactcgaagtttgaatatctgttttttaaaaacatcgtatgcttcaactcctttccaaagctccttcaactcttcaatcaagggttttaacatgacattgagtttctttctaggatagtctgggc

SEQ ID NO: 3106 - DNA, 482 bp, Zea Mays
gaaatattgaaatttggtttattaacagtcttggcatgagtgcacctggccttgataaaagctgcagctgtgccgcgtgaagccaccagggcatagaaatccctgtgcccagtgataacttcatcaagggcttcaacttcattttcaatatgatcaaaggccccggggatgtcttcgaccgaagggtgaatctcttcagaagcagctccaaccgagttgaatatccccttcaaccgattagcgcaccgggtggcaaagtcagcacacttgttccgaaggttctcaaaagcttcatgtagcttcgtatttctttcggtttcggctttgaccttcgcttaaagctcctttgtttcgcggttaaagcgatgtgagctttcatccaaaattgtttgggcttcgtccagttcctcgctcaatttagcattctgagattgtacttctgcaagggaaccttcggctgtttgcagcaagatgtccttttc

SEQ ID NO: 3107 - DNA, 586 bp, Zea Mays
cacaaacagacggacagacggaacgcgtgaaccaatgcttggagaccttccttcgctgtttcgctagcgcctgccctcgcaagtggaaagagtggttgcctgctgctgagttttggtacaatactagtttccattcagctttgggtcggtcaccgtttgaggtgctctacggtcgccagccccgtactctgggtatcacagtggatgacgctactccggctaccttgtcctcttggctacaggagcgttcagcaatgcaggagctcgtccgtcagcatttgttatgtgctcaaacaagaatgaagtgtcaggcagataagtgtcgatccgaacgttgtttcgagatcaatgactgggtttaccttaagctacagccctatgtgcaatctttagtgatgtcccgctcccaccataagcttggattcaaatactttggccccttctaggtgctcggtcgggttggccaagtggcacaccgtcttaatctgcccgctcacagtcacatccacccggtggtgcacgtttcactactcaaattggctaaacgttatcaaggtccagatgttgttccactgcctgttgagat

SEQ ID NO: 3108 - DNA, 393 bp, Zea Mays
gcggtgttgttacaaccctctacgtctgtgcttgcattcactaaacatctattcgttttggcgtaattgctcatgcgcgtgattaggtggtagactgttaaaggactgtctttgaccgcactcacatgtctagaggattgatttgattgaaatatttagcaatgctggcttgtttgctctaggtgaggggagctgcctattttactctttcgaacttcctaatctttgctgagtttatcatgtggaggtgttttttagtgaggaagaagcatcgtcgattggggaagttcacacttttcatgtacaatggcggatgtctcttagtgaattgggaacacatttttcatgtaagaaaagatagggaaggacaattagttgcacttcctgtttacc

SEQ ID NO: 3109 - DNA, 1113 bp, Zea Mays
cttggagatgcgccacgggaggaagactgagtatctcgaaatccccctcaaagacagtatcaagggatggcgcttggagtggttcatagttgagaattatggaaactctctcccccctcggtcaggaagacagccggatgttcgcaccccaagctggaccgagtcccccacagatcaggaggtagctgaggcaggtgctttgctggctgaagttgggttgctgaaggagaggggtctgactgctgaagccgttgttgctgactttgtcttcaagaatattcagtcgctgaaagacatggcgcacctggcttatttgtatcgaggcctagccgactcaactcgggttaccaacagaagaattccctctgcggacttggtgagccgacttgagatgatccttagaggcaaggtgtcaaatgttggtgccccagtggcatactcggcctggaacctgcctcctcccaaagccttcaccctttttgtgtcgaatccacctgttactgatggcagtttgggtcttagagtgcgaccctctgctgaagaagttagtgccttggttgcctcgctcggggagattcctgatgatgaacggcaggtccactttgaggtgctcctgaatcctagcgatgcggagataagtgctatgcttgatttgctggttgaggactcttctgatgctgctcctgctgggacatcggtggtggcgcccctcctagaggctgatacaactttggatactcagaagcctgctagtactcgcccgaggcgcccttgccgagccagtcaacctgatccttctgctgatgagcagaaaaagaaaaagagacgcctccggcgagtatccagtttggatcgggatgttggtacctcggttcctgctgctgaagaagtgcctgtgactgaatttactgacgctgaccccaatgggtgtacccaatctgttgctgatcccaatgaggatgctccatctatcgctgatcccaatgggggtgctgcctgtgttgctaacgtggacgacgaggaggaagaagatgaagttcctttgactcggaaaaacagtcggcagttcattgctagtggtgaaagtagtggagtcccttctcctgctttgtc

SEQ ID NO: 3110 - DNA, 282 bp, Zea Mays
ctggatgtgttcgagtgatctagggaaggaatcgaccgcggggagataaccttgagtcatgtcacggttccgcgaacccagccagagccgggccaggatatttcaccgacgttcaccgtggcttggtcattccgccgtcgtgtcactcgcgccttgctcctccctcactgtgtctcttccttacgtggtaaccatgcactaacgacgtaatccgaggctgtggatcgttagccggaccaccgtgcctataaatagcgccatgaaccacggcgaggcactcac

SEQ ID NO: 3111 - DNA, 704 bp, Zea Mays
tcggcggcgggtatggcgtgtccaccgtgggggcggtcagctaagccagtcagggcgtcccagtggccctcggttgctctggtgctgtctagcggagagagaatatgggaaacgagaggtggaagaaggcccttggccgtgggatttgcaagcagcgggcaggattggtttgtgacctcagtcaatctgggccatcaaacttatgtggacagttaggattcgcttacagcataacctttcctgtggatcgatctcggccaccggttgtgtatcgaacggctagaacctgatttgtgtagatcaccacactaaatcgtgcgcgttgatctctagatcgacggatagcgaggcgtaattgaatttagatcattagattttaatcggacaaccacgggcgtgcaccgcttctgatgggatccgatctaatcaagggcgcacgattctgatcctgtggctcttgtgcgccgataccccttcatcttgcgagtcttgcaaaaacaaccctgaattttataagaatgaacccgccatccaacttgaaatagcctgtgtctaaggaatcattcagtatagtccctagacttttaggtattaatgcgcgcagtcccgagggttataaaaacacggaaataattatgaaaattgatttttcaatacaaaaataatatcagaaacttggataaatcatattaaattcattgtag

SEQ ID NO: 3112 - DNA, 716 bp, Zea Mays
tctatggcctcttatcgtcgccggtgaagtcgccacgacggtagacacgaatccactgcgccggaattctttttctcctccggtcgccagcgctgctcgaccgaattgatcaccaccactcaagtatcctataaattgaagcctcagcatgttccgctaggtaatcgtgcgtccagtgaaccaactcgtagctccgatcgttccccacagctccccaatttgggatttcccccaaattggttgaagaacgccgcgaaatcaagctcgccgtggccagcgctcctcgggtcagtatctatcaaattactccctgttctagcttgattgtagcctcctattgctctcagtgccaaccaattgaaattcggctgaagcctttcaccggaacacgcgcctgctctgtagaacgccgctatgccaccctcaccgtcgacccgctcttcggttcttattctgcccaaaccaatgtgtgtacataacccctggtgaacccgcgaacccttccccagcctcaatttggtcatccccgccgtcgtttggctggaacgcgttcatccctataaccatccgccctgtcaccgtggactgattgattcaatgcccccttgatgaaattgatggaggggaagtgtgcggtaggagtctaattcggtctctgtcgctcaggagctcctgccatggcggtatccggccggaacaggctcatcggagatcag

SEQ ID NO: 3113 - DNA, 499 bp, Zea Mays
caagaaatgagctgacttgattaatctgtccacaatgacccaaatggaatcatggtgcctggaggtattgggcaatcccacgataaagtccatgcagatgtcctcccatttccaagatggtatgggaaggggctgcaaagggcctactgccctcaaatgactggctttgatcctctggcaggtctcgcactcggatatgtacttggcaatctccctcttcattcttgtccaccagtataaggatctgagatcatgatacatcttgttgctaccggggtgcatggaaaattttgaaaggtgagcttcagccaatatcttctttctgagctcagggtccttaggaacgaccaatcgatctccaaaccatagaattcccttgctgtcctgacggaagcatttgtatttttctgctttctgcttgatcatttccttgatacctttgaggcgcagacaccttcacacccgcggtcgccttggtgttgttcctgacatgcccaag

SEQ ID NO: 3114 - DNA, 491 bp, Zea Mays
ctcaagtgaaataagaattctatggttatgtacacaattgtcactgtttcgttcagctgcaaatcatttgcacaaagagtacagcagagatagggggtgacaatgatacagcgatgtgagtatggagataaaaaaggcttttctaccttagattgtctgtaaatatgttgaacctcaaaacggtcaaatgagtcactgcaaaatttagtctttgatcataattagatttttaatcccatgtcaaacagatcaacaagtttaggtacagggtgtaaacagtaaaaaaagttatatatcgctcaagaaaagcttacccagtaatgaaaacaacatatgcagctttagctctagtaatgatctccaagggtctccaaaactgtaaatatccaaccaggctgctgtggatgcgctcaaagcaatctttggtatgatacatcctaaagtccaaatgctattgcattaagatcatcctcagttggaacaactctagc

SEQ ID NO: 3115 - DNA, 560 bp, Zea Mays
tgacaacggaggtgctcttatgcaaatgtaccacgactgtttaacttgggcctgattcagactgttggatcccgatccgaagcccatgatctatcccaccgaaacggtaagcagtgttttaatctaggacgttggattccgaatcaatgggtatgatccaaccgagcgaactggtatagattgatctaatcccaaccgtccatcaccaaaagaatggcgcaggggccaccctcctcctctctactacccggccgacaacgctggtttcccccgtggcggtgctctcgccggtcagaggcgcacacgaccgtcggtaactttcccccaaacccgatagctcaacgtgtgcaaggacccaaggcgaagtaacagaggggtttcataccatgcttcaaggtggtgtcagacctgggccactgcgttatgcggtaccgtggcggtcatggcactccagcgagcaatttggccggagctggtggcccacaccccatatcagtgccacgggtatactccccatgctacgacaaatcactctgacccacatcaacagccccataatg

SEQ ID NO: 3116 - DNA, 644 bp, Zea Mays
gttttgcttcggtagttgaagaagtccctttgccaaattcaggcactatggccggttcaatatatcgcggccggcggatcagaaccttcactttcttgcccttcggcacaacagtggtggccgaagcgacagtctttctcttctttccttgccttcgtagtgggtagtgataatcagggtatacgaagccaatcgcatcaaacaccctgttcaatcttttcttgccccaacccccgaaggctgcggacaaggcatcatcttcggccttggaatatgtcccaagcagctcatcgctggtagcttcaatacatttcaaccagtcatcatttggttcatcaaacttctctctaaatctgaaggtatatttcaatcgaaccaggccaccttcactggattcggcagtagtctccttcggcatatcccagctctccacaagtggccacacccagaaggctatgtgctcttaaattatatccctcgtgctaatgaagctgcaaacattgctaaaggccttctggcatgcttcgacgtcactttcaatagtaaccttcggccttcgaaggccgaagcgagaccagatggggcgctggataatttccttgatgtcttcccttttaattagatcatttttaacataaaaccac

SEQ ID NO: 3117 - DNA, 689 bp, Zea Mays
gcaacagtggtgcgtcgctgccataccctctgcacgccgttgtggacagttcatccgcggtcaccaaactgaggtgagaaccatcgccaagcttacatttgcctctacgattgcagtgcacctagaatggtaggaaatagcgctgttatgggtgggcaattgctcgccgtcgtgcgccgccaccgcggtgccgctctgcatcgtgggtagattccgtgtaaattggaaccaccgaagtgatgtctctacgttattcggtagacgctctgctccccgtatcttgagccaggggtagaaatcatggctctgggccgcgattgggcgttccccagtggtgctccaccgtggggaggaggtctgtgccgccgtcgggcacatcgtgaggagaagacgcggctagcgccttcgatcccgatcgtacggctcgaatgaatggggaatacccccttcgggtgagctacgtgggtcgttagatttccttcgaatggctagatttggtggctccgcattccttcatggctcctgatctgggccgtggatcttagatccgaaggcctacggcgcgtaccgatttataccctggtgatctaatcccgtgcgtctgttgttgatcggacggctcaaaatgcacgataccctttcgcgctggcacttttgttaaagaacccctctgtttatttaaaaacaac

SEQ ID NO: 3118 - DNA, 356 bp, Zea Mays
agagaagagagcgggcatccccacgtacagccggagcagcagtgcttatctattaatgcatgcatgcatgcctcggtgaccagctgctagctagcttagctgcctgcctctgcctgcctgccctactactgatggatggcgatccatggatgatgctcgtggcgaccacatggtacggtggtgagctgacgagtccatcgcccgcgcgcgcgcaactgtgctgtcccctcccctcccctacgccaccttttgctgtggccacggcgtgatgatggccgctgttaggtacgtaccacgaaaacaaccttcttcaaacagcaaggcctacagacccctgcattttcaatagcttttgc

SEQ ID NO: 3119 - DNA, 487 bp, Zea Mays
gccccccctaattttgctatcccttcatcaattgttgttggaaatgagtctattctgtctgtcacctcagtaggcgacacggtcctccccgaccctttttatgtaaacaatgtccttgttacatttgaaattatcaagaacctgatctttgttcgtcaattcaccattgataacagttgctctatgaaatttaacccttttggtctctttgtgaaggatcttgctactaggaaacgtgatcatcaggtccaatagctccaggcctctctacattgtgcgcttgccagtcctccgcgctcctttggcatccacacattttgcgcttgttgccacaaccacacccatcccctctggtattggcgtcttggtcaccccggccctggcgctctgtctaagttatctagtgctgctgccatttcttgcaataagccagataatattcctgtttgccatgcttgtcagctaggttgacacactcggcttccct

SEQ ID NO: 3120 - DNA, 422 bp, Zea Mays
aaaacatacccagtcatggcaagcaacaaagaaatgatcagctccttttgtcctattccaatatgggtacttggccgagataaggtcaatgtaatttttaacaaagatagacagtggctcaattgtatttgagccaggcacataaaggttatgctccagttgacgagagctatatggaagatagaataaatgggctgtatttggatctctcacaacaaaattctggtttgtctccatcaatttcataaaccatccctcagacgcatagatacctttcaactctggggaatggaaaataggttttgctccatcatgatatatgaaaaccttaagaagtctctccatcagttcataactcctggaagcatgagtcgaacacatttaataaaccaaccactgaaatgaaacagccaatgcacagt

SEQ ID NO: 3121 - DNA, 738 bp, Zea Mays
gctctactatggctaagaccaaattcaaaccctaacaagggttccccccaactaattttactaacggcactctaacacgctctgtccacggcgaccgtgtgatcaacggccaaaccaacgcgttcctggcgatctaaggggtcctagcttaattggtggggtcggggagcatcaggggcacacaaggacgttgaaacaaaagagcagagggtatgagcggacctgaggtgaactagccacggcgaggtctctttcacggtggcgcaaagcagaattgggggaaattcggaattggcgagctctggtgaacaattggaggcacgacttggtggctggatgcgtgactaccctacggacccatcggggtgctcaatttatagcgtgcttgggcggtggtgttcaatttggacgaattgtgctggcggtcgagaggggagctgagtcactggcacggtgatttgtggccttcaccgtggcaaacccacgggcgacgagccaaggctgaggagcgttttaggtgactcactgcgacgtggtaaggtgttgaggcacgtagcccggccggataacggcgaaccccggtgatcccaacgcgattgaccacggcgggacacgacggcggtgagaccagtgcccggattttatctccagcgcgatatttcttaccgaggagcgcttttctgagtttgttcgggcatgaatcgcgacgccagcgcggatctgagcgcaagatcaccg

SEQ ID NO: 3122 - DNA, 325 bp, Zea Mays
cttgcggttgcggcttgggaaatatcgcgcgcgtttcggtggcgcctgtcgactccgtggctcattcgccgtctcgtctttgatgtgacggtcggtgctcccgtggaggtggagagaacattcccgtccctccatccgtccgtcccgatcgcaaccttgagttattggtcggggctgccgtggggttcctgtccggccaacgagatcgtccagtcgagagtgaaagggaggtgtcgtccaagacatgtatgggcttccgtctcgtctcgtcccattccccatccatccttccaaggctgcctaaccaacgtcctctcctccctgc

SEQ ID NO: 3123 - DNA, 971 bp, Zea Mays
tcggccgttctgaggagacgtgtaggggcaggacatgcggaggtggacgccgcgagagaggaagaagtcacgggacacattgttatagaactcacgcccgttgtcacactggatgcttcggatggtgcgactaaactgagtggagacccaagcgaagaagtgagacagggtgggaaaagtgtcagacttctgacggagaggaaaagtccacagataacgcgagaagtcatcaagaataagtaaataatacttatagccataaatgctaattacaggggatgtccatacatcacagtgtatcagataaaaaatgcctgctgctccagaagaggagatggggaatgggagcctaacatggcgacctaactgacaagcatgacagaggtgctcaaaagatcccctacaaccggaaacagaggtgttgctggagagtttggacatcacatcacgaccggggtgaccgagacgacgatgccaagtcatagaagaggcggcgacagcaagaacacgcggggcagaggtcggtgtagcggaagcaggcaagcgaagtgtgtagagtggcccggggctgtcacaccgagctagaagggtcctggtggcaagatccttcacagaaagaccaaacaggtcaaactccatggaacaagagttgtcagtagtaaactaacggacggaaagaagattttgaataatgtggggagcaacaagaacgttggataaacggaaaggaccgggaaggaccgcgtcaccgacggaggtgacgggaagggcagagccgtttccaaccacgatggaggacggaagggaggggtgggggggggagaggtggaagacagaatacctgcgtctggggtggtgtggtaggaggcaccggagtcagccacccagtcagatactgaggtgggtggggccagtgtcattgtggagaaggagttggcgagagactgcgtgtcccacccattggtccaggg

SEQ ID NO: 3124 - DNA, 501 bp, Zea Mays
cccctctttagattgtgcatgccctcatggagtaagctcaggaaacatcttaaccagcacattccaatcttcccaagaagtggcttcatctttttttgtccactgaaccatcacctaggaaatggcatgattccccttcttcacaagtcgtcggtccaagatcttcaccagcctcagtgctccttgctccagatttagtgttgttggtaattcagagaaaactggtcgataattgggtgtaaagggattcaaccgtgaaacatggaaaactaactgtattgaagccccctcaggcaactccagctatacacttcactatcttgaaagggccaaagtaccgaaaagaaagcttaggacaagagcgaaacacaaccgaatgctgcacatattgttgtaacttgagtaagaccatctccccaacttgaaaaattcgatcagtcctcaatttatcaacctgttgtttcattcgattttgagctcaggccaactacactttcaaca

SEQ ID NO: 3125 - DNA, 1020 bp, Zea Mays
gtcggatcacactaaggtttatacatgtttgggtcgctagaatgcgtaacaccctactgccagtagagactgtgtatcggagtttcactggtgtatatatattacaggagaactgtgggtggtggaggatgagtttgtcctagcgcttgtgtagatgctggtttccatcctttgtcggtgcctggggtgcatgcttcgtgtgaccgatgaggtcctgagcctgttcgttggcggtgatgtagatatccgcctctcggaaaagttgtttcgaggtggatagagctttctagaggttggctcagacaaaaatcgagtcattagggccgtggtagaagttctcgatcacgtcggccttcgtgacatcgaggatgcaattcctcatactttgaaaacgctttaggaacgagggcagagactcatcactttggcgtttgatggatttgaggtccaaggttgggctggtttgtcggaaagggattggaaattcttgacaaacccgtggcagaagtcagccaagtcatcgatgcaatagtgaggaagatgttggagccattgcaacgcatcctgcccaagaacaatgggcaggtacgctgtcatgacgtcctctgttgccacggtagcctgggcggcggtcgtatagacggtcaaccaaccgcccgaatcttgcctgggctcatacttgtcgatgttcgagaccttgaagtttggtggccattgaattgcccggagccaggggaaagggccgagactcgctcgtccctcggtcctcctgacgatcttctcgggcatggtcacagtgggggtccctgggagtagggatgaaaacgggacggatacagccggatacagggtcatcctgtatcctaccctaatgtatttctctcgaatacaggaccgaatacggggtagttaagattcgagacggatataggacaggaccgggtaataatccggacgggtaagaaacggataacggatactactcgggtaggtatcggataattatcgggtagttcgtcc

SEQ ID NO: 3126 - DNA, 315 bp, Zea Mays
cgtaagtgtcaacatcaaacccacgagaaactagctgagcaccttccgcactggaacagtgcaaagggattataaaaatcaacgatttgagttctctgggccaaaagaaagcaggcgtgcaatgcatacatttgagctggaacaattgagtccagttgatgctgctacgcaacaataagcagcagtaatgataatgccctcaggtttgaagtgcggaatttaaggcgtgaaggtgtgacagctgaaagggccataaataaaacttcgcataaattcgttccactaggaaacgtccgtgtgaagcgttaagccatc

SEQ ID NO: 3127 - DNA, 452 bp, Zea Mays
ccagattaggtcacgctaataaacaagatgatgcgagtcgtggtttgtttgatccaaaatctacggtcgtcgcttcacaggaacgagattcgatctaacatgctcactccctgatccatggctaggatcaaacgtgccgaagcgatacgcgacaaccaatcgcgaccgcacatggaccgatcaacggtcgacatcacgtcacccacacctcggtccacggccatggcggcgcctgcccccacggcagaggtcacgccggcgaacacctgcccggtgattccgagcgccattctccgattcctatagtgctaagcgaaggggatgaccgcgcgtatatggaggacgggtactcaccgatgatcactctgtagagtagtgtggcgacggtgggggtggatcggcggcacccgcggagctcgccggcgaatcccagctagagccgcccagaatcc

SEQ ID NO: 3128 - DNA, 405 bp, Zea Mays
tgcggggtggggacacagccatggcagggacttgagctttagggggttccttccttcaagttgagcttccagggctgcaatccttgcatgtgcatcttccagatcctcatgtaccctagagaggtccagggtagcactgtccaggttggtgttaagacctaccaccacaccaacaagggtgttgaggcgatcttctccaacttcacctagaacaacaccgatctggctttatgcatgaagacatagatgaagatgtttgtacctcatgtcatgtagttgctgccagtaagtgtggctgagagaccacagagctcgcctagcagcattactgaccgaagcagcataggtggataacggcgttagagactcatgagctgatagagtcttgaaacctctatctcctgc

SEQ ID NO: 3129 - DNA, 1206 bp, Zea Mays
gggaggtgggtctcgctttcttctctaccggcttctctttcagctcttaggggaaaccctgctccaatcccagaggcggtaggcgtggttttatccgaagccatctgccagggggagagagtcactattatgcacatgccaattattttcaaccaagttattttattcattacaccaatacattacaagcatacgactactacaagtcgtactacacgcgagcgttctctgaggtactaccgaactctttttctaaagcgtccccaaattccttgagaaggtcatcaaggctagctagggacatatgctcgatgtcagacaaattctctatcctggcaggagttgatgctggaggggccttcttcctccgctcagcttggcctccttggttcttggtcttcttctggattttcttcgtgggggcgagcttctttagcttcttatcgtaatccatctttagggttcggtaggcttcacaggtgttggcctccttgccttctgctatatcgagacactcttggagggatgccttctccttcttaagttccttgacctgctgctccaagctttccacccgggagtttaggtgggtgcagtgggaggaaagatcatcgtagtggttatcgagagtgtggaggtatccggccatgtagacaatggtggggtcatcctcggtagggtctctccctgacagggcctggagtcttttcctccaggtgggggtatttttgttgctaggtgggaagtaacgaagggggtttcaaagatctctctgctgtagttttggcatagctgtttaagggattttcgggcaacactttggcaaatgtctgggaagcggtgcccgatgaaggtgacttggaagggagggtggtttgggtaactttggctttctcccaggtagaccgccatagagcacttctccactccattttcgcggtattctttccagacatattcgggcttcttgcggatccccatgcgtagtgcgcaacttcgtaggaggtgaggaaatccttcctcgtctgagcagtaggatgtcctaatgacccaagagccttccatctggtaggagaaaagaagggtccgttaatatcggggaaaggagggaagatttttcttaggggtaagaggtgttttcttgttaagacaacttttaaggttagggctgcggtctacgaccagttttatgggctctgataccac

SEQ ID NO: 3130 - DNA, 1142 bp, Zea Mays
gttttttcgagttggttcagattggctagtgcctagcctgtggattattgtgtcgaaaactatggtgtatgtccattgcattgggcgggtcatgtcggatggtccatgctcagatctagtgttgtcggggaaatgatcctggtccctgggacccgctggtcagtgagggtgctatgggaagagcccctgatcgctgggcccgttagtcagttgtaagagataggtgcgcaaaccctagaaggactcgcccccggtcgaaccacgtgaccccgagcctgggggcaggcgtggcggagcctgacgagggaggacagacgagtcggaagggaaccactcgagtggatctcgcgctcggccccggactgacccgccataaatgactagtcgcattaaccatgcctggcaccgagccacagcgtgacaccggtccgcttctcactcatgacctacggaccccctcagtcgcatagcactcatgacctacgagccccgggactgtggcacattaatggctcgtgtgccctcggactacagcgcacttatggcctatcgaactaggcctgagtgtgcagacctaccgcaggacactacacgacgactacatcgagccccaggcaacagaagcctgggtcggcgtagccggaatgatggtgcatgggaccatcgtcgccccgcgataaatacgcggtagccaggcagccccggaccacacgagtacgcgtggactcacccgaggtaaaacactggttttaccccttgccttatggctccttcccagggaagccacatgtggctgactcttgccctaacctataaaagggagaggctgacctcgaggcaagggagatgggtggagagatcgatagaccgatcaacagacggagacgagcccataaggacgaactagggcaggagtgccgacgaggaccaggaggccagagccccgccaagccaagacttagctatgactccacctctcagcttctaagctccacttccaccccgatctagagcatctcctccctctctcaactatttgtaacccctactgcgagtttgatcgtgccggtagcgcaagccaccaatgactgaatgtagaaacgttctgcccgaaacaatataaatcttgcgccctccgcgca

SEQ ID NO: 3131 - DNA, 925 bp, Zea Mays
cgcgtgcgcccgcgccctctggcatttttgcagaagagaccccgggtttctgactaactgaaaaacgagcttcttcactgttcctgtgtgtcgctgaccgattacaaataggacctccaccttctattcccttgcacggtgaagtccccgacgacgttcacgcctagccgagctccgacgagcgcctgcactggccgaatggggcaacggctagggtttccgagcagcggacatcaaattggacctagcccgagcatttcccctccattaatttcaccaagggggcactggatcaatcggttcatggtgtccgagcggatgggcaaggggatgaacgtgttccgatcaaacagcgatgaggatggccaaatcggggctgggtaaagcttcacgggttcaccagagtctatggacacattttggtttgggcagaacaaggcccgaggagtgggtcgacggtgaggggggtcacgacggtgttcttcagagcaagcacgcgttctggtgaaaggcttcggccgcaattcgattggttgatactgggggcaataggagggctaacagcaagcaaaaacatggaacaattgaatagatactcactcgaggactgctggccacgggggggttcttcgcggcggagcaagaacagaggaggagagaaactgggggctacgtaggctttccggtggaattaacttggttgcctaagagcttgtgcgtgcgatgtaacgaagaagcagtgtccggacttatttataggcttccggctggaaccggatgaggatcgcggagctcgaaatcgcgctggcaagcatgccgcgcggcggattccggtgatggcacggtggccgccgtttacccggagcctgccacctcagtgaccttctgccacgacgccgaggatatttaccgcggccaccgacga

SEQ ID NO: 3132 - DNA, 673 bp, Zea Mays
ctccggcgacctgctctcgccggcgaccgagctccggtgaaacagtgacctcttcactcctctctggtgagaagcctcagctctctctactcttctcctttccctctgtttcaggcagcagtgcagcttatgttccacctctattgctcccatttcaaattcctatcaaatccagtgaatggagtgaatcccagtgcatggttgtgtgccctagttctccattgaatcccttgcaggttcttagctccttcgggagggtttccccaccaccaatagccatttcattcaaaacctaaatccccgcacatcacatgttcgatgaaatgcaccaaccactcaaaattggtccgattgaacccaaacttttcaggcaccttcacaacacctccagtaacacattcgcgcaattttacaccaatccgatataccaggcttcaatttcacacaattccccgtttcgagcgatcaattccgagccgagtgcccaaattccattttctttgcctcaaaacaaaccaagtgcacacttcactcatatttacccatataaacctattcgtgaagtatcggctcaattccccatcatttcatgcctcaatttgaatttcaaacctcatatggcactatttctcgttcaaacgccgttttcgcgtcgtttgacctctcgatcgcc

SEQ ID NO: 3133 - DNA, 322 bp, Zea Mays
tggtggaccgaggatgttcaaaaggcaataaaggagaagaaagaatgttacaggagcttgttccatgacaggagcgcggtcaacatagagagatataaggtggcaaagaagactgcaaagcgagctgtgagtgaggcaaagggtcgtgcaaagcgagctgtgagtgaggcaaagggtcgagggactaagtacaaaggaaggggagaaagatgtcaataagatagctaggtttcgagaaaggaagacgagggacctcaaccaagttaaatgcattaaggatgagatggatcaactcttggtgaaaggacaagacatcaaacag

SEQ ID NO: 3134 - DNA, 273 bp, Zea Mays
gctcataccaccaattacgccgtggagatacctgtccacggtagaaggcggtcgacggtgatgcctccccgctccgacgagcaattccactcccaccggcgacacaacgtccaattgcttgctcgagtccaaaccacggctgcagacaaacctccacgcgcaccttcctgaatccgctgcgctgccagagcccgcggcacccatggctctctctctcccttctcactgcgatggcggcgctaggttttcctggaaaggccatggagggctccg

SEQ ID NO: 3135 - DNA, 342 bp, Zea Mays
ggacccgctcccctagtgtctgctccttctcctccagcgtccgctccttctcctccgcctcgagctcataatcggccagcagcttatctcgcctctcaagcatttcctccttgaaggcgaggtccttctcccgccaggcgagatccaccgcccgcttatccagggaggcatccttctctttgaggttctcttcggccagggcaaggctgctggccctgtcatcaagcccctgctgcacctttcgcaggtcctccacagccgcggcctgctggtcccgctgctcctccagcatcttgttgtaggcattcagcttcgactggagctccatgatgacctcctccc

SEQ ID NO: 3136 - DNA, 276 bp, Zea Mays
cttcattgacatgaaccatggcaagacttacgagaggctggatcgacgattgtcccagatcatcgacaggcttgctgtgttggagacgcaacaacaagcaccgccaccgccaccaccacctcctcgtccacgtcttcccgatgatgggtgtttgatgaagaaggtaattatgatgaagcggccactagagatttgcacctacattgccatcttcatcaaaacatagaaggtatgccacactgccagcaaggtaataacaatcgtgctcctgacgac

SEQ ID NO: 3137 - DNA, 468 bp, Zea Mays
gagacagtgcagcacatcctcacaaattatctttgctcgtcagttctgactcaatcttgttagccttcttgggctggagcatacaatgcgttagcgcctcgtcgccattacaagtgctttgcagactactgaaaaaagcaagtaaaaagattggaaaggccaaaagaaaaggatgtaacagtactatctacttggcacatggatattgttgaaccacaggaacccttgttaatgatggagctttctgcaaacagcctagcagatagcacttccttcaaagaagagatgaggctgtggtgtttggctggagtctgaaagctccaagagttattctttggtcgcgttcagggcacatgtagtttttcgaggtgtaatgtctgcaaccttctcttatctcctagttgggttaagtgggttgtcttgtatgggactctttcccctctttttcctctctctaatacaaagata

SEQ ID NO: 3138 - DNA, 625 bp, Zea Mays
tcgcaggtcaccgtggtcaaggccccacacaccataaccgccggtaagaacccctccattgatttcgccatcctctccgctctgtgtagcatccgttcaatgggagtttgggcatcagggcaccgatccggcatgctccggcgtgaccactgtcgcggcgcggtggtgtcgctgcccctgttgtttgccgtgagctagaagatgcccttccaccgttggatccaaggccagtggtgaagattagatctagttcaatgtggcggggaccgtcgatctcgctatgggtggctaagattagaggcttgtaccggttcggctcggctcgatctcgaccgtagatcggtgtgtaagcgggcacagttggtttggggctgttttaaatcatggtcgtcgatctcgtgatccgcggctcggatgtattggtgggttgggatctaatccgatccctgaattcaggatcggacggctgtgattagctcgtaccccttcgccccggcatttattcaaaagagtccttatgttattagaatatagatcccgccgtccactctggtgaatcgctgtgtctaggacgcttttgcgctttagcccctttccttttatataatcatgcgagcaatccagg

SEQ ID NO: 3139 - DNA, 425 bp, Zea Mays
cggtcaggaggtgggccttcacttccttgggtggctataggaggagctagaggtgctcccgataattgtgacgggcctcatgtcctttgcctccctcgttacctgtgagggggccgtgaatgccttgtcccgcgagggatgcaggcactttgaggtctttgactagtcggacgaaggcttcgagcgcggaatcttccaggtcgaggacccggtgctgaagcggtcggctggggcgcttttcaataggatgtggggccctcacggccgagagactgtccgggagaggtccgaccgggcgatggatcaggtaaaggtgcatatgtgtgatgatatctgtgggtatgtgtgtgtatttgtgtggttgttgaatgaatgtgttattgctgtagatggcgcatgatgaagaggtcgaggacctcggtggt

SEQ ID NO: 3140 - DNA, 846 bp, Zea Mays
ccgatcactgatcgatagttgggatcgattaagccgaaaggaggccaccagatccaatccaagccgctaatcacggatccaatggtcacagtgctccggtgcacgcgccaccccctacacctacgcgcacagcggcgcccaacgccacggtggcgcaatcacctgagaccacgccccggcacaccagtgcattcgatctccacgcgaatagctctataaaaactacaatcgaccgtgaaccttaaggtggacctatcatcggtaatgctgcaaccaagggccctgcccacgacgagatgaggatttacggcggtcggagatctccggcgagaaatctcggaggcatcaaccgtgctttctacgcggcgcaacgttgactacttcctatcggtctctaggaaggttcagagcttacctcgagggttcggtcgaagcagaagcccggaatccctagcggcgcaccacgctagtagtccaccgccgcgccctcttcggttccgatcgaaatccaagcgaagaaatgccgtgacagcgcccagcggaggggttaagaggtgctcgcggctccaatttatgggtaggtcagcggccaggtgaaccgaagtcggatgcggatcacggcatgcctccaccatgcgcggtggattcgttgcggggagataactgacaacccgacctgacttcctagtgacacatatgagcggagagagagagagagcgtccgcgtagaacgagtctgccctaggacccacccgcagcgaacgagaggcgcgcaaggagagtacagaagctgacctgtggacccctagtgtcagggccagcggcgtgtgcggtgttaagaacctg

SEQ ID NO: 3141 - DNA, 3425 bp, Zea Mays
ttgataaaaaaaatatgataaacgcataaaaaaataccgaacaatgtacaaatggttcttgtccttggcgtatcttgcccttgtcagctcttgtcaatgcttgaataatattcctatcaaaatatttgatgcgtggtgttccacgtttattctgaggtgtagctgaatcatgaagatgatccaaataatacagctgcaaaagcataacatgaatcattgtgagacataacaaaatataatctaaatgtatatgaattttgcataaaaaaatatggctacatataaaagacaaaaagtgacatgcttacaagaatgatgatggaacatccgtaaattgttgtagaaacatttgtaacgctcctagtatgtcacttcttggcagtttggcataaatcattgaatattagctggtaccagtctatctcgtggaaacgatacatttcctcagttaaaagaacctcatggttagttattccccagctggcagtagggaacaacaacctattgcacagtatcaggaagaaggatctgctgcttagatcatcgtcaaaccctttccttaaacgatcttgaagagctgcaacactaaaatcttcttttgataaaccaagtttagcccttaaattgtttgcagcaacagcttcatcaatgcctaatgccgtttctccaccagcatttggtaaccccaaaataagttgcaccgtctcctttgtaattttgagctccttccctgggccggctcaaattgtcatgtcattatggtcaagcttttccatcagccaagctaaatgagatctactgccaagtgcgtcaactctcatatcaagaatactggagaaccccctccgtgcaatagcttggcgctgtctgtcatttaaaatctggatgcttactataacgtcttggggattgcatctcacattaagcctctgctgaaaaaatgtatacaatgaatagcgtaaacatttacatctgcataatcgcaacttaatgtttaaatcaaatctcaaaacaatataatttcacgcagaaaatgatatatcgccattgaccatcaattctaacctgtcgggggggggatccactactttcctccgctttgtaactatcttcttcaagacttatggaggactgtcatcaaagttacgcttcttcgataatggcataaagttatcgtcctcatcaccagcctgcattggtttgtgtctaacagttttcgccggaacacggggtatgtcgacactaaagcactcttgagtagactgaattataatccgctttggattagatggaggtcggtctacgttcttcatgtatgatgttcctgccaaatcaaacaacacatatacataaaaaacgtaatggagcaataaaaattctgctcatatgcaacatccaattaatgtataagctggctatttcgtgcgtactggccctaaatgtacggcgagatgtttatggcataacatgttgacgtatatatcataattttgtcaacaaaatagcataacacggtattgtttagtgcataaacgtgtgagacgttgaagagtataaatttgtgtatccatttaacaatgaatttatgctgaattgttttttgataaatgaaacaattgagttactaataatgtgaaaccgatttacgattcagattgtgtaaatatgcaaatgtaagagttggcgcttgaggacttacccgtgtgtggaggtgcctgaaggccggccgatttcgggaccctctgcagtggagaagcccaaggcgacgtgcggcttggtcaatgcgtaggggacgctgaagttgacggcgggtcggactcagcgttggagacggtgctcgcgacggcgggtggattgcctagggttcggcgccgcggtggatcaaatgcggctcgttctctgcggtggagaagaacaagggggcagcgccaccttctctgcgattctgggtccctcaccggtgaagaagaacaaggcgacatcgtctccctctatgcggtggagaaggtgaatgcgacgacgttcgggcgacggggggagaatctctagggttcggcaaccgcagtggagaagaagcagatggcggcgataaagctagggttcggccgccgcgagcgttacgggtgaggagagctggaaaaactgcgtgcttggttgctggattcgtgggcccgatacacgtaatctgctgggcgaaatcaacgcgaaggcccatggaccgacacgtggattactgtttcgtaaacggaaacataagacatcgtaagatcgtctaaggaaagggtttgacgatgatctaagcattagatccttcttcctgatactgtgcaataggttgttgttccctactgccagctggggaataactaaccatgaggttcttttaactgaggaaatgtatcgtttccacgagatagactggtaccaactaatattcaatgatttatgccaaactgccaagaagtgacatactaggagcgttacaaatgtttctacaacaatttacggatgttccatcatcattcttgtaagcatatcacttttttgtcttttatatgtagccatattttttatgcaaaattcatatacatttagattatgttttgttatgtctcacaacgattcatgttatgcttttgcaactgtattatttgaatcatcttcatgattcagctgcacctcagaataaacgtggaacaccacgcatcaaatattttgataagaatattattcaagcattgacaagagctgacaagggcaagatacgcaaagaataagaacaatttggacattgttcagtattttttatgcgtttatcatattttttatcaatttaatttgccttatatatggtacatagatagaagcactgtcgtttatatttacaaatgaaactccactttatatgatgtgcagtgtcgtttaaattttatgctgtcaacaacctcgtgttatgcttattttctctcaagtttatgatataattatcaccgctatacagtcataagcttcactgtgtgaccagtttatgcagtaaacaacatcgtgttatgcattgttgcccatacatttatgatacaattatcaccgttttatgcccatacattatgcttttttgtctcaagtttatgatacaattatcaccgttctatactggaaatatctctttgtacagtcatgcttcacagtctcaccagtttatgcaataaacaacgccatgttatgcatagttgcacatacatgtatgctacattcgacaacgttctatgctttataagtttcacaatctaaacagtttatggccagtgttatgtattttcgaacttacatttatgctacatacgacaaagttatatgctataaaacaagtcgatgtacattcagattgctacataactgttatgatgtattttcgatagaagcag

SEQ ID NO: 3142 - DNA, 716 bp, Zea Mays
agtgttgtgagataaactttgagctcgattttgaaggggatccagtgactttttgtgggagcacattgtagcaaaatgatagacggattatagctctataactttgctgcagaaaattggcataggtttcacacaaaatcgggagtaaattgagttccaattggctctgtcagtcaagctctttattgaattcagagcactgttcaccatcatcagaaatatcgcgccgtggatcaggatcacccccccccccccccgccggcgataagaacgccaccgcggcgtgaccggtcgtcggtggtcgcggtaaagctccttggtatcgtggcaaaaaggttaccgaggtggcgaactctggttaaacggcgagtgccctcaccggaaaccgccgcgcggaaagcttgccagcgcatccgcagttcgcgcttcttctccaactctggtcgacggcctataaattgagcccccctcggcttcgccatgtattctaccagctattgcacccacctgcatcccaaaccccccaccagagaacttgaatttgggatttcccccaaaccggttgaagaacatcgtgaacccaagctcaccgtggaaagctctccttaggtccgatcctgttgtctttagtcttgttctagcatcctcatgtgcccttgatgctcaccaaaccgtccaattaaactaggagcccgccaatcgattggaacacgaac

SEQ ID NO: 3143 - DNA, 566 bp, Zea Mays
gcgcactccattttcagggaccatgcaatgctcttattccctgatggagtgacggtaaattggactgcaagtcacacagcgacactaggcctcgctaactgaggtaatggagcctaatgatgtagctaaatgtttgatcaggtttggattgcaagtttaacttagcatgggtcagtgaagttaaactagtaatgcagacaggtgctgcaggagggccgaacattagctatgttctgtacctgtgtatggctcagattgctacaatgtttacaagaatggtcgctggaaaggagaagcatacgcattcccagaagccagaaggtcctgtgatcctgttctatatctgctccgattctgagtggcagaaatgcagatcctacgctggtattagatgaagcaaatttataggaagtagtattctcaacaaatcctctggggcctgtctgaagtggtggctggctaggactgggaggcaactttgccttgctttgcttcaggggctggctgctctgatgattctcctctctgattgggatggtgcgcctgtacgcaaccgttcagggccc

SEQ ID NO: 3144 - DNA, 511 bp, Zea Mays
cttgttgccagctctacagactgcagacagcaaacaagtgccctgctctcacctatgattttttttcaagatgcgcacactccacgatcacagagacacatccaaaaattcgtcaagctattgatcgtgttcacttgctcgggatcgtttctcttacgatgcatgtttgatgtgcatatttctctggaaaaatacaaagtacgctttcaatttcagactagatcaacatagttagcatccagtccgttctaataaatataagcaggcagtccacacatgatgttttcagcttataatgactggacggtgtcagtgtcacctaggggagggaggaagatcccgacaacagcaagcgtcattgccgtctgctacacgccttgtccgatcgacccggaccgggagtttcccgggcatttccaccgtcgttgtctgtaatttatcgatattgttcggcgcagttaaattgaaaacggctgagatttgtcgaaagcacagaagttgaaaacgtaac

SEQ ID NO: 3145 - DNA, 748 bp, Zea Mays
cttagatctcggtaaccaccatggtgtggtcctcccgcaccagccgggtgaagggtatcctcagcccttggaacaataaaaccgaaatcatgttcgccgtgagtgccatcaaccaaagaggagggaagtgaggctgcagacgaggactgacattgttgcactcgttccatcagtggagactactcagggcgcttcgtggaagcacgacgggtgtcgtgggggagggttcagaggccacgattgatcagagcacacagaatcgctaactagagtcaaaatccgttgtggagccgcaacacgtcgagagcagctacctcaacgccaccgttttgggtaagcacacctccgatcacttcgccttcgtctacacttcgcccggcaccaatccacgttgggaattaatcctagggagactgtatttcacctcgccggtgaactctcggtcatggggtgcggcggtgccggcctcacgcggttgtggggttggggatgacatggcagtcgttcgtctctggatgtgcgactaagattcgaatcctcttaccccttcactccataaaaccctgaccgttcatctatcggcgagcgatccagattagcttataaaatgccacttcgaccgggatgtcgtggaccatggatccacgatctaacgacccagacgcgagcataccccttcatcggtcagagttgttaaatagaccctcgagtttttaaaattgaacctgccgtcctctacagtttaaaa

SEQ ID NO: 3146 - DNA, 574 bp, Zea Mays
tttatctaaaatttctgcattccaaaggggacatgatccttggtggcaatctaactgacactactaatgttcatcgagaatcagtggcagacccaatagcgcaccccttacacgcacctagtctttttttatcgaaaaggcaggaggtctgccaagatatattgataagaagaataacaagaggtttaagtcaatacagtgaccgaagcactaggcaaaggtccaatctgaagagaagtaaacagaaataaaaaacagaccccactaaatagttgttaaagggtaactaggtgcttggcccctgccaaattccaggctgctgcctcactcttgattttggcaatgatttgttggcagctcgagaatctgcgatcaaagattctcgcatttcgttctcgccaaatctcccagtttacaaggatcaatagtgatctgatgccttttctattacatcccggcagaaaagccagcttttcccaccaatgccccatcgaggggggtcgcccccagttagacggcttcaagccctcaacatctacccaaacaacttcctcctaaattcttttgatgaaac

SEQ ID NO: 3147 - DNA, 333 bp, Zea Mays
caggagagtattcccatcgaattagagaaccatcaggattgtacttaagaagagactgaacaatgccactactttgttgttcctttttagcagtgcaattatgccgaagcaaatggccagtcccacaactagatttagcactgaaggtctgcttacaatatttgcaaagggcaccataccttaccctcttaccattgacgagattagtcagctcctcaaagtcattccagactttggatctcttccttgaggcattggcaccgatgctaccactagtaccagtaccaatactgcttccatcagcagcagtggggctagttgagcctatccctg

SEQ ID NO: 3148 - DNA, 767 bp, Zea Mays
ccgcgcgcgtgaaggtacgcggaagcaggggcgaggattctccgaagcggagggcgaggcggcggcagcgaccttgagggagatggcggcgggcggtagggtttcaatcccggcaggggcgcggcgcacgatcgcggacatcaaggagatcgccggcggccacaccgacgaggaggtctacgctatgctccgcgagtgcaacatggatcccaacgagaccgttcagaggctcctcctcgaaggtccgctctctcccctgctcatcccttcccccggccgtctagatttcgtcgtttgatccaatttcctgctccatgctgttggcgcgagacggacgtggggcttctgaggttgagtccgcgggtgcttttcgattcgctctaggctttccttgatttagttcgtggaagggtacggagagggttgcttccagtttgtgggagtgtaccgagagggttgcgtcactgtatgggttgtcattttagggtttttggatattcaggtggctgcttgagatattcaggtggctgcttgagggaagcatctctgcaccattgtcctctttgtctcaatcacgatgtgtgctgttatctactcatgatgaaaaatgccaatcaagtagcatttctgatgatgaaatttcgcagcaacatttctccttgaagcaacattgtttcggtgtcattttagtccaatcggttgtgaactggacctagttagctgatgtggccttgacaccatgtcgtccacgtggcacgacattgtca

SEQ ID NO: 3149 - DNA, 798 bp, Zea Mays
gtgcgtagaatgggagcaccgttggaaaatgggcccgtggggcttggtgcgcacagattctcgatgctgataggcggcttggcgccgaggcgagggcagcgggggtagctgcgcgtaggcttggagaacgttggttggggaacgactatgaggctttgcacgtaggacgggagcaccagtgcccgtggatgtggggccagattgtcaacacgtggttagaaacgggggctcgagcgggggcacctgtgcggatggagatgacacgggcaggggcaggcgggggtggcggtaaagtgtggacgctaacgatagactcttaatagagtagtagatgtcgacaaatattttttaaaaaaagatcattggtacacattgggcgaagcaccataaacgctcgagtgacactagatgtaaattataagtatgtgtactttgtaggcttacgtagaacgagtttactatggttgactaaggacgtaatcgtttgggaattgggattggatgcttccataagtatttcgttgactatagtaaggacgtacgtagtcagtctgagctgcagcctctagcaaagcaagactccatcgtcgtgactttgtttcgctagttcagtttgtaaactttgactcatatctcccacccaacccaaatcacctattgattctaaatctaaatccaaatcctcacaaccctattgccgattggttctaacacacaaccttgacttagcaatatttcagtccatgcattgcatccgtgacttgtgttgagcaccgtttgtggtattgggtaaaactg

SEQ ID NO: 3150 - DNA, 325 bp, Zea Mays
acaactgttacctggattataatcaaagttttcaaaagtccttgcaagcttcttgctaaatgggccttctctattctgaaacttctggagttcgatgttggctacttgttcttgcatttcgtcatgataataaaaagtctccacacaattgataaaaccttctgttattttgggaacatcaaagattgatgggtcagcataactatagtgtggattcagcaaataagctgtcaaatgcaatggagaatcaagtcttccagtcatcttcttctcaataacaacaacaacatccttgaaacggttctcaacattgccaagggcctct

SEQ ID NO: 3151 - DNA, 1255 bp, Zea Mays
caactgcctgtgtgcgagcaacaggggcaggaggaccggtagcactcgtggtctgtgtggtgccgctggcatcaacctgtgtgggatgcacaggggcagcggcattagacgacgtgtagatggcgccatgggcagcagcgctagacccaggcgaccatggccccgcaccagagcttgtcggcgctgtgatggcctcgtgcatggggtgtgttgctgaggaagctgtggtacctgcatgcacaaaacgagctccaggaactgaagcggtaagatcatgatcatcgatgagaaagtctagggtggatggtgccatgggtgtgctagacatgttggagaaaggaaaaaaagattcgtcaaaaatgacatgtctagaaataataatgcggttcgactgaagctcgaggcatcgatagcctttgtgttccgaggaatagccaagaaaaacacatagggaggagcgaggggcaagtttgtgaggtgttgtggaggacatgttaggataacaagcacacccaaaaactttgaggtgatcataggagggctcggtggaaaatagggcgctatatggcgtggaggatgcaagggttttggtggggaggcgattcacaagatatgtcgcagtatgaagaccctcaacccaataggccggagggagacttgcctgaaataaaaaggagcgcaggatattgttcagggtgggaagagagcgttctgctttcccattttgttgagatgtatatggacatgacatgcggagggtaacaccatgggagagaaagaacgtgcgggcctgagaattatcgaattcgcggccgttgtcgcactggaagctcttgatggtggtcccaaactgcgtgcgaacaaacgcaaaaaagttagaaagagcgaaaaatgtctcggatttgaggcagagcggaaaagtccaaatgtagtgggagcaatcataaagaataacgagataatatttgtatcctgacacactaacaatgggagatgtccataaatcacaatggattatatcaaaattatgaatagcgcgggagctagatgaactgaaaggcaaacgtgcatgtcgaccaagttggcatgcatggcagatgtgatttatgtcatctttattacatgaaatgacactggaactaataagtttggttaaagcttcacgcccaagatgaccgagacgttgatgccaaagggaggtgggtgcggcgaggaaggcggaggtgctggtggatggtgtatagaacgggtagag

SEQ ID NO: 3152 - DNA, 672 bp, Zea Mays
gggcaagggcgtcgcacgccttttcgaatcgggtgagggagtcgctcttcctcctggatcggaggaagcgtcttccatggcttccagtggagcgggaattgaggggttggtgagtggtctgtcttgccatggtgatgctgcaagtacctctaacgtcctgactgagacgggataggccgatcgtggatccagccccagtcgtggctccttctgtcaatgttgtggaggtcgccgctgcgatcggaatagggtaggtggcggtgtgcctcgtgacgcctttagatcccgcagggcgccacgtggaggcggcttcttgggttgcatcgcaatcatctcttccttcgctggtcacgctagggaaggtgactactaggaagtgctcatcctggtatgtcgatttgcctccttgcttccaatcttttattcactgtctaatgctcctttccttttccttttcggtcaccatgtacgtgccgcacaagtctgtgagggacacgaccttggtgatcagagtggtgcctccgtctccctaggccttcgggttgcaacagacgggaggtacgccccctccgactctcgtggtgtcccgtcggcgggtgcaccatcctcctccgttgtggtggtggcgtcatcgtcctaggtcgttccatgggcggcgagtgcggccatcct

SEQ ID NO: 3153 - DNA, 476 bp, Zea Mays
gatattcgcagggaggtaactttggacgtgtcgcgacctcgtggacctagcctgatcctagtcggagataattcaccggcggtcgccgtggctcggtcatttccgccgtcgtgtcatccatgcctcgctcctcgctcaatgtgtccctttttacgtggtaaccatgcacgaatggtgtaatccgcggccgtggatcattagccggaccaccgcgcctttaaattgccccaccacccacgacgaggtattcacatcttcagcagtgaactcggttgaagcacaaatttccgaaatcctctccacctctcccaaaattggttgtgcacggtgaaaccatagtcctttgcgaccgtgtagccccaacctcacctcctaattccgcccggaaccgtcgcaacgccattttccccttttctgtcaccagcgaacgaaaatcctccgcgctccgtgcccagcttctcccaggtctgttcatg

SEQ ID NO: 3154 - DNA, 564 bp, Zea Mays
gtattttcatctttctgcaggattttgcagctcctactagagaatggcattagagtaaatgaactaacaaggatagaggttgctctcgtcgtcccataagtggtagggagctccacgtacaaacttcatttttcttattcacaatatgattcattgttaatacaacaaaagaaatttgacaaattggacaggttcaacaattgtgggtgtgtccattcaccagtacaactgaatgctttatttattcccatatagctttgtgggtttatatgtctgagttatccctactgtacataagtaggaggtgaccgctacactatgtaattgaaaaaatagggatatcagaccaggtttccattgaccaatattattatttttggttgtgccagtacaaaagactatcctgttttcatcaaagctagatttggcccagcttgatacctgcaggatgccaatgctattataatctattgttggatgccataaatttatcattcatgtcttctgttttgtgcaacgataagattgattttaatgtatatggacaagatatttagatacaat

SEQ ID NO: 3155 - DNA, 414 bp, Zea Mays
ggtttatcggagagggacttgaagttcatgataaaccgacaactgaaatctccccaatcgtcgatgcagtgtcgaggtagatgccagcgccattgtagtgcgtcctgcccgagaacgatgggcaagtacgctgtcatgacgtcctccgttgccccagcagtccgggcagcggttgtgtagacggccaaccaaccctctgggtcctgcttgggctcatatttgttgacgttggagactttgaaattgggaggccattggatggcccggaggcgaggggtgagcgtggagaccccgcacgtatcctcttgtcgatgatcatgtcgtcgatcctggggaggggagcgagtattaggtcacctcgaccgtccccgggctagactgttggttgaggctgctgctgactcgatctgggtt

SEQ ID NO: 3156 - DNA, 580 bp, Zea Mays
caggcacaccagggcagtattcccccgaacaaaccatgctacatgaaggggcgacaatggcgaccatgcgggtatgctacttaccagcgtcggaggcggatacgtgcttgcccacgcatcgaagcagacccgcggcgatgataaagctctgacgagcaatcgccaactccccgtgcaccaatcacgcacggcgaggctacgtctagatgcggcgtgtacttgcgattctccaggagaatctatcgggcatgagcgaaggcgtgcgcgcgacttcgatcgacggacctctccaccctgacaaacgcaacgatggcgttaatccaccctctgcaatcagggtgcgtagggcatggcaggagaggtcgcggttgcggagaaagggtggcgtggcctgagaagtcgactggagagggcgccctgcgcctttcggtcttatggggaagggcgaccccaggtcggtcagagcggccacggacgacgcgcggaagaagctccggcggattcggctgggtagttgcggcgcttggccaccggtcagagcggaagatgcgcaggacccgccaatatcgcgcagctgaag

SEQ ID NO: 3157 - DNA, 306 bp, Zea Mays
cgcccgcatccctcgccgtcagcacgccacctcacacgatgtatgtgtgtctcacgttcttgttctggcttcttctccctcgcagcagcaatggaagcgaaagacgccttcgttcttgcccgaacgttgggaggcagcgcagcaatgatggcgtgtgagctagctgagcgcttcttcactctctttttatttatcagatcagacgtgagcgctctacttgtgctcggtaggccgtatgtgtgtaggctagctagcggtgctgcttccatttagagcgtgccgcttatgaatgaaaataagcaagaa

SEQ ID NO: 3158 - DNA, 700 bp, Zea Mays
gattttcatttattgaagtggattatttatatatataattagaagtatttatatacatgaatgaaacaataaataaaatcaaatgaaaccttaaattttatgttgggtttttgtttgtgcacttgattttgcaaccttaactgggattcaaatttgccatttgaatgaaaataagctagaaaaatcaaaacagaaaataagaaggggagatcacacgtgcgggtcaatttctcttcctcggcccaactaccttaccttcccctacctccaccggcccattactgcatcccactgtgctgacgggtggacccctcaatgtcagcctcgcatcctgcggacacagctcggctaggcaccacagtgtggcgccgacttgcgggccccactcgccaggttatttcctcacgaccacacagctggtgacacttacgtgtgggcccgcgtcgtcagacatctcttctccgcatcgtgcggccagaaaacagaatcgcccgcaacaaccggaccggagcgagcggagtccctgcgctagatccttgggatcttgtttcgccctcgcagtagatatataggggccctcgatcatccgaccacctggttgcctcatttgtagccgaggtgagggctggcaccatgtagaccaccgcggtcacggagaagattgccgccgtggccgaaacttggtggaagagcgtattgg

SEQ ID NO: 3159 - DNA, 574 bp, Zea Mays
aactatttcaactcgttcaagctaccggttgaacgaatacaagaaacattgcacacggtacaagccaacatgcaaataaggacccaacaacacagcacgtacgtacgcgcgcgcgcgtacattattactcctacgccttctacaacgcctgcacatgcacgtccacgtcattactccctcgtcttacttcctttctatgggctcgtcgtcggagcagccgacgtgggtggcgggtcgccgtggtgtttagggtccgggccggagggcacctctctcttgtagccgccaacctcgccagcaccgtcgtcacgtggcgtgaacgacgcgagcctcggccgacggccgccgacgatgagtccgcgctgctgtcgttgcctctcccagtagaccacattgccgccgcttcctctgccacctcgattgacagctctagcggcggcaacaacaacgacctcatcacccgtccgccccatgcgtgccgcttccgacgacgtccaagcaaagagagcgcagaacaggaacgcagccatcgccaccgctgccatccttgacgacatggtatcgagcaccaagc

SEQ ID NO: 3160 - DNA, 775 bp, Zea Mays
agataattagccctaaagtctgggtgtcagaccactctgagactgaacattgactgacagtgagttctaaggaactttgggctcgattcttgtgcaaggagttaagcaaatgggcaagatccctatagaaaatttgtagctggtatatagggctacaagtttgttacagatggattggcaagttcttgcacaaaaatccaagatcttggcgttgcaattctgtctgtcaggcgctctcaatcaggttttcaatggtacagtgttcaaatcagatcgccgggttcagttcatctcgccgccggtgatcccgcgctgggatcctcgtcgccgatgcgattcgtgctctgtggggtgcagataactcttaagggtaagaaatatcgcatcgtggatgaactcaagccactgttccgctccggccgccgtacccgcctgagtcacggtcgcttcggataaactcaccagagttatccacctcgcgaccttgcgccacgtgctttggtgctttaacaacgtcgtagtgagtcaccttatcccactcgttcatcgccggtgagcttgccacggtgaacgccacgaattgcttgcgctagtaacctcttccctctccggccgccaccgtgccaactccaaatcacgagccaccatccccgaatcctataaatgagcacaccctcagctccgctatgtaattatgcacccaacacacccactcgtgcctccaattactcaccagagagccccaatttgaaactttccccaattatgtccaaag

SEQ ID NO: 3161 - DNA, 612 bp, Zea Mays
agcttgaatgaagtaacgattaagaataagtacccgttacctcggattgaagatctgtttgatcagatgagaggagataaagtattctcaaaaatagatctaagatcaggctatcatcagttgaagattcgaaccgaagatatacctaaaatagctttcaccacaagatatggactatatgagtttttggtcatgtcttttggactgactaatgcaccagcttactttatgaacttgatgaataaagtattcatggaataccttgaccagtttgtggtggtattcatcgacgacatactagtatactctcagagtgaagaagaacatgaagatcatctgagattagttctatagaaacttcgagacaatcagttgtatggaaattttcaaagtgtgatttttggctgaaggaagtcgctttcctaggtcatattatcaccgatggaggaatcaaggtagaccccgataaaataagtgaaatactaaattggaaacaacccacagatgtgtccaagatcaggagttttcttggattagcatgatacaacagaagatttatcgaaggcttctccaaaatagtgaaaccccttacttcactgttggagaaaagta

SEQ ID NO: 3162 - DNA, 505 bp, Zea Mays
gcgagcctgtaccgaccagaaaatgcaaagaccggtgctccggtgtggctgacacctaattctacccttaacgaccataacctctcactcaattgcaaagttctagctcctaatctctctatccacggtgatggcgcgaaatacggatgaattgaggtgttcccggtgctcaagagtgaggagggagtgatcggacctgtggagagctggccacggcgagctcacacactgcggtgttcttgatagattaggggaaaatcccaaattggggagttgtggcggacgattggaggtgagggctggttcactgggtgcacaactacttagcagagctcactggggcggcaatttataggttccatcggcggtggcggctaatttttgagaagacgagcggtggccggagagaggggaggtcactggtgcaagggatgcgtggctttcaccgtggcaagcttaccagcgacgaaccagctatctaaagcggcttactgcgacgtggtaa

SEQ ID NO: 3163 - DNA, 858 bp, Zea Mays
cctcttccttccttttatctcttgaatttggcttgtagcactcgctcaccgaattatggatggcactcaatttcttttgctcttctcctcctctacttgctgtactaatttcagttttcttttgtaaatgttcaaccatgatttgttgaggggtcataggcttgaatacaaactttctccctttcaaatctagtgtgtactgatttgttcttccacaatgctgagaatatcggtcatattgccaaggtcttcccaacagcaagtgacacacaaacatgggtgcaacattgcactccactgtgtcaacaaactctccaatcttgtacgaaactttcaccttataaccaatcttgatatctccttattcattcaaccattggacatgatatggatgagggtgtcgctgcaacttcagatcatgcctttcaaccatctcacgacttacaagattatgactacttcctccatcaatgatcacctttactactttgtcttgcacttttgatcttatttgaaaaagattatgtcgctgtccaatttcagcttctttcatttgaacgctcaatatttgtgtaaccacaagagcggtactatgctcaaattcacatcctgtatgttcttccaatttatcagtgtcatctacatttcctgcttcagatttctcttcactagctgatgtatattctccatcatcagtcacaaggatcacacaattatttggacactccttaatgacatgaccacgacctccacacttgaagcactgaataccactactcttggttgttgaacccactgatgttgaagtggatgctgctggtttataactcgtgtttggagcagcaccgttctttccac

SEQ ID NO: 3164 - DNA, 507 bp, Zea Mays
gagctgaccattgtactttgtcggtgtccctggatcatgtgcatgaagctctgaacctcgcctgtcacggggcgcccgtaattcctcaccagagttcatcggccgacacggatcgcacctcgccgtggcctgcttccgtcaccattccgcacacgctgtaagtcctcccacaatgttcaccgttatgcacgcatcgcttaagtcgtctcgggtaggtaattaagtcactagccggtcattttggccgtcgccgatgagatcaccgccgctgacgggtgtccaccgccgcaatgctgaatggctttggggtgattgtcgcgcggtccgttgattcggtatcggatagttgggattagagggcacatttccccttcactggattgatgttgtctgtgcatcggcggcgcgccgtgccgtcgggaggagagggagtcgtttgggacgatggtgacaacaccgttcgatctgcgcggacgaccgatattaggccagggataccccttcgcg

SEQ ID NO: 3165 - DNA, 574 bp, Zea Mays
aagtcgctcgtaattagggtattcaaaattcagagcgtccattactcggttcaaccttcgtttcgatcggttgccgaaggctgcagtcattaattgatcttcttttttagtgtagtttcccaaaatttcattgcacattgtctcaatcatctctagccactcttggcaaggctctttgaactgtttctcaaacttaaagcgataagccaatcgaacaagttcattcttcttctttgttccttttagcttcggcatgctccagtcacttaacgttggagataccctgttggccagatattcttgcactagatctctggtgctgatttgttcagccaccactctgaattctgctacggccagctggcatgctgaccctggcttcatgttgcacaaaggtctggtcattccgaagcttaaagccagcgggcacatgaccatcgtcatcagtttcccccttttcttttcatcggccttgatataaaaacattcgctcttccagccggttggccacttggtacgatagctgaggaccggagccttcgtatctttgcgatacgcgaagttatagcagcca

SEQ ID NO: 3166 - DNA, 349 bp, Zea Mays
gccaaaggagactgctgttgaatccagcaaaggtggattagttcgattgaaatataccttcatatacagagagaagttcgacgaaccaaatgatgactggttgaaatgcattgaggctaccagcgacgagttgcttgggacatataccagggccgaagatgatgccttgtcctcagccttcgggggtcggggcaagaaaagattgaacatggtttttgatgcaattggcttcatatatcctgattactactaccccttgaaaaggcaaggaaaaaaagaggaaaactgccgcttcgaccaccaccgttgtgccgaagggcaagaaaataaaggttttgacccaccggcc

SEQ ID NO: 3167 - DNA, 577 bp, Zea Mays
gagatttctagaagcgagattggcgggcggggtttctagaagcgagaatggaaggtgccatgaatggcggctgggggctcgccgagattgccgcgggggagaggggagcgcttgccgagggagatggccacggtaggagagggaaggagtgcgatgaaaccgcggtcgtggcagaacgtgcaccagtggacgcctacaatgcacacttaagtagtagtagagaataggctgttggtaatggaagccatgggcttccgttaggcatgggaagctccagtcagggtagtggtcacgcgcgtggtcaggtcgggccagtggggcgcgtgcgtccgcgcgattgtagggcatgtttatgcatgtgtaaatatgtgttatgttttgtgtaaacagaaggtgcgcacgtggtgtggtcgagttgggatggacgaaggtgggccagcgtcgtgtttgctggtcgggaagttggttcatactcgtgtttaggctagcatatttaatggttcagacttgcataacaggagagcggcaacgaattaacctttcaattgttcgttcagctgggtccacacaccaccgt

SEQ ID NO: 3168 - DNA, 299 bp, Zea Mays
gccggttgaatccgccctcgccaatgtcgatctgctagtctgctaccgacccaccgccaagggaggtgagttcccctgccacgatctagctctagactaatggggtagtactagtagacgccaagcgagcgtgtgaggacgagagatttgacaaggacagtgagatctacagcttgtgtggacgacggcttgtgggaaacacgttagtcgacaacgattcggtcgccgcctgcacaccccggtcagcatcgtcgacctagtccagggccagtttgatggcaacacctaactgtttagcc

SEQ ID NO: 3169 - DNA, 545 bp, Zea Mays
cgctgacgcgtagggcccatggatcagcagtatgccgatggcgcgctagcgactggatcgcagatcaacggctctggttccacgaaccgcatgaaccattatccgcgaatccgggctgttagatcaaaaatggacggttaggatgggcgttgggggctaccttccccggtcggtcaggggcggtgccatactcgcccgcggcggtgcaactaccagagacgaggtagactagggctcctagggcgctaggggtcggtctgggtagccagaaaggttggggaggactcggcgaatcctatggcagggttgggattgaaggaatggggctgaggtgaccagacggcggaccgggggatactccaacaagcaatcatgcacgactaagggcataccaggggaaattaggggcggggttagatcagttaccttgagagaaggcttgaggactcacgaacggcgtccggggcacgacgaggacacgggtcgacggcggcggagctgcggcggggcagagagaaccggtgagcgtggatcgagagaaacag

SEQ ID NO: 3170 - DNA, 295 bp, Zea Mays
caaatccttgcctccgcactcgctctctgagcttggacagccgatgttctccctcgcctccgtggtcctcacccccactcctcacccttccatcagcgcccgtccaggtacgtccccacccccgcactcctcgcccttgcatcaacgcttccaagtacgtcaccgccgatgccccgtgatcttcgccgcatcgtccgatccatccgccacctctcggctgctccatcatgccctcgtaaccacccaagatagtagcccccaaccccaaccaccagtctgccctgcctggcggcgt

SEQ ID NO: 3171 - DNA, 776 bp, Zea Mays
aataaggatacacggtcacatacggaggctgctggagttgaccccaacacggaggcgaggctaactaattcgcttgtggaatgatttggcatgcctgctggttgccatagttggtgtgtggctgagtttccaatcttaataaaaaatttaagaccaaatacaggttaatacagatcttttaacatggccttgattttctatttttcatacatgttgatgctaacaaacttctattgaacttgtctgctccgctaatttgcattcttcttctcttttacttgttcacagttcacactcacagcttctcatgggaacagaccttcttttactgaacaacagtttgcacttgccactgttgcgtaccatcaatactctctattgcgctgcacatccatctaataattcaccacttcatatggcggcctgtcacttcaccttcacaccaactagcatgcatgccatgtgttggcgtctttttagaccaaatactaacgatctctagatcacccttgtagtagttcgaaccttggagataatccctaggtttcgtccacgaaggatcaagaccttagggagcaagatagtaaataagatgtaagacaaataacactatctcgaatgtggtattaaaaggaaaccttggaaccaaggggatgattacttgatgtatctaagatggttctgaaggtgggacataacctctatgatgaccaccacctatttagaaccaaacaacaacaaaccctatggccttctcgtgatgagcataccttggg

SEQ ID NO: 3172 - DNA, 390 bp, Zea Mays
agaagacccaacgtggacatccatggaggtatgagaagaggagcccgctcggacaccctcgggggctgggttgcagcccgcactgcccatcggagccggatcatcaccggcaacaccctcgggggctgggttgcagcttgcgctacccacccgagccggatcattaccagcaacaccctcaggggctgggcaaccgccagcaccacccttgaggactgggttctctacaacagacacctctaaggctaaaggattctcagtcacctccatgggaattgagcgaccttgaccaacctcttggctccgaagaccgccttccaaggtcgacgatgcacgagatgctgcccgggatacctctaatcccacatctagagtgtcagagcagacgtc

SEQ ID NO: 3173 - DNA, 457 bp, Zea Mays
ctgtcctccaaagctgatatcatttgacttcaagaaaccaaggtgacagatttctcctcccacctgctcctatatgtttgtggatctgaatttgataagtttttgaccctttctgcagatggcacccgtggtggaattctaatagcttggagaggtgctgtgtgtcaggccatatcttctcgtgttgatatctagtcggtctcagttcagtttgttgggcttaatggcatgaattggtggtttactagtgtgtatggccctcaggaagatgagcttaaaatccaatttctgcaggaatttaaggatatcagggcactctgtataggtccttggttactgcctcgagactttaatatgatctaccaagctgcggacaagaacaaccccaatctgaatagagcattgatacgaagttctcttgatgtcacaagccttaaagaaatccaattgcatagtc

SEQ ID NO: 3174 - DNA, 630 bp, Zea Mays
gtcaactctacatgtcaccttgttgcttattttatacctgccctataaaatcttctcttttccatctcaaattgagagttgtattttacccatttccccttggatgtatcatattctttgccacttgaacttttaaccctatcgtttaatgtgttttgttcgctatcgcctttatccttgtgatcccaccttgatgttgtcgtacatctgccacttaaaacctcccttctcccctatcaattcgagagtggtgttttacataccccgtgcttggccataacctcatctttgccacgtgcaaatgttgtcttaactccattctttgttgtactcatacccttggttcaaatatacctttacctcttcccttacacccttttatgttatcctcttcaacccttgtaatacctatatttttaccatgacatttactttgatctagcctttggagccttctcctttccatccttagttcaagagcggtgctttaccatctcgcccttgattgttttccccagtgtcgccttgcaagctttgtcctaatttgatccttggatgtgtttttggttgccattcctattacctttgtcatccatcgatcttaccttgatactcatctttacgcctact

SEQ ID NO: 3175 - DNA, 365 bp, Zea Mays
ttgtcctgtaacaatatgaatcgtgctaaatgtttattcacagagacatgaaagttttgtgattctggcctgtgacaaccaacatattagtagcccaggtttgtgcaagctaggcttgtcagaccttacacccattcagcttgtagtagatgttcattgtttatgtattggcattggccagttcataatccctcaatgctacataacttttccttcctaaccacatattcataggcacattgtggggcttatattctataacctcaagattcaaagtggtgtgcatctagggcagtctgtaaataatagaatatgaatatttataccagatcagattatccgtgtctgaatatttctatagcttc

SEQ ID NO: 3176 - DNA, 496 bp, Zea Mays
aaagtattttctatattgtatttcctattttcttaagtcactggactaagcacactaatacagagaagaccggggttatcggtgtaaagtttcccaagactcaggacgctgtttcactggacggcgggtagaaacactgtaaacataagggctcaattacaaaaaggcaccgtgaagcggtatcatggatctggggccattcgatcaacaccggacgctccagattaaatcgccaggggtttaaatcggtacgcgccgtgggcagtccgatcgtgatccgacggtcacgggctgcaagcatacacccccatccgatcctgatcgcacgagtcacaattcccccaccaaaccggtacccccgccatccaatcctacccacaggatattggatcaacggtcgagggcagctcatgccctccggccagacctgggtgacggagcagtgagctcgcggtggcggacatcgccgacgacgaccgccctactccgccagtgc

SEQ ID NO: 3177 - DNA, 354 bp, Zea Mays
cttcagcatggtagtagttgggacaagagtctaccttatgctgagttctcatatactagttaacatgcgagtctgaagatgtcaccgttcgagactctgtatgacaggaaatgcatgactcctctatttttggactagactagaggaagacagttctttgggcctgaactgattcaagaggcagaagaacaagtccgtataattcgggagaatttgagggtagctcagaccaggtaaaagagctacgctgataatagaagaagaccactgaaatttgaggaaggagattatgtgtatctcaaggtgtcaccacttcgtggaaagagaagatttaaagtcaaaggcagattgttc

SEQ ID NO: 3178 - DNA, 555 bp, Zea Mays
gaacttcttgagcatgccgacatggaacacatcgtgaagacggactcccggcggaagctatagccgcacggttacgttgttgatgacttctgtgatgcggcatggtccgacgtaatgaggcttgagttttcccttgggcgcatgtggtagggatgaggatgggcgctgccggagccgaagaagagcccagtcgccttcctggtaggatactgggtggtgatgcttgtcgtagtgtttcttctgtattgcttccacctgttcgagtccgtacctgacatcaccgaggaaggtcgcatgatcttccatctcctaggcgaacagttgccacacgagtctcactgggctcgtaggagcggatggagggcgggtcgcatccgtagaccacctagaatggtgtctcatggagtgaggactggtatgcggtgttgtagatgtactcagcccacggcagccagcgcagccattgtcggggtcgatcatcggtgaagcaccgtaggtacatgatgatgacacaatttgttgtctctgtctggccgtccgtctaggggtggaatg

SEQ ID NO: 3179 - DNA, 833 bp, Zea Mays
gatcagcggtggagcagcatcgagaaggtggtagatcagaacgcggtcaacatcgccaatcttcaagggaggctcaacgaagaagaactgacgcgcgtattgggggaacgcttggacggacagttggcggaattccaacaagaccaagcgtatcgtgtccaggaattggtggcaaatacttccactcgcgtggcggtgctggaaaacgtgtcttctgtgtttgaggcatggcgaccacgcatcgagggttccattgactctgtcaggtcttcagtcgacaccatgcggtcagagctcgcccgtctcactcagctcctggaaggcggcattgctggagaacatcaagcacgtccgagtctcctgggagcgtatgtacctgtggcggagcgtccttctacgaccacagccacacacaactccgactgggccaacggccaccgcaacgcttgtcaacctcgggagtatggaattgagaattcccaaattccaatccatctcccgaacaatggtatgcattctccctacattccccaaactcaggatactaggccaaaccggacgagttgggataaccatccatctacatctgatgctatggggggtagtgttcaggaccctaattttgctaggaatttagggagcctaccgaaactccattttccatcatttgacggtgggaatcccaagctgtggcaaactagatgtgaggactacttccttatgtattcagtggacccccgtatgtggatcaaggttgcttctatgcaatttgtgggaccagcagctatatggctacaatcgattgagtataagttggttcaaatgtcttgggg

SEQ ID NO: 3180 - DNA, 638 bp, Zea Mays
acagatcgttgccgaagatgatagcgaaaatgaagatgaggatgatgacagcatcctaagcctgagcaaacccagccatatcgaattcgggagatccacagttaaggcagaggatctagttttaatgaagaaattaggatactttggagagaatgatgacgaactgcttcgttttgctggagaggaggtgattccagagccaaaagaggatgaagatgtagtcttcaaaagcttctttagggcgggacttcggttccccctttatgagatgatcggtgaagttttgaagaagttcgaaatttacctacaccaactgacccccaatgatattgttagactcaatgtgtatatttgggctcttcgaagccaaggaaaaagtgtgaatgccgaagggttctgttgagtgcactaacttcattatcagatgaaggctagagccgatgatctgcacaagaactttgggtgctacaattttgcatactgaaaggataccaaggcccacgtgattggctaccacactaaatggccgaccgggtggacgaatgagtggttttatgtgaaggctaatgagaagaagagggagatgctcatgagcatggtaatgagtcccttaaggctaaactttggcatgactcgac

SEQ ID NO: 3181 - DNA, 451 bp, Zea Mays
gctactatggaggctgaggcttgcaaaagtagtgtgctgatggaagttgcctgcaatggggaagccaacggattggttaacttggacgcgagtgatgtctcagaagagtcaactaggtgttctgataataatatgggaatgcctggtgttcctgcaatagatttttctcaacacggtggcttagctcaaggtagcattgcataatcagatgataagacagtcaagtcagatgaggtgtccgcggtaactcatttagagcagattgactcccaagctagaataaatagttgtatttgtcgttctatatctatattttatactaatttttaactcacgcggcaacgcacatgcacatacatagtgctactataaggcaacatttgttagtcatgctatttttcatctcactgggcctaacgctttcccctcccatctaaccccaccatttctc

SEQ ID NO: 3182 - DNA, 577 bp, Zea Mays
cttttattcaaaagacagcgcaacaattacttaaagacgcagccggaataatgttgattgaagtctatcattacaaccacactccgcacaaagccgcccacgtacgtagccggaacaatacaagcgtacgaaaacgaccaacaggccacaccatcattacaactacatacacacggcaagggcatcacatattacattggctcaacctttgggatgatacccatctccctgtagttgaacatcattatcctccattcctcaccctcaaaaagatttcgtagctcgccctcacctacactcgccccaattggcgaggataacaattctcgcttaccagtcccgtccacgcgaagaagatcactctccatctcactacgatgacgcctaccacttcgcgacaattcactcactctccgtttcgccaccgccctatgccgcttatacccagtactcgcgcccgggagcccctcggaaccctccacgcacggcgaaggctccgccgcaaccacatctaacgctgcaaaataatccaagtcctcatctgaagactcctccgtccacacaatcgaactcccag

SEQ ID NO: 3183 - DNA, 678 bp, Zea Mays
tgtgtggatgtcagccttgagatcgtggaactgaatcggcccgtcgagcgctccaggtcgccgatgcgtgactcccacttggcgtcaagcgctgcgaatttcttgtcgagctcggtgaggaacgatcgagtttttgagcttccaaggcgagcttaacctgtggatccatggcaccgagatgcttggcacgacgggtgtagtggatcggctccagatccggggatccatgacctttgataccaatatgttagcaacacctactgatgggaaggaggaagcaggtagagagggagcttggggaagaagatgatagtagatatatattttctttcttgtttccctccagttcggatacgacaaaacatatataatactcttgggctagcgagacacaaatctaatgcacccattctgggcccatcacccggctactgggcctaaccctcctctttggccttgaagcttgtacttcatcagctcccctgtccgcgatgacaaccagaggagcttggactgttggcgttgtctcctgagtgctgacataaagttaacgcttacacaaaagatatggaggtggcgggcctttcctcatacctcgtgtagcctcttccccggagcgagtccattagtcctcttgcattctattgttggcggccaggtgagcgggcctgttttctt

SEQ ID NO: 3184 - DNA, 795 bp, Zea Mays
gtcggaactacctcaggcgacgctggccacggaagagctctcctcggcgatgatggcgaccgaattgggggaaaaccaaattcaggcgctatggtggctaatcagaggcgagagtgagtgctctaggttcgtgataagctaacggagcaggccggggcatcaatttatagtgattaacagttgtggctctgaatttggggaagaaagctggcagccggagcaaggtgagtcaccggagtgcagctaccgtggcgctcaacggggtaaagaccctcgcggtaaacaggctgtccactgcgacgtgttgcgacatgataacaagtgtaagcacgtggcacgactacaaagggcggcgatctccggcgaggacacctcggtcgatcgcacggcaagtagcacggtgaataatccggtgataaggctccaactcttcccaacgttgagatcttttaccgctagttgttatccacacaccagagcgcacgaatcgtgacgaccggcgtaaatcatggtgtaagttcgccgacgacgagatacactgaatctgaagatctttttgctattgtaccatcgggaacttcttcagtcgttctgacaaagcatcttcaggggtgtttttcttcgatttctatgtgataagctatcgaccggattacagcaaagttattaacctatatcccagctccaattcgaccataggaatcttggtcatttgctcactcgatcaagctcaaatcggctccaaagttcatcagggttcactgtcagccaagtttcaatcttcagtagtgactg

SEQ ID NO: 3185 - DNA, 1062 bp, Zea Mays
ggtttcacaattttatcatttttctactgttttctataattgttttaactctggagtaaaaagaaaaagaaaagcctatgaatagtactgggctgatttcagcccagtagcccaactcagagggagaaagcgcccgcgcgcgcccgcgcgatggtaggtttgcagaaaagccctcgcctttctgaacaaccagaaacagaaccgaagtgctattcacagagtcactgacgctttccagaaaacccctcggacttctaattcttcgcatgggagggtcctcgacggcgtcgcgcggaggacgaactccggtgagcacgcagaccgaccgaattgctccaagaccggtgcctagactaaggccaaaccaaattcatgaccaggggagcattttccccaacataattgcgcgaatggtcaagaggtgtgctctggccacgggggccgtgaacatggcggctagctcgtcgtgttcccgacgattgggggcatctacattcaaattgatggcttggcaagcatcactgagctatgagaagacttaaacaagggagaaaagaagatgagctaaccgggagggggctggccgcggtgaggttgagcttcgggtggcggagaatggaattggggcgaatgagaaattccggagcttggatgaacgattacgagtgggagtggggtgcgttggcttcgcaattacctagcgcaactacctgggtgctcaatttataggagggtaaggcggtggccgcgaattttggggaggacgcgcggcggccggagataaagaagaccctggcgcacgcgaatagtgtcctacgccgtggcgacctcaccatcgttgatttgacagcagtaatgagttttggcgacgccgtggaaaggttaagccacgcggcgcacggtcgggaggccttggggcgtcggtgagcttatcggcttcagccgcaaagtaggggagaaggccacggtgagtcacctgagtgacctccagctcaccgtcggcgaagatccttaccccgcgatgttatcaatccaccccgcacgcgaatcttgacgacggcg

SEQ ID NO: 3186 - DNA, 1678 bp, Zea Mays
aagagactttcccaatgcgacttgttacctggtatggcccaaagaagcgaggacccaatttcgacggagcagccgcggtgacacccactgctgtccgctgttgtaaacggagccatacccagtctccttcttggaattcgacctctcgtcgtgactgatcctgatatgtcttcatcacaatttgtgcttgtaccagccttgccttgatttcagtcagaaattcatccctttcctggagctgctgatctaccgctgccacctttgcgacacctggatggtaagctaataatgctggcggctctcggccataaactacccgaaagggggaacatttgagggcggtgtggtacgaagtgttgtaacaaaattctgcccatggtaaccactgtaaccaagttcttggacggtcgcctgctaggcagcgaagatacatgataatgatccgattgaccacttccgcctggcatcagattgagggtgaaaggcagaactcatgtgtagcttgacccctgctaagcgaaacaactcggtccaaaaagcactagtgaaaaccgtgtcccgatcactgacaatggaacaaggaaaaccatgaagccggtcaatgccatcaaagaaggccttggcgactgaggctgctgtgtatgggtggcctaatggaatgaaatgcgccattttggaaaatcggtccaccactgtgagaattactgatttaccgcccaccttggaaaaaccttccacaaaatccatggagatatcactccaaatgcctgttggaattggtaatggttgcagcagcccgacagggtgcaagtggactgacttgttgcgttgacatactgagcagcccttcacatattctctgattcgttggagggcatgagcattataaaatgtagcccgccaacggtgcaccgtcttctctacaccttcatgcgccccatcatgggcatcggccaagaggagtggccacatagatgatgcatctggtacgaagatcttgcctttaaatagcagcaacccatctacttcagtccattcctctttggctgttcctactgccagctgagcacggatagcctgcacttgggaattagtggccgcctcatctcgcaagttgtcaaacagtgagaatattgggagtgatatgctgtgcacagtgcccattggttcctcccgccgagataaagcgtctgcagcaccattcaatttgcccggatgatattcaacagtcaaatcatagccaaataatttactgacccatgtgtgttggggaatggtggagagccgctggtccaagatgaacttcaaactgtaatgatctgtccggactgtaaatgcacgtccccagagatatgggcgccagttgcggacggccttgaccaaaccgatcaattcccgctcataagcgggcaacttctggtgatgtggcgcaactgcacggctgaagaaggcaattgcaccatcaccttgatggagcacagcgccgaaccctgcccctgaggcatcgcagtccaccatgaagcgcttggagaagtccggcatttggaggagtggtgctgtcatcaaggagtgtttaagttgcaggaaggctgcatccgcagcgtccgaccagcgaaaggcctctttcttcaagagggttgttagcggggcagccacctcaccatagccggcgatgaat

SEQ ID NO: 3187 - DNA, 497 bp, Zea Mays
ggaaattaagaaagaagtattacctaaacctctcacctgttctagccttcaactcatctccttgcttcggtgtccaggtaacagccctggcaccacctctacccagctacgaactacgtagtcagggacctcctagcctaggggccgaggcccttgacaacttggtatcacgattccggcgatcctcttccaccttcgaccaccactccattgctagcactccttcatctccaagttcatcatcaacgacacccatgactaaccccaccaacgccggcctggccgatgtcatcgcgcagctgaccacgagcctgaccaccctctaggctgaagtgggggagctgcgccgtgagcgtggtaccattccgtctggctcgaggttcactgaacatcagggtgaacaacctccgcgttttcagaagttggatttcccgaaattcgacggcaagtctgatccgctggccttctcaaccggtgcgaatcctattttcatcaac

SEQ ID NO: 3188 - DNA, 427 bp, Zea Mays
ttcttattgatggtatgatgccatgttcttgtagtgtggcctttgtcctcgccacaaaacaagaagaatggtttccttggggtgcactaaatctgccaccaaagctttggcctccccttcatcctcttggggcaagtggacggaacgtgctatgtgagggttgctgctgagaccttgcctgttgctgccctgactaaccttgagaccgagccattctttccttaccctgtgcttggttatggatattttggacatgtattggatgaaaccttcctccgaagaccctggcgacttcggtgtatctatggaactcctcccttttttggcagaaatcattgtcaacccttatgtagtcatccattttttgcagcaacttttcaagggagtgaggaggattccttggaaaataatgagcagttggtcctgg

SEQ ID NO: 3189 - DNA, 357 bp, Zea Mays
gatacactaatgaactaggctttcttgctccatatcgatccactcgctaccacttgaatgagtgggctgcccaagggaataacccatccaatgccaaggaattgttcaatttgcgccattcaacagctagaaatgtgatagagagaacgtttgggctattgaaaatgaggtgggctatattaaggaaaaactcatattttgacttacaaaaatagattaggatcatcaatgcttgttgcatattgcacaactttgtaagggataggcaaagagatatggatgatttacttttaggccaatttgatcaagtaatatctattgaatctcatgatgttcaaagtgaagtgagtatgatta

SEQ ID NO: 3190 - DNA, 374 bp, Zea Mays
aggatgaaaacggccggtaacggtcggaaaaaacctctcaccgttttcacccgcataaatttttgttcggtcggaatcggtaaacgggaaagtcggaaacggataacggccggtaaattccggtatatcgaaaacggataaatccgagcaaaatagctcgaaattgatcgggaaacggtaactgtaatcggaaaagctcataataaacaaatcctaaccacacagatgttcattcacatccacatacaagtctcattcacaaaagtacacaaaacacaatcttgtccacatataattggtcatacactcatccatgtccaatcttaaattataacacacaacacataagtcttaaaacacgattgttcattcac

SEQ ID NO: 3191 - DNA, 1021 bp, Zea Mays
cttcaggttcatactctacgataccggtaaaaatatctgcgccaatgaaagaaaactcatcagctctacatggcagctaattcatgcctttggttcacagaatggagcataggaataatgtatttttttctattttggagggaaaatgtagaactttgcatccactcaaacctcttggtacaattgctatgtttttcctacagcctacccaaacgatcatttcttcaacattcatatgttttatattcctgacgaattcctatgtttttcctgttcttgtgtttttgtgttgctgtgttccaaatagaaccttacttggataaaatagatcatagacgcaatcgcattatatgcaatccattaacagagatatgacaactgacaattgttgctttggatatgcaaactgcaaacagtaattgctatggatgatgcttatatgaaactgaggcatcaagtatcatccgttaaattgtactgcgatctgtcagctgctttactgaagtgttcaatatacaaatgtaaagttgtatgcatccctctactaccattgttcaagttctacatcacaaagacaaaaaaaaacaaggttttcacataagcattaagcactgaaacagtgaggacaagcattctccaatcatcatgcaactggttatgatttatcactactagaaacataagaaaacttcatggaattaccttaaatgcaaggcattgaatttcatggaactaccgtaaacacaaagcatcaaatttcatataataattgattgtctattatacaaggatgcattttcctcatattatgcatgattttcttttgcaaacatttgtgtggtgagcacgcatgcttgtatgtaattagtgctttcctaaacggtttcaggcagtcgttcaaacctgtccaaacggtgaacggaggaacaccaagttatttagggccggcagtcccctaaatggttgacccgtctaaacggtcaaccatcggtctaaatggccaaaacggaacatgtcctgg

SEQ ID NO: 3192 - DNA, 461 bp, Zea Mays
tgccattgccttcaaaaacattttttcatatgcttcaagaaaacatatatgtctgctttactgctctcaattaatcaactagctaggaattttctttcatatttatgtagttttaccatctcctaaagtttgcttccatatactgacctccctagtgccttataactttggagttaattggtgcgagatgttcataacattcagtgcatgcaaccattatacttttactgtttggttactattgagatttatagaactttcctcttcaatacataatgttgcagatatcaatggaaatccttattgtagatttatctatgaaatgttgagttacctatcccaagcaaattggggtagaccagagtttaaaactcaatagaacccacaagtcatgattcgagcacatagatagttgtttttccatacacttctatttaaggctaaatctttggatatattcc

SEQ ID NO: 3193 - DNA, 350 bp, Zea Mays
ctttttctcaactaaaggctttaagagagggggggtccaaggttcaatccccctttgccctaggtgatccttacctaaaagcttgggtaacacttgggtccttggtatttctcaactcactcatgcttccaaggtcttaaacactccctctcttccaagttttaaccacatgtgataatgggtatatgtgcccttaggaagccaacacctaggtaacacctggggtgttacatggtatgttcggtctgtgctcatcggagtggttcttacgcagccggagctccaccgccgtcgcctcgtcgtgtccctgtgtctctgtcgttgccccgtgcctccagcgcttcccctca

SEQ ID NO: 3194 - DNA, 702 bp, Zea Mays
cataaagatcgtcgtcatcgtccacaggagagtgagctggggctggagttggtggtgggggacgagcctccagtacgtccatgcgtgtaacaagttcagcaactcgtcgatcaagctgctcataggatgtcgccgcagagtcctggtattttttaaaagctttagtcatcgcgcgcatcatctccttcaattccagctaagagacacactcatcatcgttaagcttaggccccttgtccttgtccatttgattctttggtcctgtcattgttagcacaaaacagagataaaaaggcaacaaacaatgtgaaccctacaactatctctcagggtggtggtggtggaatacaaattatgaagcatcttaccccgctcttacaaggttcttaccagcactgcaggtggcaaacggtgaccggtgtgactgtccaacgagcgtgggtgtgattgcaaaggagtacctgttctgctcgagagaaagctggagctctaggaaggctgactaaatatatatatgtggcacacaagtcagtaacagatagcaatgctgaataagtcttccaagtactggtcctagttgctggcctagaaaatgtaatagaacagttggaccaaggcacaagaaaggaggtacaagtatctaggtgcagcaagaaaacaggcttggggcaaaataatcacagaggtgcacagaacactggc

SEQ ID NO: 3195 - DNA, 276 bp, Zea Mays
agccaactaaacatatttattcagaacaacccaagcaatggcgaggagtcaatcacttgggacatgtttcgacgaaccatccttctcaagctttgcatagcgctcggtgggtcaaggcatctagcgcatgacagttacagggatatttgaatacgtcttgatgtcctttggagatatggtattccccaaacactgacaacaacccatacaaccaaaatattgggatcacaattttgcagcctgaaactcttgcttgtactgtagacctgaaagcaa

SEQ ID NO: 3196 - DNA, 495 bp, Zea Mays
gcgcaactggactgaaacactgtgattgtcgattctttgctgcccagtatgacctatatgtcttttccaagtgatcaagatgccaccacttgcccctgttgatggcaggtagacataatcagtgaactcagctccaagcatggagaggatagttcttgttgaaatgttctgcattttagtttcctggacacaaaccacatccacttgagatgagaccacaagctctctgactgagtcttgccgcactgaagagttcattcctctcacattccaggataaaattttgtttggattcatggatcactgtctacataacacaaccacaaagaacagggggaggaaactaggtttcatacaggccctgctggtggcgtgggccacccgaaaagagcggacaaggcctccacctggagctgagaaagtgggtgcttgaaaagctctgcataagccttgagggattcctgactgatgccttcatcttcagtaattatctgc

SEQ ID NO: 3197 - DNA, 355 bp, Zea Mays
atcacctttacccttatcacctctatatcttaccttgatgtttatcttatactggccctttaaaatctcctcttttcatctcaatctaagcgttgtacttcatctattttcccttggtcgtatccccttccttgtcgcttgcgagtttttaactccatcctttgttgtgctccggtcgggtattacctctacctttctcatctctcgatcttaccttggtaattacactaagtccgttctctgaaatctccaatctccaatctcaatgtgagagtggtgttttacttacctcacccttggctatatcctcttctttactacgtgtaagcttgggtgcaactccattctttgttgt

SEQ ID NO: 3198 - DNA, 437 bp, Zea Mays
gcaatttaaaggttcttataaaattaacaaatgtacagaaactcatgcagcagaataaggcaaaccgctgtggacatgattgaggatcatgttgcaaaagataattgacagcatgagcattcatgtggagattggaggcatgttttacttttacccacgcatgactgtgtttgctgacacctcatgttatagattactatttctgttactacaagcaatcagtggagagtgcagactagtgtaagtggctattccgcatgaatataaacctatggtcaatctgatccttggacatgacagtttaatacaaggactgaaaaactagttctaacatgtgtgtatcaatagttgggagtcttaaacactatcatgtggatgttacaacaataattgatatggaacacagggcaacttatatttatggtgagacacagaag

SEQ ID NO: 3199 - DNA, 758 bp, Zea Mays
gagaatgcgggctggtgggccactgtctcgataccttcaactaaattcagttaagattggatcgcaaaactccgaacagattccgcttataatcttgatcggctagccaaacaaatcctaacggactgcatggctggcatacggactcgccctcatcctctccgcgagcatcgcaacaaactcaacagaacgcgcgtctggcgggcgaaatcccctctccgcgtcgtgatccgttcattgaaatcacggatgctgtacacctgggaacccaagccaccttcctctgagcctccatcaagcagccgccgtcgagtgctaattcagcccagttcctgcctgatcgcgttttccccgcttagtctcgttgcggtgtgatcgcaacaaacaccggagatcacggagccgatctggttgcctgcttcaccctcgccctgggatataaaatcaatctccctgtgactccccttggccattagcaagttgaagcactgagagccatagccgtcggcgagccgagcgattccaggttgaagtgaaaaaaatactaaagccactgctctcggcgttcgccgccgttcggttgttgtggggcggtgaggccttggacagagaggttcagagcttattgctgttgtgcgtcgtgatcggttgagtcaacagcgactgcttgcccaatttgtcttacatcgttgccgatccatggctcgtggagggtagcttgactgacgcccagggtcgtggtaagatttctatctcga

SEQ ID NO: 3200 - DNA, 529 bp, Zea Mays
ggagtatgtcggcactacgtcatgaccaggcagagcgcgccgtggctagcggttgcttccgtgcctggttaatcggggagagcgtggtggagggattgccagcaatggcgctgccactgtccgttatcggccgccgtgaccggttggttaggaggaagaagacacggggaggtcgttgatcgtggaacgaacgaccaggatttgatctggtattctggttcgcccgtggtgtggttaaccgtagatcttcgatcgtggggccatgggtggtctgaagttctttaaatccggttcgtcggatcttgatctgatggcggtcctcgcgtaccgcttcagtgtcagagtgatttaatcctggcccttgaatctgatcaggtggctgagatcgactcgtaccccttcatcgtgcctagtttgcaaaagagaccatgtattaatagtttatcaacccgtagtcctgtatgtgggaatcctgagtctcatgaatttttgcgtaataacccctgtctctctctgttatttgcgccta

SEQ ID NO: 3201 - DNA, 409 bp, Zea Mays
tgtctgtcaggcgttctgaatcaggttttcaatggtacagtgttcggatcagatcagttcagttcatcccactgccggtgatcccgcgccaggatcctcgtcgccgttgcgattcgtgctcaatgaagtaccgattgttgctcgaggcagtaaatatcatcgtatggatgaacatgagccactgttcactccggccgtcgtgtccgcccagctcacggccgcttcggaaacatcctcgccggtgatagccacctcttgaccttgcgccatgtgccttggcatcttaccacatcgcattagcttgcgttatgcatatccggtgatcgtcggtgagcttgccaaggtaaacaccaccgattgcttgcgccggtgcacccccttctcttcggccaccatcgcgcgatctcaa

SEQ ID NO: 3202 - DNA, 488 bp, Zea Mays
gtacattgcttcaaatataggtaaaactacaagttcatcatggaaggcgtacattgcttcaaatataggcggtgttaacatacttacatcctgtttggtaatccctatcacatagtatcgtaatttcggaaatcgggggacaataagatttatgttcagtggagaatgctagaacgaactcactctcaatagtgaatcgttgggattccacgagagatatgagacacgaggtttatactggttcgagttcgtaccctactccagtgtagtgctaaatcgtagtattgctttgagcgtgttacaataaacgtgcttgtgtatctaagaaaaaagagagccagcctttatagctcaagggcaggacctcacagaggcgacttgttctctacacgtatgtggacgatctgttgccccggtctgacgtagcgctcctgatgcagtccgtagggtcatgcgtagccgtactcctggtatggcgtatcgtctcg

SEQ ID NO: 3203 - DNA, 820 bp, Zea Mays
tctgaatggaattgtatattcctagtagtcaggtcagctgtttcagttgaagttccgccagacaacaagcactcgagttcgcatcggaggctgaaagcatggtttgcgaattcctgcagcacaccttcaaaccgtttcccctctaaactggcaagatcattgcatagatcagccttacaagaatcgccaagctttcctgcctcgtatagtgtcacagcatgcgacttcaaacctgcaacaggtcagtggcaactgtactgtcagttagaaagttcagacacatctcgctggatatcagtgatatcgcgcgtagatttctgccaaacatctgtcaggcaattaaatggaagggaaatatatctaacctggagatagtgagcccatcattaagtatgaagttacattagcatcgacaatgaagcccacataagccatcccggagttcttgtgtccatcagaatcactgctaagcaactcatgaccagacttttctgaggcgacactcgtacgagagctttcaacttcatcgctgagaatgttgttggacagtgcaggagtgctcgaatccctaagaacagagtcggtatccagaagcttcacagcccatcctagtcggcaagcaaacgatgcagctgcctggagctggtaaaggtcggcttgtaaagttgtagccagttcagcaaccgtggcattttcacttgatacaacgaatacagcatacagtagcctgcggtgtaaaaaaatcgggcactggttttaacagctacataaaaatctagcagttggctacagttaagtagggaatgcagttcgttacagc

SEQ ID NO: 3204 - DNA, 554 bp, Zea Mays
cgcgcctttatcactgacccatggccccgcttggcaggttcatcccctttcctcggccgggctgttacaactacctcgcgtagggaccgggtgctgggttgaggtccaccttgacctggggataataccccctggacgccccgcgggtccacttgccctctccttgcgcagaaaccacatgccgacctatccactgtaccgccattgccatccgtgagggagaaggggaattgtcgcgatagaaatctgggttggccgtcgtctgcaatcctggtgtggacctgaaggcttctcgtggtcgattggaaggcggtcgcataagcttcgctcaaaattagtcactagcgccgcaggaattcctcatcgtggttgtgctccactgcggatccgcgccaccatgtggatagaagggtcctcaccccgaaccgaggtatgttgggtaccttactgttcgccctgctctatttttagtagatcacgattcaatttagaaattggcggtcggctgcgcggaattgaggtgctccggccatggccttgccgcggtttccgtc

SEQ ID NO: 3205 - DNA, 955 bp, Zea Mays
ttcgggaactcggggtgaaatctataaattctaggactaaattgtaatgtcttctgtgctggacaagaccgcgggttgattcaggcattaactaggggctcttatgcaaaatcgttacggcgaaagggtacaggcgaaactgagccacccgatcagaatttgagggccctgattagatctaggtttcgcatgaaccggtatgaagtagctaccaccagatcaggaatcaatggccagattttaatgaatcggtcatccaccgggaccgcacgatctaaatcgaatggctcctatcagtcctagacgaaggagtgtgcctgccagatctgaattgttttccccgagatcaacagctgacataaccccaccagttctccctcccacacgctgaacagcggcggcgccgccgccagcccccatggctgagccatggccggagtactcactccatgcatcaaggctctaaacccaaattcgaatagtgccgcaccatgctacgggaaagacaaactggttcgtgagcttattacctcagcagggggcgacagtgtcactacctgtgcggcggcacggctccacggcgaaccttcatgacggcgatggatttcgcccgccccacatggtttcccctactcgcctgcggctcccacaccctcggtaggcccgacggacacccgatttcccccaatccaagcctagatggtgctggcgacgagctattagcacaacggcactagctccatcctcgctatcccgctatctccctaatcatcgcagcactaattgctcccaggggttgggtttactaggcaagggcttggggatccatttttatggcctgagtaagggggaatcgccaggtttggcacccgatcccaacgcgattccgttgcgagttcgtctcagactctgtaatggttgagggagcgaaggagtcttcgcgtgctggacccac

SEQ ID NO: 3206 - DNA, 478 bp, Zea Mays
atttcctggagagaggcatttccagagtatgcgacgtcatataggaaacacgagaagtcgaaaaggacccttgaagagactattgatgaaagggtacaaaaggctattcatgacgtgatgaagaaaatgaagaaaacagaatgcatatcatgtgaactcaagccaggccacatgagtccacctctagtatctagcagcgtaggatctatgcaagacttcatatcgggcaccaagtaccctgtagacgatattgttgaggacaagccttgatttcttcatattccaatcaatcaatctaggacaaaaacaaaacaagctgctactggtttggtaaaaccaggatttgttaactacaaggataatcttgtcccgccacactatgctatggtccaagttctagagatcacagacagtggttgtgaagattgggagatagactttccagttgaggggatcataactttgcaggaggcaatga

SEQ ID NO: 3207 - DNA, 1129 bp, Zea Mays
cgaagatctgcatcaccgtcgtctcaagcttcctgcaggcttccctgatgaccttggcgtcttcctcatgcctttgaagttgcgcccagaaacgacaccagtaagttcctctgtaaagtacctgcatgtaagttttgatcggacttttattaaaaaccacatcattcctacttagccaaattgcccagcatatggctatagcccctactagaatctttagtatatccttgggggagaatccccgggcccaaagattaaaaagatcataaacgctataaggtgtccttaacccaaaggtaagactcaccgcccgccacatgaatttggcaaaatgacactcaaagaacagatgttgtatggattcattgcaattacagaaacacaatatttaggaccgttccaattacgcttagccaagttgtctctcgtgagagtgacaccccttctcaaataccacgcgaaaatcttaattttcaacggtattttcatcttccaaattgtctggtcctgccggccttgtccactgcaaatcattacagagtataacgattgcactgtgtactctccgttctgggtcagattccaacggaagtgatctttcgcaaggttgagggacacatcaagtaccaaggccactaatgagttccactgcctcaacgtatcaccttgtagacctctacgaaaagagacattaaggggagtagagccgagaacattggccactgtagcatgctttcgcctagtaatgtagtaaagggaaggaaatctgcgctctagtgaaaaatcccctagccacttatcttcctagaatctaacgtttatccctctattggtcacaaaccgccccatgtgagagaaaaggctcttttattttcataagacccgaccaaaaatgagagtctccaggtttcacctgcacctctccaatagtcttgttacgaaagtattttctctttaagatttgttgccacattccctcttcgttggctagcttgaacaaaccacttaactaacaaacacttattctgggaatcaatattcttaatcccgatcccccctacctcttttggttggcagaggacgctccactttgccaacctatattttttcttttcatcctctgattgcc

SEQ ID NO: 3208 - DNA, 656 bp, Zea Mays
tgcagacggagccactaggtgtcaacgcagtaaagttgtcatcaattcagatacatatgtttcgagattgtagatgtttgattgaggaggggaaattagtcaggttcgattcaggactgtagctgtttttttttaggaggggaaggacgtcgctgctggcagccatcgtggcgcgtgcctagtcatgcttgctaggcataaagtcgtagggatgcgaagatgaccccaccgccaccatcctcataagccatttaggacttctcggtcaggggtggatctaatactagggttgtcgggggtgcagccctgatcaaggcatcgatctagcatctgcccctgccaccgtctggagtctggaccgtggcattcaccatccatgccccgctcctattcgcgccccatagcacactagccccaatgcgacaacacgtgcccccgtggtcaacccatgtccgcaccacaataccgtagcaatgtcagcgccatagcttagggctcgacgagtagcattgcacacccacgcagccacacgagatgcggccatgggccagcgtgcatgactggcgtatctgcaaccactagtagtaggtgccccaacacaagacacaagctacaagtggcaccgtgagtgacttcacaacatcaattcatgagcg

SEQ ID NO: 3209 - DNA, 561 bp, Zea Mays
ttggtgaggaggagtgcgctgcctgcacgcctctccaccaaatttgagcctctcccttcagcagctgtgtgccaaagcgaacccgatcaccatacacaatctcgaagacattcatcttatcctccacgtaagttagccaatctgccgcctcgaccggagtaccactgccataaaaagatttcaacttcatgcccatccactacatcagagaaataccattgactggaagaggcacttcggccccgccacctggagcagcacccatagggacagcgctcccgggcactcctccaccaatagtaccctgagcagcacctgccggggcaacaggaatagcttgcctcagaatggccaactcctgctccatggcctgcatcacggctaacattgccgccggactcatcaagtccccactaggaacttgcggactaccctgagccctacgaggcggcatagctgcagccacagggatgagaataataagtaaataagattggcatagcatatcttcagataatgtcaaactagcacagacaataacataacatatcaatagtaaag

SEQ ID NO: 3210 - DNA, 577 bp, Zea Mays
gtggggtcaggtattgttgctggcccagagtagatgcccgaggcttaggcgagtcgtggtctggtcgcacatacaggtcttctatcacgtgaccaaggatagtcgtgtgggtactgtgcctttatacgacactaaggggtacccctgttctagggtaccgacagtggcccccgggcccacctcaggggaggatgcgagcctgcaggtggggccaaagcttgtaccttgcctcaatatggcctgagcggcgactggggcgccatcttagcacgcctgctgacgcgccgcactaattcagcgcatctgtcgtcgcacccgctgtcaatccgccttcagtcacgtcaactgccatatctgtccctacggctgactgacccacgacccccacgtctggcagtttcgtcgggccatgcgcggggcgcctcgttgccgccgccttggttaaaaaatatccttctgcagcggccccgaggcggcgcgcgatcgtgtgcggcggttcgctcttttgcactcaaagaccggcacaccagctgcatgacttgtggacccaggcccccgtgtccgagacggggctacc

SEQ ID NO: 3211 - DNA, 611 bp, Zea Mays
cgatgagtttagagatgcgatgcacaaataaactcatgcttcctgttcacctacaatggcattgaagtaaaaggggcagaattcacttggtttgcttggaaggagcaaaatggtcaatttcctgccaaaataacaccccactaacagcacatggacggaaatggtgctgagggaatctgttatttcatttgatggcaccaaagagaaattcaaaaaaattcaacggcatcgagagaagcgctataatgtccagggctgggccatggcatggctgttgtaagggacagtgcgtcggtgcgtgtggtgcatttgtttaaagagcaaggcacaattccagctttatcctttggctcccacaccaagcaaagcaaagaacctacgtgccttcacactgtagtgaaactgtgaaagcagcgagagcagaatttaaaggcaaagtaagaagtgacatcagaagctccctgcagatttgcatcaaactacaccatcgacagttagcaagttcctcatcctccacactagggcgtcttcgcaatatttctgctgtagcgctagcattgggtagtggacacgacatagctgctcccaaggtacctactaaaattcatcgt

SEQ ID NO: 3212 - DNA, 535 bp, Zea Mays
gaaatgcattgttttaagccaattttactgtagaaagggtacataaataatcttttaataagaatatagaattctatgcactttatatacaagtgatttaactgtaagataatatatctttgaggccattaggtaataatcttactggcggggcttctgcttgcagcagctctaatcttgagccaacacccaatcaaagccctactatgcactaggcagagtaggagcaaagcatggcttgcatgaacagatcaccaacaccaaatagattcatgggtcatgacaagtaataaggtagttttgtgtgaaagtggaacaacttatggtttgtaagtccataattagggttttagcggattgcatttgtcttcggatcccttgtcatctaagctaactttgtacgaactctcaaagttggtattactagcttcagttaagatctgttgcgtattactaagcattttatgcatgcaaaggtagttctgaaaaccagttgtttagtataaactctatatatacattagtttaaaataaa

SEQ ID NO: 3213 - DNA, 1071 bp, Zea Mays
ttcaagctgtagagtattggcttcgctctcagagtcagataaactcgtagaatccttgcttatggacttgtattcatcctactcccgtggtattccttttttatcttactccacaggattagtttatcatgcaatgtccctaaagtcctgtaattttcaaaaaaagttctgtaatttatatttatggttatatctttgttatcatcctacactcctggtaagtacccaaaattgttgccttgttggtacactatatttattgaataattcagtcatgcactactcttctgatttgatattactggatttagatgtaagcatgggttatcctgattgattaaagagagtacctattacaaatctactgtacttgtttctccacaccatgcagaagggtctagtttatgttgttttgttgcttacattttctgttgtttctgattgtttcgtcattttgtgcagactctttgttgcataccggagctgcttgggtccgtattggagagttacgcttccggttattgttgagctcatacagtccagatcctacatttaagtctagatacaagcattcacatattttggaaaaaattacacttgtgaagcttgaggaaaaggtaaaacatctcttgttaccttggtgcatgtcttgaaatctgtattccgaattgtcagtttcatatacttaatgagatgcaaggaagaacatttttttcttgaatacgcatgcaaacaagaacatagatttacagtggcttgcatcatcaattgagctatgttttttcgataaccagttgagctatgcggcatgtatcatcaaattgatattcatctttttaagaaagaaagccaactcttgcgaagaaaagggaaaagactgtcaaatttatagcagctgtgtttttacaggttcgtcatgattgtgaggaattagctggttctaactcccctgaagatagccatgacaacgagttattgcaattgctggaaattaaagagaaagacacccgtgcaaaggtcttattacaattttacatcatgcacttaccgtttcttcttgttcatttctgc

SEQ ID NO: 3214 - DNA, 567 bp, Zea Mays
ctcggggggagagaaatccgagtgccgctacttgctcgtgaagccgcttggccttggctggtagctcggaggaaactcaccggcgtgcgctggcatatggacatcagttcaggagacaggggtgaccggcgtcgcggatttcgaatctcgccaggatggagtcgctgggcgttggcgctgggtggctgtgcggcatggatgaaggtaaggggaccgttgcattctcctaggtgtcctctacgtgtagagcgtttgggatccaagtaatgcgtacggggtttgaatttggggtgtccggcgatgctccgccatggaggccaagcggcgccgtcggaagtccgcacacaggaggaagaacggtttctgaccatcagatccaaaccaacggtggagattagatcagaagatacctattcgttttggataaaaggtagtcgttagatcgtaatcctacggttcaaaatgaatcatgcctttatgtgatcttaggcgtcggatcgagatctgagggcagctgtagcttaccggttcgcaatctgatcatgaccgctgatcaagcgatccacg

SEQ ID NO: 3215 - DNA, 547 bp, Zea Mays
ataaacatcaccgtcgtcgtcgtccataggagagagcagtactgcaccaatagctgcggctggagttggtggtgggggacgagcctccagtacgtccatgcgtgtaacaagttcagcaactcgtcgatcaagctgctcataggttgtcgccgtagagtcctggtattctttaaaagcttcagtcatcgcgcgcatcatctccttcaattctagctgagagacacactcatcgtcgttaagcttaggtcccttctccttgtccatttggttctttggtcctgtcattgttagcacaaaacagagacaaaaaggcaacaaacaatgtgaaccctacaactatctctcatggtggtggtggtggtagaacacaagttatgaagcgtcttaccccactcttacaaggttcttaccagcactgcaggtggcaaacggtgaccagtgtgattgtccaacgagcgtgggtgtgattacaaaggagtacccattctgctcgagagaaagctagagctatgggaaggctgactaaatatatatatgtggcacacaa

SEQ ID NO: 3216 - DNA, 679 bp, Zea Mays
tggatactaaacgatcgatttaactaacggtgttatgttttttgattaacattgttgccaaacaggcaggctctgagcctcctgcgacgagattagagcccaactgcgcaagctagcgacaactcttgggctgtagtcgtaacccaccccgaacgccccgggccgctatatttcaccaaggaaggaaacgagcgaagcatccagaatgtagcccaactgagaggtattgttgggcctccactagtctggccatgttaggtagcagagaaaggtagtacgtacgtttttgccatcgccatcctcaccatcaatcaagtatgtgtgaagatgtttccctatcctaacaatgcatgaagcccaacttccgccttatctgatctgatgctacactgttctgaatttttactgccagttcatgggagcatggttgcagggtgaaccacttcttggcgctcaggaaaggagaagctgacatctggtcgatgacagaggattcgagttggctgattcctaggaggtttttgggctgggcaccacccagctgagtgtgtgcgtgtgtaacctctggatcaatgttgttcagggacgcgccattgctttttcttctcaaaccgcgttctcgtcatcccatggcacctcgttctcatcaatctatcaaacctcaccgtcagtctgcacc

SEQ ID NO: 3217 - DNA, 453 bp, Zea Mays
tgaaattatgcttatctaggcatgaggattaataataataattggaagaacagtcgttcaaattggtcattccaattaagaatgattttgcgtgtgaggtgaggtggtgacatgcccaagtagtcactgcttccctatgtttataagccgagtcaatacccattaggcgttcattaattttcacgtcgcgcatagtgtatggttgtactcgtgacaaggaggtgtaggtcttactcaattagaagtttggttggatgtgataagtagattggaagtgtgggtttgttaagcactgtgttgttggacgtgtatgtcgaagtacgttgtagtagtaattgcgttaacttgaataagagtctcaagtgcatgtcgtgctatggttgtatttgaggtagtaaattataagagttgcgcgatatgaggtttgaacgatgtagttaatatggattggat

SEQ ID NO: 3218 - DNA, 391 bp, Zea Mays
ctgagctctggaatttcaaatttctcccaaactggtctccgccaccgcgaagaacagctcaaccgtggccagctcaactcaggttagttcaagtctctccgttgcctgttctagtgtccctagaccctcctcaagctcttcgaccctttcaattgaactggaccatcacccatcaccgagaacacgttccttcgtccgcatggttctcggtcaccgtggccagagcaaaccatgtagccattgatgaaattaggttaggggaaacgttagttagggcatgaattcggtttcagccaaagtagagcgctagtctctgccccgtttggccggtccaggagctcgccggagctcggccgtgctcgacgccgtcgtggacctagcacggtgaagg

SEQ ID NO: 3219 - DNA, 455 bp, Zea Mays
tgggaggaggaagccactttaaaagggagaaccaccattcccctattggactagtcttttgaggcgattgagcctttccttgagttgggtgtgcttaacaaactgttgggctccgggcaaccctaatttgttgggcctcggctaacaccacatgggctgggagtatcatctggtatcagagctaggacccattttaagaaggtgagattgatagggacatcctccactattaccggtcggcaaagacgcaattggctcagttagcccaattgtagccggacagcgaccgtgtgagcctcagaattatcccacctcgcttaacttgggaggaggaagccactttaaaagggaaagtcactcttcccccattggactagtcttttagagcgattgggcatttccctgagttaggtgtacttaacgaactgttgggctccgggcaccctaatttgttg

SEQ ID NO: 3220 - DNA, 400 bp, Zea Mays
caaggcttagggtgtgtacttatgcaaaatgagaaagtcattgcatatgcatcgcgcttactgaagccgcacgagcaaaattatcccacacacgacttggaattggcagccatagtgcatgccctaaaaatatggaggcactacctaattgggaacaaatgtcacatcttcactgatcacaagagtctgaagtatattttcactcaaccagacctcaacctccgttagcgaagatggctggaattgatcaaagattatgaccttgagatccactaccaccccgggaaggccaacgtggtagtagacgccctcagccgaaaacctttcgggaagaaaggaaccaacttcttagaagattggaagaaagaatcagctcagctgaatgcatgtctgggagaca

SEQ ID NO: 3221 - DNA, 944 bp, Zea Mays
gtttagtgtgcaccatacttggtgcaccagaaagggcacctagagagcaatgaagataagtgataggccatacactcactagagatgtctaatgtaccaccggatatagaactcgatagggcacccaaagaggttacgaatgagtgtaagtggctgagtactcatcggacgtgtctggtgtgacaccgaataggaaactcgcataggtttgcaactgtgcacttcgagtagtacactcgtcggacgtgttcaaagtgagacaccaaacatgtaattgggcaccaggacactaatagctaattgtagaaactagtcattagtgctacaccggatgtccagtgcatgtagtacgtgtgcaccaagcatgtctgatacactcgttgagttgagtggaaggacaacgactagttcctttgtttagggctacatatatccctacatctcattgatttgagatgtcttgcctatttgttcaatcgaaggaaccatttggacaaaaagggagagcctttgcctactaaggtgattgagatttagtaattgtgagattagtgccccattagtgcattgaagaagaaagtgtgcatctatcattcttattagccttggttagatcaagtgagagtttgtccttattactattggtgattgacatcatctagatgacttggtgtcgatcgtgagtttggtgatcatcggtgcagattatgggtggtccaactcgaggtgtaaacggttgtgggtgattcaccatgtggaagtggtgaagaatcaactcatagagagcacttgtccttgcatggatcaatgggaagcgacaccgttgtgtgggtgctccaataaggactagtgggaagcgacacctcaacaaaacattgttctgtttctaacccttcttttattttgagcatttacatttgagcaattaagtttttgtatttaca

SEQ ID NO: 3222 - DNA, 479 bp, Zea Mays
ttcgtattcttccccatagcatttcctttaggctgagctgatttcccagatccttgcgaagcattagattgattttgcctaggatatgggcagtctttgataaaatgtcccgacttgccgcaattaaagcacccagttgaagaactaggcaaggcaggaaatcgagtgcctggggcacccggctgattgggggtattgttggggcggataatgataggctgtttgaagggaaatgaaggtggacgagaaaaagggcgattttggcttgaaggttggatcacaaaccgttgcttcttcgcctggccctgattaggcctctcaccaccgaatcccttgttcttcccagaagttgtgtatttagcttccacagataaggctgtgctgacagcctttccatacgtgagatctatgcatgtggccattttcctttgtagccgatcattcagtccccgcataaaatagttcttcttctttaaatc

SEQ ID NO: 3223 - DNA, 541 bp, Zea Mays
gtagtgatcctttttctgccgtttggtgttgaaggctatgcttgacacttcgatgatcatgtggatgaccccgcggaaaggctgctcggcgaagtcctcttgcttgggtgctggtggtggaggattttgacgatgcggtggaggagggaggacatggatgtattgatgttagtggtacatgtgatttggttggtgaaggattggttcgttgtggaactgttgttggtggtactgcttggggtgataagtatgcgtgacaactcgttggttgtcggctagctgatttttggccaacctgtctcttcctctggtgttggtgccacagtcctgttgtgtgggatactcctgttgatgaactgcgtcgctggtgggggtggattggtgatggtgttgacttgttgctggttgcggtttggcctgccagattcggactgcgccgacctgacccatgttctactggactgcggggtgtccttgggtttccgctgagactctatcttgcgctgatgcagctctttggacctggtgtactttttaaata

SEQ ID NO: 3224 - DNA, 566 bp, Zea Mays
gttttatccgaagccatctgccatgggaagagagtcactatcatgcacatgccatttttttaactagttactttattcattacatcaggccattacataatacagcacacagctaccataagctcattacacgcgagtgctatctagggtactcccgaactccttctctaaagtgtccccaaattccttgagaaggtcatcaaggctggctagggacatctcctcggtgtcaaatgagtttcttatcccgacagggggtagggctggaggggcttcctccttctgctcagtctgacatccttggcttttggtcttcctgcggattcttcttgcgggggcgagcttcttcagtttcttgtcataatccatcttcagagtgcggtaggcctcacgggtattggtttcctcgccttctactatttcaagctctcttgaatggacaccttttcccttgtaagttccctgactttttgctccaggctttccacccgggaggttaggtgagtgcagtggagggcaaggtcatcgtattggttatcgagggtgtggaggtatccagccatgta

SEQ ID NO: 3225 - DNA, 597 bp, Zea Mays
atctatgtcttaaatcattgacgagtattaaatgagattcctaaccgattcctactacgtacttatttgcaccgtcgttgatctaataactcatcatcaatgggtcaatttggttgaggggaggagtcgtcgtgtcatttttcccccacctcacagtcaagtactacgcggatgatcgccatggccctccgctctccctccctttcaccttttatatattcggcccgatcgaattcaatggcgacactgttctccgagctgcttgatcggcaacgacagatcgatgcgcacgtcgatggcgaatgaagaacgtacccttgcagggcaggacaggcggcctagctgcatcagctagcggcagtgtcgtattcaccgcaacaaagacccttaggtacggtcgtaccacagtccacaggccgctagctagctagctccgatccatatgatcctggattcctggtatgtactccatgacaaatgaaaagctagctgatacgtctaatcgaaattcgcactctcgatctcgctctctgtgctcggcgatgttctctgtcggtggaatggcggctgtggatagctgccacgattatatgcgat

SEQ ID NO: 3226 - DNA, 735 bp, Zea Mays
ggttgcggcgaagccgagggggcgcacaaccgcggggcgattgcacgctccttgtgcggcggttcgtcctcttgaccgttggttgcggcgaagatgaaggggcacacaaccgcggggcggttgcacgctccttgtgcggcggttcgccttcttgaccgttggttgcggcgaagatgaaagggcgcacaaccgcggggatgttgcacgctccttgtgtggtggtttgccttctttgcgcttcgggccagtttgtatgacatgtgaggcctggcccccgtgtcataggatgggaaccctggtgcgcatcgggggagaccttgcctgtgacgcttcggagcgcgagcggggaatctgcctttaaaaaggggttcatccctcgagtagcagccatgtcttgcttctctccaactcgtggtgccctttcgccttcaagctctctgtgcccctttgccttcaaggtttctgctttgtgccgccatagtttcccatggccttgtgacttcatcccgagcgtgcccagactgagtgagtgctcaaaatggtattcctcctgcttggatggaatgtgccggcgctcggcagagggatttgtgccgacgtcatccaccccgatgagcttgccgctagagagtttgtgccttttgtcctccctagcgggccggtgctaccggtcttgtcttttctctgctggaggtgcgcggccttgtgggagcggcgctcttccactggttcttg

SEQ ID NO: 3227 - DNA, 877 bp, Zea Mays
gcccaggtggtggaaggccacaggacaggatgggagaatttttgagactcaagcctcccacgttcgcgggtccagcaatcccctcgatgcagatgactgacttcgcacgatcaagaggaagttggaagccatcggatgccccgaaaatcagcgtgttcaactggcagctcatcagctttcaggaatggctttagcttggtgggacactttcagtgaggccgtcagagatgctacctgggcagaattcgaagcagccttccgtgagcaccacataccccaggggatagttcaactcaaggaggatgaattccgggagctaactcaaggtgggagaacagtcagtgagtatgtgcacaagttcacagagctggcccgctacgcgcctgaggatgtcagcaccgagtccggaaagatggcccattttttgagaggactaagacccgaacttaagaccatcctcgccagccaagacttccacaacttctctcacctctccaacaaagctatccaagtggaaagggcaaaagaggaagaaaaagggcacctcaagaggaaattccaagttctccgagctcaacagcaagaacgccaccagagagctcgaccctttgggcttccacccaagggaccaagcttcaataaaccatctagacccactccatcgcgctacagtcagcagagtcagagctcccttcaagcaccctccgttgcaagcaaccaaccgccagcaaacgcctgttggcactgcggagaccccagtcacttcaagaacaactgccctcagttgaaggcacccggaccgacctactccaactcggtgaatggccccaagattccctcggcacctacctccaaggcacctccttccaacagccag

SEQ ID NO: 3228 - DNA, 395 bp, Zea Mays
tcctcaccactactgtctacacacattaataccaagtaatcaacatacaccagataaccagacacacgaaccagccagtgccactagagcgggaagataaggtcattttccttaagttattacagtaaaaacatggttcccaattcccattctattgtcaaatagtgaagcatacatgcacaagccattaaattttataaaaaataccgtgatttattgctaaacttcaggccttgaaaagaccgctttacataaaatgctaaaattaaacaaaaggcatttgggattgtataataagaaagttggctgcaagagaagtttcggggaactcgtacaagtatagaacaatgtcaacaataaggaaaactgcaactgaaaattcagatcaacgtaat

SEQ ID NO: 3229 - DNA, 1004 bp, Zea Mays
ctgtcacggaagccaaattgttaatgccccaaagcctagcatacgcccgctgaatgttcagcagatgaaagtggcgtttggttagaaaattgactagaggtgtacaattattgggtgcatataggtcaagatgcttgctatattcctcttgtatctaaggacagtatgtaaggaaaatgcaattttaccactagcgcgtcgacgtcaaaatatatatatgttcgtgaggtttaattttatctatatattccactgattattagcaggtgattttttaattcagagggaaaaaagagacgtacacgcggaagctttttactctagtagttagagttagttgttagtactattgcagtgtagagtaatttttttaaaattgatcatagcgtggccatgtacaagattttttttgggtttactgttgtgacgcagcatgcatgcatgcacgcatttttcttccatgcaaaggcttcccacaaaacttctgttagacaggtcagtaggtcatcactcactcgatcagtttcggccaacacgtcgatttgctgcatatacacgtattggcgccacacgcgtggatggcattaatttgaggtataagctatataaatatatttttgttccattcatctgttccttgaaaaggcatcaatccgatggggtgcgtgtttaactcgagcgagattcatttggtggctgcttagcatcatggctgacaggtgaaacagtggagcaagctaacaataaaacctgcgtcagttgatgtgtatctggtcatcactgtttccgtcaactgaaatactactacgaatgagtatctagccactcattgacaaatgctgctaacgtgtactggcatgctcatgagatcacatcagcaatgttctggggtttggtcacttggagtctgccactgcaaataccttcattagtacgtattgtgcaacctgctgcaactttgattaatccataactgtcacacccggatttcgggggtccaaaac

SEQ ID NO: 3230 - DNA, 381 bp, Zea Mays
gcactcggctgagccgacaacgcacaaggacacgtgcaatgtggccagtgcgcgttcggccagttgggcaagccatcgaacatgtggcattgtttggttcggtcggtttcaagcgtccataggtgtaaaatccaagtgaattggggcatgatatttgtgtaagatttctccccatttgtatactttacatgtcatgtgcaacacttggctcaaattgagaccaggttcacaagataattgagtgtgaagatgggtttgtcttgctacccaaattagaaagaaatataatgacttgtcatgtcaaacagtgagggctcgagttcaaactttacgagggtgttcctaggacaattaggcacacatttcataattggagatttt

SEQ ID NO: 3231 - DNA, 464 bp, Zea Mays
ctagttgttggggtgaagttgggctcttgtttagctcttgcttaggttttaattactgttgatttttagaaaagcccaattcacccccctcttgggcatcgtgatcctttcatcctccattttagtttcttgaatgcagaagatggaacaatagttgtctttaattttccgtcgcactgcacgacatttaccctcatcattcaatcctctaatgttccaattaagaacattccattttctaaggttggcatccataaattatcgcttgacaaaataaagccatcggacgcatggatatcacatccaagtcacagtcaaaagatatagccccaacaccctacttcctcaaagcaatatcgacagagaagcactgtataatattcagcatcatcgaatcgaaacgcagccattaaacgataaccataatgtcatcgagatcacaaagtgttcatcatccaatatcc

SEQ ID NO: 3232 - DNA, 488 bp, Zea Mays
gcagaggacaccacggcggaaagggctgacgcgatggccgccggtgaatcactccggccgagctcgggagatggcgccacgtatgagtcaccctttccccggcgttatccatcctataccgtgcatgaatctagacggcaatcaacgacggcgagctgagctggcgttctgatccatccgaacacagtaccatggcacatcttcgtcagtcgcctgaaccgacccccttccatcgactagctctcatgattcttgtgaataaccgggcaaaattccttaataaggtttgttcttgattcaacagtcttcaatccttacacaggacatttgggtcaaaaccaaggggattcgaagatatggcgcatcaaacttgacctcacctcactggaaccttgttttaaccttaggttcagtttcagttttctggaactgttctgacatagcaacttggaataggtttttctctaatttttttgtcacaactcaaa

SEQ ID NO: 3233 - DNA, 1495 bp, Zea Mays
gaaaagttagcaaggaacgacattaataacttaccagtattaacagcccttagatcatctatctgcctttgaagagcaacaagatcccactgtgacaaagacgatatctgctcaggcacctaagctgcttgtgccttcagttggacaactacttgattcaagatgccctgcagagacaaaagttagaagatagaacaccgattgggaaaatgcaaggtaatgtgagttccataaacatgtacctagaagttcgctaagaaaactagaagacccaaagctagtacaaccaagacatctgtagaaagcaacaacacccacagaagccacaagggaagtagggacaaaagctgaaggttctaaatctcccagaccaagtgtgatacccattgggattctagcactggaaccactgacctccaaagtggttgggttggctagaccaggctcgataggcaggtcagaaactcgttgccacaaaattgtcaatccgaggaattatcgacccaacatgagccaccattgaagcagcagaaggggaaccaactgcgacaccctcggggctgaaacacccttgggggctggagaaccctcgggggctaaagtgtcctccagggccaggagtggattggcggcaaggcttactaacacagaacccctaggggactagcaggcttacttcaggcttacccctgggggctggaacaccctcggtcagcaaaccagcagaacgtgcttcatccgagcgagctatgtggacatcgataacttcaattttaggcaactcaaggagcagctcctcatgaatggactcttcaagtatgccatcgacaaccgacatagacagaccttggatgtccaccatccttgttggggcaacaagacttgaagtatcaatccaagccttggagcaccattcgcgctgaaccaaaggaagcacctcttcctcctcctcatcttcctccacctcctccactacatacctagtcgttttcaccacacttccaccttccacatcatcctccaaaccagcatccaccacatcatcaacaacgttcggcttagcatgggcagtcactagctgcgggaccgacaaacgttgaagtttcctcttgttcttaacccttgaggactcggcctaggcatctaactggcagaaccgcttgcattatggacccatgagattatcagccctcttcctgctagcactcgattgcttaggagctccacaccctgattcaagtcacgctgactcaggagattctctagccagcatgtcgagaacaacctcgatctcagagttagcggcaggcgaccgtatcatgatatgattctacttatcctcctcaggcagatcttgttatgcagcaactatggcctctatctcatccaaggaaaaccatactctatggcgagaattgctaccctcttcactgatgggagggttggacacaaactcagaaaaaggactctacaataatgaaatagcacagtcagc

SEQ ID NO: 3234 - DNA, 288 bp, Zea Mays
ctcactgtttcctcaactcagcgattgggtcttctctggccggtgtcacacctttggaccaacctctgtccgtccgggttgctaatgggaatatagtccagagtgtgtccgagttgtgccaagctgaatggtctatacaaactcttcagtttcaaaccaatttcaagctactgcccttaccatgttatgacgttgtcctgggcatgtcttggctggaacaatacaacccaatgtttgtggattggaaacataagtggttgaagttcaactatcaggagtcaacagtgc

SEQ ID NO: 3235 - DNA, 469 bp, Zea Mays
ggaaaaagaaaatcagagaagaagagaaagggattctaacctaattgggcctgcggcaccttattcggcccaccataccaatccctcgcgcgcggcccagtctccctgtgtctgcttgcgctcacccggtgccacttcctggtgggtcccgcaggtcagggcgggtcttcttctccccaaccgaagcgcgaccgcggcgctctgtatcagcccgcgtggaccgcgccgagctccgtatctgccggggttggttgtggagggaccgattctcgcgggaagtagaggcataagaccacctgccaccgcccgtcctctggcccagctaacccaacgacctccgtcgccacgaccggtgcgcgctcgccgtcaagctcggaatggcgtgggcaaaatccgaactaactctgacgggatccttggaagccgttgaagctatcttcgccctctctgcgcctataaaacgcggctg

SEQ ID NO: 3236 - DNA, 644 bp, Zea Mays
aattctttgcagccttgttgttatcaattattttcgatctttgtgaaggatctcgcatgcccttccatttttaccaacagttacaacatgttttgctttacaggtaactgaaggggaaaggttgaccctgactctttggttcactagagaccgtgcttatgatgaggatccaaaacttcttaactttctgtctcagacatcattgagctgtgaaccaactgagcaaaattcttatattcctgtaccagcttctgataacatgtatcgcttttcttgtgatcagtctggttttgacatacgatgtgctagagtgcatattctggggtttagttttcactcaagtagtggtgaatgcaatatatctgcgtcaccagctgaagatgacccaatagagttgcttggaaagcaactgcggctcgggaggggagatgatgtctttgagaaaatattttctaacagcttacatgctcttcaggtatgttcattctttgagtggccttaatttttgctgtcgactgaaagacgtcaacatcatatatcagtcgtcctttcatcatttgttaccaacacgttgcacgttcaggatgcacttatcttaatgttattctttaaaatgaggtgtaaagtactattttcaccttttg

SEQ ID NO: 3237 - DNA, 351 bp, Zea Mays
tgaatcgccacctgaatcagcgtaccactcagacaatggagttagcggggtgagcatcatggtattgaagttatgcgccaggtagtcctgatgccatgagctcccatgggtaggattctagggcaccactaggaaggcttggtagggtggtgattatacctgaagagctaacagagccggtggtggaggcgatgggccatactaaggaggcgatgggatgtaggtgctgccataggtgccaatgcgagggatgccattggagtcactatattgtggaatggtggtgaatactgggggaggtagtgtagggcgcctggactggtcatagggccatatctgcatggtgctagc

SEQ ID NO: 3238 - DNA, 713 bp, Zea Mays
tgatcgcattttcactagctctctgtggcaagaattgttcaagcgggcccgtacacaattgtgtatggggtcaacctaccatcctcagtcagacgaccagaccgagcgcgtcaatcagtgtttggagacctatttacgttgtttcgtccatgcctgtctgcacaagtggaacctgtggttgtctcttgcagaattctggtacaacacttcctttcactcggcacttcgtcgctctccatttgaagtcctctacggtcgacctccacgacattttggcctggctgcagaagactcagctactgatgtggatctggccacctggttgtccaaccgtgagttgatgaccaaggtcgtgcgtcaacatcttcaccgcgcccagtcccgtatgaagtccaaagcagacaaggcacgattagagagggagtttgctgtgggggagcgtgtatacctcaagctccagccatatattcaaacatccgttgcaccctgggccaaccacaagttgtctttcaaatattttgggcccttcacagtactgcagcgtgtgggttcagttgcatacaaattggagctaccagctgagtcttcagtccatactgtattccacgtctccctggtcaagaaggctgtctcgcccatacatcagatcagcagcaccttgcctgattcatcaactacaacacagattcctgtccaggtgctcgacaccagaa

SEQ ID NO: 3239 - DNA, 1032 bp, Zea Mays
cggccttcctgctgctccaaatacacggtctttcccttgacttgcctgaaggggcgaggaggatcctcatcatctcctccccctggcgccgacacattcttcgtgcgcgacatcctgacctgatgactgcaaatgagagagagagagagaggctaagcacatgttgataacagccgatagaatatcaaaagagtggatgtctacctggaaagctcacacgagatgtgaaaatccaggcaggacaggagacggctcacgggcaggcaaggtcactgaatgacagaagaggtgagcacgtattagtcacatagtcataagtatatgaaatgtgaataaatacatacacagagaattatggcacagaaaacgagagatatggtgatcgagaggtcaaacgacgcgaaaacggcgtttgaacgagaaatagtgccatggaggtttgaaattcgaattgaggcatgaaatgacgtggaattgaggcaatacttcacgaataggtttatatgggtaaatatgagtgaagtgggcgcttggtttgatttgaggcgaagaaaatggaatttgggcactcggctcgaaattgatcgctcgaaacggggaattgtgtgaaattgaagcctagtatatcggattggcgtgaaatttggcgaatatgttactggaggtattgtgaaggtgcctgaaaaatttgggttcaattggagcattttgactggtttgggcatttcaccgagcacgtggcatgtagtattctaggttttggaggaaatggtcaaataagcctgttaaaccctccctaaggagctatttacctgcaggggtatataatgtggcactagggactcattcaagcacagagattcacagaatttggaaggaatttgaacttgagcaaacaaggtgtggtgagaggcttgactgagctgtgaaacagagagaaaagagggaaaggatctcgagctgctcaccagaggggaagggaggccgagcaggagcaccaccactggagcacggccgccggcgaggaggagg

SEQ ID NO: 3240 - DNA, 607 bp, Zea Mays
tcagttctgacattgcctcaagatggtaatcttgatttctcttctcaatttccgaaagcttttgctctgtatttttgtagctctgaagtacagatgcgtaatcttctaatataatcttaccctcaccttcggattcttttggaactagctgtttctgggctacaagaccttctgaggtttcttcatatttctcaatttcacttgtagcgacacgtaaagatttggatggctcattttgcacatacagacttgttagtcctgaatcatcttccagagaagcatcgcctttggagtctcgcaatgaatccacgaagtcactgatttcttgcttaggagaatgtaatgtttcaatgaattcagtaagttcatgggtggcttcagtcatttgtttacaaatattctcggacccatttcgtatagacttccaaatttgttgtacttcttgcagcatttcttcaactatcctcaacctgtcagccaagttactagaatcaacagccaaagctacattgtcttgctccaaagcatgcaggcgctcatgaagtccatctatctcaatcttcattctattgatgtgagcattctgtgaagtagtagcaagttcaag

SEQ ID NO: 3241 - DNA, 401 bp, Zea Mays
tgcatgtgattagcgaccggccgggagagggagacaggcgtatgctggggtgtacgtggggccacgttgatgagcaagtgatgtgtttgtctcgggtcttaatgcctgacagcgacttaattaatccatgggcatgagctggtgtatctgtactgtacagccatccatccgttgcaggtttggggtgcgtgattgaactgtactgtactatacgctgacttcaccttgtcttcttgtacgtccgccagttgctcggcagcgtacagtgcatccggccgctatgattgggtcattgtttaacggagatgcggacgtgaatggacgaaattactttgatttttcgtactttaacgtggtagcatatggtagagccaaaagcaaacactgtgcatgatgccatt

SEQ ID NO: 3242 - DNA, 721 bp, Zea Mays
ggacccgagcgtctaattcaattgagcttgttgtcgaccccactctagctctctctctcgcccctatgccctcccgcacccacaccacgctgctgccactcatcatcctacctccgctgccctccgtccctgcttcgcttcggacctcccccacctgcacgggacgtgaccaacaatgcacaactaccgtccgaattgttgggtgtatgttagtacaccaaggatgaagacgacaatggaacatgcttcaaaaggcatcccaggagcggagggtgtgctacatgaaccaagagcaaagaggaaactgagcccaatagcagggcgaccggcctagactgggtgcactcgttccgtggcttgctccaacgtttgttggttccccaagctgcttggcatacaatctccatgaactttattgaagggctaccacggtcttaaagttttgactgcatattagtggtggtagacgtatttactaagtatgctcactttattccattgtcccatcctttttcagttgttaccattgctcagtccttctttcagcacgtttacaagttgcatgggcttttagttgctattgtgtctaagcgtgataagattttcacgagtattttttggaaggaactcttcaagctaaccggggtcagtctccacatgactagcgcttaccatcctcaaacagacgggcaaacaaagcgcattaatcaatgtctcgata

SEQ ID NO: 3243 - DNA, 577 bp, Zea Mays
cggatactatcaattcgaatttgattcgttttgaaatccgatacgtattcgagtccgagtatttagtatctgatccatatctgatttatatttgtatactcaaagttggatttttaaaatgtcgatatttattctaatcttatccgacataactcgataatatatatccgatccgaatctaaagagaaaaaaatataaaaataaatatgattcaaaaaatatccgtctgttttgttttcgatccgattacagcctaagaggaagtatcgatggatctcccacctaatagaaacatgacttcaaaaccaataggcactagcaaacttagagctgtaaacagatatacattgactacgaaagcgttggcgaacggatactgccgtttgatgtcgacatgcctccctttccagtgaaacctccaaatcgtgcgcaacctcgtgtcaggccccagccacttcgcgatacgcacctgcaagataaagatgcacatgtatacaactaggaacccgtaagttagtgcccttgttgtcgccacggaaaacagagccgcctgaaaggccagcatcatgcagacgag

SEQ ID NO: 3244 - DNA, 675 bp, Zea Mays
ttctcctccctgaatgaaaccttggactcctccttttatagcctcaaggagggatcccaggagcgccatagttttgtcgtgtatgcagaggaggcgagtccgagcacatgtagctagtatggccgacagtatggccttcgtacaggctattgactcaaaccaggaggaggacgtctggtccctgtatttgcctcttgaccgagcctatctgatggaggtgttgttcgagtcatagttgttgaaacagtgataagtatggtgaaatgcgcatggtaattctccccgtatggcgtaaagcagacttgacatcagtcctgtagccatcccattgttagcagccttcgtggaggagttggtggtgtcctttggtcgatgttatctaggccgaggccagctcgagcgagacggaggttcctcccaaggccttggtcaagcctgcctcagggcatataaccgtacatggaggggttagttcagttgttggagtagcctcctgcggcattcgcggggagttgttgccagggtagttggccgaagccgactcgggcgaggcggagtttcctcccaaggttgcggtcgactttggatgagcggagttccctcctgagggtgagaccattctcagacgcacgcacatccaatccgtagttgtttgagcacattagtctgcatggg

SEQ ID NO: 3245 - DNA, 389 bp, Zea Mays
cgggaacagcaacaacagcagcaggattacccgcagtttgggagctcggaggtacatgacctgtgccgcatgcggtgcccttgagacctgtacaagctactcctacatcacttcaaaggagtatggatactgaagttgtgtctatgaggtgggaattacgagttttaggtttctcacatcgaatccaagtcccggagggccccgcagaagggagagagaagcctgggagaggagttgctccggctctgtacatatgcttcactcgatcagctgcctctcatgtagcccaagcaaagagtctagagtcctgagatgacagtgctaataacttgttgttttattcttgttccttgttaagggctgttgtctagatagttgaagccaaggat

SEQ ID NO: 3246 - DNA, 706 bp, Zea Mays
gagggagagaggaggagtcgtataggacgtagagagggagagatggagagtcgtatagaacgtataggaggagtcgtataggatgtagagagagagatggagagtcgtatatttttatttttaaagtatactaatatgtgcagttttatataatataaatagatatgagctatagtaatagaagcgaagcacttcatagtgagtaagtagggtagcgcttgctcgctcgaggaggtgacgcaagtatgagtaaaactaggctcatacttagtcgaatgatattgcgcgacctaggcaaccgcttgatgtgcggcccacatgctgtgtgaagggaaggggtgccaactaggctcgcccgctactttccgtgtgtcctccttctcacacgtccgtattcaagaaataaatgctaaacgtatcaacagacaacaatcaagcatctagttctacgaaatgtgcatcggcaacactcaacacaccatcgtaattctatggaatgtgtgtggcgcgctattgacgatgactcgtatgtgtggcaatacactccctctcccttctctctcttctctctctctctccctccctccactctctttcctctctcttccctttccctctctcctctcctctctcttccctctccctcctctctcttccctctccctctctcctctcctctccctctctctcactctctgcagagacg

SEQ ID NO: 3247 - DNA, 787 bp, Zea Mays
gattgaccctttgatagtgatccccttttgccatttgttcttgaagtcagagctggaccctccgatgatcatgtgaatactcccctgaagggtgggtccgcgaagtcttctttctttggtggtggtgggtggtaggtgttgatttggatgctgtggcggtggaggtggaagagctaacctttcttggtgttgaaggcgttgttgctatggaaagaaattggggttttgttgctgggggtagtatgggtgttcgttttgatattgatgttggttgtactgttggggttgatatgtatgagcgatgactctttggttgtctgtcgaggcggccctagccaattggtcttttgttgctttggtctcgaggcgatctctggttgggtgtgctgaatcttcgccatggaaaagacaatagaatcttctcggttgctgagggcctctgcctctgcctctgcccatggtcgcgttgccatcgtggccttgttgcaggggatagtcttgacgacgaggggattctctcctggttgctgctggtttgtgatgttgtgcaactagagctgggcacgctcttgtcggttgggtcctgatgtggaggcctgatccatgtcctgctggattgtagagtctccttagtctttcgttgagacttgactttcctttggtggagctcttctcatcgggcatacttttcaaaaagttgatacaactcctgcaggttagttggtggatcccttatgcagtggttgtatacgacacctgctcgaaggccgctgattgcatagttgct

SEQ ID NO: 3248 - DNA, 364 bp, Zea Mays
cttggctctttgaagatgagcccccaatggctgaaggttgcagaaagattttcaagcaggagcttttgctagtactctatagggttgggagtaagtttgacactgtcgttccgcaatggctatctcttaatggcttgtgacccttttccatcctccttcgcctccctcttctgtactcactttaacctcttggttcttcaataaaatcatagaagacctttccctcctgtttctttttaaaaacaatcgtattagatggtctggtacttgaaagaattaagcaattcctatgacatgctagattagataaacttggctattattcaagtgtatttgatgcagtttactctactttagtcacttc

SEQ ID NO: 3249 - DNA, 457 bp, Zea Mays
tcgctgtgttggttacttggtggcgttgctttgcgccgtggcgtgatcccagttcccagatctgaaatccggtaaggcggtaagtccccactccccagatccgctctgtgttggatccttggcttctcgtgctcgatccactcctcggttgcgcgactccggtgctccctgctctggttttcctaatcctacattcctacctaaccctaaatccttaatactccctgctctggtgctcctcaatcctcatatgctctggtgttcctcatcctcggacctcggctggcgaccagtaggtgactccggtgctccgattgcgttaggtatgttctgttgattgctccttaataaatttgtgttctgttgattgatgttagtatgttgaggtcattctgattgtgtatgaactttgaatggaggttctcatatatatagggtgatggtaatggaagccctg

SEQ ID NO: 3250 - DNA, 1179 bp, Zea Mays
ccaaccctcgagctctggccacggtgaccgagagcagagcggcaagatcgccgtgttcccggcgaccagagagctcctagctcaattacatgggtcggcaagcatcatggagttacgagaaagctcaaacgagagggagagaaggatgagctgaccggaaaggggctggccgcggtgaagccggtttcacggtgtccgtcgattggtttgggggaaatcttaaattctagctcactggtggatgatggctaacaatcgttggtggctgagtgggtgatgatgttacgcagctaggggagggctcaatttataggcagagtgagcggtggccgcaaattttggacgagcaacgcggcggccggaggtgaggaaggatcctgggcgcggtgaatacgtgtccagaggtgtggcggttgttccggtgatcgacggggagttagagtaagtcgtggcggcgcggtggaaagtgagagccatgcggctcacggccgggaggcggcggtcaccggcgggcttatcggtttccaccacggtgaacacggtacggcggccggaatactttactgaccggggcttatccatggcggcgatatttacatgaccccgagcttatctgctgcccacgatgcacgaatcatggctatccgtcaacaatcccggcgaaaagtcaccagcgacgagcagggggggtgaacctgtgatctttttcagtttggaacttactgtaccatggcaagggtcatcaaacaacctgacagccacggtttagggccattgttctcaaaattttgcattacgacttggtcatctctctgcaccaaagttatagggctaaagttaatctttaactttgccacaaagcttactatcaaatagtcactaaattcccttcgaaatcgagctcaaagttcatcccatctcactgctcctggaaattcagttcagggagggactgacagcccgactttgagcttaattatctctcaaatactcttaacaaccatgcttaccaccttaagcaaagttgttcttctttgatagatcttcaaatttggtgtggtgacctagggcaaaaaccctataatttgaaagttacaaagccccaaagttgagccaaattctctgattttcagacttagaatagaactcaaatgaggttcattttgcatttaagtccaa

SEQ ID NO: 3251 - DNA, 674 bp, Zea Mays
cgagtgcagcgtcgcatagtagagataaaggcgaatcacgcggatggagactcaccggtagaggtgttgcgcagaggtcgggccgcggtggggagcttcacagcgcacactcccggctcagtgagtaattctcgccgcactagggccacacatgagccaatcctacctccgcagggatccatgtgcccgtctgaatgcccgggactgggttgcaggagtaaggcggcgatgattttgcggttcgacggcagcggcggcggaactcacaactctctctccctcgatttgatggtggcggcagaaagaagaggaggctagggttcggtgtcatgccttatggccaccaaggaggtcggtttggggcgccagctgcgacggagtcaaccccggaatcacgcccccactccggtcttcgcggcaaggttggttggattcagtggagaaggaagcgctgacacagatggcccacgggtcggtgactgagtcgcgagggaggtacgcctggacagtggtccaccggcagcgaggccacgccaaaactctggggacaccgactgacgcacgggcccgcctgaaagtggtttgaggagtgcgcggcgagagcaagcctaggtgcgcggcaggcgaagggagactgggccgctgtggctagcttttggccaaccggagtcttt

SEQ ID NO: 3252 - DNA, 1567 bp, Zea Mays
atgctactggtcctcgccacattgtcaacgacggtgacgtacgcagcggggctgaaccctccaggtgggttctggcccggcagcggcgctcgccatctcgccggtgacccggctctcagagaccactaccccagtcgcttcaaggccttcatggcgtgcaacgacacagcttttgccgggtcccttgtcatcctcgtcatgctcctcagcgacacggcaacgggtcgcgctgtcaggtcgaatgcgcttcgcctgtgtgttcttgtcagcctgtttggcctcatggctgcctatgctgcagggagctgcagggaagtccatacctctatatatgtcttcgccctcgtcgctgctgtcctactgtatctcgtcatccagtgggtcgcacccatcctacccaggccacagcttgtcagcgagcgcatagaatggatcaaaggagaaaaggataaactgactctgaagctgaaatcgttcctgagcagcacaaccaaggagcaggagcagccattagctttgggtcaacagcatccatcgtccaatcatgtcttagcaagcactgatcagaatgatgtgagaaagctgcgcacgtaccttctactacttgggatcctagcagccaccgttacataccaagcagggttgaacccccccggcgggttttggctagacaatgaggacgggcatcgtgctggcaaccccatcctggaggccaccagtccgaggcggtacagcacgttcttctactgcaattccaccgcattcgtgtcatctgtggtcatcatcgccctgctccagagcagcttggtcgctgccggtgccatgaaacggtacgcgctgcagacagccatggttttcgatctcttcggtatgatgggggcatacgctgctggcagcagccggaccttctccacgtctttgtacgtgatgatcttggtcttccttgtcttctcttacgtcatggtccacgtcctgctcttagtgtgcacacgacgacgaggctctggcgatgatgatggaccagcagcttttcaggaagtagacggcgacgaccctgaactgaaacatctggagaagcggcgcaagtttctggtgttgcttgctgttctggcagcgtcgagcacgtatcaggctggcataaacccaccgggtggcttctggcccgacgacagcgatgggcaccgagcaggctatccgatgctcaacgatgagttcccacgccgctacgtggtcttcttctacctaaactccaccgctttcatgtcgtccttggccgtgatcatgctgctcgttagcaaaaggctatgccaaagtgggaccaacggctacttgctgcgtggatgcatgctactggatctgctcagtctcatgggcgccttcgcggcaggaagctgcaggagagtatccacctcagtgtacgccatcctggctgttgctgttgtttttgcctacgtcatggctcaacttctggtgctgacctttgcaaaagagaaggttggctacttcttcgagtgggtgctccgtgccactcctttcaagagtccgcatccatccaaggacggcaagc

SEQ ID NO: 3253 - DNA, 495 bp, Zea Mays
gaaagggtaagcggatgatttaatcctaaccgttttccgccgatccaatggacaagaaaccacccccaatccacagcccccaggacggcggcattcttacgcccgcggtggcgctcaccaaacacggcggagctacactggcgaaaatgtcaaggcgcccaagcctgcgatccccaaatcgagtaggtgctacgcaaagccgagttaatccaaggatagggacgggtaccataccagtggttagaccacacagaagcctgcctctaatggcgtggcagctcggctgagagcaccgaatttgggcgacaaattccggtcacgcgcacgacaccacgccccgccgcgccctcggaagtgttctaccggtgacgccgaattctttttaccactcgccgaggtcccacagtgacgtggcacgactctcaacaatggcgcatggcggcggtcttcctcccgaccaaatccgaggcggacctcggtgacactcacacaacg

SEQ ID NO: 3254 - DNA, 682 bp, Zea Mays
ggctaacaggttagaaggccggctgcaaaatatggtttcccccaatcaaaccgcttttattaagaaacggtttattcttgacaactttatgctagtcaagcagacgaccagattcttacattgtcagaagcaggctcgtatccttctcaagcttgacatttcaaaggcttttgactcggtatcgtgggccttccttctcgaggtcttgaaaaaacttggttttggacaaatctggtgtgatataataagcgggctgttagctacctcttctaccaagattttactaaatggtctgccaggggaatgtattgggcatcaacgcgggctgaggcagggtgatcctctatcgcctatgttgtttattcttgtaatggatgtcttgaatctgctcgtgcagcgagcttctgaggaagggtttattcaacctctctcttcaaggaatacgcagcaccgtatctcgctgtacgcggatgacgcagtgttatttctaagtcctactgccccggacatcagtatggttatggatattcttcatttatttggttcaacttcaggtctaagaactaatatccagaagagcagtgtgttcccaatctgctgtggggaagaagatgtgaattgtttacaagacttgctaccatgtaatatttcagattttccatgtaagtacctcggtttgcct

SEQ ID NO: 3255 - DNA, 436 bp, Zea Mays
agtaaacgggcgccacagtgagcttcacaagcgtgcagagccacggaaacaacacttgaattggataggaacttaccagagtgggctggccacgggtgagcggttctcggtggcgcggcaatcggatttgggggaaaatggcgtcgcggcgtgctcgggtggaattgaggatggagcttggggctacacggccgcaagaggttctagttttactgtgcacaatcaatttgagaggagggggcaagacaacgcgaatttggcttcgattcaacccacggtgtgtgtgatggtcgtgcctcgccgggaatcacagggctatttatagccgcggcggtccggcgatcacctcacggccacggatagcatcacgagcgcatgccgaccacgtcggtaggagacacagtgagggagatcacgacatgagtgccaccgcggc

SEQ ID NO: 3256 - DNA, 353 bp, Zea Mays
ggggggcgaaaaacaaaacaaaaacccaaacggagacgacgaagaagtggcctgcaacacaatcccccgacctaacgttcaccttcctatttatttcggagctccgcttctctctcctcccgtgcatccgccgcgggcctcctccagtcctcttcctcaccccgacgactccgcctcaaatccaatcccactcccacctagcggtccggctggcctcgcctcctcctcctcgcttctctcagcctcaggacgacgcctgcctaggcttccaccgctgatctgaccccgaaacctcgttcccttgtccgcttcctgccgtctcagtcgtcgatacttgtcccccaaaaccccgg

SEQ ID NO: 3257 - DNA, 500 bp, Zea Mays
agacacttttttgagtgtctttataaaaaaaacatagttcctcgttgacgtggttgcctgcatccaccaccacgcctctgtgctcgccttcaacctcaagtccctactggtgacgtgagcacccccgaccccgtatcgtcttggtgcctctgttgttctaatgctcgcgcttaggttttgcaccaatttctgcttcttgcttgctgcacagatcatgtttgtaccagcgtacctgatttgatatacttatacatgatcctatagtaatggcagatcacagttcataagagtgctatagcacactgcaacttctatgctaagatagcttcaccatttcatatctaaattactacatgaactgaacaatatgttatgccacttcaaggagtagagcagtcacctgaaaaattgctcataactaattgtaagtttgcaacaaccattaacatcagaaatagtagacttcacaacactttcatgtattcctatagaaagaatgt

SEQ ID NO: 3258 - DNA, 388 bp, Zea Mays
ttcaagagcatatagccttcagggtatggccacttgtggagagctaggatatgccgaaggagacaaccgccgattctagtgagggtggtctggtccgattgaagtatacctttagatttagggagaagtttgatgagccagacgatgactggctgaagtgtattgaagctaacagtgatgagctactcggggcatactccatggccgaagataatgctttgtccgcagctttcgggggtcggggcaagaaaagattgaacagggtatttgatgcgattggcttcgtataccctgattaccactacccgctatgagggcaagggaaaaagagaaagactacctcttcggccaccccagctgagctgaagtgcaaaaaggtgaaggttct

SEQ ID NO: 3259 - DNA, 629 bp, Zea Mays
gtgagcgtgggcccacgtgccagagagagggggagagcgaacgacgctagggggcggtggttcaccgtggggaaagaactggccgctggtgggttcgacggcggttttcccattggtggtccagttcccagtgatttggtaggtgggctagcacgagcaggggtgggtggtcatagtggtggggtcgatttggccgatggcagcttaggacgaccgatctacggtgatgtggcgggcttccacggtggcgaggtcgccggcgaggccactgggcgcgataggggaaaaagaatggtgcgctgtgtttgtggtgaagtggtgaagtttgtgaaccacttcaatttgactctaagatactggagagggaaggaagagctcacaggagcgaaggaaggcgatggcaccgagctcgattgaatccaggggagggggagggagagtggccgagggcggtgcgaggagaagtggagctcggggtggcccttttataggcgctcgaggagggaaatggtcaaagccagttggtgctggtggggtgcatagcgacgacgctaatggcgcacaacgcccgggacgagacagctcggggcaggatgtcgtgtgagggtgcgagcacagtgaacaggggg

SEQ ID NO: 3260 - DNA, 512 bp, Zea Mays
cccttgaccacccttgtttctcaatgatccatgagcggtcattttattttgcacatccttggtgatctcgttgttcccttgtaacatccctcggtaatgaactttaacttcaaccattctgttgcaaccttacatatcttacccttgattgttttctccatttcgccatttaatgagtcttgccttaactccatcctttgcccacttttgtttgctattacctttacctttctcatccctcgatcttaccttggtgattacgttatgtctgttgtctaaaatctccaacttcatattccaatttgagagcggtgttttacttaccccacccttggctatatcctcttctttatcgcgtgtaagcttggacgtgactccattctttgttgtactcataccgctggctctttaatgctttcatcttttctctcatacccttgtctgttatcgcctttgacccttggaatattgatgtcttctacctaaacgcttaccttgaacttatcctttaa

SEQ ID NO: 3261 - DNA, 573 bp, Zea Mays
atcgcgtatctttaaccaaccagtaaatgtgtcgtgtggccaactctagatgatgtgcgaggagacacaagcgattatcctggttcgggctactcaaagctctacttctagcagagaggatgaggcttatattactcacaccgtggtgcctgtagtaggggtttacaagcacagcgggagagggaagtccccaagtccctagagatgattgaggcaagcgccaatatctaagacagagtgggggagcgtgtgttcgtctacgtgcgtcgatgagtggatgctgatgtcttcgatcttctccctcctccatggagggaccgctgccctatttatacaccaaggggagtgtccttagtgaagtcgggtcttgtattcgaagaagagatgcctggcgtctgatgtgatggtgaactgtgcagtagattcatgcctgctgacttctcgtagagagccgaggccgagatcgaggggttgtccatacgcccgaacccccaagggagaggccgcccatgccgtagtggctgtaacaacgccagggtatgggtcaaaggctgcttacggggtgtgtcatcg

SEQ ID NO: 3262 - DNA, 796 bp, Zea Mays
ggccgagatgtgcccattagattccaaagtgatacttttgtcacaaggactcttgtcggttgcatttttttgttgttatgctaagatgatgaccatttatttagtgattaccatgctcttgtttcgagtcgagatgacacttgttaaagagatagatatggataagaatgaggttaccctctactagggggtgaagagggaggtggtggaggagactttccttttctaggaggtgatggatataggtggtggaggagagtcgtctcttttggtgtagaatagggatgtggatctctaggaggagacaatgacctatgaggtgagtatttgtcatcattctcatcatccgaagatggtagtgagctttatgaagagtatttactaggtaataatagtccccttgttttgaataataagtgacctatcttacttagtaggttaattcagtaccttgttgtacttcttatcccatatcctatgaacgttgaccatagtgtacccatatggagttgggcaaccatgaatggtctcaccttcggtaggctaggcctcatcatctgccaccttgttacttgtagaacactagtggatgtaaagcttgataagcatgtattcagttaagttttccactagatatatagcatttgtcttttctttgtcaagcgatgtggatctgcatctactataatccttgagcactaggatcatgcctatcagagaaggatcgacttgtgtcgatccctgcttttgtagaactcgcttaatctcatgtcaaaatgatcacatctaagatgac

SEQ ID NO: 3263 - DNA, 357 bp, Zea Mays
gccgacctatgccttaatcgccggtacgtgcactttcctgtaagattcgccatcggcttcgctaagcgtagattcggctcacaccagcggcagcagaggagaacaacaaagctggggcaatgacccgcctgcgtcgtcgggtggatggcgcttcgctggggcagacaccgcgcgagatgaggggaagaatggctggagcacgtgagaggtggaagatgatgcgatcaccgtccgatttaggttgagtggatgggattagatctggggaagcaatcaccgtagaccgttgatcgggtatccaacgcctggggtttgatctcgcgtaaattgaatccaagccattggtcacgaatccat

SEQ ID NO: 3264 - DNA, 1330 bp, Zea Mays
tgggcgcgcggcgctgttgctgagagctgctggtgtggtttgtttgcttgtttcggattgggtcggtggattggattttggattcggctgttgggctgcaatgctcgcttattttgaatatttcccttggagcttcgtgctggaattagtgtacgagtgcgctgtggctgcgagatgtgtgattttgcatcgatgtacgtgtatgctgttcccgtggatttgagggtgccagtggggtcagagcttgtgctgctgaaaggaatgatacgccttggttctgattgggcttaggtttcggggaggactgaatcatttgtgtgtgacaggagattcattttatggcaaagaggaggctttgtttgttttgttatgctgaacctattatcttgtggcattctgtttcatgaacttttgtgatagacaattgtttgttatgcatagggcactgctgctgctgcagaaagtatttgcatttcacgctggaatagtgtaccattgcaatatgcccttgccaatatatttctttttagttatgctcatggaaatgccctcgttggatttactgggattaaattctgttttgttcactgcatagtcacataatatatacaatggaataaaaatgatgtgacacctgtaattttatgtacaagcttgcaacttaatatatatccgattttgtttttgaagtgattcttgaacttgatcactttcattgtaaaccattcttattctttcgatggtcagtttagtcactgcaaatagcttgatccatggaggccttgtgttttttactcatttactattaaagagagttattaattcagggccgtgtctgagactttaggggctctgggcagaaccatatataaaaacacattttgatagaccgaacgacaaaacacaatgagttagctattgcctatggtatatgtgtacatgcgaaggtcgattgtcgatggcgtgtcctggcgtttttgtagttctgtctggactctccagtcctttggagacgtggtggcggcaacacgacgggaattatgttttctagatgtattctgttctgagtactgacttgaaaactggcttacttgagcaggccaacagctgcttctggcttatgttagtgagcaagataacaaaggctggattgcccgcttagcataggatggttgagtcaaccaaacaaacactgtttggacaaattaaataattaagtactatacttaagtatatacttgaggggggcaatattttcggggccctgggcggccactcggctcgaccccccacaggtacggccctgtcttaattctgttaacttagtgct

SEQ ID NO: 3265 - DNA, 286 bp, Zea Mays
gcgcgctgtacagggtggacggcgggttgttttcaagtaaaccgaggggctcatgtgcaaaaaggcctgggcgaaggggtacagggggatatcagccgcaggatccagaatcgagggctatgattagatctggcgcccaacgaaccggtatgcgctattggccgtgggatcaaaatccgatggcccagattctatgaaccctgatataaccacaaccgcatgatctgagatctatggctcccgcttgatctattctgtgccgtccgatttccatctaacggccaac

SEQ ID NO: 3266 - DNA, 664 bp, Zea Mays
gcttaccctagtttagtttaggtttttcatcctataactccagataattgccatacaaaaaaaattccgctgtcctataaccctgtttagccttgcaatttcgtttcagattgctttgttgaatttgtgtccgtgtcgagtcttgttgctggtttaggtcgtgtcgtaatcgtagttcaaccgctccatcgatgttatttgtttccgccgctatcccatccaccttaccctgattacaagtcgagacaccacattactcgatttgccctcgctagctgccttgtgtgaattctcgccacgctagccctagattaggttgcaagccgcattacgcttacctattgcttataccaggaaggtttgtgcccctatgctctatagccgccgctacggttcctaccaatttgtgccctggaaaaccataacttgagttaccttccataaaacaggcataacttttcgctcagtgctccgtttgagctcaattttttacagcagattcctgactccattctggggtgacccaaactggcctaaggcctgtttggtttggtcaaaaaaattcaaaaaaatcgggaagataattaaaaaaattgtttaagtgttttcaggaattttagagatcctttgtgattttctctaggccacaatacaactctgtttc

SEQ ID NO: 3267 - DNA, 826 bp, Zea Mays
ttggcgcgctcgacgacgccgttggattgcgggtggtatacagaggcgaagacaggcttggtgccgatggagaaacagaaatccctaaagtcttggctgtcaaactgtttgccgttgtcgactgtgagttcggacgggactccgaatcggtagacaatgttttgccagaagaacttttgggcagtcttcaacgttattgtggatactgctctggcctcgatccacttggtgaagtactcgacggcaacgaaggtgaatttgaggttcccttgagccgtaggcagtggtccgacaatatccagcccccagcgttgaagtggccatgtgtgggcgattagcttggtgaattgcgaagggttgctcgagcgaggggaaaacttttagcatgcttcgcaagacctcacgactcgattcgcagtacagattattgcgggccagtaaaatccttgacggatcaccttggcagcgagggccctgggtcctgagtgggagccacaagttccgctgtggacttcgcgaaggatttgaatgccttcggtttcggtcacgcactttagcatgggctgactgatccccttcttgtacagctggcccccgactagtgcaaagtcctggcttcggtgcttgaggcgtttggcctcattgatatcacttgggtggtaatgtccttgcagatacaaagttattggggcctaccaatcttcagtcatgatgaggttgacaatgtgatggccttcgacgtcattagttatttgtaagccttctgggttgcggacaactggtgtgccgatgacgtggtagaatacgtcggagggcaaggcctcgc

SEQ ID NO: 3268 - DNA, 394 bp, Zea Mays
gcgcatgtatgggcatgggtgcaccgtgcatgtccaggccacctggagctcgctcgcgcgtattgctccactccaccgcatcaccaccaccaagtggcatgcatatcgagcagagggaaaccacatccaacttgtactcgatcgccactgtcgacatttccctatcgtccgtctgaaccgatcaacaggtgatgagatcgatcgtgatcgtcatctggtaccgttcgtgcaccatcgcgtcgagacgagagcaacgcactcgatttgtactccactactagttcttccggccggcctacgggttctctctcaaacgtggcgagtgccttgcacatggtggtggtccggtgaccagctgaccgacgcctatgggcgcgcgcgcgcgcgaatcagc

SEQ ID NO: 3269 - DNA, 364 bp, Zea Mays
gatcatgaacaaactgagtattcttgaaatcttgtttattgatgacgtatttcccattttacagagtacattgtcgtcccagtagcttttgaaatacagctagggataaaatttcttgaggtgttctatattccaggagttcccaatttctgtgccgtccatctgagtgagacggtatgatcccggccgagtgacttctgctactatgaatggtccttcccataggggtgacaacttgtgccgtccctcccccgttagaattcggcggaggacgaggtctcccactgcaaaggatcgtcgtcgcacggccttgtcgtgatagcgtctcagagtctgctggtatcgtgccgattgaattaccgtg

SEQ ID NO: 3270 - DNA, 445 bp, Zea Mays
gaagggtcacaccactgttgcgatgtaccaaagtcattgaccactattgcagagcaaacacagatgcttgaatatgtggcttgagaatctccggtgcggggtgatttggtgtagggccatcggaccaggaactcccagtatttgtgtctctggtgttcccatcccgacgatgtcgatgaactcttctagatcttcttcctcatcttcatcggacgagtctgtctctcctgaggagacgtccccatcagatgcctagtgctccatgtccttgtcataatcatctagaatcaccacttctagtaccatcggtgttgcaagcaattcgggttgagcctcctgctgaaactcaacatcgatgttccactagggtagatcatcaagttgctcgacctccatgggctcctcctcattctcaaattccgtgtattcaatctcctcatcaaag

SEQ ID NO: 3271 - DNA, 539 bp, Zea Mays
attattactgaacataatcttagcgaaagtggtaaacaatttatcgtatcagggatgacacctttttagcaccccgaatgatggcttaagaaggaggtttctagcagtgggtcctgaataaatggcgacgcagaggaacaacaaactaggctagaaaaagcgacccactatatcaaaagagatctagttttgctggggtaatgcctccagacatctttgtcggaccatttagcacatgagcattccaaccttgacctggcttactctaggacacaccaaactttattaaacataagagtaaagtgtattgtcggtccttgaacatggcacgttgtgtcacttaggcccttaactcagaaaaccagaaaaacatgttctcgaactttgtcggtccatttaaaaccatccaaaaccggtttcgcaaaattggatgtcgacatggcatgccacctcggaaccatttgggatctcgaacttggtatgttgtgtcacatgggtccctgaacttagatgttgtgtcactaggcccctgaactttc

SEQ ID NO: 3272 - DNA, 514 bp, Zea Mays
gcgggcaaatgttgaacgcgggggatgcactaaactcgaggaattgctcatcggtggtgatactctgtcttagatgtatggtgcaacgtgggcagcactgcccacatcactgtcttcggtaagaaaccctcaattgagtccaccttaatcccttcttcatgtagcaccatctggaacaaaggttggagatcagaactgtatgtgggtcacgcgctggcgcttaagcacggcatgtgcgccaccgcggctcaggctggggaaaagggatgacgtgagggtcgttgatcatggagtggacgttccagattagaagagagagtaacatttcatgcaaggaatctaatctgtttgatcgtgatcggatggccccagggcagtcacgattgcttaaaatatgggacgtggatcgcgaatcctacgacccagattgaataccggttcacataatatgtcgatctaatccaagcccttaaatgtcgatccaacggttgaaacctattcgtaccccttcggc

SEQ ID NO: 3273 - DNA, 744 bp, Zea Mays
gaaaaataatacttcgcatcagcatgatgcgactcatgaatagtgtaaggcattggattcgccgctattcgatgttgctctcctttattatccaagaactttaaacactgatgtaaagttgaggggactacatggtacttatgtatcgaaggtctacccaagagggctgaatatgatgtatttgaatcaatgacgaagaaccgtgccttgaagctaaatgaggacatttgcaccttcacagtgatggagccgagggcagaagtcccttgattgttgaatccacaaatcaccacttcagtggggtcaaggtcatccaaagtgtatccagcccgggttaggctacggaccggcaagatatttactgcagagccagggtcaataagtacacgccgcagatgcgatgaagcaatgtttccttctatgtatagcgggcgattgtgatcatcgtattctagtactttatcctcttcagaaaatgtaagttggttggctcctatcgagttacataacaagttgtgctttgccatgtctatttcataaacttctggtttttgcaatgcctcaataagcgcttggcgaagttcaggaaccaataagagggcatcatacacacttaacagtgctggcatacgcttgaggtgtgcaaccacattataatcaaccttgagtgcagcatctccatcattcattggtgccttccttgtatcaacttgcggtaagttttcctttaggcaaacatctttt

SEQ ID NO: 3274 - DNA, 436 bp, Zea Mays
gtgggccccataacctgttctgtctatacgcctcctacatgtgggccccataggccgtacacacccttcaaattcagccccgtgcaaaaaacgtacgttggtgtggcaccagagttggaggagttagagtaagcaatagatgatccacaacaacgcttataagccacgttctgtctctctcagtggccgatatggtactaatcaaataaattccataccatcgcatatgtcctagcgttcgtgcggcccagcgcctctcatcttcaatgtgcggcccaatatccattgccagcgcctctcctcggcccagtatccattgccagcccagcgttcacttcgtgcgtcggcctccccgtgcgtgcgcaaccatccccacactccccgtgcacaaccgccccacctccgtgcgcaaccatccccacactccctgtgcgtt

SEQ ID NO: 3275 - DNA, 331 bp, Zea Mays
actgagattagaacccgtgtaacgcttaggtcaggaaatcagatccgttcagatctgatcggatggatcaggagactctagtgtaaataaaatccacgccgtggattccagatcctggggccgggattacgtaccgattcgccggatgtatgatctaatctgtaccgcctgtttctaatccagcggctagaataccaccgtaccccttcggcctcggatttttattaaagagcccctggagtttgaaataattaacccgcagtccatcgctactattcactgtgccttggaaatccttaccccgaggcccctaagttttctgtaaatagtg

SEQ ID NO: 3276 - DNA, 373 bp, Zea Mays
gggaatgcggggatatgagaccgccggtcatgggcgtcgccgcggctcggggagcatcgccgtgggtggccatcgacggagaagatgcgcatgtggccgttgatctactgccgaacggttctgattagattggagataccccttcgctcagttaaatcgtacccatcgatgaccgatcgggcgatccacgatgtgttggccaccataagatccgagccatccgcattccattctagggctcctgcgcgataccgattcgtgttaaccctgatctaatcctcggcatcgaaaatagatctgatgaccagtagttcaccgtacctcttcggccacaagttttgtaaaagaacccctctgttattatgtaatcaac

SEQ ID NO: 3277 - DNA, 610 bp, Zea Mays
atttcgatccatgaggcataggtgttggggactgacattgtcaggtggttctaaacacttagtgacaaaacgcagagcacgagagggcaacaagacggttggtgagaactgtatcttatcgttatatgtgtctcatcgggctacaggacacgcgtgtttataggatcgtctcggggtaggtggtccaaagtacgatactacctccgactatcaacttatccaagtaatgttccatataacggggtacttacagcgtcattcgtacaacagacgacacactctagatcacacacccgcgcgttccgctgacaggtgggcctccgagcgcgtcccctgaaggacagtgtcgagcagtacgaagcataacttgttggtgtcctcaagagtcttcgtgctaacttttcctcaatcaacggctggacgggagtgtagcgaaggagtcacctcaagagcatagcgaagtcctaagctgccccttcgatcggctgggccgatggaggttgagcgagggctccgcaacgcggggtaacaaggacttcgcaccccgggtgcagcaaaagtcatggtcatccaaccgtcgtccggtgcggcccgtcaatgttgggcccgc

SEQ ID NO: 3278 - DNA, 420 bp, Zea Mays
cggtcatctatgggttagttcatgcccttctgtgtgatgttctagcctccctcatgtcttttgttgctcacaaacccgtttgattgaactagaccgccttgaattgcctagaacaccacgaattgtctccggtattcgtcgccaccgtggacagacgaactccgggccgatttagtgcaattagttgagggattagtgtcaccgagagtggaattaggtgttggccaaactagggctctggttgttgagtgccttggccggtacaggttcgccggaaggcgtgctcaccggcaatcaccatcagggacccgagtttgcgaagataagaaagaagaaggggctcggtgcacttgtcagtgagacacggaatagtaactagggactcttcaacagatattcgaacagctgaggtcctctgcg

SEQ ID NO: 3279 - DNA, 1292 bp, Zea Mays
aaagtttctaagtcatttgttgtaaaaaaatatttgagtcttgatttttttttcagctctaaaaagtaacacaattcaacatttccttatttttctcattcataaggctagaatagttctatgctaattttaatctgtaggtttattttaccttcattgaggaggaatctccaaatcagagagtatccatatgattgatgacaccttttagatgttataaacgttgatttggtttttttaaggaaacaacaaaaactcgtttatatgggagagtagcctgtagttgtatcaactgaggtttaaccgagtggggcaagtcatccgtccattctccctaaaccctgtactcggcacattaagaatgtgttttttttcctttacctttggtgagtagactaaaaaaatcaactgccagtcgaaacagtatggaacatttgtcatggaaatggccatagtttgaggttctgccaactacatttcaagaaggtttcttgtgaatctttcggaatttgattgtgtgatccttgagttcttgaatcttcaggatgtctataataattcttgaaaaagagatttccttgataatcataattgctgatggggaaaagggtcaaccataattgctgccctgaagataatataatttaatcctagcttcgttagaccttaataacaggcacactgtacactgcccctttgtcgatttgtggtttcagaatagccatggagttaagtgtttattcagctgtttactgtggttcctattaatatttctatcaatcggcgagactccatatttctaggcaatttgttacaatttacaaggggccacagtcgaactgattgtacatgctaccctacaatgtatttctcgtcctactctggccctgtttggcattggaaaaacagcttacctgagaaactggtgaagaacagagtttagattgagaagcagttgaaatggtaagctgatgtagccttgtttgatacagattctgtttaaacttgtgaaaagctctaaaataagccgtgccaaaacatcgcctctgatttatactcatgagataggcctttgccggcgttcatttgcattgtcttcagcacatggaatgacgttcttttggcacctccagcagttaaatgattacttctcaaatgatttttttcacgttatccagaactaatgtagtctttagggcagttccaatgggtagtttccatagcattaatcagtgtgtcaatatgctgatgtggcattggaactgaggagagagaaatgtttcttattcaaa

SEQ ID NO: 3280 - DNA, 416 bp, Zea Mays
tcttttgggggtcattgctggacccttttgcctttttggtacttcaacttttgctgaaggacttaaaatttcagatgtccttgtttctttagccttcggttcttctattttctccatctccggcattatgaccggctcttcaatattcggcaggggagtcggctccttggcttcggtggccgaagaggtttcactaacaaactcgggcactgtggccggttcaatatagtgtggctggtgtgtaagaaccttcatcttttttctcttcggcgatggctcattaagagcggctgaagcagcttccttcacagaagccgtatctttccttttttgaccccgtgttgggtagcggtagtcaggatagacgaacccaatggcatcaaatactcgattgagccttttcttcttccggcctc

SEQ ID NO: 3281 - DNA, 509 bp, Zea Mays
ggtggggaaattccgcttgcaactcatcttcttgctccgaggtagcttcatcttctgtgtgatgactacactgcaccttgcacattttgatcaccttgtttcttgtggcttgggtcagggtgttgatgatcttgataggatactccatttaggtcaaatcaccatgcacactgagttcttccatgggtagttgttcctctagatctttgagacagttctttaactgtgagacgtgaaacacactttgcacattagataagtgatcaagtagctctagctagtaggccacttgcccaactcgctttacgatccaataaagagaggcgacaacctttgactttgaatctccgcatacccctgattggtgacacttttaggtatacgtgatcaccctcctcatactccaactgtctcctccgggtatcagcatagcacttctgtctagactgtgttgttctcagattttttataatcatctgcacttgtctttcaatttcctgaacaatttc

SEQ ID NO: 3282 - DNA, 616 bp, Zea Mays
gatagggggaggatagaggcgcgaatgaggaatgagggaggaaggaggaatgagggaggaaggaagattcaaataacattggtcgttgtatttgagtgagtaagagagaggaaggttattcaagaatctgaactgttggtctcagggagaggaggggagatcgaggtaggggaggacagaggcgccattgagggatgagggtggaaggaagatctaaataacattgactgttgtatttgaatgagtaagagagagaaaggttatccagggatctaaatcgttggtttgagtgttatgtgtgggtgcaatttgtttggtgaatttagtggaggttgagtgtgggactgatttggttgagtgtgttttgcaaactttaaactgaatggttatatagggatataaatacattgttcattgatgtaggtaggggtgtaatcggatcgaatacggactgatatcattgaaaccatatttgttttcatatttttgtttggattcgaatacagatagcttcgggtatgcatacaaatacggatacttttggatgcaaatacagatagtcgtgtatcgaatacggaagtagttagacacggttagcatcggtaacagatttctt

SEQ ID NO: 3283 - DNA, 848 bp, Zea Mays
acgtcatcgacgattttggaatctagtctgacgaatcgaaattcgagcatttaatccttgagctcgacagcatccgcaagccggtcatggtccgcgatgaggcactcgacgatgatatgtagtaagccattggggagggcagtatgggggagtcagggtggacgaggacggcaaggtaaagcatagagaggaagagcacatgtgtcacgacggtgggcgggacgacggcctagagcacaaagcgatgcagcacgaagaagtcttcaaggcgacgtcgaaaccgacttcaactacatctttcgcggttgcgctttgtcaacgaccaccgagtggcgaggaggatcatccgacggtctatgttgtgcgggcggttgatccaaccgtgggtaggctagttgttaagttaggctcaagccaccgcataaagaaatcaaacatgggtaccccggtaacactgtaaaaaatttgggtaaaaggcaatagcatactctactggtttacatagaaagagtcacatttcagacagaaatacattatttggtgaagcaagctatgtaaataagaggaagtgctgacatcccatccttggcacgacagatgctaggacctaaaccggcaaccatatgaccctcaccacgactagggttttagtattgagctattttcggcccatctataggatcttttagcctggtctctcgtctcttctgccaatatgtagctaccaaaaagtttggtctatgcctcctttcttttgcccgacgtccagcaccagcggttgtgccccaaatctccagcaccagcggttgtgccccaaatctccagcaccagcggctgccctagaagtg

SEQ ID NO: 3284 - DNA, 322 bp, Zea Mays
gtgggcagcaaatttctgttctatcgtcatctcccaatcaagatatccctcagcatcataatgacccgaaaaagatggtatagaaaatttaaccttagcataagggtcgtcaggagcatgattgttattaccttgctggcggtgtggcataccttctgtgttttgatgaagacgacgacagaggcgcaaatctctggtggccgcttcatcataattaccttcttcatcaatcaccgcatcatcgggaagacatggacgaggaggtggtggcagtgcttgttgttgcgtctccaacacagcaagtctgtcgacgatctgggac

SEQ ID NO: 3285 - DNA, 588 bp, Zea Mays
tggatattcagaagcatgccagtgctcgcccaagacgcccttcccgagccaatcagcttgatcctcctactgacgagcagaaaaagaaaaagagacgtctccggcgagtatctagtttggatcgggatgttggtccttcggttcctgctgctgaagaagttcacgtgcctgagcttactgtcgctgaccccaatgggtgtgatccgtctgttgctgatcccaatgggtgtgctccttctgctgctgaccccaatgggtgtgttgtctgtgttgccgatgaaaacgacggggaggaagaagatgaggtccctttgactcggaagaacagtcagcaatatgccgccagtggtgaaagtagtggagttccttctcctgctttgtctgccctcatcagtctacaagaattgtccctggcaaactttgatcagactcttgaagatatggttccagaggatctgttatcggagccagcggatgatggtgcgatggcggtttgtactgatgtgcttgacgctgggttggggtcatcccgcgcctcatcgaccttagagcgcggtcttgagggtcaggagactaacttggatcgtc

SEQ ID NO: 3286 - DNA, 333 bp, Zea Mays
gcagaggagccttcgccgcgcgcggagggttctgcggggctccaggtggtagtactgggtataggcggcgaagggcggtggtgaaacggagagtgagtgaattgttgcgaagtggtaggcgtcattgtagtgagatggagagtggtcgtcttcgcgtggacgggaccggtaaacgagaattgttgtcgtcgccgactggggcgagtgtaggtgaaggggagctgcgaaatctttttgagggtgaggaattgaggataatgttgttcaactacagggagatgggtatcattccgaaggttgagccaatgtaatatatgatgcccttgctgtgtg

SEQ ID NO: 3287 - DNA, 618 bp, Zea Mays
tcgctattcctgagtttttgcagcacgtattcttcatcatctgttttaaacaaattcttctcgagacagcctttttttgattgcctacaggaccttttgaaacggtcttgaatactgttggctgatgtggacatattatgctcatgagcagaaaagataagctgcaaatcttttcctggcgtaactcattttctgaacaagtaaatagaagacagtagcaagtagggacgcatagatatctgaaaacagtagctgcatagagttgggcatgggatctgaaccctagctaaactatgctacagagacgcaacgcctgccttgccctgcccttgctccaaggatcccaactgttaggcaagcaaagcaagtaggtaacggataccctgcaagtcctccagcccgcaagacagaattctcagcccgcaagaaacaccctccctcctcacatacacatgcgcaatagaaaacccggtccggcaacaggcagcaagacgcgaatcatctcgcacgtagccggaagcttccccgctgcccgttgctgtcccctgctcctaatgcagtccagctcctcgccgcgaggcctgaaagagccctcctgcaagcgttaaccactcccgc

SEQ ID NO: 3288 - DNA, 364 bp, Zea Mays
gggccatccccgtcagtatctccttcccctcgctcgacgcggacagcccttcttcctcgcaaggatcggatcgcgctgaccggctcggccgtgatcccaggaacgcgcctacttgcttggactctacggattggtccgcgtctctgcatagctgatctcccggttgtcatcgcgttcctcaacggtctacccaaccgcgcggttcgcgcggaggtcctcccgggcggagctgaccaaacccgttccctatcgcctcggcccttatatgggaagaattgacgtcaccacctccttcccttgccctctcgtttagcactagccgcgcagtcgtgccctccatagccgcctcggagaagacttcggc

SEQ ID NO: 3289 - DNA, 590 bp, Zea Mays
ggctaacatgagtatggagtagaacttctactgaaaggaatgaatttgtctgccgacaaaccaagacgaacacttctagggtcccatgcaaattctggatcaaaaccgtccagtgactgaaatgcctcgccatctgatggatgcaccatgatatttgaatcttgtcttgacgatccccttcgttatgccatctcatttgcttcgttgtctcctgatttagaaacaagcgtttaagccgcggagtaataggcatgtactagagctgcatgacccggacttttgtagtgaccacagtgccttcctcatccaccaccactgcataacttcacttcttacagtgcatgcaatgcgtgtcattttcgtgatccctccaaaacaacatgcaattattttcgcacgcgtcaaacttctcatagttcatgccgagatggtagacaatctttttagactgatacaagttctctggcatcttatggttcggcaggaagacatcaataataagcttcacgatatcattgtagcagttatttgagacgttgtacttggacttcatcgccataagtcatgatacgacctgaagtacgatcacg

SEQ ID NO: 3290 - DNA, 597 bp, Zea Mays
gtttgtgcgacactttggtattataagcaagcccttgactgacttgttacgaaaagatacagtgtttgcgtggacttcagttacacaacaatcattggacactctgaaatccgcactggcacaagctcctgtgttgggtattccagattttaccaaagtttttactatcgaaactgatgctagcagcattggcattggggcagtgctgcaacagcaagggcatccacttgcgtacattagcaaagcactgggaccaaagaatttggggctgtccatatacgaaaaggaatgtttggcaattctttttgcggtggatcactggcgtccatatcttcagcatggggaatttttgataaaaacagaccaacagagtttaattcatcttgatgatcaaagagtgtctactgcctggcagcagaaggctcttacaaagctattgggcttgcaatacaaaatcatatacaaaaaagggattgacaacaaggtggctgatgcgttgtcaaggcgcccggggttggaacgagatgcacctcagctacaactgaatcagatagctgtttccacggtggttcctagttggctagtgcaagtggtgca

SEQ ID NO: 3291 - DNA, 504 bp, Zea Mays
gcccgatgctggtcagctctatctccccgccgagccaatgacctgtggggcccctatgccagaaccatcccctctgctgcgaggatatcacaatggattcgatgtgtcgccggcgggaatctcggcccgtcacaaccaccacacacaccggacgcagctcgggcatataaatccgtgcgctctgcctctcttgcgaactccgttgtgagaggaaaccatcaactggcaggggaaccgggagaccatcgccgaggaggaagaaaggattgccgccgcgaccacgcattgctcttgccgtcaacctacccatcctatgtgtgggacgaattcgtcgtggggcagagaatcaggcgcgaggatcaattgggtgcatggtccccgggactgcggcgaattgtacgacgttgtgctcgcgccgtcgtggtgcctctgcatgtcgcgtgcggacgctccgaccaaccaaaacaccggtaaggaatccactgacgcgttcgcctcctcctc

SEQ ID NO: 3292 - DNA, 629 bp, Zea Mays
gctgctctaggtccaacttgccgagtccattggtcgtgtagttggtaaggtgcttatcccccactccttggattcctcggtgtttcccttactcttatcactctttcttttgatagctttggaagtcgagctggaggagctacgttgccgctttggtcatgctctggattttgtcggtgctcgtggatcctctctggtagagcacttggacaatgtcccatgccgcgaccggggcgttattggtttcggtgtctggcaggacatatctgtagtgctgcttgttgcggagctcccaatcgtctgcagcctacaggaggtcgtgggccctcccttggccctaccagacgagggtctaaaggagatgctagagtgttatgacaaggtggcaagtcgcatcgtacgtatgttgttgtggatgacattgttcgtagcactcactgaccgaatgttgtaacgtgccctggcatgacttctcgaaatagtgaaaaaggatgacccactctttttgttcttatgggtgatattgttcgtggtgctctctggaccctaatctttcgagcctctactcatgcgtgagttagcccatgaagctcgcccgcgttctcggtggggactatgacatgtgtctc

SEQ ID NO: 3293 - DNA, 588 bp, Zea Mays
gcattgtagatcttctctccaacaacctcgccgatttccctggcgacaatgacgtctgcacgaccgtatcccttgcgcccgagccgacctgcgggggagcataaaacctcgtcgtgtgctccctcctccacctggcgtgaaccctagatcgagcaccttgtgacttccgccgccatcatcgtcacaccgtagggagagagagaccttctatgaaccacgtgttgtgccgagagggagagagggttgctggacccgtggagctctggcgcagactactggacttcatcagccgaacctcggtgcgcatcggtgaccaacatcgtcaactaccgcatctaggggagctctccatcgccgcgaagccttcgaccaccgtggaccgacctattcgtcttgtcaattgccggtgagaacatctcctccagttccgccatggtctagtagtgcgatagcacgggttcaattagtgaatgggagcgagaattgcagaaccgggcaacgctggcgatggcaccgccgcttggcaaccctgtgcaccgccgtggtccgatcagagttgggggaaaggtttatggccgttggattgtg

SEQ ID NO: 3294 - DNA, 743 bp, Zea Mays
cccgagtcaaagtgtcaatgatcttgataggatagtctatgtaaatcagatcaccctgaacactgagttcttccattggtagatgttcctcggggacacggagacacttcttaagttaagacacgtggaatacatcgtgtacatcagatagatgatcaggtagctcaagctggtaggccatctccccaactcgcctaaagattctgaagggtccaataaagcgagaggataacttacctttaactttgaatcttctcattccatgaattggtgacaccctaaggtacacgtgatcaccctcttcaaattctagtggtcttcttcgattatcaggatagctctttttgccgagtctgtgctaccctcaaattctcccggattatacggacttgttcttctgcctcttgaataacctcaggcccaaagaactgcctttcaccagtctgatcccaatataaaggagtcatgcactttctaccatataaagtttcaaatggtgacatctgcagactggcctggtaactattgttatatgagaactcagcatatggtagactcttgtcccaactgcctccatgcttaagggtacaagctctcaatatatcctccattacttggttagtcctctcagtttggccattagtttgaggatgataggccgagctgaagttcaacttcgttcccatgttctcatgaaggctcttccaaaaccttgaggtgaattgggatccacgatcagaaac

SEQ ID NO: 3295 - DNA, 615 bp, Zea Mays
agcgactccaaaggtgtaaccctttgtgctatcaaggctataacttctccaacttttgcctcttcgactcccataggagggagttcttcaatctcatctgccacattagctttgggtgcagtctaaaattattcaaaacaagaaattaatataataaattcataaccagtataccgaagatcgaaaaagcctatttactagaatttcctcagaggcttaaggagttgattcaacctacaccttcggaactttgctctaccttattgttaccttcttcttcctcttcttcgaatcctgaaccatcatgggatagtcaggatagaagaagtcgatagcatcgaagacacaattcaatcggcgcgtctttcgagccccaaaagcccgtaaagcttcggctttaggcttgctatagttaccaagtatctcgttaaatctcgcttcaaaataatctagccactcagcgctaggttctccaaactcatcttcaaatctatacttgtaacgaagcctaactagcccaggctcggcgtccgaagcatcttcttcagacatattcgacatttcccactcaactgcttgtggtcatgtcttaaaagctaaaaattcctgaacaag

SEQ ID NO: 3296 - DNA, 629 bp, Zea Mays
cttacattgacgacatggtgatccaaaccatgaacctggaaaacttcatcaactttctccaataggtcttcaatagcctgaagcgctaccattggaaacttaacctagagaaatgtgtgttcagggtaccagccaacaagctactcgaattcatcattagtcaccaggtaattaacgccaacccagagaagatcgaagccattatgaggatggagcaaccacaatcacaaaagaaggtccagaagcttacaggctgcatggcggcacttagtcatttcatctcacggctcggtgagagaggcatgccattctacaaattgctcaagaaggtcaacagattctagtggacctcgaggctcaggaagcattaaaggcacttaaaaattcttgaccgccccaccggttctcaggccacccaaccgagctacccccgaccgaccagctgaagatttactgctatacatttcatgcatgactcgtgtggtaagcaccacgttagtagtcgagcgggtagaagaagggcatgcatatccaatcgagcatcccatatacttcatcagtgaagtcctcgggccctctaaaatcagatacctttatgtccagaagttggtgtatgtagtgctcctcac

SEQ ID NO: 3297 - DNA, 806 bp, Zea Mays
gggccatccagactttgtccatctccggcgtcccttgattgtagaaaaagctctcacagcgggacagccaaccaacaggatcttccttgccgttgagggtgggaaagggaaggttatggtagtgtgggttgtgagggtgctgctacaggttggggggtatgcgctatggtgggggtcgggaaagcctgggatttttacgtggagtgtgggaagggtatctgatggatgggtatggttatggttgatatgggcggcagcaaggcagaggttgatgatggaagggtggtggaggtagatgggagtggagcgatggtggtggcattggtggtgatggtatggatggcgcggtgtgggttggaagggcagatatgctaccatagcctggcattccataggggaaagaagtagtgctaggggtggtgggcgctgggggcggcggtggtgttggcgacctactggacatgcggtcgatggcagcggtgagggcggcaaactggtgcagcaccatctcctggaaagccatgaaatcagcctaggagacaacatcggatgttgctgcgacagattgcggcaaatgtgttgacagcggagatggtgggtggagttgatcccggtggcgacttcttcggaacctggcatcaccgataccagattgttgggattagggttacgaatgtcgtacgagtggtaggtttgggatctagggccaggacctggacgcttgggagccgtccagatgctggtggagaaggcgcggtactgttcacgcgatgaacagtaacgggatgggagaagcacgggcaaga

SEQ ID NO: 3298 - DNA, 561 bp, Zea Mays
gatcgtcatggtacagtagctcgaatggatcaggacgccagcgcagccaccttaccgccggcgaccgattgccgccgtgattcgtgcgaccgccggtccactttgtgctctggatagttggatatcgtcgcggggttaaaaatcttcgccgccggtgagctggacaccactccggctagccgtagttcatctcctctggctcaccgcccgcgggtaaagttggtcaccgtcgtcgtgccgtccccgtcgtccaccgcgtgtcctaaccgcgccatcgtgtcgccgtgactccctaccactgtcctgtcaacgccggtgagcttgccacggcgttagccacgaattcaccgcgccgccttcttccccatctccgactgccagcgttactcgaccaaattggccaccaccgcttgagggctctataaattgacctcgcccgtagctgcgccatgtcgtcgtgaagctgtagcacccgctcccaccctcgatcgtccactagcacgcacgaatttccaattccccccaaatcaagtttccgccaccgcaaggaactgctcaccg

SEQ ID NO: 3299 - DNA, 774 bp, Zea Mays
tcgttcaaacgtcgttctcgcgtcgtttgaccccttgttctccaaatcactcagtttttgtgtcttcactctctgtgtatgtatttattcacatttcatatacttatgactatgtgactaatacgtgctcacctcttctgtcattacagtgatctcacatgttcatgtacccatcacctgtcctgcctggatcttatctctctctcgtgagatttctaggtagcgatcacttcatttatgatcttatcagctgctatctactcctgcttagcttttcactcactcttgcagctctcaggttaggatggtgcggacgaagaatgtctcagcgctagggggaggagacgacgaggaccctcctcgccccttcaggtaggtcaaagggaagactgtgtaccttgagcagcaggaaggccggaagaagcgatctatggatagagccgctcgtgcagcacttgcagtggcgacagtagcagagcaggcagagcgaggaggacaattgtagatctcctctgatcagattgcctatagagtccgtcgcctcgcatctcggcctcgctcctctgctccctccacaccttcctccacagtatccactacatctcccacttcaccagctcctatcgctccagagccatccaccacttccgccatacccaccacctccaccactccagcttccactgttccccctcccgctccacccattccaccacctcattttagggagcatgacgaaactgagatgcgacccctagctactgatccccgtct

SEQ ID NO: 3300 - DNA, 608 bp, Zea Mays
ctccatcccgatcggacagttcaatattgtttgctaatgctaattcaagagaggaatcagtggggtgttgtttatagatcgctcatttgcgcctttattgttcaaatgcaccctagtccttcgattttcaggaagaacgagtggttcattcatagtgttgtatcgtattgtgctgtgttgtgctgctgcgctttattgtttataacgaaatagttcagagtgattgttgcattgtgttgtaccgtgatgtgttgttgtatgccaataattctcctcgtgctcatatcactgtttctctaaaacttggcaatggaatggcgtgtaattgctagctgtgagagcttatgaaggagcggtgaggcgaccagaggggtgaatgggagccactaaaaattcttgacttgtgagcacgtgactttgatcccaaagctcaacccgtaaactcttatagactcacaaagcaccagatcacagtatgaatcaaaccaatgtcgtttgatcacacaaaagtgcagcttagagccctgctcaggtgtttgtaaaaaatcaaagtcaaaatcatagagaacaccgagcggcagtgtcggtctatagggcggcagtgtcgg

SEQ ID NO: 3301 - DNA, 661 bp, Zea Mays
caagttcctagtggggactcgatgagtccggcggcaatgttagccgcgatgcaggccatgcaacaggagttggccattctgaggcaagctattcctgttgcccatgcgggtgctgctcagggtgctggtggtggaggagtgcccagaggcgctgaccctgtgggtgctgctccaggtggcagggccgaggtgcctcttccagtcagtggtctttctctgatgaagtggatgtgcatgaagtaggattcttttgatggcagtggtactccggtcgaggcggcagattggctaacttacgtggaggataagatgaatgtcttcgagattgtgtatggacatcgggtttgctttagcacacagctactgaagggagaggctcaaatttggtggagaggcgtgcaggcagcgcactcctcctcactaggagtcctatcttgggatgtcttcatgaggcagtttgaaaggagattctacttggtcaccttcctggagaaaatgaagattgatttgcagtcctacaagcaggagaagaagtctgtcacagagtatgaagtgggcttcaacaagatggtccgctttgcccctcatgtggcttataatgagatggagaaggcgagtcagttccgtcagggcctgaaaccttccaccaggcatgccctgg

SEQ ID NO: 3302 - DNA, 491 bp, Zea Mays
cgatcaagcggacgaccaacaccggcgtcgttgtgtgccgtaacctgagggccgagactgagatcgtcaatcgtagaacgtagaagcgcagatcgcagaaggtagaagcagaatagccatgcagatcgcagaatggcagctaggaacaccttaacagaacgacagatgggaacatgtactatgctaacgattctgttctgattaggcccaattgaccaacttatgcactctaactttctttatttgtaagaacaagcgagtagtctagtggtaacactgattcaaagcaaggtgcaagtctctggttcgaagctccgcgggagcaatttttttgccaaataaatcttagcacatgcgtcgccgggccgcgagtcgccaggcgggggttgtgtcccactttaccaaaaaaatgcgacccatgtaggccaaggatctcacgccgtcaagtgttgtacacgtggggcgttttttactaaaactcatctgtgact

SEQ ID NO: 3303 - DNA, 599 bp, Zea Mays
ttgactgcagaagggatataagtggacccatccaaggtagaagttgtttcaaattggaagcaaccatccaacgtcagtgaagtacgaagctttctgggaatggcagggtattaccgccgctttatcaagggattctccagcatagcaaaacccatgaccgaacttctcaaaaaggacaataagtttgtgtggacccccaaatgtgaggaaagtttccaaatcatcaaggagaagcttacaaccgcaccagttctgactctgccagatatacaccaggattttgtcatcttctgtgatgcttccaagcaaggcttagggtgtgtcttaatgcaaaatgagaaagtcattgcttatgcatcccgcttactcaagccgcacgagcagaactaccctacccacgatctggaattggcagccatagtgcacgccctaaaaatatggaggcattatctgatcgggaacaaatgccacatcttcactgatcacaagagtctaaagtatatcttcacgcaaccggacctcaagctccgtcaaagaaggtggcttgaattgatcaaggattatgacctcgaaatccactaccaccccggaaaggccaa

SEQ ID NO: 3304 - DNA, 441 bp, Zea Mays
tgcgcgccagattcttggtaatagctgcttgcccgaactcgtttttatcaccgcattgtgtaggacccactcggttgaagttttaggcaccgggccgtagtggagcctctctagcaatggtgccgccgctgggttcctgtgcacagccgtgttgttcgtcggggagagaggaggggaggaagaaaggatttagtccgttagatgtcgatccggcggccatgatcgcgtgtagcgtaccccttcgtcaaatgtatctgagccataggatggtatttcgatgaccgagattagatcccgccctcgtaaaattctagccgcaggattttaatctgatgccccacgttgcgtaccggttcggagtgaatcgggatctaatccgcaccgtccattcgcgatcgtgcggcccagatttgatcataccccttcgcgggtatggtttac

SEQ ID NO: 3305 - DNA, 512 bp, Zea Mays
ctggtgttgcgttgctgactcagagcttggattgttgtacattccaaacgccccttgtcccttctccaagatcacatacgaaattcttgataagcctggcctgttgcatgcgtgaagcaagcaaatctgcgcccctcccctggacatgtgatcgcggagatttctgagcccgggacgcatgcggtagatccctgctggattttcatgcctcattttcagctatgcagatcgagatcgaggtgtctccgctgagcccgggacacatgcggtagatccctgctggattttcatgcctcattttcagctatgcagatcgagatcgaggtgtctccgctggcctctgttcatggctcatgatcatcatggacaacggcctccattaacgcaatacgcagtgcggccactcgtcagtcgtcgcgcccaaccaaaccatgacctgcaccccccctcccccttcctttttcaagaatacagtattagtttattattaattgatgaaaagaggttatcct

SEQ ID NO: 3306 - DNA, 500 bp, Zea Mays
aagggctggccgcggtgaggtgggtttcacggtggcggagacttgatttggggaaaatctcaaattcgagttctctggtggggggtttggggtgcaggtgggtgctctagctgctcgaatacataacgaagacgatggtgcactcaatttatagactctgggggcggtggccggtgaatcgagcgattacgcgcggcggccgggaaagaaataggcactggcgcaagcgctaggtggcttctaccgtggcggtctcaccggcgatcaccggacgaccttagcgtgactatccgcgacgtggtaaagcgcccggacacgcggcgcaaggccgagcgacggtggttcaccggcgaagtcatccgtagcggttgtggcaacttggtacggtggtcggacttgtttagtgaccggagttatccacagcggtgatatttctaggaccccgagcgctatccactccatccgagcaccaatcgtggcgacgacggcacgaatcacgg

SEQ ID NO: 3307 - DNA, 717 bp, Zea Mays
gttgagtgtaagcatgaatgtcctgtgtctgtccgtgttcacgtcgcatgcctccccttttatagttcaaggggggcatgtacaagggttctgagccctgacacgtgggctcagggacaaatagatgggtggaacttttgcttgccatgcccgtgtaatcttcgtgcgccctgacacccgagatctgcgtcgtctcggcgcgcaaggggaaagcttctcgtataagggatgagtacagtgcaccgcgtagtacgagcacactgtttcgacaacggactggacaggcatgcctcctgcagggtggccctggtgccgcctgccagcggaatggacaggacgcaataaatgtcgtggaggcacatcatctgtcagaagggtggacaggcggcgcgtccgctccgcaataaatgtggaggccgcgcagcctagatcccttatgtcatgctccgcccgtcgacctacgtcacggataataagccatatggctgcattagatcctcggccgggggggggggggcagaggcgcttcgaatagagccaagacacgcctcaaccccggacccatgcctaggttatgacacttcctttcctaggaccttgttatgggtggtccggagctcacttggtggggtccaaaccccatccaatggtttcgggctactttacctcgggggtccgggttgtgcgcatagggatcccgagcctactaggcccgag

SEQ ID NO: 3308 - DNA, 361 bp, Zea Mays
cttagcaatgctggaaaaatttggtacgaaacaccgataatatccagcgagccccaagaaacttcgaatttcaaagacactagagggtctcttccactccaccacagccgcaagattcttgggatcaaccgcaatgccctgctgattaatcacatgccctaggaaagccacttcggacagccaaaatgcacacttcttcaacttgccatagaactgattctcccttagggcacccagaacgagacggagatgctgctcatgctcagcctcggtcttagaataaatcagaatgtcatccaggaacacgaccacaaagtcatccaagaactcatgcaacatcctattcattgcttccataaaa

SEQ ID NO: 3309 - DNA, 390 bp, Zea Mays
gccgcttgtagagaactgggacatgccgaaggaaactgtcgccgaatctagcgaaggtgagctggtccggctgaagtacaccttcagatatggggataagttcgacgaaccaaacgatgactggttaaaatgcatcgaagtgacaagtgatgaactgcttggatcatattccaaggcagaagataatgcattgtccacaaccttcagaggtcgaggaaaaaagagattgaacagagtttttgacgctattggcttcgtctatcccgactaccgttacccgctgtgggggcaagggaagaaaaggaaagctactgctgtggccgcctcggccgaacctgtgccgaaggctacaagcaaaaagatgaaggtccttacccaccggccacgcta

SEQ ID NO: 3310 - DNA, 450 bp, Zea Mays
aagccaccttagatagccaggttgtcgccgctggtcttgccacggtaacatccacgaattgcttgcgccagtagctccttccctcttcgaccgccaccgcgccatctcaaattcacgggccaccgctcagggatcctataaattgagcatgccgtcggctccgctaggtagtaaagcacccaatccatcaactcgtgcctcaaatcatccatcagagctcgccaatttgaaacttcccccaaatcggttttccgccgctgtgaaaaggctctcaccgtggccagtgcgcttcaggtccgttcatgctctctgttcactcgtttcagtacactgatgtgcccttgatactccctgacccggccgattaacctagaacccataggatcacggagaacgcgtcgaattgtccgttaatcgcatgggcatcgtggacggagagaatgaggcctc

SEQ ID NO: 3311 - DNA, 635 bp, Zea Mays
agggcggacctggaagcagctagccgcgatgaggtggttcatggcggcgcagtcgaccaaattgggggaagaaggaaattctccggctatggtggctaattgaaggcgggaatgggtgctctggcctagtgataacatgacacaacagactaggccatcaatttataggagtgctaagcggtggtgtccaattttgaaaaggaagaccggcggccgagaggagaggtgagtcaccggtgtaaactatcgtggcgctcctcggggtaatgcctccgtcgacgaactgacctcctatggatatctaatgcgacatggtagatcttctaagcacgtggggtggctacaatcgacggcgaactccgacgaggacaccactgtccactgcgcggcaagtgtcacggtgaacagtccggcgaaaagtctctctccctttcccgagttgagatctttccttgcctgtaacacctcaaaatctcattttgagaatttggtaaaattttccaaagattttgagttagaatatttttttaaataaacttttgaagtcatatcccttaaaataaatatccttcctaataaatagttacttaaaacggacccacatgaaattagtcatcccactataaggttaaaag

SEQ ID NO: 3312 - DNA, 415 bp, Zea Mays
cgccactgtgtccgagtcgtcccctcacccccccgcctgcccgagccatctcaatcggcattagcgccattcccgccatcatggcgagctcgccagtgctcgccgtctcctccatccctcttcctccctcgggcgcctataaaaggacccgcccgagccccgccttcaccacaccagctccggccatctccactgctttcccccgagccaatcgagctagcgccgccgtgcctccctcgtcgctccggtgagctcctctccccctttctggtgatcctttgtacaattaagctagcgcttgagctctgccacacgatcacggtcacgaggcacacctccccgccccctattgcgcccaattgccgcaccggcgaccacgccgccgcggacactcgccaccgcgccgcggaccggc

SEQ ID NO: 3313 - DNA, 709 bp, Zea Mays
gccgtggagagggtagagggcggctgcccaaggggaggagaggaagagggagggggcggtggccaaaggggtggaaaggtaaggggctgccacaattgggaggagaggggggcaactagggtaggggagggaggctcccatccatcggatcgagatcaaagggccgaacatgctctcccatctgagctcccgaccccaacagaaaaaaatgccaaaagatctactgcttccctgaggaatgcctcctgaaactccaaaccccaatgccatagaacatgaaagaaaagagaaagaaatttagcttcttttcagaaaattgggatatcacagacgatcaccgacccgatctacagctcacccgagggctagacgcccagatggtcgtgcagccgcccctcttcttccttttctctctactcagggtaatggtggctcacggtatgcgcggacgggtacgaggaggtgctttatgtggttgaccggggttggaccgagggcttgggtggttggacgtggcctgagcttcgcacgatcggtgcgcgctccccgccatggatctcgcgcaagctgttaccgatcccagggtgaccgaccactgggcccaagttgtcagcgcaacagagatgcatagcccgagcacccgaaatcacagacagatgggcccctcgaagcagtgaggccagtgcgatgcgggcgcgcgtcgcgcctg

SEQ ID NO: 3314 - DNA, 313 bp, Zea Mays
aaggattcttactcgatcccaggcgctatccacacgatccgagcacgaatcacggcggcatgagcgtgaatccgtgcatggctcgtcggcggcgagtttctgaacttgttttccctggtgcactgtaccatggcgaggtgggttcagttggcctgacagatcaaattcagggcaaattttctctaaattttgtatggcaacacatccaaggctctgcagcaaaattgtagcccaacataccatcttcatctttgttatagtattccaaaacaaatttttactggatcatgcttagaatcgagctcaaagtttg

SEQ ID NO: 3315 - DNA, 818 bp, Zea Mays
gcggccttcctccaatccgtgccagggtttgcggggggataaattggtgccccctgtgcccctctccacttcttcgtctacctcgtgaatcctctctcacctcagccgcctgcacaccgtgcgcgttgggggaaatcacaggcccgccgtcgttgaccacgtgaaccacagacactgggcaatctgtggagcattcaagtgttgcgccacgacctctggatgcttcggcagccgcttgcttctccattggtgtcgcggctatagggcaattgctcgtcggacttcgtcaagcgacaccaccgcgtggccagactcaaccgcgcaataatccatggtgagaatgccctcatgcttttcgccctactcttcgcatcgcgtagcaccattcggggtgaaccgtagggctctgagtcgagcgttgtgcacctccggcgatggctcgccgtggccactgggcggcgccgccgcactctgttgaccagggtaggagcaacataggtagccgtcggatcttgctggacggctaggattaggtgatcgcataacccttcgcgtgagtgattctaggccgttgatatttgatcgggtgaatatgagtcgatcgtagctatattaaacctggaccgtggattctagatcctatggatcatggcacgtaccgtttcatccgcgtttaggtctaatctaggtcgtcaacgtccgatcggacggccagagcgggccgataccgctttggtggccgactttgcagaaaacccctcatagtgtttaagaatcaacccgcggtccatagcagtgtcagtctgagtcttagaaac

SEQ ID NO: 3316 - DNA, 653 bp, Zea Mays
cgggcttctggcctctcgtggcacgcattggcgctggttctccctgacgcgtggggccatcgccagcgttttcctcttcttggctggacatcgcggcatggtggttgcgccacccgagatttcagctggaggccagtgcggccacgctacccataaaattggtgccgcgcaggtcaccttgtctttccatgcgtcctaatcaagcattggagctcaaggatgccaaaaaatcgtgggagcgtgtgagggtctagagagcagggagctaccgcatgtgaattctgactcgccgtcgaccgggctgcttggaattcgtggccagcaccgattgaattgctcaccgtcgatcaaatcccgccatggaccgcaagctcccgcgaccgggtccgcccgcgtgtctagccgtggtgagatgtccttctcgtgtcttgcaatgccttactctatattttacggccattggcgtgggtcttcgggcgagaaaatgggatagcgttgtgcctcagcggatacgccaccgtgcatacagggcgccgccggccggagtctggggagagaggtcgaaatcgtgccagccgttgagttactgatcgacggctctgatcggctcttgcgtggcgattggattggagggtgctgaccgtggattcgga

SEQ ID NO: 3317 - DNA, 695 bp, Zea Mays
ggaaggagccacaaggaaagggtaaaaccaaacattctacctagggtcaagccacacatactcatgggctctagggtcgcctagttgtctcgtatttattatggcgaatgacgtgggatgtgtgggtcctaggcgccttcattcaggctatgatgatccttggccttcatagcctggggctgggcatggcttggcgtgttgcgccctgccaacggcctatgcactcaggcctagtcgtgataggtcatgagtgtcccgtaggccaaggggcgagcgggccataaatgcgtcgcggtccgaggggttcataggtcatgagtgggaggcagaccgacacccccgctgtggctcgatgccagacgtagttaatgccgatgatcatttatgatgggtcaggcttaggcaaggtgcgagatccacttgagtggccaccccacatgctcgacccccttgtcaggttctaccacgcccgaccccgggctccgtgcatggggtttgtcaggggcgggtgcctccagtgtagatgttatccatctcctccgactgaccaacaggcctagtggccagattctttctctcagtatgttccttgactgatgggacctagggacgggggatcatatgcccgacacattgtgactaagcaagtaacatagggtgcaagatgtgtatcagtcttctgagttgatgcatgc

SEQ ID NO: 3318 - DNA, 433 bp, Zea Mays
caagccagtaagccagaagccccggagacagtccgtggagcggcaggacttcatccgagaggaggttcggaagctgttgcatgccgacttcatagaagaggttcaccaccccatgtggctagccaacccagtcatcgtgccaaaagcaaacgggaaactccggatgtgcatcgactacaccagcctgaataaggcatgccccaaggacccgtacccacttccacgcatagatcagatcgtggactctacctcggggtgcgactttttgtccttcctggatgcctactccggttttcatcaaatccggatgtccagggaagatatgaaacacattgcttttgtaatggtggatgggttatactgctatgttgtgatgccttatggtctgaagaacgccttgccaacctttgttcgagtgatgagtaagaccttt

SEQ ID NO: 3319 - DNA, 381 bp, Zea Mays
gttcgtgttgatgtcgtcgatgttgatctctcgtccgtggagggacccctgtcctatttatacaccaaggggagcgtccttagtgaagccagatcttgtattcgaagaagagatgcctagcgtctggtgtgatggcgtattgtggagcagattcgtgcatgctgacttcccatagagagccgaggccgagatcgaggggttgtccctacacccgagcccccgagggagaggccgcccatgctgtagtggttgtaatagcgacggggtatgggtcaaagtctgcttacgaggtgcgtcatcgtcctggcgtgtgatgacgtcgagattccctgcagcactcattgagatcaaagcccctgcttggttgatgcagaagtcttc

SEQ ID NO: 3320 - DNA, 300 bp, Zea Mays
ctagagtttagtaggatggagtcgctcgataccagccttgatgacatttggtttgaatcgaagtagaacggggccattccaatctagaaatatttcctcaatatgttgcatctctgggctccctaaaaacgatcggacccaagtgctcgcgagcgcaactcttcggtccacgttcctgtctcacacccatcctcttctttctccttttgctcgtggtccttctgccgcactcctgccttttcatcatgctactccaccacattgtcgtcccatcgtcacgccacaccatacttatcatcg

SEQ ID NO: 3321 - DNA, 504 bp, Zea Mays
cacggccgtggccgccgcgccatgctgctcgatcgaatcagcctcttctccttcttcgtcgtcctcctcgcagacggtacgtggtctctccttccttcccccctctgtgcacttcgcggtcagtggatgggtataagctgtgcctcttctgtttctcttcttctatagcttggttctcttcgtgacagcaataagccgcggcctaataaaccctgctcaagttgtctagcgtactacctaatctgcggccgcaagcaagcaatgatgacgaggcaggtagctagcgctaatagctgctgctcttgtgcgcggaaaggtgtggcgtgatgtaaacgtctccattgccgttgcgctgtgccgtcctcgctaccctttcccccgtcgcgcgcgctgcgtctccctccatccggccatccctagtccatttctttctgaaagcgatcgggatttcttcgccctttccaggatttgttttaatccaccatttccgatggaccaccctcc

SEQ ID NO: 3322 - DNA, 422 bp, Zea Mays
ttgggacaagccttattgaggttggtgtagtcgatgcacatccgaagcttcccgttagccttgggaacaatgactggattggccagccatactgggtgatggacctcttcgatgaagccagtgcgcagcagcttccggacctcctcacggatgaaatcctgccgctcaatggactgtctccaaggcttctgactcaccggtttggcgtcagggtggatcttcagatggtgctcgatcacctccctggggatcccaggcatctgcgacggttcccatgcgaatacgtcggcatttgcctggaggaaggcgacgagcgcgatttcctatttctcctccagattgcctgcgatgcgagtggtctaggaggaatccccgccgagctggatagtcttgacgggaccgctgtctgctccagatggttg

SEQ ID NO: 3323 - DNA, 544 bp, Zea Mays
cctgcatacacttacgaaccgataatctgaaaaatcgactcctgttaaacattttgcagtttcataagtccaaagcataggggcagcggccatagcaatgcaagtcgttgcgtctacatgcacggtttctacttcattgcctacccattgaagtaacatttgatgtaaagtagaaggtacacattgatcagcgtgaatccaatctttgcctaggatgatactataatttccttctactttagtgacgaagaaggcaacaattagtgtatttgtcccgattgttaatttaagggacgtgacacccttggcctcgattggactgttgctcccaacgatgttgagtgtcatgtttgtcctgatcagcttgttatcctatttacctagctttctttacaatgagtaaggaaataaatttatggtcgcacctccatcaattagcatcctagaaatcggcgtcccatcaatatggtcgcgcatatagagcgacttcaagtgattgatccattctttgggtttggtgaagataatatctttaggaccgaaa

SEQ ID NO: 3324 - DNA, 512 bp, Zea Mays
ccttttttgtaggttaccaggcgaggaggaggactggagttgtcacaaggaagagcggtgccaaccgctgctcccctcaccaggcgaagcccggcgctgtcgcgtctcctgcgacacattacgtggaccactggggaaacccgatatcgacctccagagtacaatgcgcctcagcattaactgctaacaagatgtatactttcccactccaacggcgggtgctacgaccaaagtacacaggccacacagtggcggatgcgttaccgaggcaagacctttgactctctgcaccacgtgggctgctgccatcatggcctccactatagtgcacgaggtaccaaggcaaagggtgacaggcggagaagacaggacggcgtcgcctgagcatccctatgcacggtagcgcttcaacctatgccgcaacatactcctccactctgccccgattagatgaggccagggcacaacgggccaggtgatctacatgaagaccagaagaaggtctatttccc

SEQ ID NO: 3325 - DNA, 544 bp, Zea Mays
aaaactttcggtccgccgctgccaggtagaggccgcggtggctgtggtgacagactaggcgctgctgtggcggtggctgccatatgccggaccgaggcgacgaacatggagcactatgtgggatcgtttcccaggcttagcacgcgatgtttttggacagacagggaaatagaaaaatatatgcgtcttcttcttcctctcgcttctgggaatgatgcctttcaggcttccatggagaggaggtcgcgcgactgtgatggcgatgacattgtacttcacccatcttcccacgctcgaaaagataacagtctctttcgttccgtgacttccaatcgtgttccatagcactctcaaagcacgccaccttgaatctcatcctctcaatcatcggcactaattcccaccaagatacatgccatcaagagcctcctctccctcctccctccacccctccccgtcaaacgccgccgcgccacaaagagcacccccacctctcgatcgactgcttcctcaaacgctgttgcgtttctcgcgcggaatgccc

SEQ ID NO: 3326 - DNA, 277 bp, Zea Mays
cgggcgcctataaaagggccgccccgagctcctccttccccgcaccggcctcagccacccctctcctccctcgtccgagctcaattcgtggaagagccgtcgccgtcctcttcctccccggtgagcccttccctctcttctccctgccactctgttggtccatcaagcgattgcttaagcctcctagcttcgccacaccgccacgaacgcagtacaccacttccccccgattcctcgcccaaagctcaccaacggcaaccccgccgcgaagctccgc

SEQ ID NO: 3327 - DNA, 466 bp, Zea Mays
gtggcaatgggcgtcgatatggtgttgtgggcaggtcttaggaatctggcatcttgagatcccaatccatgaatgcaacacaacatgatgggtgaagcgagctccaccctttcccgtcggtgactgagggcaatgaagtgcacatatttgaagaaacagtcgacgacgatgaggatgacaaacttcctgtggaccttgtgaaggccctcaatgaaatcaatcaagatatctgcctacacctaagatggtacgtcgagtgcttgtaggagatcgtccaactacagggtcaatgtcttgttgcattgacacatgtctcacatgcgattgaagtcgcaaatgagtactctatcgcctggaggtcagcgttgacccaatagtagcaccccctaggatgattgtagaacaccgtacctagattacctcatccgcgatacactcttgacggacaagactggggctcgacgac

SEQ ID NO: 3328 - DNA, 373 bp, Zea Mays
ggcagccccgagccccacgagtacgcatggacccacccatggtaaaacgttggttttacccttgccttacggttccttcccgaggaagccaccgctggccgactcctgtcccgacctataaaagagagaggctcacctcaggggaagggggatcgaggaacataaggatggaccaaagaggacttggagatgactggacgccttcagacggagacgaacccacaaggacgaacaggaggaggagcgccaatgaggaccaggaggtcggagcctcgccaagccaagacttagctaggactccaccttgcagcttataagctccacttccaccccgataagagatctggaagcctcttctccctctctcgactgc

SEQ ID NO: 3329 - DNA, 601 bp, Zea Mays
tagaaattagaggctatctaaaaaaggacaatttagatcgacaaacctcacatgcatgagatacaagacaagtgttggtccaaaatgagtgatgcatacgttttgttactctactaacccaatattaaaacatttaaataaccctatatggggccaagtcgcacttgtttgtcgttgtcggaggtcttgacacgggatggacgaggtagggctacgcttagcgtgagggccaggtgtgagggcctttcttttcgattgcgggtgaacatggtggataggcatggaagccgacacgtatgggtaataacgagttagcacgacgatggcagcaggaaggcacgagcatggtggcgatagccaggagcgggggtggacacgaggtgcggtgggcgaccgagcgatacacaatggcaggggggcaaggaagtggtagcgtgtagccgcacgcaagagctaggggcacacaaacaatgtcggctagccaaggggcggcgacagtggcatggagagtgggggtagccttaagccagaaaaaatagacttaatttcagtggctagaccatagctgctgaaaataaatacttatttttgacaatatccc

SEQ ID NO: 3330 - DNA, 798 bp, Zea Mays
gcactcggtcccctaacaaactaggcaacagcctctagaggataagtgatcagccacttttacacccccgcagttcgtgcgtcgtcgacgatgcacaatctggagcgaaaatcttcaaacaacgtagttggcagcccttttgtcatgatgtctgcgagctgatgacgagccggaacgtgtgcgacacgaatgtccccaacagcaactttctcgcgaacaaaatgaatgtccaactcaacgtgcttggttcttccgtgatgcacaggattctgggacatgtagacggccgagacgttgtcgcagtacacgattgacgccttggacaccgggtgcagcagctcgccaagaagatgacgaagccaacaacattctgccgcgacgttggccacacccctgtactcagcctccgcgctcgacctagagacgacgggctggcgtttggacgaccatgacaccaacgagtcacccagaaacacacagaacccggacgtcgaacgtcgagtgtcggggcagcccgtccagtcggcatcggaatagcccgtgagtgctggcgtagaggagcgatgaagttggagacccttgcacgatgtgccgcgcacatagcgcaagaccctcttgacgaacatccaatgcacgtctttgggatcatgcatgtgtaggcacgcttgctggacggcataggtgaggtcgggccgcgtcaatggttaggtactggagtgcgccaacaatgctgcggtagaaggttgggtcggcgactggtgctcctgcgtcgcttggaagcttcgccttcgtgtccac

SEQ ID NO: 3331 - DNA, 573 bp, Zea Mays
caagagtctaccttatgttgagttctcatataataatagttatcgggtcagtcggaagatgtcaccgttcgagactctgtatggcaggaaatgcaggactcctctatattttatcaggctagaggaagacaattctttggacctgaacttattcaagaggcagaagaacaagtccgaataattcgggagaatttgagggtagctcagaccagacaaaagagctatgcggataatagaagaagaccactggaatttgaggaaagaaatcatgtgtacctcaaggtgtcaccacttcgtggaatgaggagattcaaagttaagggcaaattgtcccctcgctacattggaccattcttgatctttaggcgagttggggagatgacataccaactcgagttacctgctagtctatcggatgtgcataatgtgttccatgtatctcaactgaagaagtgtcttcgtgtccctgaggaacagttaccaatggaagagctcagtgttcagggtgatttgacttacatgaagtatccgatcaagatttttgacactttgactagagttacaagaaataag

SEQ ID NO: 3332 - DNA, 378 bp, Zea Mays
ctttttgttatttggaccaagtggttttggcgccagcaaaagggtgaacacttctgatctttagactagggctgatttttgacatagagaaaaatggcttgctctagggtgctctccacttggggcttaattttggggtttttgtaggacctttttgtaatacctcccttactatattttgtaggtatattaatgtacttcaactttggtaaagggttcaatccatgaattggccatttgcatagttttccctttaatccaatgtttgggggtttaatggcccaagaggggaaattagggttttagaacctttttcataggtgaagatacatgaaggctagggtatccctcccatcatgatcatcacttagtttagcc

SEQ ID NO: 3333 - DNA, 539 bp, Zea Mays
gcccgcctgaggtcgagctctgcactgcacggtaattaatgtagctgtcgatcggctgaagctagctgcacacgtacgtacgtccacggaccacggtccaccagcagcagcagaagctgagctctcatgtacgtaacgactcagcagtcagcacctacttgcatgcatgcatgaccctcttggcttctcttcacggctcactgtccctgcccaggctgcctactctggctcgccgctcacggtcgtcgctactcactagcttaataattcgtgttggattgagtgtacgttgaccggcaactcataaattaaagaggattaggtagcacggcataacatgacaacatgactttcatagcatattaagttgcatgtacccaccaatccaactctaaagtttaagctgatgagaagagatagataattcaattatattatattctaatagagtattcaaccactgtcttatttgcactgcaagtaggagaagtcaaatatactagtacgtagccgtctctgaaaacgtacttttgaaccgc

SEQ ID NO: 3334 - DNA, 350 bp, Zea Mays
gccgaattcgcttgggggcagagcagcaggaagcatttgatctcattaaaaaatacttgtcttcggctcccgtattaaaagcaccacgagcaggagtaccattccgattatacattgccgaaggtcattggggctgttctgacacaagaaactgaaggaaaggagcatgtggtgacttatctaaatcggaggttggtggatgctaaaacaaggtacacttttattgagaagttatgcttatgtttgttttatgcatgcaccaagtgtaggtgttatttactgtctagtcattgcactgtttctggtcaagccgatgtaattaaatacatgttgcataacccaattatgag

SEQ ID NO: 3335 - DNA, 1027 bp, Zea Mays
ggataaataagttgtgggagatagccctatagataatatgaagaccaaacaaaaaaattagacagaaacttttacctctttgtcggggatgagatcctcggtccctatggcccatcggtcaaagagcgcactagggaaaggcctctagcaactgggccctgctggttagccggaggagataggaacgactaccctgagacacccacccccggacgaacctcgcggcactgagcccaaggtcgggtgtggtggaacctgacagggggctgggcgcgtcgaagcgaaactactcgagtggatgttgtgcctggcccgagaccgactcgtcataagtgaccgactacattaactacgcctggcgatgagtcgtggcagaggcaccggcccacttcccactcatgactgacgaacccctcagactgcgacacatttattgcccatgcactctaggcctacgacgcactcatggtctatcgggactaggcttgagtgtgcagaacgctggcagggcgctatgatgcccgcgccacccgccatagagaatacatgacaatcggacgaccacgagaccaacgagcacgcgtggcttcaccatggtagaacgtttggtttaccactggtgcccgaccccttcctcgacctataaaaggaagaggttagtccccggaccaaaggatctcgggcagacagatgcacgcacaaggacggacctagacgagaagacgcccagaaggaccgacgaataggagtacgcaccgacgataacccagagaccggagccccgccatcaagccaagacttagctaggactccactctgtcacccttagctccacctctaccatgataagagacttgggaaactctcctccctctctcgcccgcttgtaactcctactacgtgctttgatcttcaatggtgtcggttagcgcaagccgccgatgactggaagtagaaacatcctgtccgaaccaatataaatcttacgtccaccgtgtataccgtccgaacaccggaacacacacaa

SEQ ID NO: 3336 - DNA, 614 bp, Zea Mays
cgttcacgaaaattgtccacgtgtgatgatttagagagtgagagaatatgcgatccaaaacaaatcacacgttgcgcctgcgacagaggagaatcacacaaacaaaacacgacagccgttcctaccattcaccgactatcatgaaagccgcaccaatatgcaatctatcaatcgccaaaatcctcccctggaaaaacctacacataagaaacgcacaatgccacatcaagcatactcacctaaacatgcaggaatcttctggcctccaaacgcttacttcctaggatcccaaaccccgcagccaaggagccgccgccacaaccaagagcgctccccgatcacttctgctgcggtcctgccggcgcggccgtgaccatgcaccacgactcctaccagccaaggaaaccaactgtacgagcagacgccgggccgcgacacctgtaatccggcaaggggtcgggggaggtcgcgggatgcatgtcatcgtggcccgtgacctatttaaaccacggaagggcacaactgtcgcgcggaggggaatagtttaaggaagaaacgtctctcgctagaatgaccagtggcgttcgatccgcatctgcatgcgtcagtcaccc

SEQ ID NO: 3337 - DNA, 345 bp, Zea Mays
ccagacttcacttcatagtcgactcgagccggcagacaaggtgaaggcacatctggtcagaaaatccgcacaacgacagagagggaagatatccatctaccacaacatttaaggctccatgatgtacattacttaacactagttcgttgggcccatctgtcggggctcagcacctatgtatgtgcccccttggactataaaagggagggcacatgggatgcaaaagggacatttggactcttacgcagacttctccatactcaagcaatacaactcgcaatggagtagggtattacgctctggcagctcaaaccactctaaaacccttatgttcttgtgttcttg

SEQ ID NO: 3338 - DNA, 611 bp, Zea Mays
gaccaatgcagcttgagcttctttattcatgtagcacactaccttttaatgctgaagttaggcttgataggcttctggatgatgcccctgatatcttcccttttctccaaatcactcttcacatagaaccattccttcgccaaggagtttggccacttgttgcgatacaccagggctaggaaacgagcttcttttcgatattggaaattgtatcatccaaaattattatgcaactattccttccatgttgccttcgtctagtaatggaacttgtgaatctggcagaagcattctacgttgggctccacacctttgcttcatactgcctagataaacaccccaagcctcattatagaattaggagttagctgatgaaggtatatgtcaaaccttttgagcacttctacaatcatcttgtggtgcttgaactgaagtccgtcttttaggaagcttcggaataccaccacctcattattctctagcaaagaggtagtatcttctccccaagcctaaccatatcaatgtcactaatataatatgtatttccaacacttcaatatgatctttcataattattgatttgtcgaagcatgcatggccgaacgttgttg

SEQ ID NO: 3339 - DNA, 543 bp, Zea Mays
tggaatttgaattgaggcacgaaacgacatggaattgagccgatacttcacgaataggtttagataggtgaatatgagtgaagtgtgtgcttggtttcaatttaggcgaagaaaaagagatttgggcactcggctcgaaaacgatcgctcgaaacggggaatttggtgaaaataaagcctggaatctcggattggcgtgaaatttggcaaatgagttactggggatgttgtgaaggtgcccgaaaaatttgggttcaattggagcatttttggctggtttgggcatttcaccgagcacgtgacgtgcggagttctagggtttcggtgaaatggctatttgaggtgggaaaaccctcccgaaggagctaagaacctgcaggaatgctcaatacacacagagacacacataccacaacatggattcacaagatttcacaggatttggaattgggcaaaaggggtggaaacagaagtgcttcactgcctctcagacagagaacaagagagaaagggatagagggagaggagagcggagtgctgctc

SEQ ID NO: 3340 - DNA, 503 bp, Zea Mays
cgcgcgcacacgatgtgtcaccggtgagcctgtccgtcgagcctgaggacacctacgtcgtccccgaggctaacctacaatgctcctttgcttggttgaccccaagtgctcaatagcctccctgaccacgacgacggcataaggttgagctctggtgtgcctggtcgaggcttacgccccagtagtgttcaaacgcaagggcgcgacagcattagggttcgatccaaactaggttgctcacatgggtttgaccggggaaggcgtgagtagctgggtcgacatcaaggatggctcacggtggtctccgttggtgttccaagagatgggttgcggtagagctcaaaaagaaaggtcagtgagcaccacggttacctagacatcacaaaacatgaacaggccgagcgagttacctcacaaagaaaggtggccgcgatgaaccgagaggaacaggtgtgtgtggtcaccacttttaggttttcaggggcactggggttttcttgaga

SEQ ID NO: 3341 - DNA, 680 bp, Zea Mays
ggaaaactgaggtgttcttggtgatgcagtgcggtctagttcaatcaatcgggtctacgagcatcaggagactcatgggatgctagaacaccaagtagagaagcatgacccaacctgcagatggctggccacggtgagaagctcacaacggcgcggaaaatcgatttggggggaatcgcgaattgaggagctacggtgaacgattggaggcgaggagcaatgcactgggcgcgtaacaacctagaggagcacgctgaacgcttagtttatagtgatcaacagaggtggcgcccaatttggggaagacacgctggcggccggagagagagggaggtcactgacgcgagctatcgtggctttcacctaggcaatgactcaggcgatagacgggctatctactgcggtctactgtgacgtggtgaaatgactgacgttgtggcataaccgaatgaaatggcggcacgacggtggcggtcgcgcagacacgtcgccggtgcaagggtacagcgaggctggttctatccattccctcgcggatctttttacgtctatggtaatatcctgcccgagctgagcacgaatcgcggcggaccgcacggatcgcggcacgacgatcaccggcggcgaggttcagtgaacccaagatcttcttcggactactgtaccattagtcttcatca

SEQ ID NO: 3342 - DNA, 811 bp, Zea Mays
aaggtcctgatggtacagtagcctgaccaagatcgtcagatacatcgcacctcaccgacggtgatccccgtgcctggatttgcgcaggccgtcacgattcgtgcttggcgcaaagtggataaccgtgggggagtaaaagatccagtggggagacgtattgggtcgcggacagtagcttatcggagggcttgggggctgtgcgatgtggccgaatggccgtggttgtaagaggtcaccggtgagctcgactgcgccacgctgtggtcctttaccacgtattcgtagccgtggcatgctcagaattactctccctgcatttgtaggccgtcgagcgccacgtcgtgctcgccagtgcaatgtcttgtcaccatcgccctccaaatcccttccaaattcggagtaatcatggccaagctctataaattgagcacctcccttgcttcgcctcctcataatgaacccagtgcaactctaacctcggtcggtcatccaccatagcctgagcaattccgttttcccccaaatcggttctccgcgccgtcgttagcatcttaccgtggccagccatccacaggttggttcatgcttctctacttggtgttctagcatcccttgagtcccctattgctcgtacgcccgcttgattgaactagaccacgctgaatcatcgagaacaccttagttttccctcgggtctcgccgtcgtcgtgggcagaagaactccgggctggactagttcaattgagggatggattaggatcgccaggggtggaattagatgtagaacgacttagggtgtgaatggtttggt

SEQ ID NO: 3343 - DNA, 503 bp, Zea Mays
gtctaatgccaaggagtttaggcctataagcatcattcatagttttgctaaactgattacgaagatccttgcaaaccggttgggaggtcaacttgatagtatggtgtccaagaaccaaagtactttcatcaagggaagatttattcaagacaacttcatgttggtccaacaaacaacccgcttccttcattctcagaatcagccaacaattatgctgaaactggacatatcaaaggtgtttgattcagtatcttggcccttcttgttggaagtcttgcagagtctggggtttggtgctggatggtgtgacattgtgagtgggctgcttgccacatcctcctctcagattctccttaatggtattccaggggacttcattccgcacagaagagggctgcggcagggagaccccctctcccctatgttattcattttggtgatggacgttctaaacctcatggtggggcgagctgttgaagctaggctgttgcaacccctgtcaa

SEQ ID NO: 3344 - DNA, 608 bp, Zea Mays
tggaatttgtgagctctagtgaacaattgggggcacgacttggtggcttggtgcttgactaccctacggacccgtcggtgtgctcaatttatagtgtgcttgagcggtggtgcttaatttggacgaattgcgctggcagccgagaggggaatgagtcacggcggcgatctaccgtggcaatcgcagggcgactgaactacgggaggtcattggatggtcactacggctcatactgacgtgataaacttcctaaggcgtggcgtcctcacggtgaatggtgaacatgccggtgattgccgcacggccacgtcgccggtgtgtacagatgaaccattaagcacacagtacattccagcccatccgcggctagatctttcaccccgtgatcattatccgcgtttaattcagcgtgaatcacggcgatagaacgaatccgcgcgtgtgttcgccggcggcgaggtctgtgagctggcgatccaatccggttactgtaccatcacgaagtttcatcagttggcctgacagagcatgcctgggatcgattttgctctatattttatgtgatgactcaaccaatactctgcatcaaagtcgaagcctgataaacc

SEQ ID NO: 3345 - DNA, 312 bp, Zea Mays
gatttatgagtctcttttgaaaattgtgttctttttcttgtgacgtctgctgcatgtgaatgaatttcggaagttgtggctgttgaatccaatggttatggatggtttgcattagctatctgctgtggttgttgcttgaaggcttcaatagtgcccttttgattcttttcttcctagttgggaaatttccctctttaagaaagggaatagaaatttatctacatgtgtatttgaatcttgttttgctgctctcaatctcacatttgaactgcaaagcttaatttattatgtcctggtagttgaaccccacgg

SEQ ID NO: 3346 - DNA, 604 bp, Zea Mays
tctagactcgtgataccatgtaagtaaatagaattgcgggaattatgtcttgtattgatagagaagaattataggtacatatatagaggaggagtgcaagaggcaaaaggaaatctcataaacagggaaatcagcaggatcctaattgatccatcctggactcctccccaaaactctttatcctagcctgctatacaaggctcaccggctatagaagccaagcatcaggctgctatacaaggcaatgaatattgttgtttaatagtgacgacgacggctggcgagttggagtccagcaggatagcctgaccgatgtccttaatggcgactcacccagtaggatggtgcatcaccgatgcctcctcctcctctccctcgattgttcttgctccgctgccagcaagggtgcatggtggcggagacccggttgcttatccacgcatcgccatcgccggtgcctcctcttcctcgttgttcttgcctcactgcctacacgttaacggttcgagacgcttggcgatggggagggtaaaggcggcgacaactgacgagtcggaggcagcatgatggcctacttgatgttctctatgacgacacgaaagaa

SEQ ID NO: 3347 - DNA, 642 bp, Zea Mays
taggcacactcgtggtaagaaaccccgagggtgtcaaaatcacagaagatcctaaaggccaaagaatcgtaaatttaagcatgaccaaagattagagggtgcatataactctatatctccagggccactaccaccccaccgatcaggccaaggccaaaaggtttaacaccgaagtcatgagtttgcaacaatacaagggtagctatacagtaaggtactcagccaacctttgctcaaatgcattacagaggttgaaggcattgaactcctccaagaggtccacaaaggcatctgcagttctcactcgagccccataaccctcgtcgctaaggtcatgcgccaagggttctactggccagccatcgtgtgagtagtgaaccgtgtagtctgctcatgcgaagcatgcaaaaaattctcacctcaggcaggggcgccttcgtagttcacaaagcttattgctcacacttggcccttacagcgatggggcctcaacatagtcggaccgctccccactgcgtaaggcaaccccaaatacaccttcgttgcgatggaatacttcactaaatggattgaagcaagggttgtatccacaatcacagcgaagacaacacaaaaattctctggcagatcattgtctatcgc

SEQ ID NO: 3348 - DNA, 671 bp, Zea Mays
gggcggtctgcctgccattgccgtttggtcaggcaggcacctgctctcgcagtctcacgtgcgcgtgggatggttgggttgcacacacagctgctgggcatggactttcagtgagtgagcgttcagttcagcaggtgccaactgccaatgcaaccccgtgcattacctgacccatagcgatatcatactgcattgcaacccgtgtccgtgagtgactgaaagtactgtagactattaccactacgcgctgtggagctcctcgattttgtctagtacttcagctacatcaatacagtaggggagtgagtagtaataggaaatgtcctgtctttagcctcccgagaagttgatcagtggccacctcctccccgtttgggaacagtgacaggcgcaacgcaaggcaagcaacgcgggaatctccgttcgtcgtatcgctgggaaaaggggattctctttccttccacctccgacaaagacacagcccccttcccttccccagtccccctatcgaggcacacgggcacgcctccccgttgacgcgcagcggcgcagggccattcatgtgcaagttccccccgagctaggccgccgcccgccgtcgtcgctctcatcaacgcaacgctgtgctacactacgcgacgagccagaggcgttcagtgcagacggcggag

SEQ ID NO: 3349 - DNA, 479 bp, Zea Mays
cacagtctcccctcaccttcttccggagctgctggcggtggctccgagtccgtagggtcggggcgttaaatgccgtgcttgcccacgaaccctccaccctaaaaccacacgaaaccagctgccctccccatgaccgagagagctcccccgtgcatgccgccgccggctaaaaccacaccgcgtgggtgaccaaccgtagcaaggtatccggagtgttcgcaggtgaccacggaagcgttctgcggcacattagggcggaatagcccatcggaccgccacgaattcctcgacgtcgttcaatctccaccacggtaccgcactgtcacgtgggcagggcagtcgccatcccgatttgaggtagatccactctcatcctccttgtttcaatctccgcggcgcgtaggacgtaggaatcggagtttaaacgcgtgggcagcgaggatggggacctctggcaatggcgccgccgtggtcctgcg

SEQ ID NO: 3350 - DNA, 278 bp, Zea Mays
ccgccgctgcctcttcgcaggtgctgctaccgctggtgcacatgccgatgatcgagtacacgctcacatggctggagtctgccggggtggaggaggccttcgtcttctgctgcgcgcactcgcaccaggtcaaggagtacttggagaaggccgggtggtccggtaagtccgggcccgggagcatggccgtcacggccgtcgagtcccacgatgcgattagcgctggcgacgcgctccgcgtcatctacgaccgcggcgtggtgtgtgctctgtcctgc

SEQ ID NO: 3351 - DNA, 304 bp, Zea Mays
gcacaataacgatgttaaaaagaagactcttgcaaatgaatttatagggataatattgcaaaggaaagcagtgaatactcttctctttaattttattgtgtgtatctctttcaagaatcaagataagtaatgttaacaaaacaatgaccttgtgtctgtaccgaactcctttctccactgcagcatgtccgcccacatctgtgctgctttttcaaaatcgaacttcctcgcttttaaaaatctacagcacagaactgaaaatcaacaactgacattatatagctgaaaataacaatatgagcat

SEQ ID NO: 3352 - DNA, 308 bp, Zea Mays
cgagccaagaaatcatactgtgcatctagggtgagcaggtatgcagtgaggtacacaactgtggggtcgtcctcaagcagctgctgcccttccaaggcacgcatcctggccatccaaactggatggtttctctgaaagggcggaaagaatctgagcggggtgtcggccacttcttcttcatagatttgacacagggccctcaatgccttgcgagcgacgacttggcaggtgtctttgaatctgtgcccagtagcagtgacactccattccacatggtgtggactggatccaatgtatacagtcacgac

SEQ ID NO: 3353 - DNA, 528 bp, Zea Mays
gttcgggcggcgcctccggtcaggtgccgagcaagaagcagcgctagtcctgctccctcgcatcctgtcctgtgcccaccaggtccttagtgacactggggcggcaatcttgcgggagtgggaggcgctagaggctgagcaccaacgcctcagcgactggcgcacccaacaggaggagcacaccaagtcggcgtctcgatagttcctctccaagcggggccgcaaggagtacaagagggacctccagaaagtgtgcgccagggagctggaggcgtcctggagggagaagaaggtgaccaggagggaggaggccgtgtctcagcgggaggccctcgcagcagagttctgggccaagctgagtgccctggaccagaccctggaagcccagcgggtccagcagaccaaggctgtggagaggctgcaaaagtggcagcaggagctcaagggcaaggccagcgatgccgccctcgccaaggagaaacttaaagcgaaggagcagtccttggataggcgggagacggacctcgc

SEQ ID NO: 3354 - DNA, 536 bp, Zea Mays
cctgattacttccttcatatacaaggggaccaaatctgaagctgaatttgtggtcttcatgggaataaaatgcgcaaacttagtcaagcgatccactaccacccatatagcatctctgccctgacgagaacgaggtaaacccaccacaaaatccatggtgatatgctcccatttccactccggaatttccaatggcttcagtaaacctacaggccgcttatgctcggccttcacgcgctgacatacctcacaggcggccacatacttagaaacgtcaaccttcatccgcttccaccagaagttttgctttagatcttggtacatcttggtttcgccagggtgaacggtgtaaggcgttttatgaccttctctcaatatatccatcttcacctctgatttctgaggcacacaaaggcgacccctgaaacgaaccaaatcattctcatcgatggagaactcccggggtttaccatcgccaaccctctttcgagcttcctgcaataaatgatcctgctgctgaaccgcacgcactctct

SEQ ID NO: 3355 - DNA, 1904 bp, Zea Mays
tatttctctgttgtttgaattcaacagtcgttatgattgcagaagtaagtgcagtgtgatggttttgaaacttcttattatttcgcggggcttagagatcgccttaagacgagcaatcgaaaatgtgcttatgctgaatcgagtagtcgcgagcgtgccgtgccgatttaagtcactaccgacttaaaccgactgctccgttggtagggtctagtggtcaccctgagttaggtaaacgtgagcatgtcataccgccttaagcctttgctgacttaagtcgattgctctgttagtagggtatagtggtcaccctgagttaggtaagcgtgagcatgtcgcaccgtcttaagtcattgccaacttaaaccgattgctccgtttataggctatagtggtcaccctaagttaagtaagcgtgagcatgtcgcaccatcttaagtcattgtcgacttaagccgattgctccgttcgtagggtataatggtcaccctgagttaagtaagcgtgagcatgtcgcaccgtcttaagtcattgccgacttaagccgattgctccgttcgtagggtatagtggtcaccttgagttaagtaagcgtgagcatgtcacaccgtcttaagtcattgctgacttaagccgattgctccgtttgttgggtatagtggtcaccctgagttaagtaaacgcgcagaaaacaattcgagtgcctttgagaatgaagtcattttattgatggtgtatctcccaattacagaatacaatgtcgtcccaatagcttttgaaatctagctaggggtaaaacttcctgagatgctctatattccacaagttccctatttccgtgccatccatttgagtaaggtgatatgatccgggccgggtgacttctgttactatgaatggtccttcccatagtggtgacaatttgtgtcgcccttcccccgttagaattcggcggaggacaagatctcccactgcaaaggatcgatgtcgtacggtcttatcatgatagcgcctcagagtctgttggtacctggctgtctgaattactgtattcaatcgttcttcttctagtatatcaacatcctccagtctggtagcttcagcttcagctatgttttcgaagatcaatcttggtgccccaaacttgagatcaacaggtagaactgcctccgaaccttaaaccatgaagaagggagtgtttccatgcaaggctcggctgggttgagttcttaagctccagaccacatacgacaactctctgatccactttcctgcgaacttttcattcttgtcgaagactttctttctgagtgcttctaatatcattccgttggctctttctacttgcccgttggctcttgggtgtgctaccgatgcatatttgatctgaatgcttttttgttcgcagaaatcaaagaattctgaactagtgaaattggatcccaagtcggttatgatgctgttcagtattccgaatctgaatattatgtcctgtataaatcccactgccttagccgaagttagagaagcaatgggcttgaactctatctacttagtgaatttgtcgatagcaaccagtacatgggtgtatcctccttgagctttcttgaagggtccaatcatatccagtccccagcacgcgaacgaccatgttacaggtatggtttgcagttgctgtgctggtagatgttgctgttttgataagtattgacaagcttcacacctctggactaactcggctgcatcactcttcgccgttggctagtagaaaccagacctgaagaccttcccaaccagagttctagatgctgcgtgtatcccgcattgtctagcgtggacctcatctagtagttgcttcccagtagccgaaagaatgcatttcatgaggactcctgtcgcacccc

SEQ ID NO: 3356 - DNA, 515 bp, Zea Mays
cctaggagattcgtgccgcgggagtgatagataacgccgggtcaaggtgaaaatatcgggggaggggtgaactcagtcattggctagaccagccatcgtgtcccgccgcagtcagtcagtcacgttggcatcatcggagctcaccatttctccgaccgtgacacgcaacgatctctactccacatcgtaatggtcgtggaaagcgaccggttatcatccctggaccaattccctcctgcgcgccacgttgagtcggccaccgtaaaatatcctcgccacggtaaccttgatctcaatccaaaattcgtgttaagcttggccagagactataaattggaagcaccccctgttccgcctactcgttacaaactcagtgaaccactcctcacccccaatcatccaccgtagcgccctaatttggaattttcctcaaatccattctccgcgccgccgtgagcaccccctccgtcgacccactgtcctgtccctccacccgtcttcctagcttccgttct

SEQ ID NO: 3357 - DNA, 375 bp, Zea Mays
tgggcatcagaactcagggcgtgaccaattcacagtgaattgctcgccgtagcctgggaaccgccaatcactgtggttgaccctctctccatccccaccgtcggtaagaactcctctgttgagttcgccatcgtctcctttgcatgtagcaccttacgattgggaaaatagtgcctcagtggatgatccacgcaattctggcatgctccaccgccctgaagtcgggcagcgccgcccacacctgtcgcgtggagaagatggggggagcgttgatttttcgctgaacggctcagattgaacgttgcgtacctcttcgcgggtttgatctgagcagttggatctgattggatggccctggtgggatcatgattatat

SEQ ID NO: 3358 - DNA, 450 bp, Zea Mays
tgctgggacatcgatgatggcgcctctcccggaagctggtaaagccttggatattcagaggtctgtcagtgttcgcccgaagcgcccttgccgagccaatcaacttgattctcctgctgatgagcagaaaaagaaaaagagacgtcttcggcgagtatctagcttggatcgggatgctggtccttcggttcctgctgttgaggaagtgcccgtgcctgaacttaccgatgctgaccccaatgggtgtgatccatctgacgctgaccccaatgagtgtgctgtctgtgttgctgatggaaatgaggaggaggaagaagatgagatccctctgactcggaagaacagtcggcgatacgtagccagtggggaaagtagtggagttccttctcctgctctgtctgccctcattggtctacaagaattgtctctagaaaactttgatcagactct

SEQ ID NO: 3359 - DNA, 580 bp, Zea Mays
catcgatatgccataagctcagtgtcataatttatggcgccgatgtgttgccctatatgccacacacccatgtgggcttgcccgtcgcatgctcttttctttgtcatgctcatctcatgatacatgtacactaacgatcgtcaccctgcctcctcccattgtagttgcatctcttgctaccaagcctgtccattccctcctctcatcaccgtccccattctacgcctcccttgtcgtcaacactatgaatcaacaaataatagaaaaaattacataactacttaacatattgaggattgactgcataacctctaaactataatgactactattttagatacctttcaaatgatcccttgagatagtttgtcatactacaataacctcatcatgatgacttgattatcacatgagcatagttgtaagtgtgtacattcttttttacccttcattctcactgccccgtatgcatgcattcctttaccttatctttttctagcctaccacacctttttgcaagcaacttatgactgcttgtctcatgatctaccaccatcactcctcgatggcatctatgctc

SEQ ID NO: 3360 - DNA, 372 bp, Zea Mays
ctgaccactgccacctacctcctcaaccgcctgcccaccaaggcggttgctcaccccactccttactttgctatcttcggcacccacccctactacgatcatctccatgtctttgggtgcgcttgctatcctaatctcgcctccaccactcctcataagttagcaccccattccactcgatgtgtcttcctcgggtactccctcgaccataaagggtaccagtgcctcgacctcacctcacatagagtcctcatctctcgtcatgtcgtctttgacgagctggatttccccttttcatctttctcctccactgcctctctcaccgagctagacgtgttccttgatcctgcccctatgtcccccactgtcgcc

SEQ ID NO: 3361 - DNA, 376 bp, Zea Mays
gtgtgctgtgctgaggatggccggcaacagtgatgaagtggctggtacaaatactcggcggccatggagaatgagatcatccttcacctgccatggggcggtcagagtaccctctctgatctgattgcagaggcgctgaaattctggatcagaggcgcacactcttgtcgtagatcctcatataactggaaggtggggctggacactgcgttgagcaggccgtctgctgtgttgcgacgagacagggcgtctgcaactgtgtttcactggcctgccctgtattccactgtgcaatcaaatcctaacagtttgctgacccactgatgttgaggtactgtggacagtcgttgatcaagcatgaacttcagactatagt

SEQ ID NO: 3362 - DNA, 803 bp, Zea Mays
ccgaggcatatttgatctgaatgcttttttgttcgcagaaatcgaagaactctgagcttgtgaaattggatcctaggtcggttatgatactattcggtatcccgaacctgaatattatgtcttgtatgaattccactgctttagctgaagttagagaagcaatgggtttgaactctatccatttagtgaatttgtcgatagcaaccagtacatgagtgtatcctccttgagctttcttgaaaggtccaatcatatccagtccccagcacgcgaacgaccaagttacaggtatggtttgcagttgttgtgctggtagatgctgctgttttgataagtactggcagtcttcgcacctctggactaactcggctgcatcactcttcgccgttggccagtagaaaccagacctgaagaccttcccaaccagagtccttgatgctgcgtgtatcccacattgtccagcatggacctcatccagaagttgtttcccagtagtcgaaagaatgcatttcatgaggactcttgatgcgccccttctgtatagtgtttccccaatgagagtataatgagctgactgcctttcaatgcgttctgctgcatttctgtcatctggttcttcctcattctttatgtacctgatgatcggctccctccagtcatcagaatcagactctggttggctcagggtattgcattcctctacccgatctagtgaaatgctcgggtgcagtatttcttggacaaaaactccaggtgggacctgagtcagattggatcctagcttggacaatgcatcagctgtc

SEQ ID NO: 3363 - DNA, 271 bp, Zea Mays
ggggcatcttccccagtccagtcgcgtgaagcggcgccgccccaccattacggcggaactcgccggagctacctggtttcccaaccccgacgccccaaatcccgattgagttgcttctatacgctgcgaggcacgaaacgagtacgcgggtgggtaacgtacctagcttggtgaccggcgaagaagtgtttcacggtgcggcgcgacgcacgccgacggcgagaaattccgagcttcccaggcttcaagtccacacggcggtgccctgaac

SEQ ID NO: 3364 - DNA, 458 bp, Zea Mays
atgaacagtctccccagttttgcgctctttctgttatgagcgtggaggacgttccaacaaatcagtagatcatcacactgactccaatttccctggtgtcacttattttgtcctcaagaggaggtgcgtggttatcgcgcagctttgattatcgttttgttcgactgggacttgagatggtccagtctttttctgttttggctacgccaactaacctgcagtctcctcgacatggaattattagttttggaaccttttgtatcagtaggcggcagtatccggcgcgcggcaaagcagtggggtggggggaagaaggccaggccagggaaggatcgtccgattctcactttgggagatggccaacctgtttgattaatcgtctgctccgatggccgtggtaaataaacagcacaaagcgtctttgttttacgtccgttcccccatgaggccaggccatc

SEQ ID NO: 3365 - DNA, 843 bp, Zea Mays
gacttattgattattacttcacctcatccttgatgctgcttcaaattattagtcacctcgactaattctatgttgtgctcctatatgcccccttgccaaaaagtattttattctagtatgatctatacttctctcaatctattagatctgatctcactcttgtgcttgcgacatctttgtagatgccccctcatcataaccttctagtctttttgggattcatttctcttccatcattaaattgctaccattttgacaatatctattccattggtattgacatgctgcatcttttggattcttccatacccttgtcccttaattcaaacacttaactctgaaaaactcggttgcctatttaaacattccagtttatattttcatgaccttcttgtcttctaagagctcttcctatcccattgttaagtcattatctttcgacaatttctattcccttggccttaggatgctcgtatccttggagacttgtatactcctacaacattatatatgcttatcttcatgccctaatgtctgtttaagacatttcagttagcatgcccttgaccacccttgcttcttaatgatccatgagcggtcattttattttgcacatccttggtgatctcgttagttccttgtaacttccttcggtaatgaatttttacttcaacccttctattagaaccttatctatcttacccttgattgttttctccacttcgttacttcgcgagtcttgccttaactctatcctctgtcttgccttttgttattatcaccttcaccttagacacctctatatcttacttgatgtttatattatacctaccctttaaaatc

SEQ ID NO: 3366 - DNA, 395 bp, Zea Mays
gttgggactgctctaaggtccttagagtatacttaggaccacatattatagccgagacagattgctaggtcgtgttggtttctctctttagaagaacagggatacacattactcagaaattgtttagaaaagtatctgagaatgaatctccgatgtctgtattccattaacgtaaacaatatatacacagtgaacggacggcttcacgcccgcacgcctgttcgggagaaaaagcacgtttactttatgcgtttacattattgctaattaggattaagggaatgagtaactgctaatcttctagagtcttcttgttctctctggatcttctggagacttcttatctctggatgagatcaccaccgtctattttcctttaacactcccccttgatc

SEQ ID NO: 3367 - DNA, 524 bp, Zea Mays
gtgagttgctccgagagccgaagcacgggatgccccatggatgaacaggtccaagggtactaaaaattgtaaggcaccctaagggctaaaatagttatggtgttagtgttggtctaggtgtggggctagtgcatgaggttacccgagggctaggacaagaggtgtcctaggtagagctgggcagccggtcctatgcctatgcacgagaggcgctcattgggggcccaaaaaataagggtccaatatctaatggatagttggccagtagggaatagggttaaggctgcttgcctgcttgctaatgcctccacggaagcaaccgtcaatgtgattgacagacgtggagacgccacaaacgcaatcaggggcgatcggtgaacgcagacgctgatcggctagggcgctagccaccgcccgccaggcccaggcattcaacttccattgctgatctttcggacttcatcatcggtcactcgtccggcgtcagcatcttaggtgttcagcggcaccggcgtcaagcggcc

SEQ ID NO: 3368 - DNA, 596 bp, Zea Mays
gcagatagtgtcgccagccgccgcggaaaccacccgttgactcgccgggtgaagtcaagctccaggcgacgggcgatttctcaccgaagctgtacccatttccgcctgccgcgtgacgccgtggtcgggcctctgagcttcatcccctcggtaagaaaactatcgctggtgatcgctttgtctcccgcaccgcttagctcggtctaatttagtgcttagtactcgggggtgatcgatcgactacctcaccggcgtgcgccgccgtgcgtgctcggtgttgccgcgcagcggatttggggaaggaagaagaaccgtgggccgtaggatctcaggttgacggctctgattagaagcaggcgataccccttcgcgacattaaatcagggtcgttgatctttgatcggaagacgtaggattgatctgcgggctctcgtcaaatgctggtctagaaagagatagatctaatcctgaccgttggaattgatctgacggtccaaattagagtgtaccccttcgcggtgtagcatttgctaaaaagccccttgacttattcaaaaacaacccgcagtccgtcacagtataactctgtgtctcgg

SEQ ID NO: 3369 - DNA, 339 bp, Zea Mays
tggacggcgggttgattcctaggttttctagggtctcttctgcaaactggtaaagtgaagaggtatcggccacgatggaccatcagatcttacatctatggacacggttcaattgaacgattaaatacccttcggtttaatcaacggccgatggcccttcttccccacccgaacgcccagtcgcgttggctggccttccctgcggttgagctcgcccgcgagcggaaattccaccgccaccgagcactaatctaaaattaactggtgcaatgcgatgagggatgaatggagaacatcctggaaggcgaatcacctacgggggcgaggtagggaccttgg

SEQ ID NO: 3370 - DNA, 907 bp, Zea Mays
gtattaaaaatcgatttccataattaatttcctagttttcactgtcctctggactgcgcgtcaaattccagaaagtgcaggggctggcgcacaagttttcctagactcgggttgctggcgcatggacgacaggttaatttagggaaaactgagggtctcttatgcgaagtgccacaacgaaggggtatggggcgatcgaggccgcacgatctaaatgaaacgacccagatatgatcgtcgaagggctatccattgattcaatttgtgccacccgcggccaaatccaacgacgctggtttaacgcatcaacggaatacgccctagttccatcgtgttcctcggatcagaatcctagggttcgcgttcaatcaaacgcgattacctaatttgcgcccaccccagtctaacttgatcgcccatccaggatccaacgatccgaggaccgtcatcatcctcccgccaacagcgaggcagacgccctagccgcgatgcaccctgacggcagtccaaggtctgctactccgcaaccagatcgagtttcttgacgacctccacaccgagctaggatcgcgacaacttacgacgaggattagataacaccacatctcaccgaggttataggagacgaccgaccatggtgtcggcacttcctaagggccggagagatctccagcagccaactgccccgcacgccacgccaagaggtgcgagcaccggtgaacgcccctgggccaaggctgggacaccacagcctcgtgagagcaccgcggtggcgcttccttcacctacccacgacgcgatacgactgcaaggagacgcgtacgcggggaagaagaagcaggggagaggtagctacgagaggggctatatactgacgggatggtgcggcccaggcgagatccacgcg

SEQ ID NO: 3371 - DNA, 503 bp, Zea Mays
atcgttcttcctccagtatatcaatatcctccagtctagtagcttctgcctcagctatgttttcaaagatcagccttggtgccccaaacctgatatcagcaggtagtactgcctccgaaccattgaccatgaagaagggagtatttccatataaagctcggctaggttgagttcttaagctccaaaccacatactgcaactctctgatccacttccctgcgaacttttcattcttgtcgaagactttcttcctgagtgcttccaatatcattccattagccctttctacctgaccgttggctcttgggtgtgctactgatgtatatttgatctggatgcttctttgttcgcagaaatcaaagaattccaagctagtgaaattggatcccatgtcagttataatgctattcggtattccgaacctgaatattatatcttgtatgaattccactgccttagctgaagtcagagaagcgatgggtttgtactctatccatttagtg

SEQ ID NO: 3372 - DNA, 739 bp, Zea Mays
cagagatgcaacgcatctcaccgccggtgactctccaccgcgatcaacaccgatcatcgcgattcgtgcgctgggactcatggataatcaagggcagagaaagatctcaaatcagggaaaggagagcagcttatcactggactattcaccgcgacacctgccacgcagtggacggtcgtgtcctcgtcggagttcaccggcgattataaccgcgctacgtgcttagaagatgtaccacatcgccatagatatcggtaggaggtcagttcctcgccggagtagttaccccaggaagcgccacgacagttcacgccgatgactcatctctcttctgggccgtcggtctctcctttcaaaattggacgccaccgcttagcaattctataaattgaaggccgggtcagtcgcgtcatgttatcacgaagccgaagcacccgttctcaccctcaattagccaccgtagctggagaattcccttcttcccccaattcggtcgactgcgccgccgtgaaccacctactcgtggctagccgattccaggttcgtcctcgcccttgttgttcatgttttagcatccacatgtgcttgtgaccgtcgtctgcccagcccttggagcttgacttcatctaattaaccggaacgcctcggtcagagttcggtatccgcggtcaccgtggtcaggcacactctggcccgaattaatccaattagagcatgttctagggtcaccttgtgtcgg

SEQ ID NO: 3373 - DNA, 294 bp, Zea Mays
agggattccgggtcgtttgaccgcgagcaccatgagaccctgaggcctcaccaccttgcatcacatttccggatcctctcccgcgcttggatctggaacgcagaggagtttcttcacagatttcttgatcatcatcggagtcagtctcaactactgacgggttcctatgacgcaccatccttaagataaaaaaggagaacaaatgatgagcgaggagatcgatgttcaaggattttaacaaacacgtttgagtaaagacgcgtatgatattgagcatgcacttcaaccgttcat

SEQ ID NO: 3374 - DNA, 498 bp, Zea Mays
gggagatcgaggacctggacaagaagaaaaatgccaaccagatgctcttctcagcgatcatttagagagaacagcttcgacgctcggctattgagggactcttggacactggctgaacaattccaatgtagctgcgctcttttcaggcgcgcggagatgcaatgcaacctgccagacatatatgtctaccatttgcataatatcaaaacttgaagaatggtacagatatcttatttcataaaaaaacgtgtcgtgagtgtaattacattagtagtcctttttgtgtatttgagaaaaagagagtagctaccataggaatttgtcaattggatctttttaacgatcacgtttaatagagtgagtagctttcacgggttgtaatgctatcttctgttggaaatttatctgtttttaaccttttattaacattgtgctttcttgttttaaactataattattgtttttttcctatattcagcttctgctatgtatccagat

SEQ ID NO: 3375 - DNA, 427 bp, Zea Mays
cgtgagctggccgccgtacccacttgccctgcggccggtcgagatggccatcgccggagtttatcacttgcaaactggacgccacgtattcagaagtgttaccatgtcgcagtagaccgccgtaggtagcccgtctatcgcctgagacattgccccggtgaacgccacggtagttcgcacggtgactcacccccctctacggccgccagcttctattttccaaattcaaagccaccgcttgcagatactataaattgagggtgcagatagctccgttagtttgttacgaaccccgagcaccaaccctcgcctccgattaaccactatagaccccgaatttggttttttcccaaatcagccaaactcgccgccgagaagagttcttctgtggccagtgtcgcctaaggtagttcttgtaggattacgg

SEQ ID NO: 3376 - DNA, 474 bp, Zea Mays
tgcaattgtgttctgatggattcttgtattgacaccttgtgtgatgagttgcgcaagatgaagattgaagtaattccttctggtgcattgtctcacatttctattgagccagctttgcaagaccagatcatcatggcccagctcagtgacaagggagtgtagattatcaaggagaatctccatcagaagactgagaagtataaatgtttccgccaagatggaaagggtgtcttatggtttgaaagcagattggtggttcctaaaaatgaggatctcaagaagagaatcttggatgaggcccatctctccaaattctccatgcatccaaggagcaccaaaatgtaccacgatctgcgttgtattggtggaccagaatgaagagggagatagcccgatatgtatcagaatgtgacacctatcagaggataaaggcaagccacttgaaatcaggtggagccttgcagcccctgtcca

SEQ ID NO: 3377 - DNA, 315 bp, Zea Mays
ggggcagtctttgatgaaatgtccgaacttgtcacaattgaagcagccactcgaggaactgggaagggcagggaaacgagcactaggggcactcggctgattgttctgggcgggggcaggagtgggacaaatgaacacgggttgtctgaagggatatgtgggcagacgaggagagaacgatttgaattgaaaggtcggattaccaaccttgtcctcttttcaggtccctgagttgatctttcacccgcatatccttttgacttcccttgacccacatttttagcttcaactgacagtgttgtgctgtcagccctg

SEQ ID NO: 3378 - DNA, 650 bp, Zea Mays
tctgctaacagaaaccgtaaaactctgcacccgtgaagttggatactaagttggtgataatgttgtttggcactccgaaccggaatatgatctcctggatgaactatgctgccttggatgctgttagtgatgcaatcggcttgtactcgatccactttgtaaacttgtagatggacaccagtacatgcgtgtatccccctgagctttcttgaatggcccaatcatgtccaacccccagcacatgcaaaggaccaggaaaccgggatggtttgcagttggtgagccagcaagtgtcgttgctttgctaggaattgacatgcttcacacctctgaactagatgggctgcatccttatttatcgtgggccagtaggacccagctctaaaagatttcccaactaacttatcaatgttgttacacaatggttgattagcatacgaagttctctttggggttgccttagcattatttaggttggtggttgtgctttccaataggatgatacggttctagactccctcaattgcctccttgcttacattcaataccatagtagtggacacataggtgcaatgcctaactttaagaagcaaggtggaagcttcgatttggtgatcgagtattccacatattgttcctcccaatagaag

SEQ ID NO: 3379 - DNA, 698 bp, Zea Mays
gcaggaggttacgggaaacacgacggtaactttgggtggccggaggtggtcatagtcggccggtccatgtctccaggcggtggagctcgacagctacgtgtgctccacctagtctgtggtggtagagctcgattcgatcggtcagcaagctccatgggaggtcggtgatgcggtctaccgaaggaattgaatggaggcaggctgtggaggcgggtccgtgtgcaccagcagaacctttgactccggtgaggtcaattccactattccattgaggtagagtttgggctcgagctcgaggaggctttacggaccattggggaagctaatggtggagctggattgggtggaacgtcaccggagtgggctgaccatggtggccggtgctcagaggcaagggtggtgtgtgcggagctcatcggatctggacgctggcttgggaaggtgtggcaaagggctaagagagcaacggagggcatgaccaaggtcttggctgcttaaatagacgcggacacggtggtggccgaccgatgtttcgggtgcttctacgggcacatccaatgcgcggtgagtgtgctagaaggcaacaaacatgtggcccagcgtgtgatcctattttccctcgcgttttgtcacctcatccgacccgatcacgccaagatcttcgtgtaaggattttatcttataccttaagatttctt

SEQ ID NO: 3380 - DNA, 534 bp, Zea Mays
caagggtccgcttcaggtaactgcgcctgcctcgcctgccgtgcgcaatgcgacttgcttgttcaaccctggtgctggtgtccgccatttgctagcgagtgagctcgagctcgctgatgattttcttcttcgcttctgtgctttgccacatttgagctgtcgttggtggtttttgaagcataccggtattaactcgtgctgatggatagctgcgatgaaattagatggatgtgttgaagcttaactggttaagctgtagcggtataatgctgttgtggtgtctagtttccttgtcatacttttctatgccagtgtggctgacagttaaacagatgatgaagggtaaaagtatcttttctagcgtgtaatggagggagggtgcgatgaatcaggcaatcctatggccgagtgggttaccctggctgttatacctacgcacaccaatgcttctgttatgttgattttggactagataccaacaagttctgtcaatatgttgcgtgtccatgtttttcctctagggttacatcctgg

SEQ ID NO: 3381 - DNA, 582 bp, Zea Mays
cccgatggctccctccgccgtgattcgtgctgccgacgtcgcgattcgtgcccagggtggatggatagcgtcgcgggtgaaagatcttcgccgccggtgtgctggacgccactccggctagccgcaatccctctccccttgctcaccgcccttgaataaaggttctcaccgccgtcaagccttcatcgttgtccgccgcgtgtctcagactgtctaccgcatcaccgtgactcacccttgctcttcgtcgatcaccggaataatcaccacgacggttgacacgagttcacttgcaccagtaacctttctctctctggccgccaccgcgccatcttcaattcaagcgccactgcccctgggatctataaattgagcctgcagcgagcttcgcaacatcatcacccacccagccaccgcgtctcgctagcaatcattcgcctgagctcgcgaattttgaattcgccccaaatcagttctccgccacccgaaaaccaacctcatcgcggccagccctccacaggtctgctcataccctttttgttcctgttctagcatctgtgcatgctggtgatgctcgtcgac

SEQ ID NO: 3382 - DNA, 644 bp, Zea Mays
cacgaatcgggtcacgaggtcgtgcgaagcctgccagaagttttccccccgttcgggcaacccttcgcaattcacaaaactgatcgcccacacgtggccccttcagcgctggggcctggacattgtcgggccactacccacggcccaagggaacctcaagttcacctttgttgccgtcgagtattttaccaagtggatcaaggcaagggcagtatccataataacatcgaagactgcccagaaatttttgtggcaaaacattatctgccgattcggagtcccgtctgagctcacagtcgacaatggcaaacagtttgacagccaggacttcagggatttttgcttctccattggcaccaagctagccttcgcctcagtatatcacccacaatccaacggcgtcgtggagcgcgccaacaacaagattttcactgccatcaagaaaatgcttctcgacgacaagaagggtaaatgggccaacctgctacctgaagcagtctgggcgctgaacatgaccgaatgtcgggcgactggattcactccctttcgcctgctatacggatcggaggccatgaccccgcaggaaatcaaacatgggtcaccgcggacaagcgcttcagccgtccccgacgtcgacgaaccaa

SEQ ID NO: 3383 - DNA, 491 bp, Zea Mays
agtacgattttgtccgagtttagagaattcgccaaatcaaatcgttagtcctcggatttccatttcgagattcggggaatgggatgcgtagttgaatagcgtgtcgacccagtgtacattgctaaaaatctgaactcaaaaatatctgcaattttctgtaaagaaaatgaagaaaagaaaatcaaaaacatgaaaaaaaagaaatccagtcgtcttctctctctcactgatttttctccccgcgcgttcttatcggtctgcgccgctcaagttcctggaagaatatcccgccgccgagctcatcctctgctctccctgctcaccggcagaagccccagccgagttccagccgtcggtcttatcccgtcgtgggatatttcctgctccctcctctgccttgtctcccacgcgcaggcttcttctccacgcgtgctctctcctctcttctccctcacggtgcttcgctggccagcgttcttccaagccgtgga

SEQ ID NO: 3384 - DNA, 529 bp, Zea Mays
gtcgagtctatacgcgttaggcgttccttaaattgtgattcgcaaataagtgtattttgtgtagtgtggattgattgtgagtgcatgtgtcacaagaaaagaattagtgcgcatataggcgatgaatgggtgtgatgaattgatgacatgctttcgtagtcatcatgtcgtctgttggtgacctaactgaaggtcgtagagaaaggtcgattggttgtgtgttattattgtcaccttgtggttctgtatgaattgcaacatgaagtagtaggctctatatgtgatgctagatgtctaggtagacgttcgggaattgtggtgctcggaccgtcgagatgaaggttaagtcggtcgatgccgattaagtagttaaaatgattaagggaataatcatggggttaaactagaaactagtgttctcgcacccgtttgggatgttgtagtctaaatgtgtatgtttatggtcgtggatgaaaagtagtagtgctcaggtgatgtctaaattaaaatgcaaactattggtgaaaag

SEQ ID NO: 3385 - DNA, 290 bp, Zea Mays
accaggccaccttcactggaaccaacagcggtttccttcggcatctcccaatcgttaacaagaggccatagcttgaaagcaatgtgctcatggaccaaatctcgggtaccaatgtagctgcacacggtgttgaaagccatcaaacatgcttgagctttgttagcatccgcgatcgaaggtttcctgatgccgaaacgtgatcgtatggggcgctggattacgtccttcacatcctccctctcactcaaatcatttttaacataaaaccattgcttcatccatgaacccga

SEQ ID NO: 3386 - DNA, 411 bp, Zea Mays
actcgaattcagcccctgactggtgcaaggaccacctgccctatgtcgtttgactgggtcatggggataatttaacaaactcagctctagaaacttttagaaaatgggttatggattgctccaagcagtggtgtcagttgattttgatgaaatttgtcactgattcgttatgctgaatggctgtagaggcatagagggctgcgtaatcaaaggtacagggctgcgtaatcaggaaggatatgccgagcaattgaaaccgctgcgctaactgctgaaacgttgtcttatgtatgccatacatgtgctaatggtcacggtctggtgtaatgtgctactgcactgggatgtaattactattacacagtgccatattccggctgcccatacttgataaggaaacaagttttttca

SEQ ID NO: 3387 - DNA, 1238 bp, Zea Mays
acaatattcagtatttttttgacaccctcgccagccgctcagctctcgttcatataccttcccttacacaacccactctaggcccatgtaacgcacgttcggacgcctggctcgatggcccaactgctgctgagaactctcctgttttgccttgtcggtgtcttcgtcttgcatggcatgtgttgtgctgacattcccctccccttgagatgtcgcttgcccccaagcggctgcatgaggaaactgttgtcgaagagcttcatagtattcccaagtgtcgagggcctcatcgaacccggaccagcggacgaggacctggtcgactgaacgtccgccgcgcgagatagtacgccggtccaacacctgagctggtacctggttgtccacatcatcatcaggtaaggtagcactcaccggctgggacagagagatagcacgtttaagctgcgacacgtggaacaccggatgcaccatggatccctgtggaagcttgagtttgtaggccactgatcccacgcgctgcaacaccggaaagggaccaaagaatttgaacgacaacttgtgatttgccctgggagcaatggaagtctgaatatatggttgcagtttgaggtacacaaggtctccaacagcaaactgcctctcactcctacccttgtctgcttgttgcttcatacgaacttgggctcgcagcaggtgctgtttgaccactcggagcatcacttctctgttggacagccaggtggacaggtctggatcagttatagtgtcagcaggcgcaataccaaagtgtcgtggtggtcgaccatacagcacctcgaatggggagcggcccagagcagaatgaaatgttgtgttgtaccagaattctgccattggtagccaatgatgccacttgtgaggacaagagttaacaaagcagcgcaaagaagtctcgaggcattggttgaccctttcagtttggccatctgtttgggatgatacgaagtgttcatacgcaattgcgtgcctgataatttgaaaagttcttgccaaaaggagctggtgaatatacgatcacgatcagagactatcgctgctggcatactgtgaagcttgtacactgaggacaagaacactttggcgaccttggatgctgtgaatggatgaagaagaggtagaaagtgtgcaaacttggaatatttgtccactaccaccaaaatgcaattcgcacgagcagcacggggtaaaccttctat

SEQ ID NO: 3388 - DNA, 364 bp, Zea Mays
cgcggcggatgaatagcgacttggcggagctcacgtccgcaagctcctgaggaaggaaaacaagatatcacaaagaatgccctggtcacgcaagtgtacgtctaaatccttacctggaaaaccctgggaacgtccctggaaaggatttccatggtcgaccgaagcgacctcatcgccacctcggtatactcacggaaactatcccgagacttctcctccaactcatcgttgagggagaggaggagctccgaggtgccgcggctccagaaccgaagcggctgcccacaccactcattgggattgagctgcgcagggataaggctgctgctccccaggacaggccacggttctacgcgcccctcca

SEQ ID NO: 3389 - DNA, 491 bp, Zea Mays
gcatgagttcaccggtgtttgcccagagaacggcgtgccagcggcagtgtaagtcccggccaccgcggaccagccactccagccctcctccactccatctgacccattggctagcttccccggagctcagtgaagctccccgagctgcagaccggacaccacctcaccggagacgtcggattgacgtcgctggacttcaacggccgccgtcgcacgtagaccgagccacacggtaagccattcgtcgattccttgtgcctacggcatccttgacctccaatgaagctccccatgctatttaattgaactataccgccgtgagcaggccagagcgcatgccgccgacgagcctgaccgcctgcgcacgctgccagccctattccggccatcaccgtcgatgatccgccccttaacgtgaccgccaggacctccgaaacctcacccagccctccaccggacctctcccgccgctgataagccgcgtcaccctt

SEQ ID NO: 3390 - DNA, 338 bp, Zea Mays
actgtgcatccaaggtgagcaggtatgcagtgaggtacatgactgtggggtcgtcctcaagcaactgctgctcttccaatgcacgcatcctggccatccaaactggatggtctctctaaaagggcgtaaagaatctgagtggggtgtcggccacttcttcatagatttgacacagggtcctcaatgccttgcgagcgatgacttggcaggtgtctttgaatctgtgccccgcggtagtgacactctattccacatggtgcggactagatccaatgtatacagtcacgacacacttctctgtgccatgctcgacgaattcacgaccatcatactctggc

SEQ ID NO: 3391 - DNA, 580 bp, Zea Mays
gtgtgctccatctgctgctgatcccaatgggtgtgctccatctgttgctgatcccaatgggggtgctccatctgttgctgatcccaatgggggtgttgcctgtgttgctggtgaagacgacaggggggaagaagatgaggtccctctgactcgaaagaacagtcggcagtatgtcgccagtggtgaaagtagtggagttccttctcctgctttgtctgctctcattggtctgcaagaattgtccctggcgaattttgatcagactcttgaggatatggttccagaggatctgttatccgagctggcagatgatggtgtgatggaggtttgtgctgatgtgctcgacgctggattgaggtcatctcgtgcctcatcgaccttagagtgcggtcccgagggtcaggagactgacttggatcgtcctggtcccatggaagtaactgagggtccatcagccttagaggcggctactgcagagaacttggttctcaaggacggtgttgacacttgcccagcccccgaggatgttgccggggatgactcggcttgggtgggaagcgcaagccactgcccagccccc

SEQ ID NO: 3392 - DNA, 692 bp, Zea Mays
ccggggtcgagatgatcgggcggcgagcatctccgagcgaagatccttttgctccgggtaagaccgccgcggtggagggcactaactccggctgccacgcggccatccctcctcccggccgtgtccgatcatcggcgccgctcaccttcgttcctccacgccgcatcgactcggtcgtgttactgtcgcagctgggacgtggcaagccgtaaggaaagggtagcgcttgacgtcgccgttaatcgccagctatggccggcaatggttatcaccgtggccatggctctgcttcaccgcgcctataaattcaccccgtcctcgctctcttcgctcaaatcaaccgagctccgaccttcgtctccgaattgcgaagccatagccaccaccctcgtctccgattagcccccatagccagagaatcgctcactttccccaattcggtttccgccaccgcgaggagtacctcaccgcggccagcccctttctggtcagctcattctcctctcttcctcgtttgagccttctcataactccatgatgctagccgaaccaccaatttacacgaagtagccttagatcgccgggaacacgactgtcttgccgcgatgttcacggccaccgtggccagagcaagccattgggccatagatggaattaggttaggggaaatgctcgggctaggtccaatttga

SEQ ID NO: 3393 - DNA, 396 bp, Zea Mays
aggaagcagagggcagcggaaggaaggcctggatcgaattgatcctggttctccgataccatgtagagagttggtttagggggagagcacacacacccaatcaggggggtgacttctcatatatatagccaagtggtctggtgtacagggatacaatctcctaaactaggaaggttatcacctatacaaggtatggctaaactaggaaggttagtcacctatacaaggtaagacaaccggctatacatatatgcctaatagacacacttttccctaggccaccaaacaatgccctccccttgctttctttctacctctccatagaaaaccttttcttatcttatcaattgcatctaaggcccattggggaatgtcaattgccattgctaaataatc

SEQ ID NO: 3394 - DNA, 353 bp, Zea Mays
cactgagttcgttgtcgtcaacacccctttacgcgttgtagaggtcattgcctatctgctggcggggctcccaatcgattacgacccattcgttgcctacataacgatcaaggctgagctactcttcctcgacgacatgttcgtgcacctagttgtgtacaacttcaacacatggccatattacagatgcaacacactgcctttgccaacttcttggatcatgacaacccctctcatggtagtgtctttggtgaccatggccacggtagacactctcatggtgattcttgcggcaataaccctcgtcctcaatgctagatttgtggcaagcttggccacacaccaccatcaag

SEQ ID NO: 3395 - DNA, 565 bp, Zea Mays
cttggggtctattcgcgtacttcacatttcgacgacgtttcagtttacagacatatttagttatttaccaaagggctcccagtttctatcttcacgagtttgggtccagtctcaacgtttgtctcatcgacacttgtgactacagggtggtgttagactagcatattgtatgagtacacgctaggtatagcaggcagactcgtgtatatagtagactgccatatatgatgtgtgcatgtatgatgtgggtatgtgctaggtataacaggtgggtccttgtatatggttagcgagatatgaggggatctcgtttggttctgtttttataagatactcctctctctccatatatacatgcataactaagtgctaatcatcacccggggtgatggacctcatggtctatcacctgtactaaaaggttcatcccaactaattaatcatgccagccacgcgcgattaatcggagcagtcgtgcgcgattaacggggtctgcaccagggaaatcaatcggatcagggaaccaaccgcaccagtcacgcgtgattaacgagactgatccgcc

SEQ ID NO: 3396 - DNA, 432 bp, Zea Mays
caaacccaacagagaaatttactagcaaataaaagtccttggatttgatacatgacacagtgtgacacggtacatgcacacacgatcgagttccaagttagctaggactaggtacgatcgagcgaataggacgcttagactggtctacgcctccagctagcaaaggctgtaaactaacccactgtttagccgctgatctggtctacgcccccaggtttggcaaggaacagaagatggtacgtacatgcctcctccaccataccctctccgatgatcatcttggggcaaaaaaaaatctggacgagaaataaatttggacggacaaatcagcgacataaacgaaaaatctggaaagaaaaaatcagtgacaaagacaaaaagaattgaacgtctaccatagggcttgaactcaaatcagtgacaaagacaaaa

SEQ ID NO: 3397 - DNA, 459 bp, Zea Mays
tactagttcaattaactagtggcggtgcttgcatgtttttgggggcccttggattgctaatgtaatattgccgtggattttgaaaggatcggggcaggtttgggtggcaaaggctttaaaatcagtttggattgagctgcaccaaattagtttggattcaagtagggctggatctactccttagtattctaggattgaagtggggttagggccggattgtgacccattcccagacctagttgtgcgtcaagatgattttagcctatgaaaacgtgcgtggttcccctaaaagctgattttggtgctgagttttttcacaggccgctggagttgctcgcaaactcaaattgattctctcggcttgacttccaccggagtcacagaagaccttcctctggttgtccactggtcgaactcatcgcaacagcctaggcccatccccgatacacttcctcttgc

SEQ ID NO: 3398 - DNA, 406 bp, Zea Mays
aattggaacaatctgaagagcatcgtcgggggttgatttagctccactagcagatatcagaattctggcatccggctcgccgacctctaaggtgactccctcgctcgaagttaaagaagtacgcatcgctatcactccatcagatcgtggtggagacgacccgacgtggacgtccatggaggtgtgggaaggagagctcgctcggacaccctcgggggctgggtggcagctcgcactacccatcggagccggatcactaccggcaacaccctcgggggctgggttgcagctttcgctacccaccagagccggatcattaccggcgacaccctcgggggctgggtaaccgccagcatcacccttgggggctgggttttctacaacggccacctctgaggctgaagga

SEQ ID NO: 3399 - DNA, 545 bp, Zea Mays
tctggatctccatctctgtaatcctttgtgacaaagtctttgaatggcctaggtcaaaattttcctggcctggcccaccagagtgcaaaaccctagcagaagacgagccaacactattctccaccacttgggcggacgatgtctagctgccgtgcggcggcagcaacattgtaccaccactatgaaggggaggcacagtagcgtacctaggtcgatggcgagttatagtatttacatgggccagcacggaggagctcatcattggtctctttgccaacaactcgacagcagcaaaggcaatggcgattgagcaacagtggcgaggaagcaattgcgaattcgaaagggacgtgtcataaccaagcgacaaggcaagcagcattttataccagcaccagcacgcaatagtgtagcctcattttttcaatagtcacatccagcggccccctcgaggcgattcaccaggtgatcgagggcagcgtccatcccattctaaatcaagagaatttgggaatggaccattgggatgaaccactcccttgggg

SEQ ID NO: 3400 - DNA, 554 bp, Zea Mays
gacattcaaactgtgcattacgtacctcggcgcactcagatcatctctgcatccttatgtaactggcgtcatgaaccctatatgaccacggttaaaacgaggcaatcggtctggcccgccggtgctacatgcctcacttgactcatgggtgatctctaagcccttacttacacgaggcaatcaccttaagtcacccttcgacttatgggtggtgttacatgccttcgtcagctcttgcagggtgaactcaggccctacctcgtgaggcaatcggcttgagtcgtgtcgccgactcaagtttggtgctacatgcccacgcaaaatctcgacagcgtaactctagacccttcatacatgcagtcggcctggcccgccgacgctacatgcatgtcgcttactcagtgaagggtgcctctctcccctttcccacgggcgttacctgccctcacgtcctcataaattcatgttctcaaggtgcagactcagatgtcggatttccatagtagccgactcacgggctatcctaagacatcctcgttagctcaagggttatg

SEQ ID NO: 3401 - DNA, 303 bp, Zea Mays
gcggaattttccaaggaaaggtagaatcttacattcaagctcttgttttccattgctcccctgcaattaacagagttacctttatcaacacggtttgggtcatgctatattgtacaactgggcgattagcttgttaacatttaaccaaagtatcaagttccacaagttaaacccacacccgtatagagggggggaaaaggcagacccagtgccagaggctcccacaggagggcttgttcggttatttccgctccacatggattgaagtggattgggtgggattgagatgaattttgagttttt

SEQ ID NO: 3402 - DNA, 594 bp, Zea Mays
gcgtggcatgttcctcatcgttctgggcaaatatgcccttacccgccacgttctggaagacgacgccttccctgcgcgtccggcgtgggctcaggcggactgctgtgttctgacgtggatctacggcaccgtctccaacgacctccagcagtccctaatgatgcgacaacgtcctgcgcgcgaggcttggcgctacctcgaggacacgttccttggccagaaggaatcccgcgcgctcctcctcgaaacgcagttccgcaacctccggcaggactccatgagcatcactgactactgtcgtcgtcttgagtcgatggccgcttccctcgccgaattgagtgatcccatcggggatcggcagatggtgctcacgcttctccgcggactcagcggcaagttccgtcacatggtgtccatcctcaagctccaccagccgttcccgacgttcgcgcaggcccggacacacctcctactggaggaaatggagatcgacaaccgtccaccgtctccgccatccgccatcgtcgctacagctcctcgcccagcgacaactgggacgccagcacctccacgctcggggacgcctcccaccac

SEQ ID NO: 3403 - DNA, 447 bp, Zea Mays
gggaaatccgaggttctcgggctacagtagatgaaaaggagtagcggatggtggattgggtttgtaacaaagaggaggagctcacagtgtgctcaatttatagggatcaattgggaatatcacaaatttggacaagatcatgtctaccggagcgattggataactccttggagctcgtgctccgtggcgcgtgggtagcttagtgacttgggcaatatttttacttcctaccacgcttactacgatgtggtgaaacatatcgtcgcgtggcgcagcagcagtgaacggcgacctttggcgatgacagcttggtcggtcatggaacaagtgggtatggtggatccaacgcatggattcatccccctcgtgatcttttcacccctcatgtaatatccactccaagccctgcacgaatctccacaatgagctcgaatcattgtgcaagat

SEQ ID NO: 3404 - DNA, 630 bp, Zea Mays
cctacaggtataactttcattctttccattaaacaacttgttgaagtacactagccatctgtccttgatctccttatccttcaccaaaagtcgatctgcctcatccttgatgcatttgatttggttaatgtcccttgtcttactctcatggattctagccatcctataaatgtccttctctccctcctctgtgcctagccgttgataaacgtcatcataaacctacccctgtgctacactcatggctcgctttgcaaccctcttcgctatttaatagccctcgatgttggttgcgctcttgtcaaggtggaggcgcttgaaacactccttttccttaataactctttgcacctcgtcattctagcaccaggtgtatttcgcttcctgtttgcctcccctactcacactaaacacttataaaagccacctttcaaacacatgtaaccatatttagccacgtgtcgactacatcttctccttcttcccaaggtccttcgcctagcatcttgttcttaaatgtttgtgccacttcccctctaagctcccaccacttcgttctcatgatcttggcacatttgtgatggacacgtacccaaaaacagaagtccgccgccacaaccttgtgtagag

SEQ ID NO: 3405 - DNA, 516 bp, Zea Mays
gagaaatggttctatgtgcgctacgtgggagacgaaggctggtcttgacccagtgtgatgtctccttttgaatttgaggccttccctcgctttgttattaatgaaaaggactaggggaaccgtgctttcaggattgttgtagttacttgtagtggcagagacttggtggaagagtttttggcgtgtggcgtgcaaccgcttagtcgtgggtggtcggtcggggttgtgacccgcagagacttcgatggtttttacaagcagattttgagtgtcgcggagacagagatggaggcggaggactttgttggttcggtaacggaggctgagattgagaagggtgctgctctacgtgggggccacatccacctcaactgtgtttttagcttgatgggtctcgagtatgaggagcacaaggccaagccaaagagagggaggaagacgtcgaccggggttcccgcctaatcgcagacatcgactgagacctcgtcggcctgctcaaaggatgtggatgtgtgt

SEQ ID NO: 3406 - DNA, 350 bp, Zea Mays
aacgacataaccaagaactcgtagaggtcgtcgtgggtgcggaacgttgtcttgtggacgtcctccggccgcattcgtacctggtggtatcccgaccgtaggtcgagcttggtggagaagcacgcgccatggagcttgtccaggagctcgttgacgactgggatggggaacacatccttgatggtgagggcgttcagtgagtggtagtcgacgcagaaacgccacgagccgtcggccttcttgacgaggaggaccagcgaggagaacagcgagtcgctgcgactacgacgaacgatcccttgtgcgagcatggcggcgcactgtcgctccagcttgtccttgtgggccgc

SEQ ID NO: 3407 - DNA, 568 bp, Zea Mays
tggtgctgcgattgcggggttctagtcgtgttgattggaagccggatcatctgtgtgacatctccaccaaatcgatagttatcttcacctgacggaagatcgggcacccccattcctatcaagtggtattcaaagactcaggtattaccgtcaggcttaccctagtttagtttaggtttttcatcctataactccagataattgccatacaaaaaaattctgctgtcctagaatcctgtttagccttgcaatttcatttcagattgctttgttgagtttgtgtctgtgtcgagtcttgttgcttgtttaggtcgtgtcgtcatcgtagttcaaccgctccgtcgctgttatttatttccgccgctatcccatccacctttcccagattacaagtcgagacaccacattactcgatttgccctcgctagccgcctagtgtgaactctcgccacgctagccctagattaggttgcaagccgcattgcattgcagcccctccttgtttcatcatctcgcgcttacctattgcttataccagggaggtttgtgcccctgtgctctatagctg

SEQ ID NO: 3408 - DNA, 1053 bp, Zea Mays
gccgtaagtagtcatcgcttcctctataattataagttgagtctatacgcgttaggcgttccttaaattgtgcttcacaaataagtgtatgattgtgcttatgacttgaatagatgtcttcgagtgaactgataggttcctaaggcaaatatgtgtaaggtgtttatagtaacactttatcccgaaaggtgttaagcctgcgcaaaaataagagataagtgtacttgttttatgcatgtgatcgacgattgggatagtcgaggcgaatgaggagtatgattaatccggttagagtcactatgttgttgatgccttgtgcgtaacctggggcacgtatgtgcgtgtgtgccgtggtgtattatagtggtggtggcataagatatttgattgagatgtgcgggtatatgctgtgatatggttatactcgcgatgatggaggatgtatgccttgggaacgcgacgcttaggtcgctgttgtataatcgaatgaaggctgtattgttgagcttgaatcaaaatgtgggaactagtggtacgctaggcaggcggtgttccaaataaataaatcggttgatgtggtagttgtcgtgcatgatttattgttagtgagtagttgaattacgagttatgtgaaaagcatgttagaaactagtgtgcggcgtgaaactgtgttcgtgtggtgaatgcgttaattaaatgtgtatgttagttctcgcgcgtgaattaacttgtataaaaattagtaagtctacttgttagttctcccttggttatgttaactctaacaaatggtaaagtgttagaataattcaagtctctaaaacacgtcaattcttgaattatatagaagctgaaatttgttgattgttgttttggactgcacgcactgtttttgtcgtgctgtatgtttgatgaactaaattgtattttctgtagatatgtgctataaaaaagtggtagataactttattatcttactggtgttaaaatttgacaggcataagtctgatcgtttaggagttatgatttttgcaaattcagtaactgaatctg

SEQ ID NO: 3409 - DNA, 993 bp, Zea Mays
tgttgagttgcacaccgcaccggagggcgacaggattgcatgccgagcttcggtcccaggacgagctcgtggaaacggagcacgcagcaatgcgtggacggcgacacgtgtacagtgtagtcagacggatccaacatgtcaaacagtgtccggcaccgaggtcgcgtggagatggagctgcggccctgccaccgccatgtgcggcacctcaaggctcgtgaagtcaatgaaaccgctagattatctttcagcaaagacgattttttttaactaaagccggccagttcagatcgatccacactgtacttgttcagtagtcctagctgccgcgcgcgccgagcagtcaaagcgtgtggatttggatggcagcaggaactcaacgtcgtgccaagccattgcctgcagctgctcgtctttactttggttgtccatgccggcagcggcgaggcaatcgagcgagaatcgtatccatggcgttgctcgcgcgctcgtacgtgtgtgtgtgcgcctttaccgcacgcatagttatcagtgacactgtactagcgtgcatttttcttccgcgcttggtttcgagagaggctagggaagacttggaagcatcggcattgtggttgagtgtagagcgatgcaatgcaaggcggtccggggctgatcgatgaagctttctctcctgtctcggagagagcgaagtctgtcgggcacacaggtctggtgctgcatttttcaattcaaggccgagtgtctgtacctgactttaccaacttggaactcaactagcacgagtccgctcccggcaaccgaactctgcacgcaaaggaaaggctcctcgatcgtcctacacagcgcctttgggattgcaattagctagcaaatagttgccatcatgccctactcattgacagctgacgtccaatccatgcatgaaagaaccaccggccggcctcctcacacctcaatatgtacatccattcggctactagtactgctccc

SEQ ID NO: 3410 - DNA, 1052 bp, Zea Mays
aattaatgtacttagtcgctacatggtacaatagctgtaatcttgtgaaagagcaatccgatgagcttacgaacaaaggactcttgcaacagtctttcctctcaagtagccgctacgaagtcgaataaccatgtgctatgtgcagggccttcaacctcttcgtcagcacctccgcatcgtccgattccggcagtcggccgcccatcgtctcttggacacggcaggcgcgcttccgccctacgtggagtgtgcctaagctcttggccagcgccgcctctgcgtcgcacacctgatccgcatccggtcggcaagtgatgtactcttggatgaggaggcggcgattctggaggcaccgacggtggcgcatgatcgcgtcgatgtcggtcgccgctctcatcttcactaacgccacgtgcacctcggcgatctccttgaccttagggctccagtagccactttccttcgccatactgagcagcgtgacctccaactggatcgccgcgtcgaggcgtgcattgatcgtctccagcaccccgaggatgcccttgttggcgacgtccggccgaacatccgcgcacgcccagtagtccccccgtcccccgccgtcgactcgtgctaggtgaagcgtgccccgcgaggcggtgatgctcgagcgagcgaggcggtactgcaagttgctgctctgctccgccgaggtggcattcgtttgatcttggcccccgccgccgccgtagaaggtgtcggtcaggctaatgcagcagtgtgtggggctggcgttgacgctgagcatcggcgactcagggtcggcggggtccacgggctggctgacctggatctggatgtgcccgtcgctagaaggcggtgcctcaggaccgtagatctcaagcaaggcagagtacgtctggtctatgatgatcataaccatgctgtcgaccatattccgtggatgatgctagtcgccaaacagctcctggacacgcggacacgggggcgccgtcgttattgtcctcgcgctcggtgatacggtaagacgtagggtaaacgcgaactga

SEQ ID NO: 3411 - DNA, 293 bp, Zea Mays
tggattattttggatgtttccaaggaaatgactatctgtactctaaagaaaggaaatgcattactttataattttgtccatgaaatttaacacctccttactgacattgccatcatttgtgagatattttcagttctgaagtaatgtgctgagcaatgtttggagcagtagcttctacagttacatgtgtacctactgaagtttcaaatttactgcacatatttagattgcgttgtttgggccctcaacatttcaattggttttggattgattggtttaggaagacatgtttt

SEQ ID NO: 3412 - DNA, 390 bp, Zea Mays
gcaagagcatgaagaacacttgaggaaagtacttcagaggctacgatattgtcaactgtatgccaagcttagcaagtgtgagttctggattagtgaagttctgttcttgggtcatatcataaactgagatagactatctgtggatccaaataaggtagcagcgattctgggctggaaagcaccaaaagatgtctggggaaccaagagtttcattggaatggttggttactatcggtgtttcattgaaggtttctccaagatttcccggccaatgccagccttgctggcaaagaaggttgagttcaagttgacccccgtgtgccaagaatcatttgagatgttgaagcagaagttgacaacaacaccgatattggttctgccagatgttca

SEQ ID NO: 3413 - DNA, 450 bp, Zea Mays
tgcgattcagttaacaggatgcggccgcgacgcggaatggccacatcgcgaggggaagggagcgcaatccacggaatcccatggttccgggtccgtcactgcacagggaggagggagctccagcagagctacgacgcgcatatacgcgccagggcgcggagtccgccctgtaattcatcgcacacgaagcggagcggagatagggatgagggcgaggaaggaggggattccctgcccagccgcacagagaagaggaggatttggtcggcagcttagagaagacctcgaccggaggtggtgaagcggtcgtggatccgttgaccgagcccgcaaagtcccaacagccccgggcgaatccaaaccatccccgaagcatacgcgcgacaggagggagccaatcgattctgtttgcgtccatgcggggttgggggcgattctgacattccggcc

SEQ ID NO: 3414 - DNA, 858 bp, Zea Mays
aggcctggcgaaaaattgaatctacgagatttccagtatcctgtaaataacgtatctcatatctctggatgactttattgctgaccaacctggtggatctctgactactggaggtaatgacaattatatcggtccatgatcttcctgtttcattgtttcatggatagaagatcaaaacgaactcagaagcacataaatattgtgaatatgcatgtatttttaataggatagtgatcttcagctggaaacttgtctgatcctgtttctttctctactatataaagcaacagttttcaccgtcatctgctcccctacacttaaatggtaaaaaagataaaattatgcacaaatcgggattcgaaccatggttgttggctctaaatctatatttaggcccacctaaccaacataacacacgtcttttgctttatactctatacttatattacttataaatagaaactgtagcgacgcacatgcactttgctagtatgcaccgatgtgtcactaacaaaccttttttagcaacaaagccatatattcttgggctactgatgacatctccaaggaagtgattgctatatacatgtctgcacaaaatacataagctctcttaataatttgtatttttttctgaaaggggttgaacgatgctcccccccccctaactccttgatatttatgataacatcctctgatcactgtttatattgtcatcaggatgcaacagaacagagtgttgctgtggattttataatgttggaagtagaagctgcattcatgtgcgatggtgcttctaaaatgccaattcttttgtaaacagaatttgtgatcttgaaaactttgtggtacggagat

SEQ ID NO: 3415 - DNA, 467 bp, Zea Mays
gttgggtggtgtggccatctgtcgcagttttgaccaactccggcgggcgcaccgccgtagctccaacgcgccgccgtggtcaaaccacctggggtaggggataagcttgcaaccatcagatctatgatggatggctgcgattagaagccccataccggttcggctgggatagatcgtgaccgcagatctgctagtgggtgggcaaggatggtctggaaccgtataaaattctaagcgttgaatcaagatctaacggcccgggctgcatacctgtttggataaaagagatctaatctggaccacagattacctatcgcgtgactgtaatcgtcccatacccctttgcatggcattcttacttatgagcccctcggtttattccaaattaacctgtcgtccacgcggggtgaatatgggtcttgagaaattttgcgagttaacccctgcatttctctgcttttgacgcc

SEQ ID NO: 3416 - DNA, 510 bp, Zea Mays
cacctggtgtacgtcgccggggataaactccggccgataaacaattccggccgccgtaccctatttatcgcggtggaatccgatagctcgccggtgaaccaccgcctcccggccttgcgccgcgtgtctaaccctttctaccgcatcaccacaacctgctctcgctctccgttgatcaccggagcgattgccacggcgttggacaccaagccattgcgccagtgacctctccctcctccgaccgccgtgcgtcgtcgcccaaattcgcggccaccgctcgtgggctctataaattgactgcgccctcaactccgtcatgtaatcaagcagcttctgcacctacctgtaccccaaaccctccaccagcgagctctaattccggatttcccccaatttgggtttccgccaccgtgaaacgaacttcaccgcggctagccctttcccggtcagttcatactcctctctccctcgtttaagctttctcttatgactacgatgcttgccgaccta

SEQ ID NO: 3417 - DNA, 609 bp, Zea Mays
agctagagcattgttcgtggccactagaacttgtcgatccttaagcttttgttgcctcctactttcttgtgctccgtggcctccgaatatgacgttgaccatcctgtcaacgcgagggaaagatccacctctccttcctactactaaggctacctatgttcgccatgctctcctcggggcgggggaggtggcaatggttggaacggtcagccgtgcccgacggagtttttgaaatctctgcagttctgtagggtgcgttgcatgtccttgtgatacgggcaatgggaattgaggatctcatccagtgtttgtacccctccacggggcgcgccgcgggctcgagcagtaggtggtcgggtagtgtgcacctcctcgcgaggtctcttttcccagtgtttgtctggttgctggttcgtgtcccaccgcggtgtaggcgacacggactttgtgcctccaataaggtcctgggccctctcgttcgtggtgatgtggatgtccgcccccctgaatagttgttcagaggtggcaggtgctttttgaagtatggcccagacgccgggttgttggatccctgaaagggaaatgggcttaatcatttcctataatcga

SEQ ID NO: 3418 - DNA, 895 bp, Zea Mays
gttagaactcagaattgaatttgtttgaagattgaaattgaaacttgaaataaaatgaaataggaaaaaggaaatggaaaacataaaataaaaaaataaaagaaaaaggaaaccaccatctgggctgatttccaccggccggcccagctgcagttcattttgttgccccagcccaccgtcgcattcctgcggatggcatgtgggtcccaccttgtcagctcattcctctccatcctaacagacccgcgacatctccaccgctctgctccgtaacaaaccatagctgcgcgccggggtcggaattctggtaaaccaccatgcggatgtgactccaccttgctgcggatataagtaccgagctcgccccccgcctcttggccatcctatcgagatctgaccgcctcatattcaccaatcgggagagagtgagaatcgcgcgatggcgtgtgaactccggtccgccgtccgtcgccatgggaggtagaacatgtgccgctgcgggtgagtgtcctgccggtggccccctctgccaggtcgtcgtccccaacagaacgcgcgcctgcgcgggcgaaatcccatcctccgccgcgggagcagccgggcccagggattccgtgccggtgtcgccgtcggggtaacatgccatctccaccgtcggtgccccgctggcagaccaagaagcatcgccccgtcgtcaggaacgtacctgtagccttcccgggtggggaggatcaccggaccacggacgatttctcaccggagacaccaaggtgccgccaactcgcgctgcgtcgtggacgatggtctgtgagtcccgattcctcggttagtgaccctcaccgtgctcgttgtgttcccaatcgcgcgtaccacctattcgatttggggaatcctc

SEQ ID NO: 3419 - DNA, 807 bp, Zea Mays
tcgtggccatgtcctctggttgtgttggtcatgctgatcgcgaggacctcacatggggcatggtggtcgtggggcttgaagttggtcgatcgacgatggtgaccacttacctcttgtgtggttaggggaagttcctgggtgatcgcctcttcttcctccagttgtgggggcgtgtggctcgagctcatggttggggcaccccttcgcttggtcactaaagattgtgctaatcaactcttttctagacacatggtcacttgtgatttccattagctcggcgatagccttgggcctaccacaacccatattgtgcaccaacgccttattgggcggtgcagtagatgaatgacccgacaatgatagagtcgctcatgctagacagttcattgtagcacttggagaaaaaatggaggtagtcctttaggctcttgtttgaccattgcttgtagctatttaagtcctaggggttgccttgatgttggcacattccttagaatttcctacaaaaactttctctaggttagaccaccctagatacaccctttcgggaggtactcaagccaagctcaagttaactccatgaggtagatggggaggtactagatgatcatcatgtcattgcttgcccctcttatgcgacaagcaaggtggtagtgctcaagccaaacgatctggttggtagtcgcattgtactttgcgatgttggccgacatatgaaattgtcaggggaactcattggtgcagtgagcattgccaaatgtatgaggccccgattggaccttctcactatcatggttgttgcccgtg

SEQ ID NO: 3420 - DNA, 383 bp, Zea Mays
tgggagctccagacttgtacgcacaggggtccggtgtcctactatggaggtccggacccaatgatgcatcctgggatgtattacctttccttgccacgtggtgcctttagacctgcccatgtggtggggtcgggtgccgttctccgtgtgaccgggggacgccgtacatgtacagcgccttcatactgtagaagagggtacccctgattcagggtaccgaaagtggcccccgggcctgcctcaggggaggatgcgagcctgcaggtggggccaaagcttgattagcggttggcctgctgctccagcgcgcctgttgacgcaattactgccggtccgcctttggtcatgccgactgccacgcttattcccacggttgacggccc

SEQ ID NO: 3421 - DNA, 355 bp, Zea Mays
gctccgataccaattgttagaacactgacgagggtggataataatatacgtaagcaagtgtttggtgctgcaagcgacagcttttctggtgtctctccattcattatatagaagatacatgtagtcatatatggttacagactgattgaatcaatcacagcagattgaatcaatcacagcacgtccaagattatctgttgccatcccaacagtctagacatgcagtttaccatacttaaccactaatcaatataaactaccaaatatactaaacgtgtgctcagggtttattcctacacgccgcacgacgcttctgtccttcgctccctgttcccatgtcatgtagtgagtgcct

SEQ ID NO: 3422 - DNA, 350 bp, Zea Mays
ccgccggcgagtgggtcgccaggacgtgagcgtgcttccgccgcgaggagcaggtacgcaagtctcaggtagtatttcttctctattattttctcaactcctttctcaagtctgaagcaaaatatatataaccccttacatgggccggcccacacacacacccaatgcagcccataataacacctacgattccctgatcaccatacgacactcgcggcttcagacttcagcttcctctgcttccactcccttgctctctgcattctccatcatggcacccatcgtcgtgacaccgccacgccgggaggacgccatgttcagcgacaccgaccccatcacgtggcggccgc

SEQ ID NO: 3423 - DNA, 708 bp, Zea Mays
ctaccattagaccatctctattccattttgttattgacatgattgtatccttgcatcttttttaatacccttttcccttaatctaaagtacttacccttgtacctatatagcctatctaaacagttcagtctatgtgtccatgaccttcttgtcttctgagatcatttcttattctgttgttaagtcgctatctctcggcaatttctgtgcccttggtcttagtatgctcgtatctttggaatcttgcatactcttatattcttatgtatgcttattttcataccccaataactgttcaagacatttcagttgacatgtccttgaccacccctgtttcttaacggtccatgagcgatcatttcatgtcgcccatccttggtgatctcgttgttactttataacttctctcgatagtgagttcttacttcaaccattctattgcaccctcacctatcttacccttgattgttttctccacttcgccactacgcgagtcttcccttaactctatcatttgtcatgacttttgttattatcaccttcaccttagacatctctatatcttatttgaggtttatcttataccggcatttaaaatcttctccctttccatctcaatttgagcatcatactttacctacttttcccttggtcgtatcctcttctttgtcacctgcgcgttgttaactctatcctttgttgtgttt

SEQ ID NO: 3424 - DNA, 451 bp, Zea Mays
aaatgtgacgcctgtgcgctgtacagcagccgcgacggattattggttggattgaaacaataaatgtggttgattggtgtggtgccgcgccgccggcccccgcccctaatgcccggcgctgaacgcggccgatcgatttcaaatctccggctgccggccccaatgatcacgggcaaaaagtctgtcgccgcgtgcccgcgtgagagtcgtctctgcttcgcggaggatctctccgagagcgcatgatgcatgatcgggggatggataatcagttcaattcgtcgtcgtggtcatggaggaacaaccgacgatgcatggcatgcatgacctgctgctgctgcgagcgtttcgtcgttcggggggcgcatgcagtgcagttgtagtagactagtagtagtatacgaatacgaagagcaggcggcggacggacatggcatggctagcatgtctc

SEQ ID NO: 3425 - DNA, 410 bp, Zea Mays
gacatcgtttgagtcgaacgtaagtgggatgtgtgaccactttgtctggatgaccagttcgttgacagtaacatggtttatgctttggtaatattctctcctctgcctctttgtattgaagtctatgctcgagtctccactgatcacgtttatgatgcagtgaaccaaaggctgagggtaggcctcttcttcttttggcggcatcaggggtagcttcctttgatggtgcatcgattgcagaaggggtgggggtagctgtaatctttctaggtgcgctggtagctgttggtagtttggctggtactgtgggtagtggttgtatgcttcttgttgatgttgaaactgtgtactacaacctttgatggttgttctaggtagtcccctttccccttttctacatccatcctctc

SEQ ID NO: 3426 - DNA, 484 bp, Zea Mays
gtgaaccattgactaggtcaaaaggtaagagtgaaggcagatgcaaaccacgtcgtcaagggggagtgtggctagctacgggcttccaatcaatgctagaaatcgcgctctattaggaagttgcacaaggagttgtgttgaggctatgcctagtagatcatgcatatgttgaggctatgcctaacagatcgtgcatatgactgtgcaaaacattattttgcacgtttttgcacgacagactgtattgtttatagaatggagtttgaaataagagatggggatgagtaaactgttgaagatagcctgagggagtcgttcctagggcccaccagggaaatcgatggagtcaaataggggagtcgcaacatcgatggagatgggcatcaggtgactgtcgcactagggaggaggccactatgttgagggagaagcagtcgcatgggtgccacatcagggaggagtccgacatgctagaagaggcggc

SEQ ID NO: 3427 - DNA, 394 bp, Zea Mays
tccagagtccaatgcttgtttagaatggttgctgtctcactgtctgactgtttacttttattctatctataatttatttttcttttgtcgataaggaggctgtgggctgcggttgtgtttgttccattttcactttgttttcaatgactacaggttgcaactttttaagtgatggaatcagccgtggaaggaaaggggaggaatgcaagtgatggaactgattcagaaagtaattcgtttgacaagagggatgatatgtctgaagatgaactggtagtgcttggtggaaaaattgatgattcagcggacaatgtcaatattgatgaatctgaggacaatggaagtaaaaaaggagtcaagagaaggcgcaagagggtgcagatgaaggctacag

SEQ ID NO: 3428 - DNA, 379 bp, Zea Mays
ggcgaaacggagagtgagtgaattgccgtgaagtggtaggcgtcatcgtagtgagatggagagtggtcgtcttcgcgtggacgggactggtaaacgggaattgttgtcctcgccgattggggcgagtgtaggtgaaggggagctgcgaaatctttttgagggtgaggaattgaggataatgttgttcaactacagggagatgggtatcatcccgaaggttgagccattgtaatatatgatgccctcgctgtgtgtatgtaaccgtaatttgtatgataaagctgcgcgccttcgttgatatgagtcttttgtgaaagacttcgatctttacgtagttattgtgctgttccggctgcacccttaggcgacttttgcacgg

SEQ ID NO: 3429 - DNA, 662 bp, Zea Mays
accaagtaatatgagcagccagagatactagtaacaggggatgtctagacatcacaatgaactatctcaaaaggggaaatagtgtgggaagtagatgtactaatgggtagacgtgcatgtttgcctagctgacatgcatgacaaagagtgtagtctactttattacatgaaattaaatttttttctcttgagactagctaagactgctggaccggggtgacctaggtgacgatgccacacagaggaggaggctgcaaggagggcgctggcagtggactgggcggctggtgaaagtgtgtagaggtcgcccgagctattgcagcgaagaataacacgccccgtcccgggttccttgacagagaaaccaaaagcgtcaaattcgatagaaccaccattatcacaggtaaattgatgaacatatagtaaattacgaactatggaaggagcgacaaggatgtttttcaggacaaatttagcggagttgatgtcaaggattgatgagccacaagtcgtgacaggaatacgtgcaccattgcctactatgatcgaagaatcagcacttggaagatgagaatgaaggatacctttagaggagtgcatatgtgtagaggcaccagtgtccatcacccaggcgtcaccttgcagcgacatttgctgcagcg

SEQ ID NO: 3430 - DNA, 570 bp, Zea Mays
acttctagcagccaaaatatccactctctttgctcagcaaaacagataggggagggagcagataaggcctccacggagggtatacactatagtccaaggttgatatttcttacagcgtgaggccactaaatttgctgctgtctagctcatcccatcgcaggaccaacagacaaagcctcccagcttatcttccccaaaacagtccacagttgattttcttttgagtagagctgaggagaatctagatccttcactgtgtacctcgtccataattccctttgcacacacaagtgagatcagcagggacaggatcttcttcagttaatcaaacccaacactgaatcagctttatcaaccattactgccctattgcacagctctctgtttgatcccctttatctcacaaattcacttagcaacaaacccatcatccttaactaaatttagtcactaactacagccctaccaacttggtatagcaccccaaggctgcaactataaagaacacaagttatgggcaccaaactggagcccaaaagcactgaaaagtgcagtttcagcttaactgaa

SEQ ID NO: 3431 - DNA, 398 bp, Zea Mays
gtgaaatggaggtgcatggcatatctgtatttgaggcctatgggcgatgtaataatttccgcagcgccggcgcccgcatgacaccacacaccgtcacagtggatggtccaaatagtctctgtgcgaagctggtgtggctccgaaggccctgtccaatctactataaagtttgccaagacctaggatttgattgttgtccttggctcaaaggtgacgttggatccggagagttcagctgcccatttggctattctggcagatgcctcgggatttctgaataggtctcctagaccttgatctgtggtgaccctaactttgtgcgcctcgaagtagtgccttagcttgcacgaagccatgatgacattgtagtctatcttttctaactcagtcatgttgca

SEQ ID NO: 3432 - DNA, 828 bp, Zea Mays
cgcctaagggtgcagccagaacagcacaacaagagtgtcaaacgaagtcttttattcaaaagacagcacaacaattacttaaagacgcagccgaaataatgttgatcgaagtctatctttacaaccacactccgcacaaagccgcccacgtacgtagccggaacaatacaagcgtatgaaaacaaccaacaggccacaccaccattagaactacataaacacggcaagggcatcgcctattacacatacacggcgagggcatcacatattacattggctcaaccttcgggatgatacccatctccctgtagttgaacaacattatcctcaattcctcaccctcaaaaagatttcgcagctcgccttcacctacactcgccctaatcggcgaggacaacaattctcgcttaccagtcccgtccacgcgaagacgaccactctccatctcactacgatgacgcctaccacttcgcgacaactcactcactctcgttttgccaccaccctacgccgcctatacctagtactcgcgcccgggagcccctcggaatcctccacacgtggcgaaggctccgctgtagccacatctaacaccgcaaaataatccaagtcctcatctgaagactcctccgtccacgcaattgaactcccagaatcatcagactcaaaacacttagacacagagccaaacgaatcatcatcggcagccacagtcaaagccgccacaaacatagtattgttagtagcggttgcgtgcgcaggcccaaacctcagaacctgcgcagcaaccgaggttcagtatcacatagacaaaatttacaaactcct

SEQ ID NO: 3433 - DNA, 411 bp, Zea Mays
cagtcgttcccctccccactacgcaactgcctcacttactctctcccactggtaccgactgtttcatccaccgagttcatctccattaatggttgaccgcttcttcgcctccccacttcaacgccaaacgtttcttctcccctccccttctccattagccggtagtttcctccattaatgaagcactaatcgcgtcataagtttccacgccccgacgcttgattttacctccccagcctataaatcatgtgccatccaaccgtgctcgagttccatgcctccattcttcctcttcgtgcccgtacactgttgttgtcgtcttaatgccgcggaagctgttgtgtcgtcgccgccggagctcgtcttcgacactctttgcgtcttccccaccgccgacgaaagtgtccacgg

SEQ ID NO: 3434 - DNA, 645 bp, Zea Mays
tggtgttttacttgagtggacataaacacaatctaggtatcccttgaatagaggggattattggaaaccaggtatcacaaaaggtcattagctagcccaggtatcacaaaaggtcattagctagcccagtggaaaaaggtgccttacaaccttaacatatgtttggatagttctctctctcaatttggctaaattttccatagtctttattttattttgagaaatgatgtggcaaattgatgtgtggtgttttacttgagtggacataaacaccatctaggtatgccttaaatagagggtagtataggaaacctggtatcacaaaaggtcattagctagcccaataacgtcttcatccactagttaaactctaataccctctagtgtgaatacaacgcccacaatatcatagaaacgtcatttgaggtttaaaaggtgatctattgttttgaattctttatattccaactttttatcaactatatggtggaaaaaagttgccttacaaccttaacctatgtttggacagttctctcgtgcaatttggctaaatttcccatggtctttattttattttgagaaacgatgtggcaaattgatgtgtggtgcatccactagttgtactctaataccctctagtgtgaa

SEQ ID NO: 3435 - DNA, 469 bp, Zea Mays
agtataagtagcggcggccgcgtggtgcgaacaaaagattaattcatcggagctccatccctccctccctccctcgcaccctcctcttagcctagccccaagtgggcagctaaattctagccctccgtactcgaggctccaaggcaaacaggggatcaggaaacaggaagagggtgcgggcgtgcagcagaagcaagggcgctttccacatccacagctagcctcttgcgcttacggaaagatcagaggggcaggggcggagcgtctgttgcaaggacgcgcacgagactcgtaagggagaaaccaaacaagtagcagggagctcaatcgccgcggaggggatcgatgaagtcgccgctgcggaggttcaggggcttcggccaccaccacaccaaggaggagcggaggggccaccaccagccgccgccggccaagctcgacgagctcgtctgcgccgcccaggttcgtc

SEQ ID NO: 3436 - DNA, 637 bp, Zea Mays
gcaaagtactgtccaaagtgtaaatcatctaggttcatggaggtagaatctggtgatggatagaagaggcagctcgacatcccatgacaatcctacgccaccttccgttcataccaaggatccagcgtctatacatgaccgaggaatccacgaaacagacgacatggcataaaaatggaaaacgatacaatcctgacaagatgatgcacgcatccgatggtgaagcatgaaacactttgatgccattcaccatgaaaaagccgaagagtctcgtagtgtacgtgttgcgctggccacagatgggttcaatccttatggaatgagcgctgccccgtacacttgttggcccatgtttgttatcccaatcaatcttgcccccagtgtgtgctttcaaaggcagaacatattcatgtcgttgataattttcggacactcgaggaataaaatgggtgtgtatatggagcctttgattgatgaattagtatgtgcttgggaggaatgggtatggacgtatgattgagctatgaagacaaacttcaaaatgcatgtttggtaccagtactccatgcatgacttaccggcatatgggctattctgcgcctggtgtgttcacagtaagttctcatgcccaatttgc

SEQ ID NO: 3437 - DNA, 508 bp, Zea Mays
attttctaattacttttactgaattttctaattctctaaactgggcatcaaattctataaagtgcaggggctaaatcataaactttctcagactcagtaaacaatctgagtggacggcgggttttatttttaagaaagtcaggggctcttatgcataataggcgggcgaaggggtatcggccaacttgagtcatccgaacagaattgagggcccagattagaaccatgctttaagtgaatcggaacataatgtgggccacccaatcaagatccaacactccagatcagaccccaaactcgtatgccgtcctaaccattagatcgaggatcgatggctaggatccgacggacgaaagggtatgtggtggcgtgatgtcgtccatccaccacccatccgacggccaaaagatcatcttccaccccccggttgtgacagggagagggcaaccggagcactgccggcgagcagacgaccccacaccccagtaacctaatcgcgatatggttt

SEQ ID NO: 3438 - DNA, 325 bp, Zea Mays
acacgccatacgttggattggagatctacggtcagtatcataaggacacgtgttctaatccaagacgctagatctcaatcgaacgctccaccgcccttcctcccaatcggtatgccattttctaatctgaaccgttgtccacggatccgacggccacagacccatcttcccaaaccgagcacggtcgaagacacgcatcacgatggcagcggcgccgctgaccgcgaatctcgagcatcgccggggagccctaaacctaacccgatcttgtgtgaaatgaagagtaagaggtgatgaatatggaagtggtagttataccgctgat

SEQ ID NO: 3439 - DNA, 573 bp, Zea Mays
cttgggtggccaagtcgtcgcgcggagatgatccgctagtgcggcgcagcccacgccgaccaatgggacacccgcctggattcgggcatcccttgcagtgaagtcttggtcgtggttgcgtccctcgaagttttgccggcgctcacgtgccctctccaaagagactcgagcatcctcgcccgcacgcctgtagttgagttctgcctgcaggtcgtcagtctgtgcacccctcactgagggtgagcgcacagataccgacgcctcgcgttgatgccaaaatgatcgaggcctggacctggccaagctaggatgggccatgtcgagaagtcggtcgacatcttcgcgccattgcctcatggcccccggcgaggccgtggaacttggagggttacgtagcaactccctagctgcagacaacgccccaccaggagcaacccttgatggagtcctggatgtctacgcgggcgtgtgctgccacgcagcgtgcatagcagcagcaccaggcgcagggcggttggagctttgtggcatggaagatgctgccccttcctccatcaggaagtcctcaggaga

SEQ ID NO: 3440 - DNA, 659 bp, Zea Mays
gccccctgtacgaaacaaggcgagtgagcgagcctccccgggcttgctattacatcactcgcatccacgtcagggtgatggatgtaggggacaggggattcaggactctgtctgctcacgagtccctgacaccactgtccacctacgctgcctttggtcagcgatgctgcccgtcgaaccctgtggtcgctcagccacacctaccggcaacagctgcagaacacgaggttcaggcatcttcctcaacgtctgagtggaggaatccagaccagcattgtcccaggtgaagctggtgaggatcgcctcaacacccttgccggtgtagtggccggtctcaacaccgacctggacagtgccaccctagatctctacagggtgcacttggagctggagaatgcccacgccaggattgcagccctggaagcccaactgcaaggactggatccgcccgaagcctaggtccccgccccgacgttgtctcctccccgcaagaggctgcgctatggagagcccggatccgtcactaggccgcaagagtcatgatgtaataagttatacttcgcgttaaacgatgatactctctttaagttatcatattaataaataacaaccatgtgatggtgattggttgacatgcttgagttggatctttgtttgag

SEQ ID NO: 3441 - DNA, 752 bp, Zea Mays
gtaactgaaatcgtcagtataaatgtttgcgtgccgctattttagagttctttttctactggtagaggcggagggcaacgaacaaaggagattattagctgcggttttacgtctagccaggaacgaactgtattactagtatagcctactagtaggcttgctatttagctcctcgatcgccagagagagaatcgtacgttaaggccggtaggaaacacggcaacagatcatctgtctcctcgctgtctgtctcgctcgattgatattcgctctgtcccgcgatctgtcttggatcgctgagagcgtgattggacgtccagctcgtgggcgcaaggctcgcggtggcctggatgcgcagggatgctccctcaccgtatctccacgcatgcaaattgacacaataaaaagccactaagttgcatcggtgcgtacaagctcgtctccatacatacagcccaccaatcactggttaaatgcggtcaacggaatgtggagagcccagacgcacgcggccaggtatccaatcacgcggtgagtgtatcgccggagttgtcccttgcggttaacggcatgctagcgacggtgccactcctagtcctacatacagtgttgttgaccttttgtagaagacactccagttctgcagtgttctaggcccgagctggatatgacgaggccaaaaccggcacaccaacagttccggtgttgggccagtgttggaacttgctctcagcggcaaggaggccaacaag

SEQ ID NO: 3442 - DNA, 512 bp, Zea Mays
ggaatgggtaagaccttcctatataaggcactacttgctagagtacgttcagagggattaatagcaattgctactgcaacttcgggtatagcagcgtccatattgcccggaggacgcacaacacactcaagattcaaaatccctattaaactcgttgacaatagcacatgcaacttcacaaagcaaagtggcactgcggagttacttcgcacagcgtccctaattatctaggatgaatttgcgatgacaaagcgtcaagcagttgagtgccttgataggtccctacaagatattatgacatgttctttgccatttggtggaaaggttatagtatttggcggagattttcgccaggtgattcctgtagtgacatgtggtacaagagcacaaataatggatgccacattgcagagatcttatttgtgggatagtataaggaagatacgtttgactaggaacatgagggctcaatctgataaatggttttcagaatacctccttagaattggtaa

SEQ ID NO: 3443 - DNA, 478 bp, Zea Mays
gggtgcagtgggaggagaggtcatcgtagtggttatcgagagtgtggaggtatccgaccatgtagacaatggtggggtcatccttggtggggtctctccctaacagggcctaaagtcttttcctccaggtgggggtatttttgttgctgggtgggaagtaacgaaggggggtttcaaaggtctttctgctgtagttttggcatagctgtttaagggcttttcgggcaacactttggcaagtgtctgggaagcggtgcccgatgaaggtgacttggaagggagggtggtttgggtagcttcgtctttctcctaggtaaactgtcatagagcacttctttattccattttcgcggtattccttccagacatattcgggcttcttgcggatccccatgcgtagtccgcaactccgtaggaggtgaggaaatccttcctcctctgagcagtaggatgtcctaatgacccaagagccttccat

SEQ ID NO: 3444 - DNA, 531 bp, Zea Mays
caaatttctagctcttgctcaatagttcttgcctgattttcgagcttttagagcttcggtttaaaggcgtgcttggtccaaatttgaggagaagaagatgagtggagagaagaagatgacagaagagaagaaaataaccgaggagaagaagttatatgaagagaagaaagttgtggatcctttcatcgctgggttttatgagtccatggcaaaaacgaatacagagaaaattactaaggagatcatggagggtttgttcgaagattctgatgacattgatagttatgacgtggagagtggggatgaagattctgaggatcggccctggcggccaagtcatactatcttcggaaagtcgactatcaagtagagtcatattgacgccatgaggggggatattttcgcgacatgtctattgtcagagttggaggagacaacactgccctcgctcttgaggaaaataaagttgttatttatcgaagcttcctgaaagcaggtctccggttcccactgagcaaatttgtggttgag

SEQ ID NO: 3445 - DNA, 859 bp, Zea Mays
gcccgatccgcgtgccgggctttggcgtcatatgtggtccacgtgctttggcccagtccgacacggaaaataggccggcccgttatcagcccgcgcccccatcgcaaaaaacctaatctgcgtactgcccactcgcccaggccgccgcccccaattcgatcggcccgtctcccgagtcccagtcccggctgtgcttggcgattttcgtgctcccgatcccggcggctctgcccgtggctcgccgtcgccttggtgcctcctccagacggccgacggctcgccacctccgacatctctggtgctccctgactccctctcctccctccctacgtctccttgttcctaactctaaccctaatcccattcggatctggtgattggtgataccctaaccctaatcccattcggatctggtgattggtgatgctcgttcatcgttggtgctcctcgctggtcggctggtgctcctcgcctcctcggatcgagttgtagcttcacagctggacggctggtgctctgtgcggcgccggtgcgtgattccttcctgattcttctttgtctccggtccggtggtccgcggctccgtgccttgtatggtcactgcctcactgcctcactagtgcagtagtgcccctgctggctgcttggacatctataattttgttatgttttcattttcctcccattctcgccctccttctaacctgtccggttgctcgactttctctggtgctcggctggtccttgcttgctgttgttggtcgctctgctcggctgctcctcggaccttggctccgttccgtcgtctctggtgctccggcttggaaaggtatgtttaattttagccatttaattcttg

SEQ ID NO: 3446 - DNA, 496 bp, Zea Mays
gtaatctaggtgctggaaaatagaatctaagtgatgtgcttgtgatcaaccaaggtgtatgcatatgatgaaagaaaatctaagggagttcttggaattaaaggaagaaaagaagggaaagggtagattagggtttcaaacctaggttaggatttttgggatgttacacctaacccacggacgttccatgataacataatacaacttttacaaactggactcatgactaaacaaacagagcaccaaaggagcacacgacgacaacggcagaggggcacacacaacaccgaactaaggagcacaaagacacgcacgacctgacagcagacttagggagacgacaagttgacattacagaccaaagaccgacaaccaaccgattacagttgtgacggcagagagccccccactgatagccaaggggagagtagcgatcattccgccacaggaggcaccactccaatggagttcgtggcattgcagcccagccccgcag

SEQ ID NO: 3447 - DNA, 716 bp, Zea Mays
aaagtaagtagtagctagagacaagctagctagtggctgatgagcgtgtcagtcccgtgacacttgaagccgcaagcgccagtgtttgtggaacccagccgaactgagacacctcagctcttcgtggccctcgccctcgatcggaagctgcctggaagcagcgtgtgctgccctagctctacctagcttatttggtacaagtggcacccatgacatacatggctagctggatatggataactcgataataatcccaaaaaggcaattttaagataagagaccccgcgagtataacgtgcgggattgacctcagcgcagccactcgcgatcgatctctgcggagccgcaagggaaaagttcgagatccgcgcgcaacctgcaacttgctccgatcccatgaatgaatgaattgtcggtttcacaacctcgcagcgacttgtcgccgacgagcggtggactttcctcctcgccccggcccgcgcccttttttttttctctctctctctctcctgcgcttttcttgactctttctgtttgaaggggagaggagggcagaccgcagacctcgatctgtccgttgacgaagccggcggcggcgcatgcgcgcttttaatttctctgctctctgctggtggggaggcaccgatggatgcccgatggccaagggccacagctagccgcgcgcgctatgaaactggccagaaagaaacgaacct

SEQ ID NO: 3448 - DNA, 335 bp, Zea Mays
ctaatctgttggagagttattttgctgttgagtagccaaaatttagtttgtcaagttatttggctagtcacatggagatgctcttagcctttatttttaaattccatttcattagtttgaccatttcattagctagaagtcaagatcttagttcaccatttcattagtttgaccataggtttaattgaaatctaatatatgacaacttttgatcgtaattaaaactgtaaatgcatcaatgttgggaaaagatccccaggcccctagggcccactggtaagagagagcgcacgggataaggacctctagactactgaggaccaccggtcaacggg

SEQ ID NO: 3449 - DNA, 368 bp, Zea Mays
ctaaggccctcggcttgtaacttctgcaaggcacgaagaatgggctggagcttctcctggtgctcgcgtgtggccccccagcgccagttatcaccagcggcggtcaccactcgttgagaaaacggcggaagcatcccgtcgtcgttccggagataaaaccaccggttctaccaccccttgttcgaagatacaagggaggcggggatgtactgcgctacccgccccgacctcagctggagggtgcagccgccagcctgcaccgccatacggaccttcttcacgtccgtcgacgcggcgaagaactccacggagaagagatgggtccacaggtcccagtgggggtcaatccccagaaacccctcgcaaac

SEQ ID NO: 3450 - DNA, 1384 bp, Zea Mays
gtggtgcactacaagaacgtgggtacccatgaacttaaccttaagttcgacaagtccaacaaacttaattggctaagttcatcgaaaaatcgtcatcgactatattagttggtgaaccgacgaacttaacataagttcgacagtttatatagtaagtttgatgttttgcacccacgttctttacacagatacctgtagtggtggaagttgtagtctttctaggtggttggataagtgttggtcgttttgttggtattattgatagggttgatagatttcttggtaagggtggtgaacttgagattggaaggtgtgagttatggcctttggtagctgatatgggtgacccctcgttacccttttagcttccattctctctttggtttccttggtggcgcggcagtccctggttgagtggcttgcgtcttcatcgtgaaaaacataatagggcttgcgatcacgactaggaccgcgtctgcgccccttgcccctgggtgccctaccacctcttcctagttgctggctgtggtcatagttatgaggggtcctcaaattgctggtagtggatgacgttgttgacttgctagttaggcgccaagggctactatcctcttgaccatgttttggagtttcctaggtgtgagggctccctcggtttgcgttgtgccttgaccttgcagtaatggagatcctcagaccatgcatacttctcgaatagttggtacagttcttgaagggttgttgggggatctcgagtgcaatggatgtagaactaaccggcacaaaggccgcttatatagagtaatggatggcaattctatcttcaaatgatgttagctgagatttgagcgacaagaacttgttgtaagtcatggaggctctcggtttctagctgcctgcacagtgatagctctacgagggcgtcagtctacgacatgtaccttggaaattgaggagaaacttctcccaaagggccgcccatgagtcgattgagagcgatggcagcctagtgtaccatgtcagagcggggcctttgatggctattacgagtgacttcgccattgcattgtcgttgccccccgacgaagccatcgtgacctgataactcatgatgaattgcgaagggttggcctttccattgtattttggccaatttcctgctctataattgcttggccaaggtgttgcttgcaacatggctgagagtgggcatccgttgtcagtgaagttgaaagcttggaaggcatcattttgtggagtctgtctggctttgtcgaagttatttggtcttgctttgctgtgcgaggggtgagctgggtcctgctaggcatgtagttatgaaatttcttgttcaagagctaacatattctctttatcctattgg

SEQ ID NO: 3451 - DNA, 530 bp, Zea Mays
gcggaaatgggagcgggagggggaatagtggaagctggagtggtggaggtggtgggtatagcgaaagtagaggatggctcaggagcaacatgagtaggtgaagtgggaggtggagtagaaatagtggtggaaggtgtggagggagtaatggagcgaggtcgagatgcgaggcgacgaactctataggctatctgatcagaagggatctgcagctgtcctccctgctcagcctgctctactgctgctaccgctgcaagtgctgcatgagcggctctgtccatacgacgcttcttcctgccctcctgctgctcaaggtaaaccgtcttccccttgacctgcctgaatgggcgaagagggtcctcgtcgtctcctccccttgatgctgaaacattcttcgtccgcaccatcctgacctgactgttgcacgatagagtgaaaagctaagctgaggtagagagcagtcgataggatctcaaatgaagtgatagctacctagaaatttcacgagagagagaagatccaggcaggac

SEQ ID NO: 3452 - DNA, 815 bp, Zea Mays
ctagctaagtcttggcttggtggtgggactgtgacctgtaggtcctcgttggtgcatcctcctcctgtctgtcgatccttctaggtgtcttctcgtctagggcccatccttgcatccgcccgtgtcttcggagatccaagagtctcctagcctcgggttggcctcctccttttataggccaaggaggggggtcggccagcggtggcttccttaagagcgttctaccatggggtcaagccacgcgtgctcatgggacccagggtcgcctgactatctcgtattctttatggtggacggcgtgggcagcgtggggcccaagcaccatcattcgagctatgccgacccctggccttcgtagcctggggctcagcatggttcgtcgtgttgtgccctgctagatgtctccgcactcaggcctagtttcggtaggtcacgagtgcgccgcaggtcagggggtgcgcaggccataaatgtgtcgcagtttgagcggtttgtaagtcatgagtgctctgtggttcgaggggctcgtaggctaagagtggaaggtggaccggtgcctccgccgtggctcgacactagacacatttaatgcggtcgatcacttatgactggtcggtcttaggctaggcgatggatccactcgagtgggttcccttcggtacgcatggccctgctgttagactcctccacgcccgaccccgggctaagtgtcacggggctcgtctgggggcgggttcctccagggtagacgctacatgtctcctctagctgaccgataggccgcagttgccagcgaccttcttcgggcgcgctcg

SEQ ID NO: 3453 - DNA, 599 bp, Zea Mays
gtaggtagtggtagcagtagtggtagtactaggtaatggaaatcatagtggagaaatgaggatattagggtcggttcataatgagccggctcttttcctttatagtgaccctcttctgatgaatgaaaccgtaattgttgtgtctgattttgagtttcttgttttcttcgacttatgattcgtctgataaatctaatcaagtgatcccaggtgatgattgtgactgacaagtcgtactgatagatccgactgataacatttacttacttcgcttggttgaagtctggtctaagtcatgtcacatgttgcaatgcgctcgacttaatgcacacagatatatccttacattcagtttcctggtggatgaactctaactctcctttttctgccacaaacgtctccctgaaattctagctcaccatcgagcttgcgcttgattctattcattagggaggtcttatggcgtctaggaagaagaaacatgggagcactttgcctgttatttcgcccatcgatcccaatagtcaactttccttctgcagtaactacacttctgttgtttctaggtctgacatgctcggtgttttgctgtcgaaaga

SEQ ID NO: 3454 - DNA, 307 bp, Zea Mays
atatggagtaggcaatgcaattaaggtttgcgcttttgtcatgctcagctcatctaaatttcacaaaacagcgagaatctttggcatattcataccattccgtgacaacggacaagttggaacccgcaacacccacacgtttttgtaatgcagtggttagcactcttagtccatgatcagtgactcctagccactaaaatttccagagattaggtttcctgtcttgcccctcagtattattcagatgacgcatccggccgtgccaggctgctgttaacaacactccaatggttgtttaccttatcgc

SEQ ID NO: 3455 - DNA, 452 bp, Zea Mays
taatgtcattcgggctgaccaatgccctggcatatttcatgtatttgatgaactcagtatttatgccagaactggacaggttttgtggtggttttcattgatgacattctggtatattcaagaaatgaacaggagcatactatgcacttgcatacagtacttcagagactgcgatcatcgcttatatgctaagttgtccaagtgtgatttctggctgagggaaattaaatttttgggtcacaccatttatcgggatgggatatcagttgatcctgagaaagtgcaagaggtgatgaattggaaacctcctaccaccgtacggcagattcggagttttctggggttggcagaatactatcgacgattcattccggatttctccaggattgcaaagccaatgactgaattgttgaagaaaggagtaaagtttgtgttggggacttgttctcaaa

SEQ ID NO: 3456 - DNA, 1015 bp, Zea Mays
ggaagatatgtctcaactctgtcggcgtttccaaatcccaatcatccggcatcactacactgctttcttccactccacattcctctcctcttgatctatatattccgattccttcggatgatctgctcgaagatatcgtagtacagctgatggatacatgcacgcatcttcaattaattccaaacgcacgcatgtgctcatgcaacttgaagacccaaataaagcgcgcatctgccgaccagtgagcgtggtgaccgtcacagcatctgggggggtttgacgacatcgccgccatacatatgccgggttgacagacgggtggtgaaagcgcaacaattaaccgcacgcgcgcggtcagcagacttgcacgggcgtgcagtcccatcagccaaagatatgggaatattatatttcttgttcttgttctttttctttctcgtcccatggccatgctttggcgatcgagaagcccctctgaccggcacagtactctgaatgtgctgctggactgaaaggaaggggcgggcgagatagataggtcaggattctcgagagatcgatcgatctgccgggcagattgagattcccggcgaggaggacaggatacaggccgatctctctagtgtccggccggtggcatatatatatcggatcacaatcgcgtcggtgccatgcataacgacttcgatctgcctccaaaaccgcaacgcaatgcagctgtcatgtgctcagtcttgcggccgtgtgctgctgactggaaaggcgtcgtcaccccccctcccgcgcgccggattcctgacggaattgcgagagcttgaccggagcttcggctgaacgaacagagacgtgctccaactcgctgattggaacatctctcgtgtgagatgggaatctcgtgctgtatctttctccacaggtttcgcctcggcctctcgggtggtgtagtgctactagtgctctcggcctcttcagcttattggtagccattgggtaggccccggcggcgccccagctg

SEQ ID NO: 3457 - DNA, 780 bp, Zea Mays
gcgaggccgtgggtatggcagcgcggagctatggggctagggtgagcgtgtgtcggggtgagggcacggaatggtggatctgctctatctcaatacttggcgagcgcggcggataggattgacgaaggcacacggggcgggaggccaaagatcacgcggctggccagggcgcggtgaggcagggtcgctggggcagtgtctacgggcgtgagatatcgacgtgggagtggggtgattacggagatggtcgggggcgagaggcagaacggtgcacggtgtggacgcctacacaccgtgcttatagagtagttgggataggaaatagaaaacatcagcaaagcctccagaagcttggaatgttgaggtgggtaatagctacaatcttatgtgaagtaacctacacgtattggtgttgaacacacacagagttaggtggggggaaattgtgcgtgcaacatgttgacacattacagagtagatggtgcatacggctgcagcacaagctatggtctccacctagatgacttcatgtcagtgccacatggaactttgcctgctaactagagcgagcaactgtgatacgacatagactgagcatcactttgcctaccttgcattgccttgcaaggcaatgagaggcataggaaagaatgactacctcctttgttccttgccaatgttatttcctttctttttctttccatcttttcaataaagcaacgagtcttttttgtgcaatttgtcctcactcatgtgtactcgagaaaacttttcggtcgg

SEQ ID NO: 3458 - DNA, 892 bp, Zea Mays
aacgtttcgagcaaccaaacacggtagcgttcaaattgaagctagggcgagtatcactgactcactagaggtatggtacacgcgcgaatttgaactaagggagcacgagaggtctggtcgacgtgagggtgctctcgggagtgctctatggtggcgacacgatgttctcgatgtccagctacagtgcgttcaatcggtcgagtcggtgagcttcactattactagaggacgctaaaacatggctcaaaggggcatgatataacctgagaagggctagccacgacgaggtgtctcacaacggcgttctggctggtttgggggaatccggaattcatgagctatggttgatgatcgggtgtgaggggtggtgcgcttggtgcgtaacgagaggacatagcaaggagaggcatcaatttataggtatccatcactggtgccatgaatttgagatgagattgaactattcggcggcgagattctttactagcctaggcttcgtggcgcgtagcagtgcagccgctcatggagggtaacttgccatctccacggttacgatgacatggtgaatcgacccctggcatggtacgaccgaggaagctggcagccaccaaaacgaccgtcgctcagccacgtcgccgacaagtgggtatggcaaggcagagccccgattcaacccccctgatcttttcactctctcactgatccatttgctcaccacgcagacgtcgtccctagccttacgcgaatcacagcgctaagtgcggatcacggtgcatgacacaccgacgacgagaaagatcttcgtcagtgactgttcactctaaatgacttcgttcatctacgtgacaacccgattttaggggcattttactccagtttttgagcagcacta

SEQ ID NO: 3459 - DNA, 378 bp, Zea Mays
tccaacttgcagaagagtaacacagtgtggtgtgaaagaaggatgcatgtctatgtaataacaaggcaagtaccccgtgagttatctccactcttcatgaatcaacgtatatatttccaggtgctcagactctcgaacaagggtcacgagttagcaaagctgagagtgatgcagggatcaaaagcaaccaaatggatacatgtgatgaagctaaaaggtactagaacagatgttggcggcccagtatacaggcttctagttctagcgaaggtgcaaactcacaggcagcatgtgacaaaagttcagcatctggaaggcaacgaatgcattgtaagaaaggccaagctgaaccccgcaatcggaatatttatatttctt

SEQ ID NO: 3460 - DNA, 472 bp, Zea Mays
agacaccgattcatgctgggattagatggatagcgtcatcatccactggatctctagcaccatctcccttgagctgcgccggaactccagggagcttaagggcatgacatgccacctctggttcactctcgagaatcagtttctcggaaattgtgagacccacactctagcttgataccaccttccgcaccttcgtctaaggcaaccttcttgtaggcgactactattgcaagctgaagggatggctaactccctggctgacttgggcgcccccgtcaatgatcggaccctcgtcttcattcttcaacattctttgaggcctggacaagaagtttgagcacgtcgggatcatcatccgatgctactccccttcctattcttcctcaaggttgggacaatcttgtccttgaggagcttaacatgacaaccaccagccttgtcgatgctctaacaaccttcatcaccactcctc

SEQ ID NO: 3461 - DNA, 552 bp, Zea Mays
ccccgtttggcccgaagcacgacactattaaagcccgtcacgaaactggcccggcacggtggacgtcgggctcgtgccggcccggcccgatggtcgtgccgggtatgggctccatggccggcccatcgttcttggcccgacacggcacggtttaacgggcggcacgattgccggcccgactcccccctcccctctgcgtataaccgagtactccccgtctccccgtctcagtttctcacgcgaccaaaccctaaatccctctccctcctcttctgggctctggcggcggcgcccgactgccgacgacggcgacgcccgacgtgtgacgcttgccggcgacagcttgtttggacttcccgaagctcttctctttcctctaatccccttccctactctcaaatctcgaaggacccgaaccctaatccccatcctagcatcctcttggcccaacgacggtgctcctgctcctcgcggtggtgcttgcaaccactcaggtgactcgggtgctccggctaagcaggtgtgttcctactctttgtaccgtgctcctcc

SEQ ID NO: 3462 - DNA, 546 bp, Zea Mays
tgtgtatgaagacgaagagcaaaccattgcacgtttcatggctgggttacaccgcagcattaagcgcattgttgagtttcagccgtaccaatgtcttgttgatttggtacatcaagccaccaaagctgaacgccagctacaacaagatgctaagagcagcaaggccttgtcatatggtgcacgaaccatgactggaggaagcaaatcgatctcaaggtttactgctgcatccttagcgtcaaaagtttcaactggagacttgcgatcccacaatcaaagcaattatagtggaaagaacgttgctgctccaatcatggattctaaatcagcagcatccacttctacatcagtgggctctacagccaagagtagtggtattcagtgcttcaaatgtggaggtcatggtcatgtcattaaggagtgtccaaataatcgtgtgatccttgtgaccgatgatggagaacatacttcagctagtgaagagaaagctgaagcaggaaatgaagatgacattgataaatctgaagaacatacgggatgtgaatt

SEQ ID NO: 3463 - DNA, 937 bp, Zea Mays
gtccgcctaggtggagctgtatatcaggatgtcatcgaaaaacacaaggacaaacaggcgaaggaagggcctcaatacgtcgttcatgagagcttggaaggtcgccgacacattgcagaggccgaacgacatcaccaggaactcgtacaagccgtcgtgggtgcggaaagccgtcttgtggacgtcgttggccctcatgcgcacttggtgataacccgaacgtaggtccagtttggtgaagaaccaggcgccattgagctcgtccagcagctctttgacgactcggatggggaatgcgtccttgacggtgagcatgttcagtgcacggtagtcgacgcagaaccgccatgacccgtcgggctttttgatgaggagaaccggctaggagaatgccgattcgcttcgccgcatgatgccttggttgatcatggttgtgcactgccgctcgagctcatccttgtgagccaccgggtaccggtatggtcggactgcgaccggagctacgtcgggaacgaggatgatgcggtggtcacggtcccgttggggaggtagacccgtgggctcggcgaagatgtcggtgaagtgagccagtagcgcgtcgaggagctggttgctgccgatggtgacactgaaggccgatgtcgcggtcgacgtggttctggaccagcagaccgtgcgtccatggagctggaactgcatggtgtggttggcgatgtcccagacgatcggccccaaggtggcaatccattgtgtcccaaggaccagatcaaagtccgccagtggcatgatgtagaggtcgacgcagaacggaacaccctcaatggagatcggcgcctggggcaagactcccgggcacgcgatgcgctcaccattggccactcgcgctgtgagccttggtcgagcccggacctgtagattcgtgtggacagccgcctcc

SEQ ID NO: 3464 - DNA, 282 bp, Zea Mays
taatattgtcaactccgtcttttttggggatcaatgtgatataggctgtattcaggcgcccaaaattgttaaatttcctgccccaaacagccgagatggctgccataatatcattcttgataattgtccagcaagccttgtagaaccttcctgtgaatccatcagggccaggggccttatctgagggcagacatttgatggcatcccaaacttcctgctctgaaatgggggcttccagatcggtcagatcaaaactgggcattccaagagcctctaactcaa

SEQ ID NO: 3465 - DNA, 380 bp, Zea Mays
caagaacgtgcctccttttggagactactacttgatcatcacatgaggtctcacgtagatgcatgatgtggtgaaaggcccaacaccaactgtgacgacgactttgcaactgttgatgatgactatggctaccctgaaggcgatggctgcattggaggcgtgatgacgatggcagcatacaccaaagagatgaacactctaatgacctcgacggtgcatgcatgaccatacaggccgatctacatattctatgccttaggatataatgggagtggcagagaagaaagactaaagccaccaattccatgttaactgcagggatggcatctaacttattttgggcccctttgatgacaggagactagccttttgctaaaatg

SEQ ID NO: 3466 - DNA, 664 bp, Zea Mays
attattattgtctatgaccttggtaaccatggagagcgagagatggcctaggcgattgtgccatttagacacggttggtttgtcaacagcatttgcctgcttgagtgaagaatcggtaggaaggggatacaatccacgacgacatggccccctaagaatcgttctcctcgtatcctgatccttgatgagaaaaaaaatcaggatgaaactcaataaatgcagagttatctttggtaagacgatgaacggagactagatttttagcagttttaggaacatgaaggacattgtttagatgtaagctacgagattgagttggaacagtagtatgaccaacgtgtttaatttccatacctgaaccagaggcggtgtggatctgatcattcccatgatacttctccctcatcgtcagtttgtttagttcactttgtgacatgatctgttgctcctgtgttggtgtaccagttggtgtcgacattgtaggcgttcatggctatggcaacattgatgtggcgctcttctgggacgtagttttcatcgaaccgatgccagcaccgggacaccctgtggcctgtcttgaagcagatctgacagagcagtaggtcatgagacccactcgctgcatcagatcgttgtggccgccctccattgcgttgcttcggtg

SEQ ID NO: 3467 - DNA, 299 bp, Zea Mays
ctcagcaccaccgtcagatgattgcctgagcagaagatgcagagaagcacaaccgtaagctccatgtggatctcaccatagctcaagcccgtgtagctgccttggaaagtcgtgaagtcgttgctgttgaagccctgaagcaagccaatgatgagcacgcccagaagttgatggaagcctacttggtaacccataacccacgtagagccctgtggatccaagagcccgcttcatccaacccagttcaacccatgagagctgaagatccccagattcttgaaggtcacccggtctctatc

SEQ ID NO: 3468 - DNA, 468 bp, Zea Mays
ggttgtaacgtgttgcttaatggcgtggtcgtatcatcctcctccccttgaaaaggagtcgtcctcgactctgaagtgtcttcacttgtaaatagtaagaggtcagcaacattgaacgtgttgctcatgccataacttggtggaagatctatcttgtatgcattattattgatcttggcaaaaaaacgaaatggaccattccctcgtggcatcaatttggatttgcgctgatcaggaaaacgctctttgcacaagtgaatccaaaccacgtcccccgatttaaataacactttcttcctatgcttgttcatgcttgcagccttgcgcactgctttgagcttaattgtttcattggtcttctcatgtatcttttttatatatgtcacacgcttggaggcttccatattggttctttcatttgttagagctggccaatccttgattgcattcaccttggattcatccacc

SEQ ID NO: 3469 - DNA, 318 bp, Zea Mays
ccgcggtggtggtggttccggcggtggtgcccgtggcaacgcaccgacgccgggaccccaacaaggtgcgccttggcccactttccaccactcgtggtcaggacgcatctccatgtggtcgttccaggggcctggttctgagtctcgtcccccgacggccatattcgctggtgcacagtcggggttcacctcgccgccggggtttgccttcgcatctccgtcgccctggaccttgcctgccgcttcgtcgtggcccacaccgtcggctgctccaccgtccgagctagttggttgggacgcagccgccctggctgcctt

SEQ ID NO: 3470 - DNA, 606 bp, Zea Mays
cccatacctggtgcaaaaagctgtcttctcaatatcctcctcacgaatcctcaactgatgataaccagagttcaaatcaattttagagaacacctgggcacccctcaactgttcaaagagaacctcaatacgaggtagcggatatttattcttgattgtcacatgatttaaagcacgataatccacacataacctcttgcttttatccttcttctcaacaaacaatactgggaagcccatggtgacctgctaggcctaatgaaacccttagccagcagatcatccaattgccgcttcaatttcacctgctcctttggagccatccgatacggggccttatgaataggctgcgtacctggaattagtttgttttcaaaagccgcaccacactccagtggaatgcctagaagctccactggaaacacgtcggcataatcacacaccacacggatgtcctgcacccgcaaggcagtcccactctccaccaccatggagaagaaaattcctgacttccttgaccgatgatccggaagtaattgagtcaacagggagagagtgaactttggagaactccccaagaataccacctccctacacgacaacgcc

SEQ ID NO: 3471 - DNA, 387 bp, Zea Mays
atccttctaagggaggctcgaagccagaagagaaaagctactagcccaacaccacaagacgaggagctagaccaagaaatcagcaacctggaagttaatcatcaacaggtggaaaaaggaagggaaaagatgcttcagctggtcgagctccaaaataagattgacgaagcagccgaggaaatgtgacatattgcgcaggatactaagcaagggcacaaaccatagtaaagagacattcgtcaagaaggccccagccatgatgacatgtggtatgatgattttcatcatgataacattgcttttgatgacgcttcccctctagctacagagttgcaggttgtcccatggccaccatcgtacaagccacctcagctacccatgtacgtt

SEQ ID NO: 3472 - DNA, 364 bp, Zea Mays
cggtcacgaaatccatgcctatttcttcccacttccattcaggcactgggaggggttgcagcaggcctgcaggcttttgatgttcggccttcgttcactgacaggtgtcacaccgggctacatactgtgctatttcctttttcatccctttccaacaatatctggctttgaggtctaggtacatcttggtggttcctgggtggatggagtaagcggagttgtgggcttcattgagcaggacttcccgtgcctctcccattggtacacacaggcggttcttgaaccagaggactccttgctcatctgtcctaaggtccagaagttgctccttgcgagctctctccataagtctggctgtctctgc

SEQ ID NO: 3473 - DNA, 292 bp, Zea Mays
gtcaatttccagcttctcatgccatgtttggctctttcccagatatgaaactccataaaacttgtggctttgtcgtcactctaaacttcaagcgtatgatttcattttagaatgtaagtatccatgcatagtttgagagaactttggtacatacatatttgttggcatcaagcaagcgtaacaaataatcgctagaaagcttttggattgtgacccccctgcagacaactcaatcactgttcaaatgttctagtgtattctatatgttaaactgatagtacttccattcctt

SEQ ID NO: 3474 - DNA, 614 bp, Zea Mays
atcataagtatattccataaatttggtggaatgaactcattcctcgtcttatctatactacttcttaagatagtagtgtaagcgtccacacggtgcacggttctgcccctccacgtccgccctgcctccgtgacccccttccctcgcccccgaccgtgatccctgccggcaaaccttaccgtcatcctcctcccccgcctcccttccatcttagcccgccccttccatactcctccccgcatcccttccatcctcgtccgtgctccaatgatccacatgtgcgccccttccatccttgctcgcactcatctcctcttctgccttgcaccatgggccatgcaagctcactgaatgtcgcaatccacgctgcctgactcctcgcttcctctcgttaacctccccttcctcagatccacctcgcaccatcccccgactcctcgctgttgtcacaccatctccgcctggtccccccgacacgagcacctccgtcgtcgtcgctcgcctcagagaagagaggaaggcaactgctgcatcgaccccgcgccatccccgcctggtgcctggtcccccggcacaaccacctccgtcgctatcactcgccttggagaagagtg

SEQ ID NO: 3475 - DNA, 787 bp, Zea Mays
tctggcgaacttgtactggccagaatacgcaacggttggtgccctaactcggctaacaccaaatcctaccccaggcgaccctaatccctcaactaattgcacgaatccgggccgaaatctctctgtccacgatgacggcgaaaatcagagacaatccgaggtgttcatgacgatttggtgcggtctagcttaatcaaatgggtctacgagtaataggaggcttgagaggctagaacaccaatcaaagaagcttgaactgacctgcagagggctggccacgacgaagtgttcacggtggcagagaaaacggatttggggaaaatgtgaaattgggaggctctggtggatgatcagaggtgcgagctggtgcactgggtgcgtaataacctagcggagctcactggggaagcaatttatagactccattggcggtggcgtccaatttgaagaaagcgcgctgacggccggagagacaggaagttacaggcgcgagcgttatcgtggctttcaccgtggcaaagcctccgccgattgacggactcattgctactgttcactgcgccatgttaaagctcctaggcatgtggcgcatggacggtaagcagccaacgccggcgaagatcatcttggccagctgcagaacaagtgggtacggtgaaccacccagtgaccagatccgagccaatccgggtgccaagatcttttactctcctcggttatgcactttgcgctgagcacgaatcgcggcgaccggcgcgaatccgggcgcgagatcaccggcggcgag

SEQ ID NO: 3476 - DNA, 493 bp, Zea Mays
gagagatatggcacgagacgagacgatcaagaagtcaaatgacgtgaaaacgacgtttgacggataaatagtggcataggatgtttggaattcgaattgaggcacgaaacgatatggaattgagccgatacttcacgaataggtttatataggtgaatatgagtgaagtgtgtgcttggtttgaatttaggcgaagaaaaaggaatttgggcactcggctcggaaacgatcgctctaaacgggaaattttggtgaaatttaagcctggaatctcggattggcgtgaaatttggcaagtgggttactggaagtgttgtgaaggtgcctgaaaaatttgggttcaattggagcatttttggctggtttgggcatttcaccgagcatgtggcgtgcggggaattagggtttcggtgaaatggctatttgaggtgggaaaaccctcccgaaggagccaagaacctgcagggatactcaatacacacagagattcaca

SEQ ID NO: 3477 - DNA, 631 bp, Zea Mays
accaggagttgatattcctttcggacatgtctgtcgtctgcgtaaagctttatatggattgaaacaggcccctcgtgcttggtttcaaaggttcttcgttgtcataagggctgctggttttacccctagtgaccatgatcccgctttatttctttattcctcttcacgagggcgcaccttgcttctattatatgttgatgacatgttgattacgggtgatgatccagaacatatttctcaagtaaaacaacatcttagtgagcagtttaagatgtttgatttaggccctcttggatatttcctgggtattgaggtattacaatctacaaagggctattatctctcacagtataaatacatccaataccttattgctcgctctagtctgactgataatcgtacggctgcaacacccatagatattcacttacaactttgtctgaatgatggttcaccactacaggatccatctagatatcgacatatagttggcaatctagtctacctcactatcactcgaccggatattgcacatgttgttcatattctgagtcagtttatctctgcgcctactttagtccattatggtcacttgcttcatgtactgagatatttacggggaaccacatct

SEQ ID NO: 3478 - DNA, 357 bp, Zea Mays
gaaaagaaacgacgcagattagtttgggcgtatcgattcggccgggtgaacatggtctgtccgatttcgatcctgcgctccctgattgattttagttgtttaaaatctatgtcgtagatcttgcatcctggggttctcgtagcgtaccggttcgcggagggacggatctaatccgggccatccgcgcttgatcggacggccgtcaacacttcatacaccttcggttgcgctatttggagaaggacccttatagtattagagaatagaacccgccgtcctattgcgactgtgcgctgtgtctgtagattcttacccaggcgcccctgatctttctggtaattgaggcccagtcccgag

SEQ ID NO: 3479 - DNA, 337 bp, Zea Mays
gagacgaacacgtccacgaggaagctgactacgcccagcaggactacttcatggggtttggtcctgttgtcgaacattatacatcaatgttcgagacggggcacttccccaacctgctgcaagaagtgctgcacgcgctaggcacctacgcccgccccctgtacgaaacaaggcgagtaagcgagcctccccgggcttgctactacatcactcgcatccacgtcagggtgatggatgcaggggacaggggattcaggactctgtctgctcacgagtccctgacaccactgtccacctacgctgcctcggtcagtgatgctgcccgtcggaccctgtg

SEQ ID NO: 3480 - DNA, 504 bp, Zea Mays
ctacagttacttgtttcatgtgcggctgtgttggaccagaatcgaaagccgagaggggcggagcgggagctccagcgtgcagtgcagccgcacgcacacatgcacagagttggttgtagtgtagcaggctggacagtggacacgacggtgacgcgtctcgatgacttgacggcgtcacgacaggacgatgcgtctcgacggcggtggctggcaaatgccacagctacgcgatcctctctctgactctctcgttggtccgcccatgtcgagtctaccgtgtgtcttttcttcccagccgtgtcgagcaacgcaccatctcccctttgcgagcgatggcctcctactcttctttctctccttcctcttcctcctcttcttcctccttcccctacttcgagcatgacaccgatcgggagccaacgctggagtgggatcccccaagctgcctatgagaaggaggctcctctacactgggatgcagaggagtgggacttcgtgatggag

SEQ ID NO: 3481 - DNA, 752 bp, Zea Mays
tgacaccgtatatggggtgggagagatgtggggttgaccattggactcggtctcgaagttaaattatcttcatatatggtagaactacagattctaccggagagattgcacagattgtagggtggggatttggtgcgaccagggcggcggcgctgaggcgccgtcgtgatcctggctgggtcgcgtgcagggagaagatcacaggagactctggctccctctgggaagccagaatagattggaattctgcttatctttattccagagtttacagatctatatatagagctatctcaagtctatttattaactttggataagtataactatctagatagaactgatctaagtctatctactaactttggataagtataactaactagatagagctgatctattagctattgggacttgggccccatctgggcagccttggccttattgcgcctaacataggcttggtcatacataacatctctccccgctttctcaaatagctcatccttgagctataagttggggtaagcagcacaaaactcttcaagcttttcccatgtggcgtcatcttcagccaatccacgccactgtacgagaacctgccacacgccccgcctaagttgagcgcgaagcaccttggccggcacaggaagcagctggccatccatcatagggtcaagtgtccccggagttgcaggaggatccccacggtgcggcttcagcaggctgacgtggaagacatcatggatgca

SEQ ID NO: 3482 - DNA, 563 bp, Zea Mays
tagagtagccaaggaagatgcaaagggcagaacgaggtgcaagtttgtggggagcggtggccgagagattgggataacacttacaacaaaaaacgcggagatgatcgtaggacggcgcactaccaagcagggcagagtgtagggtcgagaaatcgagcgtcttggttggtaagatgttaaggaggagggtcgcagtgtgcaacgcctcggcccaatatggagggggcatgctcgcctaaaacagaagagagcggatgacatcgttagtggtacgaataatccgctccgctttaccattctgcggggacgtgtagggacacgacatgcgaaacaagacgccatgagtgaggaagaaggtgcgggcactggagttgtcgaactccttgtcgttgtcactctggatggccttaacgcgggtgccgaactgggtagacacataggcaaagaagttagacagagtggtaaaagtgttagatttcaggcgtaatgggaatgtccacaagtaatgtgagcaatcgtcaagaacaacaagataatatttgtaaccagagacactagcaaca

SEQ ID NO: 3483 - DNA, 342 bp, Zea Mays
tgaacaactgaatgggatgctctactttccccttctccaagtacttcaacttcatcatctttatcatcatccaagttaataggcttctgtctagcattcttcttcaaataatcactcatctctttgctaattgccgatgttgttttcgagcacttagcaacatcaccatgaccaccaacaaggtgctgcttcaaccttctaacacctgcatgaacgattttgccacaaagtatgcacttcaccacatcttttttgttcaaatccattcaataacaatagttccatgctggatccttcgattttgcctttcttttaggatctttagctggatcgtatggctgc

SEQ ID NO: 3484 - DNA, 445 bp, Zea Mays
ggattagcgccgccatcgatcagttttaatcaaatcagctgcctacatatatttcagtgatgggtggccggctagctgggataatagtagttaatactagtatagtaccccatgcgtgatgcgtcgtccgtcgtagctaggcgaccatgcgtgattgcgtgcacctgctgtctcgatcggcagatccaaggcacgctgccctccatgcacgtaagtggtgtatcgtggtttctttacgtgtcccaatccggcaagagggaaccgcgccgcctccaccggacgatggctctgcttcgtgttggtggtgtgtcactccgtgtctcccgcgtccattgaccagatcatcatcaattcatcatcttgtggcgaggaatatggatgcaatggcacgggatcgttggtgggactgggacgcccgttcggtgctactgctacgcctttctct

SEQ ID NO: 3485 - DNA, 403 bp, Zea Mays
cctatgtctcatcgaagattgagaaatagcgactggcagggggttatagaccggtttgaaaagaggcttagtacttggaaggccaaatttctatcttcgggtggacggctagtcctacttaattctgtgttaagtagcctgcctatcttttatgatgtcgttctttgagataccgacagtcgtcttgaagaaattggatgctattcggtctagattcttttggcagggaggaggtagtaaaaggaagtataggctggccagatggaatatcgtttgtcaacccaaggagttagggggtttaggtgtctctaatctagctgtaaaaaacacaagcttactcagcaaatggctctttaaattactcaatgaggatgggatgtggcaacaattacttaaaaataaa

SEQ ID NO: 3486 - DNA, 445 bp, Zea Mays
gccgcgtgtcaccaggaatgggtcccggacccgggtagggtggagggggatagtgaccagagccggatggcctagggtcaccgggagtgggtccctgacccgaatagggaggaggaggatgaggaggatccgaggtgtagtaggggtcatcaaagtcctcgacctcatcctctaaggtaatgaatggcacaccaaactcttgttggtgccagtcattaaggtctgcggggaaggtaggggctggaggtggaggggacccgagagggagaagatgacctgtcttggcttgcgacggcgcacagactcctcaaccgctcggatgcggcacatggcgaagacgccaagaaggcccttggccagacgaatgaaaagtcctcggcctccaccccgtccctggcccggaccacttcctctcccgctgcggtccatcggacgtgaggcagcg

SEQ ID NO: 3487 - DNA, 476 bp, Zea Mays
tgccagggagcttcaccatgctgcgcgtgactcgaccgtgaccttgcttgggcgaagccgcgctccggactgccggaattctttgccgacgcatcgctactgctcaccaccgtggccgggtgctgctgcatctatagcttcagtgagaagttccccatggcgattgtcttactccctaattcgtgtagagcacttcgtacgtgagtttggcgctcggttgtgcgggtagattagcctcggcaatggtgcgtcgtcgtcgtgccctgttcctggccgcgggttcgtccggaggtaaaagaagccctctgcgccgtgtatctcgtgatggatggctgtaactggatccacggttgggacatcctcggccgttgatgcgtggatgggcaaaccggatcggtgctcgcttaccgcttcggtgggatttaatctggggcgttggcgctcgatcggacgactggcgtcgtgtaccggttcgc

SEQ ID NO: 3488 - DNA, 448 bp, Zea Mays
ccaaatcaacagtacgtgacgtgaggtcccgtccaatccctttaaaaaatcgagttatgccagcagtagtagctttactcttctttttctcgaatgtagacaccaattttggtagaggaaatttagatttctttgattgtcgtgaatcccttgatggatgtggagaaggtggtggtgtcctaaatgttgatgcttgtggcggagacggtggattagaaagaggatgaggagcagcaagggaagattgtggagttgatgatggatgtaaaggtactaaagtttgaggaggcggagatggttggggatgagacgacgacggcgttggtgtatcaaccaattcgacatcccttcgaggctaaaggatgaaattttttatggcttgtccaagtttctcgattcctttgggcccatggatgtctagcatgtcgtccttagatccttggacgac

SEQ ID NO: 3489 - DNA, 386 bp, Zea Mays
acttcatagtgggattgcccagtacctccaggcaccatgattccatttgggttattgtggacagattgaccaagactgctcatttcttacccgtgcataccacccacaagacagagaagtatgcagaaatttatgtggatcaaatagtgcgattgcatggtattccaaagaccattgtatctgacaggggagcactgtttgtagcacgcttttgggagcaactgcaagaatcacttgggacccaggtaatacgaagctcagcataccatccccaaacagatggccagacagaaagggtaaaccagattttggaagacatgttaagggcatgtgtactacactacggaaaggattgggacaagtgtctttccttggcagagttttcg

SEQ ID NO: 3490 - DNA, 567 bp, Zea Mays
gccaagatctaggctacgacagccaggggtcaacgtggcatagggacgggaatgatggtgccatggctttttgccgcccacgccgcccgccataaagagcatgaccagggaagcctagccgaccagggcacatcgcacatacgaacgaacgcaactttactaagttagaacatcctgttttaaaaatggcgcaatagctccttccttaagaagctactggtagtcgatcctcaccttggcctataaaaaagagaggtcggccaaaagaagatgagaggacaaacacacacactctcgacgagaccaaaggaccaagaggccggagacaaggcgtgagccaccgcgacatccaaggcttagcttagaactccattaccgtagcctttaggtccatccacgtataagagacctacgcataaaagacctgtgagctcctgcctctctcgtccccttgtatcccccactatgagctttgagtaacaagatgctagtattgcgagccaccgaagactagatgtacggacgttctgtccgaaccagtaaaaatcttgcgcccaccgagcatac

SEQ ID NO: 3491 - DNA, 633 bp, Zea Mays
aagcaccacgcgatacccgacgctcctaaggtgtctgccaatggcgcgtaggatggaggggaacgaggcgaaagaatgttatggtggcaggggtgtggctggcgccgagttcactgcgcaggcacgccgtggggatatgtgaaggcgcccgagtgtcgcaggcgaagctccgctaattcagatcgtagtaggaggactctccggcagccaacttctctgatggcccaactcgatacgctgcctggcttggttcctacaatggctctaggttgagggaaggtcacggcaagcaatatatatggtcagggcggagatccgagtgtcgaaacggtcccagattctaggcggtgtttgttacggtgtccacgcgagaataacagatctaattgagatgagcctagaggaagaagatggttgctgaccgcatggatccacctgttagtcttccagcgacaaaatccacacacgaatcagagtatgggcacaggccccacatggcagtcggccaagcccgggtacgcagtggtggacatctaacctgtgggttatgggcccacacatcatgggatgagtgaggcaacttggatgatgtaattttttatgcatatggctaggtgaataaataaatggaac

SEQ ID NO: 3492 - DNA, 422 bp, Zea Mays
tgggtcaaggctggtgccataggtggtggtggtagcgggacccatgcaacttgagagtggctttccgaagcaactgatgttgtgggctgttggttgcccacatactcgagaatgtatggggaatagcacgaagcggtatgcaggccctgctttgactgattctgccttgcttcggcttcagctatctctttctgcttctggatcatgacttggcatgtccttgttgtatgtcctttgtcctccccgcggaataaataaaacaatctcctgggttgggagctgaaccttcctccgaaggttctgcctcctctacctcttggagtcggtggcctgtaagagctttgttgcatccctaaagtctaggagctctgttgatgcccttgagagtggtttcctctgtcatcacctgagctgggattgtg

SEQ ID NO: 3493 - DNA, 651 bp, Zea Mays
aaagaaagtgttatattggtttaactccaacacacatggattgcggggatacatgaacatcgaaacaaggccttatgagcacttggatggaggaagacttcagtcaaccactcaatatatcattccaaaaaactgagttctttaaaacctcaatgagttaagtgataccatattaaaactttcaaattttagttggttactcattgctcctttttagattctactgccatcatactgcttgtaggaatttattccattgttttttgctgactgaagtgatgtaacaaaccactcgttttccttaacttacgcacactagggatccagaataccacccagcccaatggacttgcagttcctgatgcaacaatgtgtcctattgattcgacttctcatgttattgaactaatgcaaaaagggcacaacaatagatccatgagtgcaacagccttgaacgagaggagcagcagatctcacaggtaagttacttgtgctgcttgtcttttgtataaagagaccttgcttgtgggcaatttgtttattttgtgcagtgtcttttgaccatccatgtccagggccaggatttaaaaacctgtaacactttgcgtggtgctttgcatcttgtggaccttgcaggaagtgaaagggtgg

SEQ ID NO: 3494 - DNA, 672 bp, Zea Mays
gtggcaagtcaccaaccttagacacgacgacggacattggcggcaaggtgccaacattcgtcatgacggcgggcattggtggcagtgtcacttttgggatgacagcgagtactgcggccggcatagggggcagcgcggcggtgttcagcaccacatggatctgtgtcacgacgcccgccgcgggaaccgtcggtatggcgagcatcagtggaagggtggccacgagcacaatcggcggcttcagcacgataggaatgcccgggacggcgataggagcgatagggggcgaggcatgagcaagatgccatacgacatgacacgtagtgctgccatcaccgatgagcatgatgagcaccatcatcacgagcgccgtggcagagaagagagagaaagcgtcacaagtcattgctagtggctaggataagtgcttcctcaggagtgaggagctacaaggccatcgcgcgcttgtgacaggtccttggcgcgtattttattgtagctccattagaagttgagcatgtactgtttcgctagagctaggccagttgggaacgagatagagatggttggtggccttttgatgcaaagcatggacgacagatacgtagtggatgactgttgttcgaggcatttggttcattagctcatctgtttcttgtagatggatcggaa

SEQ ID NO: 3495 - DNA, 1182 bp, Zea Mays
ccccccttctcccactcgaatggggaggtcttgaaaaaggaggggatccctgctgcacgtgaccagaaccatccccgcccgaagtaatagcatgaagcttaggatcggatccatccctccgtggtgcagacgagaatgtgatgcggattggatacatcagcgttctcctgccagaagacatcccatcaacggcaaagggaggttcgacgatccaaagctcccttgaagcaggcaccaaggacgggtctaaacaccaagcagaacatcggtaaacagccacatccttaagctccagggtgtcaggatgaacctgatgaacactagcaaagggattaagcaattgttccacagttatggtttcccatgcatggatggggataccctgaagctcgaagtccaacaagacaggtaacacagcacccctggagttcagaaaccgggaccatttcctgcaggtgattgtgaacgtggctgccctgagaaaaggccaattgcccaccagcatctccaccatgtcacagccaggtagaaagagaatgaaacttgactgggaataatgccgaattatcagtgtcccctcttccagctccagcctaggagcaattaactcagcaatctcttcaaccggtactttctcacgatcgctgataacagtaatcaccactgccttctgaagatcatcctcagctctggtcatctgctgactccatctcaagatgcagggtttatcatcttcagcaggcgacaccggtccagcggggcgcttatccaaatcagaaatcggtttggttctacgccgtctcttgcgagtccgctgtctttttgattggacaccgacagcatcaagtgaaatcaagcctccgccgtcgccctccattgttgatggttcctggtgtcgaacagcaatacctgaatctctaggaggatgctgattgtctttccttctccacaccagtctcttcttcttcaccttgatcacagaggttgctgaagacgaagagagcctcctccagaccgagagccgtgtctcaggtcgaggttgctcccttagtctgtctccactggtcgtacttggctccggaagattgatcctcctccaaaccgagatctcagtctcaggtcgagaggcagcactgttgttcaccgccaccttcacagcctcaagcctcaccggccttttaa

SEQ ID NO: 3496 - DNA, 405 bp, Zea Mays
gtacaataggaggtggtggtggatcagggaagtccttgtccaaagagtctgaggagtcatatgtagctccaaggagcttaagctgtcaaatctgcgcatccgcctcttgctctatagtcaagttcccttctaaaggtgtactgtctctgtgactgctagggcgtaacacatcctccagttgtggcttgtagactccaaaagataagtgtcttgacctaaaggtcacctaaaactttggcaattgaatcaacttcacaaacatatggcagagaaagtgggcatagagaagaaagtcaaccacaacaaacatagtgtgagataccaaggctccaagcaaccataactaaaggtaagtaagtgcctccttgtagcatatcttaggtagtagagtgcgccttgtcaggg

SEQ ID NO: 3497 - DNA, 317 bp, Zea Mays
aacttaggcagtgcctcttctggagctaggggctgaccattcgggctcacgtctgcaattttatatgtcttgtcaggaaacttgtttagccccctatcacctctgttccgatcgctctgcttccttttccttgacctctcggtggttgtcttggtcgattccggtgcgccttgggtcagttccggtgcgccttgggtcggttccagtgcgccttgggtcggttccggtgcgtcttgggtcggttccggtgcgtcttggtatcgtgccgcagctttttcgagcatcgcacgaaattgagacaagacctcctattcatg

SEQ ID NO: 3498 - DNA, 360 bp, Zea Mays
tgtttgcgctgtctccgtggaccgggcgatttagagctccgctagtgcaattgatcgaggggaaacgcttcttcggtgttgaattagaaataaaccaatttagagcactggtcgtggcgtattccggccagagcgacctcgccggagctactgctccgccgctccacgtcgtggacctgacgttgtgaagaattagaattagaggggtgtttttgtaactatcagtgaaacgtaggaatagtaccgcgactctgtttcaacttattcaaattagcaaggacccattcgcaaaatagacacgcgggcgcgttctgtcttggctgggccggctcgggccagattcagcccattactgttggc

SEQ ID NO: 3499 - DNA, 275 bp, Zea Mays
atccataatcctgggaaagaggactgccttatcatcaatccggaagttagcaatggtctttaacaccgtcatcttggcatgcctctgagcaggaagccgaggctgaggctcaacccccattccagctacccttctgctccggcgagggatgaagcttggggacacgacttttatcttgttcccagtggcacgaggcctaggcaggaccccattcaccttcttggatatcttgctgatgaaggcttcagtcggaggtgccatccctctcactttcg

SEQ ID NO: 3500 - DNA, 959 bp, Zea Mays
gcaagttgggtcacacggccctcaaatgctggcatcgcatggacaaatcttatcaacacgactctccatcagctgcagttgctgcaacatcttcttatcatgtcgatcctaactggtatagtgacaccggagcaactgatcacataactagtgagttggatcttctcgccgtgagggagccatatcgtggcaatgacaccgtgcaagtcggcaatggcgcaggtttgcaaattaagcatcttggttcttgttccattaacaatgatactcgccctcttgcattaaataatgttcttcatgtccctcaaatatctaaacatcttttatctgttcataagttaacccgtgataatgatgttttctttgaatttcatccctcccattttttcatcaaggatcgtgccactcaaaatcttcttctggaaggaaaatgtgaatccggcctctatcccatcaagcctgctgatcttgcgtttgttaaacaagcacatctgagctgctcggcgcgtccttcacaatggcatgctcggtttggtcaccacccctcagtccaagttgtgcggtccattttaagtctccatcttctcccatgccgtgaagaaactagtttgtctactgtctgtaatgcatgtcaattagccaaaagtcatcaattaccatatcatagttctacttttcatgctacatcacctcttgaactcatatattctgatgtctggggtcctgcaccagtgtctattgatggatacaaatattatattagttttattgatgcatttagtaaattcaaatggatttatctcatgcatgataggactgatgctcggcgcattttcttacaatttcaggctcatgtcgaacgtcgtcttaataaaaacattaagtgcgttcagtccgattggggcggcgaatataaaaaacttcataatcgtttcttcacttcccttggtattggacat

SEQ ID NO: 3501 - DNA, 286 bp, Zea Mays
gtgcgggcgagatttagggtggcttaccgatttgcttgcaacgttggatcgacgatggatggttaggattagagctccatttcattaaatcttggccgtcgatctccgatcgggcggtgggtatcgtgtaccgcttcagtgaagattagatctaatctgcgccctagaattctaatcgaacggcccacgttagtccataccccttcgcgggtcagatttattaaagagaccctggaccttttggaaatagaacccgccatccagagcacaacgctctgagtctcgg

SEQ ID NO: 3502 - DNA, 704 bp, Zea Mays
tgaagctagcacccttgtcgattagttcacagaacagcttattcagatacaaatcagattacacgatctcggggaggaggggggtctgaagctagcagagcaatctatatgaaggaatagagaactagggaaggaggggagaaaaggatgaggaggagtgcaaagctagaagaagaataggacatgaactgaatgccctcccccttgctgatgtctctcctcttgtagttgctgcgatttgttacacaggcgaatgggccatggcccacacgagaggtagcccatttgatgcaaatacctgtcattaccctcttcttgagaagctgattgccccaagcagctgtacgaaaaccttggagatatcttgtcttaaagccggtttgcagagacatccattgttacttcaattgtcccctggatatctctattgtttcctggtatgaaatgatcatgccttagttccgatccatttcgtatggcgtcactggaacacatcttgaagacgtcaaatgaatcagcacgcaaaaagtgcacaagtttggctcctgaaccccatatgattctggacaggtcaaggcaaaattttaatacgctaactccagtgctcccctttgcttccatactgatcaattttggagtaccaaaaggctcacaggacgaggaatatgtcaagctcaaccaattcgctccagactgcagttcct

SEQ ID NO: 3503 - DNA, 482 bp, Zea Mays
cccatctggccgcttgaccgaccgaactggccaatcagcccatagccatgcatccctctccctctccctctcttgaacctatgacacgtgggccccaccaggtcttcttgtcctccattcctgttcgatggaaacaccgccagccgtttctttgtgtgcaacgcgttcgactctgcgtcgcctgcttggctcatgccctgccttgaggagggcagcgctcgcgccaaccaacctgctgcatcgcctccaaaacagaacgtcacgtcgtttccttcccttcccattactccgactgtttccgtggctcgccgttaatggcgctaccggtccctgctccttcctctcccctcggcaccatctcatctcctctcctctcctccccggctcttataagccatgcccccgacatccatctctgttccccctgctcgccctctctctgccttctctcgccctcccccacgcccagctgttttcgtgct

SEQ ID NO: 3504 - DNA, 722 bp, Zea Mays
caaacctaaaattgccaaatgaacagccacacgagtagttctctattttgtaaaccaagtctgtttgtgtttcagagaggtgtggtgttcatatttgagtgctcagagagttgtcttccatcttatactcgagcatcgcaagatttgggcggggctggcgcgtataatgggaagtacacgagcatcgcaagatccgggcggggctggcgcgtagaatgggaagaatgagatggcggggtggtcctgcacttgcgatgggatgcgggccgatggtggtcctgtgcactggatagcgacgaggggattggattgcgattccttccatggcgacaaggcatggatttcgtttggggtgcagaggatatgggtggggcatccgcggtgcatgggaagaatgattgggcagggtggtcctacgcgtgcgggtcgtcggcgatgggatacctgcgtgctggattgctaagaggcgtggatagcggcgaggggatgtgtttccttgtgtggcagtgacatgatttttccttccatggccgattgtggctaggaccatgcagatgcagggatagtgggggagggcgtgcacggggaagaagggagacactaacatgtgggtcgtatgcgtcgtgaggagacagaactatacgtgtacattcgggccgcccgacccagccaggcccaagcccaaaaaggcccgtattgtttgaatttcgggccgggccggg

SEQ ID NO: 3505 - DNA, 1564 bp, Zea Mays
tttggggttcagggtttattgtgtggggtttgggtttaggatttagagttcgtcgtttactgtttagtgttgtgtttttgggttttgagttttaagtttgaggtttgtgttttggagttcggggtcttgttttagggttcagggtatagggttcacaagttagtcaccggaggctaaaaaccgcgcttcctgtttcagtggccaaaacatagagtgtggacgagaggcatgaaattgttgttcgacgatgaaaacatgtgtcgcgggaggccaaaaatagccttaccggcctccaaggccaaaaatgtgtacaatggttcggacactagtgtactatggtttggacactaaattggttgttcggccatgaaaacttgtgttgtagctcacgcgaggcccaaaacagccttactttactttttagggttgtgttttagggtttggagtttggggtttggagtttagggtttacagtgacactagtgtactatggtttggacactaaattggttgttcggccatgaaaacgtgtgttgtagctcaagcgaggccaaaaacagccttactttactgtttagtgttgtgtttttgggtttggagttgtgttttggtgttcgggttttcgttttagggtttggggtatagggttcacaatttagggttcagggttcagggttcgggctttagggtttggggctctgtgtttagagtttgggcgggaggcatgaaatcgttgttcgacgacgaaaacatgtgtcgcgggaggccaaaaatagccttaccggcctccggggccaaatgcgtgtacaatggttcggacactagtgtactatggtttggacactaaattggttgttcggccatgaaaacgtgtgttgtagctcacgcgaggccaaaaacagccttacattactttttagggttgtgttttagggtttgaagtttggggtttggagttttgtgttttggtggtcgggtctttgatttagggttcgaggtatagggttcacaaattagggtttggggttcaatgttcaggccttagcgtttggggctcgaggtttagagcttaggcttttgggattcgagatttcgggtttcgatttgagggttagcgtttggggtttaatgtttagggtttggagtttgggatttgtgattttgtgttttgggggtcgggttttagtctaagggttcgcggttacgggttcatggtttagggtttggggctcggggtttaggatttaagtgttttgtgtgatgtagctcaatagatgctaaaaacaacctttcccatgccagtagccaaaacatgtttggcgggcgggaggcatgaaattgttgttcgacgaagaaaacatgtgtcgcgggacgccaaaaatagccttacaggcctccggggacaaaaatgtgtactatggttttaacactagtgtactatggttggacactaaattggttgttcggccatgaaaacatgtgttgtagctcacgcgaggccaaaaacagccttacctgtcttagtggccaaaacaagggtggcgaacgggtggcatcaaattgt

SEQ ID NO: 3506 - DNA, 582 bp, Zea Mays
gggcgctgaataaccccttttatatcttccctgtgacttaggtcaaccttcacataaaaccattcttgcatccaagagccgggccactttttcccaaatgttggcataggataactggcctcagtgtgaggtacaaagttgtagcagccaaaattgttgtggtattgctctttcctagtcgcctttgtctgatatgataactcgtggatattacagaaacacctggcgtctgcctctaacccttggcttctcatggcccatacaaaaacccctgctttaataatagcttcgggggtaagttcatgaagataaatttcaaaagtttttagaacttcgatcaacatcttgtccatgggaaccaaagtccagctttcatgaagcttctgaaaattaccacttcgccagcttttggaagaggaacagtattctcccctccggccctcacgattgaaatatcacgaaagtatctacctctcattgcttcgatctgcccttgtttaatagttgactttctgaaaacaacatggctcgatctccatggccgatcttcggcatcttcatttccactttctacatcgaaac

SEQ ID NO: 3507 - DNA, 1021 bp, Zea Mays
tagggctacaagtttgttacagatggattggcaagttcttgcacaaaaatccaagatctaggcgttgcaactctgtctgtcaggcgctctgaatcaggttttcgatggtacagtgttcggatcagatcgccaggttcagttcatctcgccgccgttgatcccgcgtcgtgatcctcatcgccattgtgattcgtgctctgtggggtgcagataactcataagggtaagaaatatcgcatcgtggatgaactcaggccactgttccgctccggccgccgtacccgcctgagtcacgaccgcttcggataaactcactggagttagccacctcgcgaccttgcgctatgtgttttggtgctttaaccacgtcgcagtgagtcaccttagccacccgttcatcgttggtgagcttgccacggtgaacgccacgaattgcttgcgccagtaacctcttccctctccggccgccaccgtgccaactccaaatcacgagccaccgtccccgaatcctataaattgagcacaccctcggctacgctatgtaattatgcacccaacacacccactcgtgcctccaattactcaccagagagcctcaatttgaaactttccccaattcggtccagagcaccgcgctacgtgagctcgccgtggccagcgtgctacaggtccgttcatgccctttgctctcccgtttcagtacccttatgttctcctgatgctccttggcccgttcaattgagctaaaccgcgctagatcatcgggaacgcctctgttcatccatagttcgcgttgtcaccgtggatagtgtgattaagagctcagatcgtgcaattgatcgaggggaaacgattattaggtgttgaattaggagtcaaccaagttagagcactggtcgttgcgtattccggccagaacgagctcgccggagctactgctccgccgctccacatcgtggacctgactttatgaaagaatagaaggggagggaccttaatgcgaatgtcagcgagacaaaac

SEQ ID NO: 3508 - DNA, 608 bp, Zea Mays
gctagatctacatcggaccgccaggatcaaatcagccatcatgtgaaccggtacccatttatgaccgaaggatctatgatcaacgacccgagagtttaaagtactcagattgccccccatacacacgatttgaatcggatggcacggacctggccacgaaagggtataaagaccttctaatcacaaccgttcatccattgatccacggcggacgggtcttctcccccctcgacacatcaccggtgatggagaacacccaccatgtcggcgccattgatggtgaatcccgcacgagcgctggcgagctctaaaccctacgcgattatgtgcaaaacagaaagggaaaagtggcgagtaacaaggtggtggccgtacggcggatcacactcaggcgacacaaccacgacacacggtggaaagcccagggttcctcggtgtcagcgagcaattgaggaatgaacggttggtttccgccctcccgaggtggtcgcgcacgagtggcacaacaaggcgaacctcctggacggtatccccaggtcacggctacagcgtagcacgcggtcgacggtggcgtgccttcaccaccctggacatggcattggcggcgg

SEQ ID NO: 3509 - DNA, 910 bp, Zea Mays
gtcgttaacaatcacatgaacataacacttcccaccaaaagagcaaacccgagctaaccaacattgtcaatgtgaagcaactcgtcgggttgtgaggtcatcaccttggtgactggggaatgggaagcaataccatttttccatgacgataagggtgataaacaagatattttctcaaatttcaatttgggtaattcttggatgaggtcaagtgagctcaatcgacacaaaagatcaaagctcaaatgatcaatgctcaaaagatcaaagcctcatatatctctttcaaatcgaagaggaagatcctaccaaaagacatcgagaggggtcagacgaatgggaaaatcagctcaaaaaactcgaccaaaaggggagatccgacaaataagatccctctaggcatccaaaacacgagacaaacccctcttaaagcgcacttcatagtcgtcctcaaggagttgtgaaactgaaagcagattgaaatgcaagatcgaagccaaagcaacatccttgggcacaaagatctcgttcacccaaatggtgctatgagagacaaccttatgtcttgatttatccatgaatgtgatgtattccttaccaatcatggggtcgaggctggagaaccatatagaactttcggtcatgtggcacgaacacctagaattcatgagccacgtgttcgccaggcctccgtcctgtatcaatagaaagacatggggtgagtaaatggcacaacattggggttaggatactgagaagaaaactactgttgtggtattttcccatgaaaagtgttaggaaaaacatcaaacatccccggttccatagggggtagcgatcaccacgagaaggaaaatgtggtccactaaagatgtgggaaccaacacctctagcacggggtccttggcca

SEQ ID NO: 3510 - DNA, 326 bp, Zea Mays
tgatacgggcggattcaggagctcaggaaattggaaagcgacagaggaaaaagcgagaactacggttcaaaactcaatgggggacgtcagcagaagtatgggttggcgtgataagttgggtgcaaagtgggaggtcgataactcgggaaaagttgtgatcgcaggaaagcaatcatcactcgggcattacctttaaaatgctaatgaaccttcaaatacatgaacaaagcgtgcaacaatagatcagcagggaaccgcgtcttcattcatagggggctcattacaaacttgagaccgactcatcctgagtcggcatccttacccct

SEQ ID NO: 3511 - DNA, 453 bp, Zea Mays
tagcctccagcccactaccgtggaaaaataaaatacatataatatttggcacacagatgaactacctttacaaattgcaatcagagcaaaaaccctgaccccctgtacaatatgtgattaggcattcattatgttcacttcttcaaccacataattgctgtctggtgcgtattcctcgtcatacgatttcactcgtattgttgttgaaaggcatccttattagtaatccttggtactgctaaggttaataaacagtgtaatgttttactagttactaccgttttagatgaaaatatttggctgcttgtgtcctgttatggctgcagatgatatgttggtcttggatgtattgaatagcctggtgaatgcaccctctaaaatgtcagaactagagattaatattccttcaggtcagcttctgtcactgctcgctgttcattttttttccacatt

SEQ ID NO: 3512 - DNA, 329 bp, Zea Mays
cagcttcgtgaatccggcgagcaattcgctatgctccggtggacaatctcgtccgagcagaccacgtccatgcatggggagcactagagaagctctaggaccaccctccgaggacgcagcgtggccggggaccatggttgatggcagcgaaatttctatctctccttttcacggtggcacatgtctcagcaatggtggttgcaaaagaattctgcgaacgccggggagattattacggtttgcgcggctgctgtgaagattaggaggaacacgatgacacgagggtcccacttgttagcgtatgcgggcgcaggtgaacgaaggagctg

SEQ ID NO: 3513 - DNA, 635 bp, Zea Mays
gttgtggagtgggcgagtgggacgcgacgactgacatggcatgtaggttgcagatggcgtgaagactggcgactggcgtggaggtcatggtttgctggtggaggcagttcgttgtgagagccaatcggcgcgaacgcgagaagcgggaggctggctggggcgtgtcgtgcagaggatgcgggaggtgacacggttgttagcgagcgtgcacgggcctgggggtggagtcatggtttgcttgtgtacggtagaggtgagttggtgtgcgttttggtgcgagtggagaagcgggcgggagtatgttgtggagtgggcgggtgggacacgatgactgacatggcatagaggttgcggatggcgtaaaactgacgactggcgcgaaggtcatggtttgcgggcggaggcagttcgttgcgagagccaatcgacgcgaatgcgataagcgagaggctggctagggcgtgtcgtgcggagggtgcgggaggtgacacgagtgttggcgagcgtgcgtgggcctaggggagggtggagtcatggtctgcttgtgtacggtaggagagagttggtgtgcgttttggtgtgagtgtgtgcatacatgaacagatactacaactgtattggtaagtgagaggcaa

SEQ ID NO: 3514 - DNA, 1034 bp, Zea Mays
ctttgaaggacaaaggtatttaattattgacaattgtgttgtcttgttcttgttgtatagcatttgagaacaaggaccaacatcccctaatacgcgcttaaccccaagaccaccgtcagatacattccccgagatcaagaaagagtaaaccacgattcacccgaggtctgtctccatggtcactcataactctgccttgcccaagcctgccctcgcacaaggtacgtctttggagaaatcattgtctcgaccgaggtcctctctccatggaaccactatttttgcctcgctcaagcctgtcttgggaaaagaagacaaccccaagccaggcctcaatcaaaggctgcaggggacatgagcattcaatgtgtgaacctaccccgcacaacatcgcaggcgaataggagcgactagaccgtggtcccattgactttcaccaactatgataacacatgcctaggtacaatggctacggttcccccatgtcgtctgctaactcctgatgggacgcgcgtacgacaaagcacgggctggtccttgggaggaaactacgccttgcccatggtcggccttagcctcggaacaaactctgcctcgtccgagcccggcctcggctacctgctccccatgaatgccgcagaaggccactcctttgactgtgtcctgcacggcatcaagccctagagaaggctcggccatggcctcgggaagacttctgcctcgcccgagcatggctttggcctcgataataccaacggaaggatacacgacgtgactagaagcaatagaactgacgtattacaaggagctttttgccatactcaccacttctccaaccactatgatttggacaccttccccatcaagagggcttgggtacgagactgagctctcggctctggcctcaactctctgcgtattcaaagatgcaaatagaggaaccagacatctcctccatgcacaagtcaacattgagtagaaggaccataccacaggccatactggctataggggctcggcctcgcctcctcacc

SEQ ID NO: 3515 - DNA, 533 bp, Zea Mays
ggaaaggtcgtgggtcggacatcggtgaagttgcggcttcagggccggctggtggcgttacttgccgccgttggggcaccgccggtcttgcgggggcgcgagtgccgtggtcggctttgggcgctaggtaggagaagggttcctggccatacaattagaagccagtggccaggatcggatgtgtgtgcttttggctgagttctaacctgggtcattggatcctggttgggcgcttgagatttgtgctagggcggcgatggatttctttaaatcggaaccgttggtttgggaacagacggatagatttggctctgcgttccaacccacggattggctatgggtcgtaggatcccgatccaagggctcgcattgcaaactgatcacttaagtgcacgtacctaatctaggccgttcgggtctgatccgatggcccatcatggccgataccccttcactttaccagttcgcagaagagaccctagaaaacttaagaatcaacccgccgtccaatgcaacagccctctgagtctcag

SEQ ID NO: 3516 - DNA, 701 bp, Zea Mays
gtctgaaggtcgaatcctgagctggtgataacctgaccttagatctatctttgaaaacacgctggctcctctcaactggtcgaacatatcttctattctaggcaaggggtacttgttcttgattgtgacttcatttaaagctctataatcgatgcacatccttctagtgccatccttcttctccacgaataggacaggggtggcccaaggtgaggtcctcggcctaatgtaacctttctctgacagctcatcgatctgcttcttgagttcaactaactctggtccggatactctgtaagctctcttaagaatgggggcggttccaggaagaagctctatggcaaattccacttttcgctccggtggcatacctagtaagtccttcgggaacacgtccggaaattctgacaccactttgataatctcgagtggatctgctgcttcacaactatcaatagccatctgataacaactccctttccttggctcgggcgggactaactcggtcacctcttcccctcctagtggggacatcaacttaatggtcctgttatcacaactgataactgcctggtacttatctagctagtttatccctagcataacatctattccctgagtactcattactatgaggttagcgggaaactctatcccccttatttccacacttatattcaaacaaacactatcagcttgaa

SEQ ID NO: 3517 - DNA, 542 bp, Zea Mays
tggttcgaccaaacataaactatctacaacgcggcaccaaatctgcaatgcgcgaagcaaaaggcgaaggtaacggtgtagcgcagagcacggcggtagaacgaaaccaaaccacatggatccaaattatccacaagtgctgagacttgcagataaattggcgattgagcgctggggcataccgacctgcagaccgtaaaccctaacaatcgaggtgacaaagaaaaataaataaatatcgcgacgcaagtggcgtctgtaaagcgagccaacagaagacgtggcgacgggatgatgatcattgatcgcaggagaaagtagatggagggagtagaggactagagtggagggggttcgcacttgggatcgacgcgcatgcgagcgatgggtggtggaggcgttgaaggcagaagggttacccgttgaggaaccccgacggaggccacggcaggaaagcggcgggcgtggtggctagcggagcggttggcggagacgggagaaaggcagacagcacagccgccgcaccggctgcagatagaaag

SEQ ID NO: 3518 - DNA, 556 bp, Zea Mays
cgttttcacttactaccgcacgacaagtgagggcatcacacacactacatcgactcagccttcgggataatgcctgccttccgataattaaacaacatcattttcaattcctcaccctcaaacaaattctgcagatccccctcaccaatactcgtcccaaacgacgaggacaacaaatcgcgttggccaccccgatctacccgaagacaagttcgctccagccccatccgatggcgcctaccacttcgcgacatctcgccaacgctatgcttcgccaccacttttcatcgacggcgttcgaccctcgccctagctgtgggatcaaacgcttcgcccacctttagccgcggcgaagactccgctgcggccacatctaacgtggcaaaataatccaaatcttcatctgaagactcttcagtacaggaaaacaggctctccaactcaccaccattagatgaaaaagacccagattcagaaccagacaaactatcattagtaggcactgcgttcgcggccgccacaaaattagtaccatcagtaggggttgcttgcgcag

SEQ ID NO: 3519 - DNA, 280 bp, Zea Mays
tctgggtggtcttcggaagaagcttgccggtcgtttcaaatcaaagcgccctcgtgccgatgatgcagactataatccaaccatagactcagaggcccaatcttcagctaggggtagcatttctatggacacagaagatgttccacacgctcatcctgactatccaattgacatcacaggatggacctgtccaaagaggagattctctatggcagaatattgctccaggaggacagtcaatcagtatgctctaccctcagacaccaatattcagttcttt

SEQ ID NO: 3520 - DNA, 365 bp, Zea Mays
agttcgcgatgacatctgaggaagaaaacatcctgaattattacatgccaacacaccacctttattacattgcggaacagtaatgattacacatactcagtatacaactcaagcttccttatttatgatacataagtacattacttaaactatactactctaatcctcttcatccttagctgctccactgcccgcttcaggagaccgttcatctgcaaggttcatggaaggaggggccccaaaaaggtctagctccccataagatcctcaatttgctgttccagatggtccagctcccattgctacaacttctggtggcacgttcgggtgcaactgatcatacaacacatgcacctcttcatgta

SEQ ID NO: 3521 - DNA, 410 bp, Zea Mays
gcgggcaccaataaccctgttcctgtaggggtactatcatccaaccgatatcaacgaggccaagcgcctcaaacaccaaagccgggacttcgcactcatcgaaggccagctttacaagaagggggtcagccaacccatgctcaaatgtatcaccgagaccgaaggcatccaaatccagcgcgaagtccacagcgggacatgcggctctcacgcagggcctagggccctagctgcaaaggtgatcagtcaaggcttctactggcccgccttgatctgcgccgcaaatcgggtcacaaggtcatgcgaagcctgccagaagttttctccacgctcgggaagcccttcacaattcacaaagctaatcgcccacacgtggccccttcagcgctggggcctggacattgtcgggc

SEQ ID NO: 3522 - DNA, 625 bp, Zea Mays
tgccacaccttgcccactgaaaatatgaccgaggtatgctatagaggtttgggcaaaagcacactttgagagttttaccctacattgatctttttgtaacatctgcaataccacatctaaatggtctagatgagtgtcgaacgtgggactatagatcaaaatatcatcgaaaaagacaagtgcacacttgcgcaacactggtgctacggtacagttcattgcgtccaagaatgtgttaggggccctagtgagaccggatgccattactcgacattcgaactgccctatgtgggtttggaatgctgttttaggctcctttccgggcaataacctaatttggtggtaactagccttcaagtccatttggctgccattagttcatccatgagctggtcaaaaacgggaactaggtacttgctctttgttgtcattgcattcaagtaacgataatctacgcaaaatctccaggtatgatctttcttcttcaccagcaacaccggggaggcaaacgagctttgacttttttgaatgactccttgtgatagaattttgtgaacttgtgtttctattttgtctttcaaggcaggtggatagcgatatggtcgcacactgaagagtgtggctc

SEQ ID NO: 3523 - DNA, 297 bp, Zea Mays
cagggcccaagagggtccgctatggttagataaagataacgctagtttgggataagatgagaattagagataagattagatctagtgtttagaggtcaaataaccctctctgtataaggagaaggattgtatcaattgaagggaagcaagagattagaaggaaatcccttctctcttgcaggtcgtgggcaaagccatgtggctgacctccccagcgtcccatccttactcgttgtgccacgtccccggtaggatccgcaacatatcaacccaccagatcctgatccctaacaatct

SEQ ID NO: 3524 - DNA, 480 bp, Zea Mays
tgacgagacatcgtcgtttatttctcatgtgatattgccgcctagaacccactgctcagcatcaccatcgcgcgcacatcaccgactttgcgggctcctgcggcgacggacttcatccttgcatatgtagcttttcccgtgtatgacgggtgggccacagtgtagctgtgtttttcccttcggacaatcggatctcaacgaaatcgcgtgcactacgcctattgttgctgccaactgtgttgatgcgggttcctcgtgggtagttgggattaagctggggcatatatatgagcacgccgcctctcctcgatgcagccatccgccgagcgccatcgtcaagcgatagcaagcagagaaagatggagcaccgccacaccattagaaaccagagagggagaagaaggagaaggtcgtactcagctcctagcagccagcgagctccacccttgcctacacgctctgtcttcctcccatgcgtgt

SEQ ID NO: 3525 - DNA, 546 bp, Zea Mays
cacaatcctaaaaatgaaatatatttgccacaagatttagccatctcacaaagagtaagattaaggctatgaaaagcacatgacatacatatagcttgtcagtgtttcgaacctctgctccgataagtaaatttctatgtgtgcattatgcgctctgaacgatgtgctcggtgggtgcaaggattatactggttcgggcagaacgtccctagatccaggcttcggcggctcacgctaccagcacctttgttactcgatgctcgtagtaggggttacaagcaggcgagagagggaaggaaagctcccaagtctcttatgcatgggtgggcctaaaagattatggggatggagtcctacgttaagccttggctccagcgtttcttatgccaattaaatataatccacaagtgcacaaattcatgtttcagcctttcacctagtcaacattatttatccacaagtgcacaagtattctagggtattgaaaatacacaagtaaaacaagaagtaaagtagcacaaaataactaaaactgaccgatagatg

SEQ ID NO: 3526 - DNA, 613 bp, Zea Mays
ccggaaccctgtacatccctgacctagtatagggtattctctgtcccgggaccttgttgtgggtgatccggaccgcactcagaggggtccgagtcccatccgggggaacgtgggggtcttagaccgtacccggaggtccgggccatgtacgttggggtccggcactctcccatgggagtctgaatccaccgaggatatcatggtatatgttaccttccctagtcacttggcagccccggtgttgcctacgcggtggggttgggcgctgtttatcgtgcatctagagatagacgcgcgggtaccgcaccttcatacttcagtaaggggtacccctgttctagggtaccgacagtggcccccgggcccaccttaagggaggttacaagcctgcaggtggggccaaagcctgattgtcgtgccatttttgggcacttgctgacgtagtcatcgtcaacccgccttcggtcatgtcgcctgccacgtccgtccccgcagatggctggcacgtggcccccacgcccggcggttttgttaggccgtgcgcggggcgtctcgctgccgccgccttagttaaagatattcctcaacggcccttaggcgttgtgcggtcgtg

SEQ ID NO: 3527 - DNA, 342 bp, Zea Mays
tgctgactgggggaggaagaagggccctcaccgtcgatccggttgcggacggctggatctgtgctttggataccgcttcgggtgggagaaacgattgtcgttgatcctagatcgtatggccgattggggcactcggggtatgaccgtggattgaaatccaatggccccaagtgcataccggttcatttaaatgataggactgatctgggacgtccagatcagatcgggtggctaggacatgttcttacccctttggccaggacgtgttacaaaagagcccccaaggatttagataataaacccgccatcctcggcgatgttcagatcattacaaccaggtcc

SEQ ID NO: 3528 - DNA, 494 bp, Zea Mays
tgggcgaacagcggtagtattgacagtttctggggatttttcgtgggtaattggtgataaccagtataataataatgtagagctttgtcatacctttccaacgagtacttatgcgctcgattcagagttgtattttggtagatatcgcagtttgaatccgggtatgttgctgtaaaaaacagatttgcaggtgggcgaacagcagtagtactgacaatttctagggatttttcgtaggtaattggtgataatcagtatgataatcatgtagagctttgtcatatctttccaacgagtacttatgcgctcgattcggagttatattttggtagatatcgctgtttgaatccgggtaggttgcggtccaaaaacagattgcagggtttatcttgtggactgtgttgggctaattagattttggaatttaattataaattgtatacaaaactggtggggaattttatgtagatgcttccggagtttttgattgatat

SEQ ID NO: 3529 - DNA, 642 bp, Zea Mays
aatggctgggggcagcaccagcttgtgggtggtgcgagtttggagatgcgccatgggaggaagatagagtacctcgacatcccactcaaggacagcatcaaaggatggcgtctggaatggtttattgtagagaatcactgcaagtctctcccccctcagtcagggagacagccggatgttcgtgctccaagttggagtgaatcccccacagacttggagatagccgaggccagggttctgcttgccgaagttgatttgttgaaggagaaaggtctgactgctgaagctgtagtcaccgattttgtttttaagaacatttagccactgaaggacagagcatacccggcttatctgtatcgtggtatcactgacttaacttgggttaccaacggaaggattcctgccgtggatctggtaagccggctcgagatgattcttaggggcaaggtgtcgaacatcggtgctcctgttgcgtattctgcctggaatctgcctccttccaagactttcgtcagttttgtgtcaaatcctcctgatggtggcagtggtttgggtcttagagtacgaccctctcccgaagaggttgaggctttggttgttttgcttggtgatatccccaatgatgagaggcaggttcatttt

SEQ ID NO: 3530 - DNA, 477 bp, Zea Mays
ctcgcagccaagcccggcagccgcgaagtcctcctccaaatcttcctcttgtcctcttcacgcacccgaaatcgagtcctcatcgcctgcatcgatcggccaatagaactagaaacccacgaaatctcgattctcgaaccgaggcttcagaaaacgcgttgatctttcagataactagccccacccccaccctccagatcccaaccaggcggcgccccctcgccctcgtcgggggtcctggatctgtcgtcaagccgccggggcgccacggtcgctgcgatcagctgccctgccgcgtgtcatgactgctatggtcgctgacgaggaagtagaagctattagtgtatagagattctgtaatggtgtgatgggctttcaagccaagatttgtgtataagtaattgggctgttaagccagggatcagtgagtgggccggcccaatagaccaggcaatatatactgtaacctgtcatcgg

SEQ ID NO: 3531 - DNA, 487 bp, Zea Mays
ggatggcggcgcgcacccaaggcgacggaagcccaccggcgaacgcgtccaacggtgagtccccgaccgattcatgcacccaaatcagttttcatggacactcgactaccacgagtcacgtggatcactcccaatcatgaaccgttgcgcccaggtccctgcccgcggcaaagcatcgaatcacagcggcatcactacggcggcgagaaatcagcccacccaaggctctgattcggtcgggtgagaaggagcaaattattccatgcgacattgcgaagctactcggttcgatttctgaccccgaacggcatctaccatggatttcgcccacggcggcaaggctcgccagacgccccaaatctcactgaatcaatgctatgcatagagaagcatcggacgaactcggtgggggtgtttcttacgggaaatcgacgcgcagatcaccacggcgatgggagcggcggcccggtagcagcacagagtccac

SEQ ID NO: 3532 - DNA, 476 bp, Zea Mays
cagcgactcgaggcaccccgcgcatggcccaacagtgacattaagtacgatggtcacgggccagtcagccatgggaataggcgtagcagttggcatggccataggcgggccggcagtaattgcagcaaccggcgcgtaggagcagtggtccaaccgccaatcagactctggtcccacctgcaggctcgcatcctcccctgaggtgggcccgagggccactgtcggtaccctgaatcaggggtaccctcttctacggtatgaaggcgttgcacccgtaccacacctccaggtcatacggagagcggctcccgaccccaccacatgggcaggactaggggctccacgtggcaagggaagataatacatcccgaggtgcatcgatgggtccggacctccaagggacaccggacccctgtacgaacgggtccggagctcctaggaggacatgccgggtccctcgaataagctccaggctc

SEQ ID NO: 3533 - DNA, 281 bp, Zea Mays
caaattcggccaccgtactgcacacgccgcggtggaagtcgataggcacgccggcgacagccgccttccggccttgtgccacgtacttgggcacctccaccgcatcgccgtgaacccttgtgactctccgtggctcgtcggagtgactgccacagtagatgccacggattcacgcgcgccagtgaactcttactcctccgaccgtcgcgcgtcaccgctaaaattcccggccaccgccctcccgtagtataaattgaccccgccgtgagctccgtaaggta

SEQ ID NO: 3534 - DNA, 676 bp, Zea Mays
cttaatcttagcaaatggatcatggtctggttcaagattatgatgacgacgtctaccattacctcccataccttgtcgattacgtgtgaggcgttgtcgcagtggtgcataaacatcatcgtcatcgtcgtcgtcgtccacaggagagtgagctggggctggagttggtggtgagggacgagcctctagtacgtccatgcatgtaataagttcagcaactcgtcgatcaagcagctcataggatgtcgccgcaaagtcctggtatttttttaaaacttcagtcatcgcgctcatcatctccttcaattccagctgagagacacactcatcgtcgttaagcttaagccccttgtccttatccatttgattctttggtcctgtcattgttagcacaaaacagagacaaaaaggcaacaaacaatgtgaaccctacaactatctctcagagtggtggtggtggtggaatacaaattatgaagcgtcttacccgctcttacaacgttcttaccagcactgcaggtggcaaacggtgaccggtgtgactgtccaacgagcgtgggtgtgattgcaagggagtacctattctgctcgagagaaagctggagttctgggaaggctgactaaatatatatatgtggcacacaagtcagtaacagatagcaatgctgaataagtg

SEQ ID NO: 3535 - DNA, 535 bp, Zea Mays
gaacatttgagttgacagcaagacgactttgtaacactcgaggcatgcggtcggtctactcctccgatccatcctgctagtagtactactagacatcatcgagtgcaatggttaaatgccattgaccttcttgacgctatatatagctgcatgtgctagctgctgctaggagggagccagctagccactcgtgctccattttctacgtgctccttcctatagtaatagtatagctgatgaaagccctgcctgtatgtgattaggtcagctcattagttagctcaaactaaagcactacgtatggtccgctgatgcaatgcaaagccgagagctagcaagggagaagaatgatggcgtgcgtacgtgcgtatcttccgaggagtaggacgactggctggctgcctacgtcatcaattcacctccatcatcacactttgctctgttgccaatgccagcctcgtgtcttgaaatgcagctgccgcagtactccagtccagatgacatgacgaccagcattgcagctcgtgaacagcta

SEQ ID NO: 3536 - DNA, 1510 bp, Zea Mays
ttggtcaagtgtcacatgccttagctactctgattttgtgaaagcttgttttgtagtacccttgaaccgatcacgagttatatgcattgaacgaggtgggcatgagcacaacacacaaggaccacatgcattatagattagaaacgtgttggggatatgatccccagactctagggcccattggtcaatgagcatactagggaaagagcctctggcacctagggtccgctagtaaataaaatgagataagtaacatctaacctctaagaacccgcctccggacgaatcctacgacatcaagtctagggttgggcatggcggaaccggacagggtgctgggtgtgccgaagggaaaccactcgagtggatcccgcacctgacatgagacaacccgtcataaatgactcaccatattaactgcgcctggcgcaaagccacaacagaagtgatgatgtacctcccactcatgacctacccctcaagccatagagtactcatgacctatgaaccgccccgggttgtagagcacccaacacctatgagacccactaaccgtggtgcatttatggaccttgtatcccagctagcagcacactcatgacctatcagcactaggcctcagagtgcaggccgctggcagggcacaacacaatgagccacaccgagccccaggctacaatggccaggggtcggcatatcccaaatgatggtgcccgggcccacactaccggcgccgttcgtaataatgaatacaggatagccaagagatcgcaaacacgtgtggctttatcccatggtaagatgcccagttttaccatcatccggtggctcgttcttgaggaagccatcgtgggtcaaccccctcttcttggcctataaaaggaggaggacgacccctagactcgtgagggttctgtgtcttgagcagacaacacaaggacagacccaaacaagacgacgcccaggagaccgatgaataggatgaggacctagaggccgaagccctgtcgccaagccaaaacttaactaggactccaccttgtaaccacctccaccacaaacaagagactagggagcctctcctccctctctcaccatacttgtaacccctactacaagttttgatcatcaatggtgccgatagtgtaagccaccgatgactgaatgtagggatgttctgcccgaaccagtataaatcttaagcccaccgcacacaccatttggagcccgaaatgcacacaataaatttattttccagagcgaggttcaaaacaacaatagttagcatgctaggtaggggacttacacgttccacgatgaagttcttcaaagctacgaatggttggtaacagtgttggcacggataggactctcggaacgaccatccgttttgggagtcttgatttcatcattgacagcaaggaaacaatggaccagtccccagaaaccccggttccccggacaagcaaatcactcgacgtcatcgaaggctttggccacctctggcttg

SEQ ID NO: 3537 - DNA, 635 bp, Zea Mays
gcgccgacatgtggtccccgagagtcagcctcacactctccttgctctgacattgggacccgcctgtaagccgttatccgaccacgggagcgcgcgccgacatgtgggacacactgtcagccactccttacccggattcgtgcactgacctatgggaccgggtgagcaggcactcttccgcaacagaaatggcgtgcatggcggcggcgtgccgcgatccgtggtcctggcttaggaggacctggccgcccacctcgccacgataaagtcgtccgtgtgcaccagggagttactaggttgtgccccgcgagactcatccctagcctcgagccctagttcctaccgtgtccgccgagcgagggtgagaacgccgccatcgtcgactttgcttcccctcaccgcttgtgctcctatccggtgtccggtggagtcggattatgctctgcgtcatgtctggcagagaagattggtgcggggtgcaacagtacattgcgaatttctcgcgggcgctgcctcaacctcacttctccgcccctcgccgcgattggagccctcctctgcactacgttcggtaataccgcacccatatgattcgcgctagttctaagtggtgtttggtcaatctcgggtaaacc

SEQ ID NO: 3538 - DNA, 555 bp, Zea Mays
cgtggatcaactccgacaaacaattacacggacactagggcagtaacaggcgaaataagggcataggaaggttgctcaccttgagtgcagactcaggggcgcttgagcgatggcgggaacgtcggaaagcctcgggtcgacggtggcagactctggctacacggggaagtctctggtgagcgtggaccgggcgaaccagaggagtgtcccaagttggtgacggcgaggcggaactcaccgaggcaacggtcgtggcggtggctcgacaatgacagtagaatgggtgcgagaccatggcgagcggcggcggaactccctaggcatgtgcgtggtgcgagagagaaggtgagggtgtttgcatgcggcacaactgagtgaggggagtgagtgaatggggtgcaggcactaaaaggaggttgggtgcatgcagaggtggtcgggaaacgcgcgacgtgggcgtgtctatggcgggttgcgggctggaggttagggaagaggtgggggctgacgggtggggtccgcgcggagagagagaactcgcaaacgggcggttag

SEQ ID NO: 3539 - DNA, 277 bp, Zea Mays
cggcagtgagaagctgaagcctgaaactgacagattgatcatcatgccaaattatctggacgacgattaagaaacaagaatgcagtagttctagcaagctgcaaccacaataacgtgtgtgctaacgacagtgtcaatgactcaagatcatgaaactgaaggttgatccttgcacacggaccggagatgtgaaagttccctgccatcttaggatcggggcgtttgggacctgtcaaattcgtaatcagaacggcgagaggtgaatattttgcattag

SEQ ID NO: 3540 - DNA, 540 bp, Zea Mays
gacaacggcgacgacggtgccagtggcgaggtgacattgacttaagtagaagtagtaggtgtagtgtaggggtagcagtgggggcaggagtcttttgtaaggatcaatttataatgaactaattttgctcatgtaatgacacccctcttatataataaagtcgttgtttcctacctttttgagtactgagctctctctctctttcatgctgcgtttgaggtatgatcgctggtgttgagttcttcatttttctcagtttcctgtatccttgtgctttagtattgatgactgacttctcccgaccgacttgtacgccaaaatgagttctttgtccaattcaacttgtccgattcatcacctttcttttcgattctaaaatattgtctccctagtgctgatgctatgataagtaggggtagttatatatacgtgcttatgcctgacagtttttggcagaaaccctagcgcttctttcgctgtaatctcttcctttgaaattctcctaccttagtgaccccgctctcgattctgtggtcacga

SEQ ID NO: 3541 - DNA, 502 bp, Zea Mays
ctgacatcagctctatagcttctggtgacgttggggtccttttgttgatattatcaaggccgaagccacgctcgggcgagagggaattcttcccgaggccatggtcgagtctgctctgggcatgcaattgtgcgaggaacagttgcaggagtggcctcctatgggatttgcagggggcagttggccgaggccgagctcaggcatggcagagttttttccgaggctgaggccgacttcagacgaggtggtgttccctcccgagggtgagatcgtcctctgccatacacacgtcccatccggagttgtttgaactcagcagacgatgtgggggagcagtagccattattcccgggcatgcgtcatcgtagtcggtgaaagtggatgggaccacggtcctgtctttcctatttgattgcaccatcacgttgggtaggtattcgcattgaatgatcatgtctctgtggttccagagacctttgactgaggccggcctcggggttat

SEQ ID NO: 3542 - DNA, 653 bp, Zea Mays
ccgccgtcgatctggggcgagtatatggtccgggagaatcgccgggacacgagcgaactaatactccctccaatttgacgatgtgatgagcggggcgggcagaattgatcgccggagcgtcaactccgccacggtcccacgctacgccatcgccagatcgaacaccactctgataacggtgagaatcttccccatataattcgctatgcctttccgtacatatagtgtcgttcgccgtagtgattggccggcgggggcgggcgttggccgaacgccggtgaggctcaccgctgttgatggctgggcaccgccgtggcatcgtcgggctgaaggagaagatccatggccgaccgatcttattcgtgcggctaggattgatcctgggcggtccggttcagccattaaatacaaactattgatccatgtctcgacagtgcggattagattattgtttcattaaatcctattcgttggatcccaaatgtgcgcgtgagattagaagctcgcgtacctgttcgtgatgacgaggacctaattgtcatcactgatccgcgatcggacggcccaggcacgatgataccccttcgcgggcaaagtttctaaagaacccccaaacttttgtcaaataaacccgtcgtccacctttatgtaaa

SEQ ID NO: 3543 - DNA, 347 bp, Zea Mays
aagcatataaggtgtaccagtctctatttgtgccttcaaaatgtcaaaccagagggtctgtgcaggaacaactttctttgccttgccctgaatccagaaagcaaggttagtaaagcacattcccatttcaataaagcgtacatacaaatacagtgttcacttttcagcttacttggctctcatatttcttgtacaaattatcaaactcctcaccccagcaatcagccaaccctggagcttcattagggcaaaacaatgaccattctccattactctggactctttgcatgaatagatcaggaacccatagcgcatagaaaagatcccttgcacgattttcctcctgt

SEQ ID NO: 3544 - DNA, 652 bp, Zea Mays
agccggttgtacatgtcttgaggctcctcccctcggccatggtgtgttgatcgccattgcccatggttgacggtgcagacgttgccttggacgaagaggaaggagatggaggcggcggctggaatggtggtgaggctgcggtggaagattgggtggaggtggtgggagaggatcgacgagactgagataccaggttgtcaagggcagtgagcccgaggatagggggaccttggctacgtagatcgtagccggtgtccgtgatggccggccgggttatacccccttgccgccgttcttcgtcggtgggttattcccctagccgccgacttaggtagaggaagagagaggattagatagtaatatctttcttaatttccaagtgtttgattacaacatatttatagcctccggctcaaccaaaaggagtaacaaactccactaattaaggaccaaccaaaatagctaaagatctccacatttatagcctttcggctcaaccaaaaggagtaacaaactccactaattaaggactaaccaaaatagctaaagatctcctacttttcctcctagccgctgctggaggtcgtgccctgcgtgcttgccgtgcgcgcagcagcgcgttcttaggatcggcccacgtcacgggccctat

SEQ ID NO: 3545 - DNA, 425 bp, Zea Mays
gatcttttttgctccagcgctgcaccagagactactttcatccctaacagccctgagaacttcctgaacattgggcctatgttgctcaaacaagcaagcattacgatgcttccacagttcccaagcgaccaaaatgataaaagaatttagacccttccgcatttccttaggagcagttgagattactgtccaccaccattttgaaaaacggaagcatctggcgccaaggcagtaaggcccaactgaagaaagatgcttgctcatacttgtctagcaaaaacacagctggccaagagatggtgaatgtcttcatcatcttgatcacagagcgggcacacatcagggtggggcaagcctctcttagcaaggcgatcaaccgtccaacaccggttatggaacaccagccaaatgaaaaacttacagcg

SEQ ID NO: 3546 - DNA, 367 bp, Zea Mays
tggggcttgtgccgatcccgaagaagctgttcgcgggcgcaatcggtcggtggtgaccggtgaccgtgtgaatctctcgccgaagttagtgatccgtcgtgcgtcgcgggcgacttcattaggctcccctcctcggtgagtaagcaccacatcgtgtttgcccgttctttacgattgtgtagcacccaacagcatagagtttagggcgctaaatcaccatgcccagaagtccggtgatggcgcgccgccgtgctgagtcccggaccaccgtagtcttgtgtggtgagaggaggagacgatgtcgcggccgtcgatccggtcaagggcagctctgattagacgaccacgtatccattcgcgctgtgag

SEQ ID NO: 3547 - DNA, 584 bp, Zea Mays
acctcgtgcccggcttagggtcgccggagtcactatcgtggacttgagtttctgaataagcaaaaaagacagggatctcagtgctaatgtcagtgaaacaatcaaatattacataggacctttattcggttagctgatgcaacgagggtaattgcgcaaaattgcacagcgctggcgcgggtggatggcgcggggccagttttctcatgtgtttgtggggcgagcgggtcggtttcggcccagtcacttccgctcaactcctgttttttaaagtttatgttctggatcggttattgtgacagcgatgacttggttgggttgtgacagcgatgataaatccactaaagaagcaaaacaaattttattttgatatagagagactattataaactatacatgtgatggttgcttcggtagagagaagcttattaaaattaaattttttatgaactatttatggtcaacaataactcaagagaggttaaatggcttggtgattctatatatcgaaaaaagttgtaggatgaggcttctatatcgaatttcgcactgggcccctgaaaagccaggaacgaccctgcttg

SEQ ID NO: 3548 - DNA, 1655 bp, Zea Mays
actgaagggacgaaataatctgctgcagtaactcaacaaataatctgcgttccattgaatagaaaggagattcctccccatggatcccctcatgatccctgatcaccaaactagccctaaagaagataggctggggtttcatcctgatggtaaatgaacagagaagtatctaacttagcttctgtaaaaccaagggacttcatgttgggagcaaaccgagtataccaagcacgaggcacctgtgtaagtccataaagagacttgttgaggcgacaaagccagttcggatgagtggaatcaacaaaccctattggttggctgcaatatacggtctcggataaagtgtcgtgtaggaaagcattcacatgcatctgatgaatcgaccagtcccgggagagagcgagagacagaacaatacgtactgtagctgatttgatgataggactgaaattctcatcatagtcaatgctctatcgctaggtgaatccacgacatacccagcgatccttgtaacgttcgagagatccatcagcgttgaacttgtgcttgaagtcccacttgccagtgatgatgttgacaccaagaggctgcgataccaagtcccaagtacgtttcgacattagtgctgcgtactcatcctccataacacgacgccaatgcagatcagcgagaccctagtggaatgaagacaacttgggtgtgtgtgtgtaacggagtagagggttgttatccggaaatcgttcttggcacgcgtggtcatacgataggggttgaccacgagagtcacaggggaagcccccagaggaagaggtggcagcgccaatggagcctccaggggtgcctgtcgagggcgccgttattaagtcatagtcggcggttggtgtagcgacaactgtagagctgcaacccgtaggggagctggtggtgtcggggatgtcgtggccgcgcgtggcgtgggggtcctagtggctggagatgcagcgcttgtcgcagaggaggtgggtgctgcatatgacgcagtcgactgaggagaaacacctggcaggagcagcggtgctgcgctagaggtaggtgccggcggtggagaaacacttggcaggagcagcgatgctgcagtagatgtagttgccgatgctgcaactaggggccttaggcgacgccggggacgatggggtacctgcggatgaaaggggaaccgatatgcaggaccaccaaatcatcatcggaagacaggaaatctaaatcattagtgggatggggcgaggtagagaaaggtaagtctgcctcatcaaagaccacgtggcgagaaatgaggatacagtttgtggataggtcaaggcggcgatagcctttgtggtcactagagtaacctaagaaaacacaacgggtagaacgaggagccaatttgtggggagcagtagcggacatgttgggataacaagcacaaccaaatacacggaggtgctcataggaaggagcggtgccgaacaaggcgacataggggatgggagcgttgattgttttcgttgggaggcgattaagaaggtatgtggcagtgtgtagggatgaaaacggtttcggaatttttcggtataccggaaaccgatttcgaaatttttcggtcggattcatcggtaacggtatttttcgaaaac

SEQ ID NO: 3549 - DNA, 318 bp, Zea Mays
ctctctattgtccataccatcgttatgttggacacattattgaggattgtgtggcttttaaagagtggctccaacgagcaattgacgagaagaggttgggactccaacctgatgctgtaaatccagattatcatgccactaacatggtgagcattagatcaacaccaaagagttctgtggaaaaggaagattgggttccgttgacacaactagaacatgagtttgctagcatgcaacttactcaagacattccaaaggttgacactaaccaatggcatgtcatgaagcatcatatacctccattaaaagggtatcaac

SEQ ID NO: 3550 - DNA, 467 bp, Zea Mays
gcatgttctaatcttggccgcattgtcatgatccaacggcacccgaccgtcttctccaatcggccgaacaggcagcggcgctcactcccttacggcggtgcccctccggcgagcagcgcgcccaaactgctaatcaaatcgcgttacacggtccaagaactgaggcgaggtgttcgacggaattcttaccgagctatcatgtgtaggagaccccgcccgtgttgacgagcgggactgcggcaacgacaatccttggtgaggaattccaagtaacccacccaccatgcgcgcccacagctgaaacaaacgacaacgatgcggactcatgaagcccccgcgccaaaaacttgagaccgcaggtcgatgtgtatggcttctgggttcggcgtcttcaatgcgatccctccccaaggcatcggtggccgctagagcattagccagagactgcgaccaacgcggcccccaac

SEQ ID NO: 3551 - DNA, 1096 bp, Zea Mays
gaatagcaatcaagtcgcaagtcttggcagacttcatcgtcgactggacaagacccgtggggccgcagcaagagcacttagaaacaatctagactatccactgtgacgacgcatggtgccatgcgagggcaggcaccgcggcgatcatcacatcgcccaccagagtcaaatacaaatacgtcgtgcgcctcagcttcgctttagagtacgacaggtgcaccaataacatagtagaatacgaagccgtcatcctcggtctttgcaaactgcgggcccttggcgtcaccacatgcatcattagaacagattccaaggtcgtcaccagtcagatcgaaaaggaatactcagccaaagagcctgtgttgatgcaatacctcaccgctatccgcagcctcaaaaagcaattcaatggcttcaccctacaacacgttgagcgaaacaaaaacgaagaggccgatgcatcggccaaagcagcagccaaaggcaggccctgccctccgatgtgttctaccatgtcatcggcacaccagccattcataatcccgaaggcttacaaataacgcaaaacatcgatggccaccagatcgtcaaccttataatggtcgaagactggtgggccccaataacactatacctccagggccattaccacccatccgatcgcaacgaggccaaaaggctaaaacacaggagcagggacttcgcaatagtcgagggccagctttacaaaaagggtatcagccagcctatgctgaaatgcataattgaaatcgaaggcctagagatcctccacgaaatccacggcggagcctgcgggtcacactcagggccaagggccctcgcagccaaggtaatttgttagggattctattggcccgcaataatatgcatggccaaccaagtcaccagatcatgcaaagcatgccagaaattctctcctcgctcaggcaccccttcgcagtttaccaagctcatagcccacacctggccactttagcgattggggctagacattgtcaaaccactgcctacggcacaagggaacctaaaattcaacttcatcgccgtcgaatattttacgaaatggatcgagggc

SEQ ID NO: 3552 - DNA, 1609 bp, Zea Mays
gaggtagaccgcgttgacattgtcgcagtagatgagtgtggcgtgagcaaaagggctgtgaagcccctggaacaaccgatggagtcaggatgcctctaccacgccattggccacgatgcggtactcggccttagcgctggagcgggagacaacgggctgtcacttcaaagatcaggagaccgggttggcatccaggaacacgacgtaacatgagtggactagcgagtgtcgggacaactcgcccagtcgacgtctgtgtagaccagctcggaggtcggagagggccgaagaagaaggccgtggtcgagggtggcacagaggtaacaaaggatccgctttgaagcggtgaggtgcggctcctgctaagtgtgcatgtggaggacatctgctgaacaacgtaggcgatgtcaggcatggtgaagatgaggtactggagggccctggcaaggctccagtagttgtcatgtcgttgatcggggtgtcaacgtcgtcggagaccttcgcctgggtgttgattggcgtggagtaagacttgcagctggacatgccagctcgctctaggatgtcgagggtatactgccgctgatggagaaagaggccctacggatggaattctacgatgagcccgcgtgtggcgccgtcggaggcgacgaggctgcacgtggcgcggacagcgtcgatgggattacagtgggtgcggcggagacagaccagtaggtaaaggaagacgagggacatccacaaggtcggtatccaggagtgtgttgaggtcttgaggggtgacaggtcgacaggagggaaggtggcttcgtaaaacacaatgtggtgggatacgatcacacaataggtggtgagatcaaggcatcggtaccccttgtgatcggaggagtacccgaggaaatgacaacgagtggagtgtggcactagcttatgaggcctcgtactccatcgtcagtgctggtgtcgttgacggtggacgaggacgggaaggctggcgcggcgtggacgagtagatggcgcgagccgcctcagcagaatgacgctcgaaggcccaggccagactcatggccgtctaaaggttcgccgggtgttgcatctcgacgtcggatgacaagggctgacccaacccggcagtgaacaagtcaatttggtgctgccgggtgaggttgtcgcaggcagaggagtgccaagaactggcgcgggtattcctccaccgtgccggtgcggcggagctccttcaactccccaagcgcgttggagcggatgggcgggctgagcgcatgttggtgaatttgacgaagcgtggacaagtgatgatgctgagatcacgctccaactggtagtaccattgcgccgccatgccgtcaagatggagagaggccagccacaccttatcctcctgtagcatgcgatatccgcggaaaaacccttcacacttgttcaaccatgggagcggatccgactcaccatcgtagtgcgggaagttgaggtggggttctcgtgggtcgctgctgtcataacgtcgagggccattctcgcggcccccactgaagctaccttcctccgtgtcgtcggcgatcaggcgaaccctgctgctcgtggttctctt

SEQ ID NO: 3553 - DNA, 456 bp, Zea Mays
gggacacacggcggtcgggagtgaggaagaacgctggcgcatcgaacacgtgttcaccggcgtggcagtaactccggtggtcgacggggagtttagagggagccacggcgacatgatggtgaggttgggacacgcggtggacaatggcgagggcacgacgacggtgagcagctttattcacggcggtgagcaaggggaggagtattgcggccgaccgaggtggcttccagcttgacgacgatgaggatcttttaccccgagaggttatccacaagtccgatgcatgaatccaaacgccagcgacacgaatcgcggcggagggatccgtcggcggtgaggacagtcgcgctggcggcctgatccgtttggttactgtaccatggggaaatggtattcagacagcctgacagtcacagtttaggaccaattttctctaaagtttctctagtaactcgc

SEQ ID NO: 3554 - DNA, 1623 bp, Zea Mays
gtgagacattctttcaaccgtggtggtttgaattgtcaaatgatttctccaaaaattcaaaaagatcttgcaagatgttgtgcggaagaggtcactgatgtgatcatgggagaacttggtgataagcatttctccatactaattgatgagtctcgtgatatatccgtaaaagagcaaatggcattaatgttgaggttagtacttacttcttaatgtatttcctttttcattattttgtatgcatctaaaattgttccatattgttattgtaggtatgtcaataatcaaggaaaggttgtggaacgatttcttgcactacaacatgtcattgataccacatccgagtcactaaaggtatctttgcttgctcttcttgacaaatacaacttatcaatttcgaagataagaggacaaggatatgatggtgcatcaaatatgagaggtgaatttaatggcttgcaaaggaaaatcttagaggaaaatccatatgctacatatgtccattgctttgcccatcaattgcaattagtggttgtctcagttgtagttgttgctcttctattcgagatttctttgattatgtctctttaattgtgaccactacaagtacatcttgtaagagaagagaagctttggtagaacatcatcatgaaagacttctgttgctacttgatagtggtgaggtaagtacaggaaggggacaactacaggaaaccaaccttactaggcctggtgatactaggtggggttcacatcaaaaaactttgctacgtatagagctaatgtgggactctgtcatagaagtgcttgggattgttgaaagggatggacgcatatcgtctgcagctggagggttgattgaaaaaatggagaattttaagtttgtcttcattttaaagcttatgggtaacttgttttctatcacaaatgatctttcacaagtcttgcaaaggaaggatataaatattatccatgccattgatttagttgatgatgtgaaatatcaattgattgccttgagggatcatggttgggaagactttcttgatgaggtcaaaaagttttgtgaagcaaaatgtgttctagtgccaaatatggatgatgagataccatgtagaagccgctcaaggcgtgaaaggcttatcatcacaaatcttcatcactaccgtgttgagcttttttatgtcacaattgatcaaatcattgctgatatgaatcatcggtttaatgaagcaactacagagatcttaacatgcttttcatgtcttgatccaaagaataatttctccaagtttgacaccgataagctcttccggcttgctgaaatttatgatgcagatttctctaatagtgatcgttctttaataaggggccaacttgagacttatatactacaagttagaaggcatgctgcttttgcatcttgtaaagatgtagcaagtttggctataaagatggttgaaacggggaagcacttggtttttccattggtatacaaattaattgagttggttttgatattgcctgtgtcaacagcatctgttgaaagatctttctcagccatgaaaattattaagtccaaattacgcaataagattggagatgagtggttcaatcatttga

SEQ ID NO: 3555 - DNA, 707 bp, Zea Mays
aatccgatttttatactttctgttgtacgagaatatttgctagaaatatgtgacctatataattcctgtacttgaataatttgattcagaggatcaaatcttgtgcattcgcctatcaaatttggagcaagatgcaagacaacggtgttgcgcgctcactagtggcttcacgtcttcttgctcaacatcaatgtgtcgataagtgaaggtggcaactgaatctagaggaggctcaatgggggcggtgactgcaaaagaggctcgagcgagtgacggccttggctggatctagagtgctggtggacgaacgaggtggaggcgacgatagatctggaggggtgacaaatccggaggaggacgagacgagatggggaggggactgcgtgtccagccttctgacgagcgttttttgtccccgtgaaaccggactgaaccggggtcacactttctcgttggttggcttccaaacgccaaaatagctacactggtattttcttgcacgagggcgatataacttgggtgaaggctgaaaaacccacgtggtttttgggctcccaaacgaaccctaaagggtttccctggatgatatggtcatctaagatccgatacgcaaaaagtaaggcaccatcgtttttattctaaataagcatatgctcctctattaagcatcaagtcgatcatttggatcacatatatacttaattaat

SEQ ID NO: 3556 - DNA, 372 bp, Zea Mays
aagttttggaagttgaaaatttcctcttccaaagcatctttagctattttcttccccttctcaggtactgttgccacagcttcttcaatagctacgacagcttcttctgtggccatgtccagaagtatcttatcaatgttagaaattgtgctttctaaatgtacatctttagccgtggcagcttcggcagctgcagcttcagtaggtgcaatttcggtcgctgttgtgctctcaacaactggtgccttcggagccgaagcttgcggtggtgtcccttcaataacttctgtcacagtaacaattcttcgtttcttcggcccagttgccttcttcgttatcgagggctccttttccttctgaaaaagcttcgtc

SEQ ID NO: 3557 - DNA, 696 bp, Zea Mays
catttagattagttctctttatcctaaccgtggaatcattgttcaggtctagtgacgtttatgaactaaaacaaggccatggatccacgttcttcgaacacataaactgcagctatgctgacaaataagtcaaacagaaattgatattgacgttaccttagcttcagtggaggttggaaccgaacctagaatcccagttgaacttggatccgaacaccttgacctcgacttgatacgaaagtctgtaggcggcaatgaagacaataataatctgttactaggtcgttcataccttcgaagattaagtggatctactggacatgagggggaggggtgtggcgggatccaggaacccttgcaacacgacaagagacagcggggtgggtacggatggacgcgaggtgcaccgtacctacgaagatgcaggcgcgatggtgggggagctgcggaaccttcgcgacggaggcaggtcggtggtgtcactgctgcaacgaggaaacggtgaaggaaacgcggaggagaagacggtggggacggcaatgggaggaggaattccgtacctgcgtacaccggcggcgatgcgttcggtgcggaccgacggcgctccgttcgcttcgcggcggaaccttcgcgacggaggcagggcggcggtgtcagtgctgcaacgaggaaacggtgaaggaaacgcggaggaga

SEQ ID NO: 3558 - DNA, 998 bp, Zea Mays
tgttcgcagcgtcgggcggaaacagaaatccgccgaatccgcgcgcggcaagaaccgatcccggccgtgtttctcatacgcgcggactcggcttgtgccccgacctccataaaagcaatcgggctttctccctgacatcgcgctaaattttgatggcggctgctgagttctgagaaccaccaagtcacagagaacagagagaaatcgagagaaggagagaggtttagagtgagagagttgagccgccacaagcttcatgggtcggagcctctgccgtgtcctcggtcgggatcttggagttccatcacgttacagggaggttgtaacaccctcgccctgggatttggggggctggtgttcccagggtactcgtcgcgcgcgtgctctgtcgtgaagccgtcgtgcgccatgggcagatatctaagctgcgtgattcacagtgagtcctccccatttctattcaccttgttcccagcatagcattgaaccgcttgggtatgtgtttggggtgctgatgcaccagggcacgtaacgccggtaatggttccaccgtgggtggggcggcggcgccgtcgtgtgtcgatgttgaatgggggggaaagcctctggccgtcgattcacaattggagggtggcgattagatgatgcgaatcgtttcggccagagctatccgggtcgttcgttggcgatcgtaggaatttggggtgatcacggatactttagatcgtgaccgtcgattgctcgatcgacggttctctgtgcacaccgattcattatggggccagatctaatctgggccgtttatttttaatcggacgaccgtaatataccgataccccttcggccgttgctttttgctaaaaagacctcggggaaagacataataaacccgccgtccctcgctactgtgctctgagtcttaggtttatttgcgcagaggcccctctagttttctgtttttatgcgcgcgaaccagagacccgagtaattcaataaat

SEQ ID NO: 3559 - DNA, 718 bp, Zea Mays
gtgttgaggcgattaccgatgctcggtcaccggtggaagagtatgagcatgcaggagggcaaggccgagggtcggggcttcttatatggcaggtttcgggcacgggcgtggggtggagcgcgcggtcgagtcgactgaggctcgtggtgtgcgtggcgcggtcagaacgcgcccagctcgcgtcgaacatgtggaggatggcttttgcccaagttcaagcgtctgtttaactgccctagggtgcctatttcagtaaggatgccatgtaggatctcttccttgcacgaagatcttgcttttccatgtgagtcccgagccatgagacacttcgagtgaggagctacaccagtgtcaagttgggtctgtcacagcgcccatgacgcgacaaaagcgtgcgccaagcgtgtcaaacaggctcggtttggtgtaaactttctccaggacatgtctaacgtgattaggcaccattgtccattggaccatttggatttgagttgagatgttaggtgaacacgacaggtttttgaattcggggtggggaagacttggtgaaaatctggttttcccctagggttccttcggttagtgattaatttgggactgattaagacttgctttgaggaaactttcttactaaatttgatatagatttttatgatctttaacttattcaattagcccatatgctgataaggtctaattcatcttttactttcat

SEQ ID NO: 3560 - DNA, 587 bp, Zea Mays
acgttatcccgcgcccgtagtcgccggagttaggcggcggtattcgattctgacggcggcgagctcaccagagcacaaccagtaggcgctacggagactcagttcctacctcgagtggtgctacgtaaaggagacgacatggcgaactatatgggtaacaactcaccgaagttagggcggcaagcacaggtggtcccgacaatggcggatccgcggcgcagaccgagctccgatgagcaattgctgttgtgtcggaccgttctgggtgagggcgagtcacacacggtcttccgtgacgggtggtagtcaccccacacgtatccgcagggaccgtgacggcgatgagacgacgatggccaatggagtagccccaccgtgcgccagcaaccagtttcctcatgacgacgacgagctaacttagggtttggggaacaagggggaagatgatgagtcagcgcggggctcgcaacacttatactgcggcgcgcgcaccaggaagtggcaaaaaccctacaggtgggtgcgccatgccgagatcgtgggggagaagacggcgctgaccgcttggccccacctggacgtctcac

SEQ ID NO: 3561 - DNA, 455 bp, Zea Mays
gaccaagtaagggtactcaagccatgtctatgagtacgtgaacctataaggtcacacacttaaggggaaggaagcctaactcggattatatccgaaatttgacagggctttagggtcattgatgggcttcggagtcagaagcccaccagaacgcctatataatgaggggcaggggcgcggttaagtgaaccctaattcgccactagtaaatgagcatatgcccgcctctcgccctcgtctagccgtcgtcgcgaacctagcagttcgatacacgacgcttcctccctgtacgtgtggataccatgaaggtgctgcatttggagcactatacaaaccaagcgaggatgtgaagaacactggcgactgcatgacattgctcgacgtgttcgtctacatcgagacgtcttccgctgccctatgcgtttagtggtaattccatgatctataaccgcagt

SEQ ID NO: 3562 - DNA, 675 bp, Zea Mays
gtgtggggaggcctctggccaggtgtcaggggtgcccctggccgtgggccctgtttccttggctttgactaagggtgctctaggggcacctgcgtcgtccctgccgtcgccgtccgtcacgttgactgacactcttgaagcaactcctgatggggtgccgatctccctcgggttccctccaccactcgggcctcacgagactggatccacagcttcagaccctccccctccggcgactatgtccgtggcgcattccaccctcgtcgttgttgtcgctgctgcccattcgtccatggccatcgctcaggcacgtgagcgggttgcggctctcgcttgggagtaggagcgtgtttctacgaaggctctcgctcgccagctagccgaggtcgagctccttcttggtggtcctccgctcgagcccgccaccgatgagggtccctgactatgtggcttcggtggtcgccaagctccacgcccaggccgccggtgtccagaacatccggtccctggtgcctgtcgtccccgacaccacctcatctgcctacgctcgctggtgggatttggtccccctcaccctgtagcgctacgcactcgacaaccatgttctcactaaccgccccacgcctcgcctctcctggttccggatggacagtgtcgtcctctcctggatcctcg

SEQ ID NO: 3563 - DNA, 598 bp, Zea Mays
atagtattctactcatcactaactctggtatgaacctgccccatggatgcacctcaatctccgctactcgtaacaccgttgggatcgaagtttggtgcgcgggttacgggtctggagctctccggcgatggtgccgctatggattgggtgggcatcgccgctgccgagttcagggatgaagagaatgcatgcaccgtccatccataactggatggatgtgattaaaagattggatgagcgcgtcatagccatctgatgggtatcgtgcggttcaggttgtctctggcatacactctcgcgggagcaatctggtccgtagggttgtaaacatatggactagattaggttaatgctttcgcctttgagtcgttcgatccgagcccttagatcaagaactgacggtctgcgtggagtaccggttcgggtgcgtgctcgatctaatctggggcgtgcgaatttgatccaacggctagggattaaggataccccttcaaccatgccatcttacatatgagaccctagacgttttaataactaacccacagtccaacacgggatggctctgtgtcttgggatttattgcaccaagacccttgtt

SEQ ID NO: 3564 - DNA, 520 bp, Zea Mays
gcatacgaggttggatttccgttgaagaaatatagggagcggaagaattgtaaatggttgaattgttcaatggaaggaaagaatgccgaaagggtagctggaaatccaaggatacgtaacacatgttcaaaacaaacacagtgcaaggctgggatgaaacttaaaaaatctacgatgatgctaaagagaatgttattccggtccggattgatctggtaaactatgagcataatcatgaattcttgaagaaagatacagaaaaagggcaattgcaatgcaacaaaacgcatgatcgtgaatatatggagttccttagtgcgatgcaagaaagcaggattccacaacattgcattatggattttgttacagaaatgcatggtggcccagaaaacgttccaataaccgtgcaggacatgagtaacttgtaagtgtattatgcattgacaataattgtattatatattacagaaacaatcgtaatgtgttgagttagatatagtgcataatcattacatttttt

SEQ ID NO: 3565 - DNA, 1293 bp, Zea Mays
atctcggatcaggtccccgaaggtcttgctcattgcccgtacaaaggttggcaaggcattcctcagaccatagggcattacaacataacagtatagtccatctactgtcacaaaagcggtatgcttcctatcctccttagccatccagatttggtggaaaccagagtaagcgtccaagaaggataagaggtcgcaccccgaagtagagtccacaatctgatctatacgcggcagtggatatgggtccttggggcatgccttattcaggctggtgtagtcgatgcacatccgaagcttcccgttggccttcggcacgacgactgggttggccagccacacggggtgatgaacctcttcaataaagccagcgtgcaacagcttccggacctcttctcggatgaagtcctgccgttccgcggactgccttcgtggcttctggcttaccggcctggcgtctgggtagacctttagctggtgctcaatcacctccctggggatcccaggcatctgcgacggctcccaagcgaagacgtcggcatttgctcggaggaaggcgacgagcgcgagttcctatttttctcccagatctcctgcgatgcgggtggtctaggaggggtccgcgctgacctagatggtcttcgtgggtccaccgtctgcccctgtcggctgcactttcggcgccttggagggtgccttgatactggggcctcttcctccgtcatccggccaagcgatctcgaccgccagggcgtgtagcttctcgacggctgccagtgcagcggtgcggtcgccctgcacggtgaggatcccagcgggggacgacatcttgaggaccaagtacccataatgggcaatggccatgaaccggtacagtgctggcctcccgataatggcgttaaaagggaggttgacctccgcgatgtcgaactagaagttttctgttcggaagttctcttccgtcccaaatgtaaccgggagcgttatgctcctgagggggtatacgagctgcgggcccaccccgaaaaatgggcgagaaggccccaaccgtgaccccgggacctgcagctgtctgaatgctgcgtggctgataacattaaggctagcccctatgtcgatcaacacgtgatgtagccgcatgttggtgacaacaggggcggtgatgagcggcagcacgccggctcctgccatgctgtcggggcagtcggatgccccgaaggagatggtagtgccccctccaccgttggtgcggagcggttttggggacccctgggaccgccgaaagtacctcccggc

SEQ ID NO: 3566 - DNA, 637 bp, Zea Mays
tggagctgttgccaacgatgatcgaggtagggtgtgtggaaggaggtgggtgagagtgagatagcatgcctgtagtgggagtggtgtggtaggaagcaccggagtcgatgacccagtcagaggatggtggagccaacgccatggtgttgtaggcagcagcgagagcgctggcgtcccagcctccagccaacagggaccatggtggtgtggtagatgtccccataggctgaagtggaactggtgctgagtttgtcggtggcgcgccgtacggtggtgtgccgaaggctggtggcatggtcagaagagccagcgtcagtgccggagggcgagaggcaccgggagtctgaccccgccacatggagatggtgccggtccaagggttgtagaatgacgaccagttctagctgccaccccggccggtggtacctccgcgcgatgaattgccacccccacgatcgcccttgcgagggcaacgaccaccgtcaatgatgggggcgtggcgaggagtcgccgcgggggggggggggggggggctggtggacgaagtgcagggggcctaccccccggaagatgcctgggtaccagtggtggtgctgtagagggccgaggtcggcgggtgagcctcgtgcgtcatggt

SEQ ID NO: 3567 - DNA, 535 bp, Zea Mays
atcgctggcgccatacttggggaccgggttctctgcaacagccacctctaaggctgaaggattctcagttacctccatgggaatggagcaacctagaccaacttcttgactctaaagaccgcactccaaggtcgatgaggctcgagacgctgcttgggataactctaaccccacattcggaatgccagtgcaaacgtccatcataccaccatctgttggctcggacagcagatcttcaggaaccatatcctcgagagcctgatcacaatttgctatggacaactcttgcagaccaacgagcgcagacaaggctagagaaggaatatcactactcccccactgaccaggtagcgccgactgtttttccgaattaagggaattccctcctcttcttcctcatcctcgtcaacaatacgaacaacacacccattgggatcagctctggccggactgcacccattgggatcagcattgtcaaggtcacacccattggggtcagcgtcagcagggtcacacccattgggatcaactccag

SEQ ID NO: 3568 - DNA, 1589 bp, Zea Mays
gacgaaacgtggtgctagcttccctttcacctggaatcttctgacgccacgcatcagggagaccttgaggtagacgaagtctccttcctcaaatctgagttctctctacctgttgtccgtgtaactcttctgccgactctgagcttcaagtaatcttctgtggatcagggcaactttctcctcagcctctttaacaaagtcaggtccttccagtgcctttcccctacgttggaccacatgagaggggtctggcatttttgtccatacaatgcttcgaacggtgacatcttgatgctggcctgatggctgttattatacgagaactccgcataaggcaaactggattcccaacttctatcgaatgttaacacacaggctcttaatagatcttcgaggaccttgttgaccctttctgtctgcccatctgtctgagggtgataggcggtgctgaagtctagcctggtgtccatagctttctgaaggcttgtccagaatttggaggtgaactaggttcctctgtctgacactatctttcttggaatgccatggagtctgattatctccttgagataaattcgggcaagggtggctcctccaaaggtagttttcactaggataaaatgggccaccttggtaagacggtctattatcacccagatagagtcattccctttttgcgtctggggtagtccggttacaaaatccatgcctatttcttcccacttccattcaggcactgggaggggttgcaataggcctgcaggcttttggtgctcggccttcgttcgttggcaggtgtcacaccgagccacatactgtgctatctctttcttcatccctctccaccagtatctggttttgaggtctaggtacatcttggtagttcctgggtggatggagtaggctgagctgtgagcttcctcgagcaggacttctcgtgcctccccttttggtacacacagacgattcttgaaccaaagggctccttgttcatctgtcctgaggtccggaagttgttctttgcgagctttttccacaagtcttgttgtctctgagtctaggcgttgagctttgcatatgaggtcttctagcattggtttgacttcgaggctaccgttgtttgccaaacatgcattcagttgagctgattccttcttccaatcttctaaaaagttggttccctttatcccaaagggtttttggctgagggcgtctgctaccacgttggccttaccggggtgataatgaatctcaaggtcataatctttaatcagttctagtcatcttctctgacggaggttgagatctggctgagtgaagatatacctcagactcttgtgatcggtgaagatgtggcatttgttaccaattaggtagtgcctccatatcttcaaggcatgcactatggctgccaattccaaatcatgggtgggataattctgctcatgcggcttgagtaggcgcgatgcataagcaatgactttctcgttttgcatcagcacacaccctaagccttgcctcgaggcatcacagaagacgacgaaatcctgatgtatatccggtagtgtcaaaacgggtgcggtcgtgag

SEQ ID NO: 3569 - DNA, 483 bp, Zea Mays
ggagatttgtttcgggtaggaaacgtacagattctcctgttaacggggacctcgtcttgtctcggcatgcaatagtagtataattgcatactcctataaaaaaacagaggagagacggggacgaaaaaggagcaacttgccagctgagcatttgtttgttccctttgactgactgggaggggagcagagcagttcacactgttaatgctgcatgcatgtcctttactatgctggcagcatggcaggatccaaggcggaggacgattgtgcggagcggcttgttgcgaccggtgccgctgccgcccatattttggacttgggatgcaggatactcaaaaccccggtgccggtgccggtgtgctgacagcacagcacagtgcgtcgtcaccgagccaaaagaggcagagatcgatcgttaccactgtactagtgtactggccctcgccctcctcgctctccctcactctcattcagattcaccaa

SEQ ID NO: 3570 - DNA, 496 bp, Zea Mays
caggaaccataattatgaaacatatttttggacagccatattgtgcccagaagttcatgaatttctcgaaaaactaggatagtccaaagcttaatgagcttcttggatttagcttgtgcccaaacgctaccaacgctgcgaagacggacgcatctcacttatccgaagcatctgtgaagactgaagagagtttggcattatgcttgaatgtaaatgacatgaaatatcattataacaaaatcgcgaaagctaatttgtaaaactgctaatgttatctagcataaatcaagcaacaggcaaagcgtacatagaacagcggttatgtaagtcgatttcttaagcaaaaccaaattggcatcagaagggatgtcatgtattcatatcaccgcgggttgggctacaagtgcccatgaactgctcatagcccttgcgcaataatcccagcatcacttgccattggaaaggggtgtgaataaatcttatatctcaggaaaaa

SEQ ID NO: 3571 - DNA, 614 bp, Zea Mays
ggggctcgggacaagaaacccgagacacagcgcatagtgactatggacggcgggttcattataaaataccctagggtctcttatgaaaactaagcagccgaagggggtatcctctaatttcagccgtccgatcaaacgcggatggcccagattagatcctctcctgctaaaatcccgctcttgctctccaccgatggatccgacaacaagggttaggatctaaacaccgaaggggggtaagcctcggtctaatctctaccgcacactcaaatccgacggcgcacataagctcttcctcgcccagacacaagggacacccgcggtgcctgctccattcacggcggcggaccgctggagttcgaatccggccatcccgtgcacgtattgccaattaaaccataccacctataattgatgctacccggaactcaatttcccaacaaattttggttgacctcgagtgtaggacccggtacacggtgtaccgcggcgacgccatggtcggctagtgcacccaggaattcggctatgccatactccaattcgctaggccataatgtgggggaaaggaagacgaacacgatgggaactcacttgtgaccagccgaggtgag

SEQ ID NO: 3572 - DNA, 747 bp, Zea Mays
cctcacacaaggacagtatgttgaagatgtcctcgagcgagccggaatggtgaactgtaaatcgatttctacgccggccgaggtcaagccaaaggtgtttgcactggatggtgaactcttggatgatccaacgttctaccgcagtatagcaggtgcgctccagtatctgacactaacacgacctgatgtggcatatgatgtgaatcaagcctgcctgtttatgcacttccctcgtgatggtcactggagtctgcttaaacgcatccttcgctacctgcgaggaacactgaagaaagggattcatatctcgacgcttgattccagtcagctcatcgcatactctgatgctgattgggcagggtgtcccgatacccgtcgctcgacgtccagttattgtgtattcatgggcgacacccttctctcttggtcctctaaacgccaacacaccgtttcccgatcgagtgcagaggcggagtatcgtggcgtggccaatgcagcgtacgaatgtggttggcttcagaatcttcttcaggaacttgatgttcgcattgataaggccacaattgtgtactgtgacaacgtctcggcggtctacctatctgaaaacctggtccatcatcgacgaaccaagcatgttgaaatagacattcacttcgtccgggagagagtggctgctggtgacttgcgtgtcatacaggttccaacaactcagcaatatgcagacataatgacgaaggggcttccaac

SEQ ID NO: 3573 - DNA, 381 bp, Zea Mays
gatatactattagctttctagcactagtttcctcatttatgttttcctccattccgtgcataggacatgggatgatcccaataatcacctcttcattctcttcatcttagtggctaaagagaaatccaagaatgcatctagatcacactattttatgtagtatggttgaagcttatcaaaagtcacatccatactcacgaataatctttttccaatagagtcccaacacttgtataccttttatgtagaagaatagacaacaaaaacataattccctgcttgaggatccaattttctcattgaacaactaatgtctatgataaagtagacacaaccaaacaccctaggaggcaccttaaattctcacagtcccaatagaag

SEQ ID NO: 3574 - DNA, 329 bp, Zea Mays
gtacaggggtccggtattcatccgtggaggtccggacccaatgatgcatcctagggtgcatcatcttcctttgccgcgcggcgcccctagacctgcccatgtggtggggtcgggtgtcgttcttcgtgcggccaggagacgtcgtacgtgtacaacgtctttatactgtagtagagggtacccctgattcagggtaccgacagtggcccccgggctcgcctcaggggaggatgcgagcctgcaggtggggccagagtctgattggcgattggcctgctgctcctccgcgcctgttgatgcagttactgccggcctgcctatggtcacgc

SEQ ID NO: 3575 - DNA, 568 bp, Zea Mays
aacctagcgaaagatagatacagaatcacctaaatagaaaggcatataatgcagggcccaatacaattacacaataatcaaacagaactatctcaaactccaaacatttgccacgcgagagaacgcaaatttaaaagacacaaataatgaatgttgtggtcattggaggcaaggctgtgaggaagcgattgatgagagacccatcagccaaagtacagcctcgtactatgagaccactgcatttactctagggccccaacatccgagcaccccgcagagaacctgcgggcatttcgaagctaaaaggagagcttcccccaaatggcatggaacccttagacataaacaacagaagcatcaaatcaaatacagaacaacataataccgcagcttcaaatcctgattagatagcccttgaaggtttgcatcaccaacatacaagacacaaccactagcttgcattaaaactgacagaggtgtgtccaacctgacatctaaacactcgcatcatgtaacactgttagatattcaagccagtatttgcgtcactgatagagaagcattcaag

SEQ ID NO: 3576 - DNA, 568 bp, Zea Mays
tcacctggagcgaagttgacgatggtggcaaaggtaacatccatggagctatccattatcgatgttgcactccctacctggcacaccagctgttggtgtttagcatcggcaacatactatgggatgtaccacgtagtgtttttgtgttcagcgaagtcgacgatagctcaatggttcgtgtgaggcacaatgggactcaaagatctaaacaagtttcggacgctgagatgcataataccctatgtcatgtgttctactgagatggtattgctcttttattggaggttacaaagtagactagaactaaatttttgttgtgcctatcagtggatccaatcgttcggtaggggtccctaaccaaccttatatatctgatgagattggggttacatggtttaatagatcactattgttatgcttacaactatggagccaactacaactagcacgcaagcgtgtgattctatgttggcctctgcatgtgcgaaaattggttacgaagccttcatgcccacgtcttcgagttccatatcatcctctagtcggggctggctgattagtccacgaa

SEQ ID NO: 3577 - DNA, 623 bp, Zea Mays
ctctattttcctggtttgcgcgtcaattaataaaaagatcaggggctcactcacaaatttgcccagactcagtgcacagctaccacggacgacgagttaatacttgattcttcaggggctcatatgcaaaagagttggccgaaggggtacgggccaatatgtgtcgtccgatctgtgtgcagtggatgagattagatcgcgctgggttatgaaccggtatgtaattataaccacacgatcgtgatccgatggcgcatgatcaatagatcgaaagggtacgctcaaactaatctctaccgtccgttaagatcagacggtcgaacggcctgcccacgttctccggtcacggcacccggtggcgccctgcttcccccaccgcagagctcgccggagcatggcgaaactacacagacaagccctaggtcctaatccacagtgcgcgatacgtaataaaggacctggcgaacacagggagagagtcctcaccatacatcgttgcccgagcggcgctggccacgacagagtgcggttcagcggcgccgtgtgatctctagcgagaaattcagcttcgccccgcccacgattccgcccgaaacagcaacaaatacgctccacgagctttg

SEQ ID NO: 3578 - DNA, 360 bp, Zea Mays
ggacagcccagaccctaactgtctttgtcgtctccgacaagagattttggccgttacacgatgcctgctgtaaagtagaatgccattgcagttgttgcatcagaaagcagccatttaacgccaccgtaaagttagtgactgttaaatacatcaacacttgtctctcaggtttctgtatctttcatttctttccatgtgtatatggagtttctttattgcacctttttacccgagtgacaattaatacttgcagttacactaaataaatcctgaattccctttaattgttggccttacttggaactacttctgcatatatcggacaactattttgaaccatttcttcaagatgtttttcaa

SEQ ID NO: 3579 - DNA, 682 bp, Zea Mays
gaaaaattatatatttcagttccaaattcaaaaaatatataaaagtcaaattttggtcaaaatagaaattttgaacagtaaaaatgaaattgtaaaccatatcgtcagggcatcgggcgaggtggatgtggccaagggaggcgggatgttgagcacaaatgcagccatgcggagaaacaaagaagatagtcacataggaggacctacagatcctacttgacagtttcctgacggatctccgcactttccatccctcgcgccaaacataaattaagaacatctctatcccctcaactaaaaattgacatggaagggtctcctcctagaaaattggaataggtctaccgcgtccctccttgtttccaaatcaaaaagcctaaaagggaaatgtgtccttagacaatttttagttgctttggtgattaaatgtctaacacaccactttaaactaattctctttatataagcatgagcacaggagtagcaaaagcaaattgaagacaagaccgactcgcaccgtacccgcgtcaacaaacgttagtcggctcgcggctgtgaatgtgggcaggggcagcaggttggggaggaagaacagggcgaagaccgggaagacgaacaggacgtccgacgacagcgaaaacgatggtgtgggcgtgttgtgaaacgtcctcatggacgtgca

SEQ ID NO: 3580 - DNA, 315 bp, Zea Mays
aagcctacggctgtgggggataaccacgccggagaagacgacgaaccgcgctacgaccttcgtagccgagggccccctgctctagacgcccaggcccttgacaggaagactaacaatgtacttattgcaacgtcttcagtctctatcccactttaatgtggtgaaacaggttaattggcaagtcattttacagcacgagtctggacagtgctgaaaccttttcttagagttagcagcccctggatctttgcttatgtttgttgtggacaaatattgtgaaatagaatgagtgggttggagtgaaggaaaatatga

SEQ ID NO: 3581 - DNA, 522 bp, Zea Mays
acttcttcgtcgctgctcaccgaacccggcagcagggtcaccgattgccagtgggagctagcggaaagccttgccgtccttcacgcacgttccggccaccgccggtgacgccggaggagggagggggctgagaggctgatgacggggacgccagtgcgtgcgtgctgcttgtgctggctgggcatgcgcagatgcccgccggaccgtggcaccgtgctggaatcattgccgtccgaaaagagagtccgcatctttccgttcgcgtgctccgtttcccgcccgcccgcacctcttctcagtcaggacgattagcaagggccgtttttaaaattcgctcaggaggaggtgagcggaccggagagaaacagcggacaagtgggcgcccattccactcaggtactgaggtagtgaggtacacccgaagcctgagcaagtgaacacaatcatgtcgtaccgtacacacccgtccaccacatcacaccccacttcctacccccaagaccaagaccgaccgctgcctgc

SEQ ID NO: 3582 - DNA, 531 bp, Zea Mays
cgacgtcaagggtggtagaagcagcgtcggtggtagggcaccacccgcatatgtattagtgtagtgtagttgtaggtagttggtagtggtagtggtagtggtagtagtagtatgaatagtagtgaaggagtgaagggtgacagggtcggttcataatgagccgacccttttccattgtaatgaacccctcatgatgaatgaaatctcctatttgttgtgtttgcactgcacttattcttctatccgacttaagattttcttgaaaacctcggtcgtgtgaactcaaatgtcaaatccgactaactagccctactgatagacccatctaaaatcttcggctcacgactttatctgataggctcgactgacatatctgcccgcctcacttcactcgattgagatctggtctgagttacttcgccagtctcgatgcacctgacttagcgcgcgcccatgcgtcctcgctagccgtttttctggctgcgaaccctaaccgtgctttttcagcgacaaacaatttcctaaaactct

SEQ ID NO: 3583 - DNA, 486 bp, Zea Mays
ggtgaaaacactatgaggtctttgaccaattagatgaaaactttgagcgtgaaatttttaaggtcgaagaccctgtggtaaaggattcggcgggggcactcttcgattggatgtggggtcctcatggccgagaggcgattagggagcggtctgaccgggcgagggagcaggtaaatcttgtcttttgtttcgtgtggttgagtgtgggtaagtgtggttttgctgaatgagtgtgttgttgctgcagatggcgcgtgccgaggatgtcgaagaccttggagatctgaatggcgcgtggcccgaggctgaggtcaacccggtgctgcccgaggctgaggtcaacccggcactgccctcaaaagccggagaaggctcctccgctgcacctgtgtctactgtgtccggtgaaggctctttgccagcccctgcaccgacagcggaggaccccccgaaggtggtggcagagcaggcagcagaggatcccat

SEQ ID NO: 3584 - DNA, 600 bp, Zea Mays
cggacatggtggtccggcgggcacggtaggagtaggaccagagagaggagaagggtgggtagcacggcacggcggcgaccgatctcatgatgtggctggcacgggatcggattgggtcatgctctggcaacgaccatgctcgtctcatacggctcgcttgctcagagcagctttgttctcccttttggagttttgactgcgactggacctgcttgcttcgtcttgatagatagtactcctttttgttgccctgactgagcacacatgattggtcgttcctcttcatcagtcctctcctctctgggtcccctcccctttgtgaggcaagaactctctactacaagtgcttccaaactctaaccagctgcaagcctgcaacttttgggaaattactagcatccctctccctgtctctgccgccgctgccgtgcctggctggctggctggtttttgcgtgctccgctccacctgaacgctttggcccatacaccacgcagtcgggcgggcgggcaggctgggtgccctgcccgctgggctcacggctcagctccagagcctagtcaacgcctcgcctcgcctcgcgcatgtgtagactgtaga

SEQ ID NO: 3585 - DNA, 634 bp, Zea Mays
acggcgaggtgcaggcgggcgggctgctggtgaggacgacattgccggtgaggatgacttcgagctgctttgaattatggtttttaattgttgtgcaatctttgttgttgatgggtagtggcgggggtactcggttcgccataccttggctctgccgcagatctctaccaaaatcattctctggcacaaactaatcaatagccatggacatttgatgcaagttcgtttcagtagccataggtgctagatgcaagaaagaagatggacacctaattaaattgttcgttacctggacgaggccctgttcttgtgcgctactagtaacatgaattgttgaaatcaatgaacaacccatggataaagtaaaccaataatgcatatgcccatgtgatcacgacgattaggcgacttgagcaagattaggaaacaaacgatttgactcttttgtcagtgcttctattcccaaacagttagggggttgtggtgagggcgatgagatcacgacattatgctgtaggctactgcttgctcgtgctatgtgccttaggcattagccgcctgcaggctactgcttgctcgccttctggctcctgcaattctccgctcgtcagcttgtagttttctagttttcaac

SEQ ID NO: 3586 - DNA, 706 bp, Zea Mays
gagtaattgagggcacaagcggttggattggatgccggattacctaacagagccgagggtgtgctcaatttatagcatgcttgagcggtggctagtgaatttgatggagacgcgcggcggtcggagaggaggaggggcactggcgcaaacgattagtggctttcaccgtggcggacttacctgcgatgagccagtgatatagagcggcttacggcgacgtggtgaagccataaggcacatggcatccgatcgacgggcggccaactccgatgaacttatctgagccactcgcaaagcaaaaggagtacggcggccagcctccggtgttatcctgtggcgaagagctttttcccataagcgttatctggtcaccggtgagcacgaatcacaacggcggcgtgaatccgggcgcacggttcaccggcggcgaggttctctgaacctgaccctatccattcactgtaccattggaaacgttcaacagagcgcctgacagagcaacttgtaacgcctagatctcggatttttgtgccagaacatgccaatccgtctgcagcaaacttgtagcccattatttcaactataattctgctatagcaactaccctcaatcgagcaatgaatctaactctaaatcgagctctaagttcatcctactttactgctagtgacgattcagacttaggctgtctgacagcccaactttg

SEQ ID NO: 3587 - DNA, 532 bp, Zea Mays
aatggcatgataagcagtggtagatgttattgggcctaaaagctatatcagttagagccatagttcgacagcaggtgcgtacctttacatcggcgagcagcgggaggagtttaaacctggatgccaagatttgttgataggtaatatacatatctggacataggagcttaatcatggggtgcacctactttggattagcatcctaatcctcatgtatccatttggcacaataacgctactgcatcagcagtggcacatcaatcaaaggggttgtttgagcttaaaagtttattttatatattggcacatctctacataattcccacacattttaggcgaactaatggatgtataaagtaccattcttgcagctagagttaatgtaaaatactatttgagagtgacctagccctggccacacattttaagcaaactatttgagaattgcaactacccctagagtgagcacatctataatggtgcataccaaactggaattaaaaaaatcttcatttgcagtggtagttgctag

SEQ ID NO: 3588 - DNA, 306 bp, Zea Mays
aagagttgcttcactcgagcataagtaacaggaaatcctgagtgaccaccaatagcactgctatgtaatgcaccgatcacagtagtctgaaggttagtattctgtcctaaccaaactctgtttttgtaccgaataacaccatcctggagagtataaggaggttgagctgacactgctaaaacagtgaggagctttaaggcctcaggatcttgttggtaacctgcaatcacctcctgtaaccatgtcggagtggacacagaaatagcaacacattcgccatcctcatgtggccggcgagacaacgca

SEQ ID NO: 3589 - DNA, 461 bp, Zea Mays
gggacgcctagtgggagttctagcaaaggggaggggagcaatctcaccatatggtcatggaggatgtcggcaatggcatcgatgtaccccttgatcgcgcggacaatgccgatgcggccaccggtctccactgcctgtctcaccgcgctaagacatctcgatgaccttagggggcggctacagctagggcttgggtcttttggatttggaaggcgatgcgaaaaccaaatagtggagaatgcgatgagagggcggaaggagcaggtgtggggcgacaggagtagcgagtggaccggagggcatcgtctcaggcgagcatcgcgcgcggcatctcagacggacgggggaaaggcgtcgaggacaggggcacaacgggagacgtgggagggagacagaggcggagcgggggcacggagctgcggcccgaggtgcgctccagcatggcgagatctgcggcgggg

SEQ ID NO: 3590 - DNA, 760 bp, Zea Mays
ggttattaaacatgtgtgccgaagtgcgttgtagtagtgattgcgtaagttgaaccgaagtgtcccaagtacatgctaggatatggttgtatttgagatatttattcgaggtgcgcaggtatatgccgtaatatggttatactcgcggcgaggaaatatgtatgtattgtgtaacacgacgtttaggtcgctattatataatcgtgtgaaggatgctcgtgatggttatgtgattaaggagtgatgtagtggcaggcgagaagtaagtttaattttcaaacgattcgtgggtagtatctcgatgttgtcatgatttttgtggtatggcaatgtgatgcttcgctttgtcaatcatcacattccatgcccctttggataaataaatgtcttgttgatcgattagaggtcttatacgagtgttatcccagcccaataattattgggggcaagtagcgttcatgagtcaatccttgctaaaattgaagaacagtccgataacatatgcacataagtgctttaggtcttcagtagccagtgtaagtcttatggagttttatgccatgttttaatgtctctatgttagacctcctaaaatatggtgttttaagtgacttacgtgttaactaattcgagtggagaaatggttaagaaaaactaattaacttgctcccacctatgtttttgagttgcgaagtctaaaatacttgctaagttttatactggttaaccaacttgttagatgactttagttaagctcgtg

SEQ ID NO: 3591 - DNA, 514 bp, Zea Mays
aatccaacctcgtatgcatattgactataaaaattatacgcctcgtccacgttactaaatgtcataccgaccttaggtatcaatcttatatcaatattgtccggctgcgcacagaaatttaacatttacgattcaatagcgactaaacctaacgtaatatgtgagaacttacgtggctttgaagaatatgaggtgtgtcctgttcatgcggcccaatatgtctcatggggatgtgcttctctgcgccgaccacgtctgccatttttgtgtgctcatcgatatgtccaggtgccctcaattccgccggaggagtaacagagacaccctctgtgtatggggcgatcgcagacgctacgggatgcatgtccattgaaatagacgtacctgctggcttatgcacagatgatacaggtggcatgtcatcgccagttccggtggtggacatcttctcgccgccaatcgctggccggacctctcacttccgccgccgctaaccgccgccaatatctcagat

SEQ ID NO: 3592 - DNA, 492 bp, Zea Mays
ggcagcaccagctcgtgggtggtgcgagtttggagatgcgtcgtgggaggaagacagaatacctcgacatcccactcaaggacagcatcaaaggatggcacttggagtggtttattatagagaatcatggcaagtccctccccctcggtcagggagacagccggatgttcgtgctccaagttggactgaatcccccacagacttggagataacagaggccaaggttctgcttgctgaaattggtttgttgaaggagagaggtctgactgctgaagttgtagttgtagactttgtttttaagaacattcagccactgaaggacagagcgtacccggcttatttgtatagtggtgtcactgattcaacccgggttaccaacaagaggattcctgctatggatttggtaagccgactggagatgattcttaggggcgaagtatcgaatattggtgctcctgttgcatattctgcctggaatctaccaccttccaa

SEQ ID NO: 3593 - DNA, 429 bp, Zea Mays
aaaacacgcactccactctgtcgtggctacttcgtttttttctctttttcccctcaaccattacccttgcacgtgggcccacttttctctctctttcctatgacgttcatggcccactagcagctccaccttgttctcttcttcgttgaatcaatcggcggatcgtagcatcgcgccgactctcgtccatccgtctgccgcgcatcgcctccaatacgccttctcgtctggccgagtgaagaagcaccgtgaaaacctgctctccctcccaactgcacagccggcctcctcgtctcctctctccactatagcagctccgttgactgccattaacaccagcgctcttcctctcctcgcctgcacccgaccctataaaagatagcgccctgctcgctgatcccatccccaccttgcaccaagctcttccct

SEQ ID NO: 3594 - DNA, 583 bp, Zea Mays
ctggtatcggacatgccagggttcaacgaagacgacaatgtggcatgtgctgcccaagcaccgtcgttggagtcaatcgccacgattcttgctgaagtacaacgccaacttgggggcttcactgagtatatgatgtccatcttttcccatgtcgccgcggtggagaacgcacaaggaacctctaccgccacaactcctcctggatttccgtatgacatgccaggttacggtggccttcccccgagcactagagggaccgacggaccgtagcctctttcaactgccaccgactgaatcaccgcatccgcggatgcagccaccgcacataccctcgccgccatgacaattccactccacctgctaccctttccgcactcggcgtcacccctaccaccattgccgccattgccacatccaacacccagtacccactactcgaccccttacggtcggcgttacccgcttccaccggcttgagtttgccacattcgatggcaaagaagaccgctcggatggttgaacccttgtgaacatttttttcatggccaccaatattagaagatgaagaagtgtgacaatcctc

SEQ ID NO: 3595 - DNA, 916 bp, Zea Mays
aattatataagtttctgaaattgttttgtattaaaaatcgatttctataattatttttctaattctttctgatctctggattgggcgccaataacagagaaacacagggactaatgtataaaaatatcccagactcagattcaacccgcggtggacggcgggttaattcactgaaatcccgaggggctctttagaaaaatacccaggccgaaggggtatccagggtgtctggccatccgatcacacctgtgcggcccagattatatcgaatcccaactacatgcctagctgcgcccacaaccattggatcccagatccacggcgcacggcgcacgatgaccttcactccctctcggccacacgatttcctttcaacgcgccagatccaaaacgacgaaggggtacccggattctaatcatgaccacacgttcgaggatcaacggtcggcacaatatcagagccaggacctaatctaaccctccgacgcagaatcaacggtcagggtgctttcttccttctctcgctcacctaggcaaatcgcgccaccgcctgtggttgcccatgacggtgcgcacaccaccggcgattcacgacataatcctataatccgaacgttcctatccctaattgaggcctaagcgaacgcagagaacccgcacatacctgtgttccgtagcaattgtggccggtccacgacgttgcagggttcggcgacgagttgcccggccgacaagcaatggcgtaggtgcggtgatgtgaacggtgaaatcagcggcggtcgaagcttctaggggtcccgacgcagcaccggaaggcctcacggatgcccaggcgcccgagacacacgagttcggcggcagcatcttctttctccacgggcgcagcaatggcggcgccggttgacgctgggagtgg

SEQ ID NO: 3596 - DNA, 412 bp, Zea Mays
ctttctccatgttcctcatttcgcccacgcccactctctctcgctctaccgccaccgctagtgcccgccggagtaaagcactcgtcgtgtcggccattcaagacaccagaagtcgcgccaaaccttcccaagcattgtcccaaggtgaagaactcgctctcgtgctcagtttcccttaattctgccctgccttggtcaatttgtgctcgccagagctctgatgcgctggtttgcctcacccgcgcgatgaccggtcgattcagcctcgtcccgagcccctgctttggtccgtagtgttcccccctcgccggagctagtcctgaccttagcgtgcctgattccccctccccgcatccgggattcctcaccagagttaccttgacccgttcggagcacccccttcgctgttctc

SEQ ID NO: 3597 - DNA, 473 bp, Zea Mays
agatctagaactccttgaggctctccacccaaacaaccacagcttgctggcaagcctctgaatccatgcatccttcatcaccttccattctgcacttacagcagcagcagcagccgccgccacagcttgctgcgcttgttgtgcgacctcagctcgctccatggaccccttctgcttcagcttgcaggtcagtcggcatattactgatctctgctctccactgcaagaagaattttgctagaaagaaatgcatagttgttagctcgtttcttactgttctgtttatattttccctccctttgttttctagataagcggatgtatgtcagttgcgtcatcatttatcactgtccaatgtccatagacatcacaacaagcactcgaagatttgggactgttccaacaaggtatgttctggtctttccatggctttgtagcttctataggcgtataccatatattaccatctcagt

SEQ ID NO: 3598 - DNA, 555 bp, Zea Mays
atgaaaaaatcctgaatcccaccatataagcttactgagtggcatggcatagggggcgctggtagttggaaatatataagctttagtttcagtttcataatcctaaatcccaccatattttgatatataagttttagtttcagttttataatccataaattagaattcagatttcagacttgctgagtggcttgttactgacttactgagtggaacagttaatgagtggaacagacaaggatcagcactgccttactatcctagactcctattacttatgtcttgatcttaattcttctctattttcaatgttttagctgctgctattctttgttgtgctatctcgaaaatgtcaatgagtgtgtttatttaacaagtctaaaatatgaactgacatatgcatgtgagcatgtttgatttgctttagaaagagaattagctaaacatgcttttgccttttttatcaatattgttgctactcagacataccaaaatcatattcatggacatggattaccattttcctttcccctaaaatagttcagcaagtgtcta

SEQ ID NO: 3599 - DNA, 313 bp, Zea Mays
ccggggaaaccgataccgacctccggagtataacgcgcctcaccattaactacggacaagacatatacatgcccactctagcggtcggcgatacgaccgaagtacacggaccacacagtgtctcgtgtgttaccgaggcgggacctttgactctctgcaccgtgtgggctgctgccatcatggccccactgtagtgagcgaggtaccaaggcgaaggctgacaggtggagaagacatgacgacatcgcctgagcatccctacacacggtagcacttcagcctacgccgcaacctacttctacgctctgccccg

SEQ ID NO: 3600 - DNA, 576 bp, Zea Mays
ctggtaataagttctgtactttccttggtttcctgtacccttgtgctctagccttaacgcaataacgcctgactcctgtcgtccgacttatatgctggaaatgagctttctgcccgactccgcctagccgacttaacttgtctaacttatctcctccctttttattctagaaaaatgtttcccttgcactgatgcggtgatagttcgggggtacttatatacacatgcctgttgtcggatggtttctaacagaaaaccctactagcacaacttttctccgcgtcttttctctttgaaattcctgtgcctcggtgactacgcttgattccgttcttgcgggaggtctcatggcgccctgaagaaaaagcaggggggtgcggcgacaatcatcccccgatcgatcccaacagccaactccccttctatggtagctgtgcctccgttgttttcgaatctgatctgcttcacctggtccagatggtgttctccgtatgaaggagttgagttcatggcacatttacaacgaatacatgttgtctaaatcctaggccggccccggattccaacctctctaag

SEQ ID NO: 3601 - DNA, 404 bp, Zea Mays
gccatccttggggaccgggttctctgcagccacctctaaggctgaaagattctcagtcacctccatgggaatggagcaacctagactagcttcttgactctgaagaccgcactccaaggttgacgaggcacaagacgatgctcgggataattctaaccccacatccagaatgtcagtgcaaacgtccatcataccaccatctgttggctcggatagcagatcttcaggaaccatatcctcgagggcctgatcaaaatttgctagggacaactcttgcagaccaacgagagcagacaaagctggagaaggaatatcactactctccccactgactaggtagcgccgactgtttttccgaattaaggggatttcctcctcttcttcctcatcctcgtcaataatac

SEQ ID NO: 3602 - DNA, 399 bp, Zea Mays
aaatgcttctgtcaggacagcaagggaattctcttgtttggtggccgattggttgttcctaagaatcccgagctcagaaagaaaatattggatgaagctcacctttgcaaattctccatgcaccccagcagtaacaagatgtatcaggatctcaaatcgttgtactggtggaccaggatgaaaagggaaattgctaagtatatatctgaatgcgacacttgccaaagggtcaaggccagtcatttgaaggtagcaggtaccttacagccccttcccataccatcttggaaatgggaggatctcagcatggattttattgtgggtttacccaatacatcccgacaccacgattctatttgggtcatcgtggacaggctgaccaagacaactcatttcttg

SEQ ID NO: 3603 - DNA, 411 bp, Zea Mays
gcttactgtatagaagaggtgcaggaggagtcttcatgaaatgcattcactcgacaactgggagacaattgttagatgaaatccatgtcgggcagtgtggggtacatgctgcatcaaggactctggtcaagaaggctttcagatccggtttctactggccaactgcgaagagcgatgctgcagagttagtccagaagtgcgaagcatgccaattcctatcgaagcaacaacacatgcccgcacagtagctgcagaccattcctttaacatggtcgtttgcatgctaggggatggacatgatttgacctttcaagaaggctcagggaggctatactcatatactggttgccattgacaaattcacaaaatggatagagtacaagccaattgcctctttgacctcagccaaag

SEQ ID NO: 3604 - DNA, 429 bp, Zea Mays
ctgcaagaacaggtggggcagaggtcgatgtagtggaagcaggcatgcgaagtgtgtagagcggcccgcggctgtcacactgagcgagaagggttctggtggcaagatccctcacagaaagaccaaacgggtcaaactccatggaacaagagttgtcagtagtgaactgacagacggaaagaagattttgaatgatgtgggggcaacaagaacgttggataaacggaaaggaccgggaaggaccgcgtcacctacggaggtgacgggaagggcagagtcgtttccaaccacgatggaagaaggaagggaagggtgggggaggtggaagacagaatacctgcgtccggggtggtgtggtaggaggcaccggagtcaaccaccaagtcagagatcgaggtgggtggggccagcgtcatcgtggaggagttg

SEQ ID NO: 3605 - DNA, 686 bp, Zea Mays
caataaaggcaaagacaaaacaccatcattagcgatcctcgcacgtcaaatatatcagaagaagggattgctcgtaaagctctggacaaaaagagtaacaagttcggaggcatcgggggtaggctcaaccaagtagccgagcaaaactccttaactcgatcatcgaagattgttcagcacctgcgcttggacagttcggtgctcatgaggacggtttggctaactcagccggacagtccgcccatggccataagcgttagcctccacacaaagcaaggaaaaagacgcaagggcaaagccaacatgacacacatggtcggctagtaaaagccgaccctacttccgatcaattgctagccaaatatgctggcaagaaggctgttctacgcaatcgaccaacaaagaaaccccggtcacccactaaaacaaaatggccaagtaaaacggcccgaaagacgatgcaacaagcatcgcctattcatcctgtcatgccaggatgctttccacccacctactcacctgttcaaatatggaatggtacaatgatgaaaccatggtacatgcatactccctttgtctattcaggatgggggcaccttcattctattccttttgatccattgatcaaatggtcacgaccgacaaagatgcaatcctaaacggcctttatgcattggggctctatt

SEQ ID NO: 3606 - DNA, 395 bp, Zea Mays
ccgccgccgcggcctccttggccgtcaccatctgcctccgactcgcgctcgctccccggcccgccggccgccgtcgcaatggcacagcagccaacaactgagtactcgatcgagcggccagcaacacccagacgacgaccccctactctcctactagctagctgagctacagctctggcagctggcggctctggtagctataggcctatagcctatactcctatagcaggtggtggctactagcttagtagcacttgtgctcagatagctcgacgacgtggtgctcaatgcaagtgatgagggtgtgggaggcatgtgcgtgggcgtagccgtggagtagggagtagtagaagaatagggccgggccgggtggggtcggtcatgggcggaggagg

SEQ ID NO: 3607 - DNA, 368 bp, Zea Mays
ttgttcagggcgatctctctgtgggcgagtactgccgtcagatgaagacgatggcggacactctccgcaccctcggggcccccatgaccgatgagagcctcgtgctcaacctcctccgtggtctgagtcctcgcttcgatcgcgtggcgcccatcctcacccgcatgaagccgtttcccacctttgcggaggccaagaacgacctgcttctcgaggagcttcacctctccgccgctgcaaccaccgctcccgccacggccctctacagcgcaccacgagctgccccctccgactctagggggggtcctgctcaccgcactcaggccccgctgccctctggagctccacgacagtctgctggcttcggg

SEQ ID NO: 3608 - DNA, 384 bp, Zea Mays
aacagatatagggttcacgtaccaatggtgaggatgctgatgttctccgaccacgacgctagtggtcccgtggcagagcagcggcacaggtgagaaattctggtggccatgaggttcttctccgcccaacgacgacaacgcaagcatcgaagctcgccatcgaccaacgaaccgaggccaaccatcacgcgctcgttgaggatccgcacaggcgcacaatcactctctctctcccttccaactctgcacgccatggttactggattggtacaggagttcgcggcgacctgcgctttatagccagcatcgacccggtcctccaaaatgtgcgcgcagaaatcaggcggaaaccgtgggatcttcttgagtttgttacggaatctg

SEQ ID NO: 3609 - DNA, 631 bp, Zea Mays
ccggcggcgatcctccggcgacctcgccagtgctcctctcctctcggtgagcagcctcctctcttcctctgtcttctctctctctctctctctgttctctaggctgtgcactcccccatttccacccttttgcacaactttcaattccctgtgaaatccagtgaaaccaagtggccatatgtgttcctatgtgtgccttaaacatccttgcaggttcctagctccttcgggagggttttcatacctcaaatggccatttccccgaaaacctaattcaccgcacgtcatgtgttcgatgaaatgcccaaaccagccaaaaatgctccaattgaacccaaatttttgaggcaccttcacaacatccccggtaacacatttgccaaatttcacgccaatccgagattctaggctttattttcacccaattccccgtttcgagcgatcgtttccgagccgagtgcccaaatctctttttcttcgcctaaattcaaaccaagcacacacttcactcatattcacctatataaacctattcgtaaagtatcggctcaattccatgtcgtttcgtgcctcaattccaattccaaacctcctatggcactgtttagcgttcaaacgtcgttttcacgtc

SEQ ID NO: 3610 - DNA, 590 bp, Zea Mays
gtgtgttggtccctggtgccttggccatcgaggcatctgttctagccttgggggcacctcctcttttgggccttaatgcaactcttctgacccttagggcacctaggcttcagggacttcacaatgtgacatggactagcaatcattcgacaaggagaaaatgtggagttccttgcaggcacacactgcatagcattgccacattccacattgtcctccgtaagagcatctccaatggtcgttgttgcatttcttgtgccaagccccggcgccccagtccttggggcatctattttggcccctttgcacttcttgtgtcagcctaagatgcctcagccctaggacacttcttgtgctaaccatcaacgccttgggccctgaggcttccgttttggcccctagggaacctcttgttcagaccccaaggcactccatatggattggggtgccatgtggaccaacaaccattcgacggtggagaaggcatggggtttcttgccgtcaggaaccatatagcaacatcgaatccgtcaccgacctccacaagagcgatggtcattgttgcaactgcttataggtctcaacactca

SEQ ID NO: 3611 - DNA, 278 bp, Zea Mays
gaaaaagagtccaagacacagggaacaactggttggactgtgggtcaaaaccctaattactagggggctctttaacaaaagtgccagcgtgaaagggtaagaacagacttggcccgtccgatctaaagtatgcgcacaggattagacactaccctacgcgaaccggtacacaaccgcagccgcctattccgagatctacggttcggatttaaatacttctcgaccgatctggtttgtccgattgtgatcgaagggacatgaatcagtccaggctgcaa

SEQ ID NO: 3612 - DNA, 339 bp, Zea Mays
tttcagtttcggttgtttgctagttgctgtcagcgtcactgaaatttcctgtattatagtagcggctgtctgcgtcaaatgacgcgtccctaatcgtatgttgatggattgcttaacaagaggtacctcgtccagtgcgtggatgtgcaagtggtcctgagggctgaggctagttcctgtttcaatggatgggtgatccggtgattgctgttgttacgcataggctgttgggttagttttgggccatatacaggagcgctaacgggctccaacctaagctcgttaccctgattgtgtggaactcacctaatgctagcgagctacggacactggacgttg

SEQ ID NO: 3613 - DNA, 730 bp, Zea Mays
tgcacacatgtggtggggaagaatctagcaccaaacgtgcccggtcagcagccaaatttgggacaacagctaattctgtagatataccgccggtgatctccacggccgaggactcctccaatatctcatagtttccagttgtctgatcacactggctggcatcgccttcttccctaggctgaacttcagaccttgggcctagatgttcaagagcagatcgtctgcccttaagcacatcgtcctccgtagaaccctttcgaccatcacggtcccctggtggcgaacgcgaacggaaacgccgcctctgtcgtgtgtaaccatccatatctgttggggtctggatggggtctgggacaacacgttgtccatccaacaccttagtctgaacatgataggcaagagatagccttccaacgcctggtccatttcccagcgaatcagtaatccagagatctctcgaatgagggattgaggccaggtcataacaccaaccataacagcgaaagacctccaaattcttgagctcgagagtctcctcatgtaccttctgtacccaggcaaaagggttcaaaatgtgtcggacagtggatagttcccaggcatgaattggaatgccacttagctcaaattccacagggataggcaaacttgcacctgaggatccaaaaaacctggaccatcttttacagtgcagggagaaggcgcctgcacgaatagtgttccatctcgt

SEQ ID NO: 3614 - DNA, 366 bp, Zea Mays
tccaaattctgaggtccacttaatttcgcacttcccctctaggatccaaactttcttggtactcttcatgtttaaaatgatctggcaccctaacttatttgcctcattgtcggtttttcgatccagctccgataggtaaatttgtttgtgtgcattctggggtccggatggtgtgccctgtgggcgcaaggtttatactagtttgcgaagaatgtccctacaaccagtcttcacgcagctcacactaccggcacctttgttgctcaatgctcatagtaggggttacaagcgggcgatagagggaggagcgcccaaatctcttatgtgtgcttagacctaaggattacgaatatggttctctctact

SEQ ID NO: 3615 - DNA, 273 bp, Zea Mays
ccgccgcaccggctgctgaggagaagaagccggagacggcgccctccgaggagaagaaaccagcggaggccaaagcagaggagaagaaacccgagtccgcggagaagaaggacgacaagaagaagtcgccggagaaggggaagaaagacggcgacaagcccaaggaggaaggcaaggctgagaaagacaagaaggacgcggccgcgccgccgccctctccatccaagctggcgccgccgcgctcgccgtccaagaaggacctggcgatcgccg

SEQ ID NO: 3616 - DNA, 994 bp, Zea Mays
tacaaatgctctcccatttgggttctcccttcagttggtgccagcaatgcatgtactggaaaggtttgttctcctcgtgtgcaaacaatgttgccgccttcgatgtctgtacaaattatggtttcattttacaaatgtgtcaacatttatacaatcatttgtacatgatttaaagtctgtaaaaattgggttaccttgtcgtcatcagttaacccactttgtttctctcttagaactcttgcgtagtagccagcaaacttactaacatctgctctaattttgtcccatctgctgctaagggctctgttgactctacaaggaaacttgcccctctgttcgttgtatcttttttcaattctagcccaaagcccctccctacgttggccagtgtgcacaacagggtcactgcttatttgcaaccaggttgtgcaaaggagaagatcttcagggccagtaaagttttgttccttagacttcttgggtttatgtataggaggtgcattcttttcaggactattgatgtcatgaacactgtgttcagcatctgagtccaagttcacaggtaatgaaggtatagtattggaaccctgcaatggtgtactagtattggaaggtggaatggaatcaggaaatggatttacttcagctgacccaagaggattcctgacaaagttcaagtaatgattccagtacatagctgattgtgaggcgggaatcatggtagattgggaagaagtatttcctgtctgcatgggtgcccacaatgttgtcggaccttgaccagggtttggaaaattgaggtttcccataaagttacaatccatagcactctgctgcatgtaacccgcaggccacaaagggtgtggaggaggaaactgctggccacttgatgaatttgacatgggttgtgaagaagtggcattgtttgatgggtccattctagtaagtgtgtagatgggacaaatttagttatatgctaaaaacttattaaaat

SEQ ID NO: 3617 - DNA, 449 bp, Zea Mays
gagaaatctctggtagggtggcggatagcacctgccctaattctaagaggagagggggcttgaggttagcttttggaaaatggatgaacacaagaacacacaaggatttagagtagtttgggctgctggagcgtaataccatactccactgtgagttgctttgttggtgacttaaccgaggtcaagatgatctttctgtgtgtgtgtcctaccttttatagctcaagggaggtacgtacatggtgaccgagcgctgacaagagggcccattaacctaatgctaaatacatagaagatgtagcgatgaaccctagcagaccaagatctcctttgttgtggttggatattttctcttggtcttcgtgtggatctcctggcatcctacactcttgccctgtctattcggaacacaggtgtaggccttggcgtaggttttgacgtagtttggt

SEQ ID NO: 3618 - DNA, 564 bp, Zea Mays
gagcagggaaacgagtacgagggacactcgactgattggtaggagcgggggcagtagtgggacgaataaagacaggctacttgaatggatatgaaggtgggtgaggcaaagaacgattttgattaaagagtcggatcaccaacctggttctcttctcaggtccttgatatgacctttcacctccaaacccctttgattttccatgtcctgcatttttggcttccacaaccagtgctgtactgatagccatactgtaggtgaggtccaagcatgttgccattttctgctgaagcctgtcattgagccccctcataaaacaattcttttctttaagtcggtatccacctggtcaatggaatactaagagaggtggttgaatttgttgagatactgcatcatcgtatctcctccctgcctcaaccagataaactcttctagcttcatctggattactccctctacaacataatgctcttggaatgccaacttgaactcatcctaggtaatctgatgtccaacaggctggattgctgagaaatttgcccaccaggtaccggcaggccc

SEQ ID NO: 3619 - DNA, 398 bp, Zea Mays
atcatttaagaaatcgcagcagaagtagtagcccggcccatgctcccctctccatcagctgcttgccgcccaaaccaactttgcattgacaccattaatgcatgcccatggatggatggatcctacaccattcaattcatgaccacgctcgtgattagtagcacagaaatttattttccctgccgcgtcgcgttcgccaccatggtaggagtatgcaacatgcatgtcacggtggtccggacctgatgaactgtcctgtccataactactactgtggggaatgcttttaattcatttgcagcgatcagaatctctgtcactgctgatccactctagactctccaccaaactaactgtttcataaattaatgactggaatagtgctccctgtgatttac

SEQ ID NO: 3620 - DNA, 999 bp, Zea Mays
gaggtccccagaactctgtttcttctccaactaggtccctgaccatggcgcgttcgccgttcatcaccgacgcggcacggactggccctggccggcggcggatgctcagtcgagcgacagggggagcattaccgacccaaggcgacctaggaacgagctttactgtggcttgaacacttagcggacgtcttgcccatgtgcacggcggaaaccgtgatgttgatcccgtgttcccattcacttacgcccgaattggtcaaacagatgctacggtgagctttacgtacctacagagctgctagaacaacacttgataggggcagagctttaccagagtggtccggccacggagcgcggagacttgtgctcgccggtgacagagaaaaggggaaaatgacgttgcgacggctctggatgaaattgggaggcgagattggggctacacggccgtaaggaactctagtttcaccgtgcacactcaatttgaagagaggtggagaaggccgtgcgaattttgggtttttctcaagcttgcggttgaggctgtgagtgcctcgccgtggtccatgccgctatttaaagccacgacggaccgactagcgatcagcggccgcggatagcattgctagcgcatgttcaccacgtagaagagaggtacagtgagggaagagcagggtatggatgacaccacggtggaggtgaccgagccacggagaccgtcggtgagataacaccgaccacatgcggctgggttcgcggagtcgtgccacgtccaaggttatccttctcgcgatcaaatccacaccgtttcatccgagctcatccaattccacagtgcggtagatcttttccccctgcgttcttcagatatttcagtgcacgggatcttcagagttcgcctgaaccgacctcctttctctcccctttctctggattcttgctaaggacagagcaaccttccttaataaaatttattcactaaacatcagtctacaaatt

SEQ ID NO: 3621 - DNA, 1169 bp, Zea Mays
gagggatggcctaggcgattgtgccatttagacacggttggtttgtcaacagcatttgcctgcttgagtgaagaatcggcaggaaggggatacaatccacgacgacatggccccctaagaatcgttctcctcgtatcctgatccttgatgagcaaaaaatcaggatgaaactcaataaatgcagagttatctttggtaagatgatgaagggagactagatttttagcagctttagggacatgaaggacattgtttagatgtaagctacgtgattgagttggaacagtagtatgaccaacgtgtttaattttcatacctgaaccagagacggtgtggatctgatcattcccatgatacttctccctcatcgtcagtttgtttagttaacttgtgacatgatctgttgctcccgtgtcggtgtaccagttggtgtcgacattgtaggcgttcatggcgatggcagcattaacgtggcgctcttctgggacgtagttttcatcgaaccgatgccagcaccgggacgccctgtggcctgacttgaagcagatctcacagagtggtaggtcatcagacccactcgctgtatcagatcgtggtggtcgccctccattgcgttgcttcggtgggtcgtttcctcggccacgcacctggacgcgcccacgctgaccacagccacaggaatttcccgagccacggctgccattgccacacccacggttcgccatgtgggcataggagccaccatcttgcagctccagtctggtctcgaaactgagcaattgcgaataaatctcagggatcgagatgggatccgatctagctgtgaccgaggtcacaactggattgtaatcagcgtcaaggccattgcacatatgcgccaccagttcttcatcatctagggccttgccgacagcaaccatttcatctacaaaacctttcatcttagcaacataatctgtgatcgacatggtacctttcttcgtagtggcgagggcaagcctcacattcattgtcttggcgcgagtctgcgcagagtacattttctccacggtcgaccatgcttgtgccaccgtctgggtagcgacgatctgcgcctgaacttccttcccaacgtttgagagaatgagctcgaggatctgttgatcccgagcataccatgtctcaaacgc

SEQ ID NO: 3622 - DNA, 555 bp, Zea Mays
ccgacgactaggcgtggtagcgttcaaattctaagcatggggagcatcaccacacataaaggaagctagaacggacagtagttgggctggaaataccttaggcgaagctagccacggaaaagttctcctcggcgacgatggcgaccaaattgggggaaagtctaaattctccggctacgatggataatcgggagtaaggagcggtgctctagcttcgtaacaagataacagagcaggccagggcgtcaatttatagcgaccataagcggcgactccgaatttggacgagatttggattacggtggcgtcgcggtgtgtcaccggagtccatcaaacgtggcgctcactaggacaaaggtttacggcagtcactcgttactctctacgactcgcgacaacgtggtactatggcatgtagcgtggcagactccggtaatggcgtacacgacgacggtggtcgcgcggccacgttgccggtcaagtgggtacggtgaggccggctcgatccattccccctccgatatttttacctaccgcggttatctacttcacaca

SEQ ID NO: 3623 - DNA, 408 bp, Zea Mays
gtgggattagggtgcactaggtgattggcccaaaacagcgccaacacacctttttgttgacttcgctagggacaatggtgctttgatctactaaaaatcgacttttgatggccggttctaaacatcgcaccgaggtctccatcaacaatatcatcaagccgaccatggaggaattatcggctggcgatcaacagggctttgaggacttcatgaaccaagatgaggaagaagcgctacgacaacaagttgaacgtcgtgagaaggcgagggtgaagtacatatcgcactttacgatgcatcgccactagtaggtaacctgtcaaggggagatcgagatggcatctctcctagcttcgcctcatgcccccattgtaagaattccagatccaacttttaagtattatgtat

SEQ ID NO: 3624 - DNA, 737 bp, Zea Mays
tattgaaatattactttgatcgttaactgtttacattttttaatatactttcctgacttcggacaggaacatagagaataatattttttctggaccggtgcctgcgagcttgcttaacataccaaacttcaagtgagataccttcttcctttcacatttaccttaatcagcttcattaaacctccacgatgttgtctgtagcattgttatttcatctattagacaaatatataatattatttagataggttgtctcgtctatatgaacttgttaagcgactaatagtatatcatcacagaaaggacgggaatccattcaataccacatctgcatctccgccttcaacaggacccgacccaactctaacaccagcacctaacacttcaaattcaacgcccccagcaccagcacccccatctccttcaagagctactcccccgcctaaaacaacctcaaattatcctgaaggatcaactacccgagacagcacttcatcatctaggaaacacaatacatcaaccctcaagattgttggttttgttcttgctggagtagtgctgtttattgttatagtcttcctagtattattttgtctatccaagtaccaagggagacagtcgagatacgatcgtaatagaagtcagctgggaggggtgcatcatagggttgaaccgcaaatcaagccacctccagtgcaacaaagcaatgatattaaagaaggtaaacctttcatccc

SEQ ID NO: 3625 - DNA, 516 bp, Zea Mays
taaaattacaaaattttaggaactggaatggctcaatttggagctaacatgaattttctatggattatacaaattctggcatttaattaatactaaaaattcatttttaaatgcatttctctggttttatttgtcctctggactgggcctcgaattccagaaagctcaggggtctctgcgcaagaaatcctatgactcagatcacccctaatatggacggcgggttaattgtttaagaacctgaggactcatatgcaaaacttacaggccgaaggggtatcgggtaactagagccgtccgatcctatacctgtggcgcagattagatcggcgccatcgtgaacgggtactggatcgcagccgctggatcacccatcggcggcccagatctaaatacccccaaattcaatcctatcctaccaattcgatcggacggccagggactcatcactccccagattctatccccgccatcggacacagatcccatggcccatatttcatcttctaccccaga

SEQ ID NO: 3626 - DNA, 1025 bp, Zea Mays
gctgagccgccgttgcaacctccgcggagatctcggggctcctggggtttttccgcgactccaccttccggatcgtccgccacggataaatcctctcccggcagctcgggcgcagcacgtccctccattccactgccagctccgtgaaccgagggaagagagaaggcggagtaccgccgcgggtgatctagggaccaccgtcgctccggtggaacttgtaggggagatagcttcgcactctctggtggatcgtatctgctgttctcgttgggctcctgtggccgtaaatcggtggcgattgctcgacgactttccccctccgttgtgacttgcatctctgcgtggactgcgccaccatcgtcactaacccaagtaagtgatgcccagagctattcgtcgtggtctctacttcgtttagcactaggttgattcaggattgggcgtcggacggtacgagcagagcccccgccggcgaacctccgccttgggcactcgggtgccgccgtggccggcccgtcgggggagaagaagatgatgcgtggggccgttggatatccatcatgcggtcgggattagatgcaggcgtgtgaggttttgagccatggatttgcggatcaggggccaggatcacccctgcataccccttttcgcttgtgagatcgtgaccattgatcgcgtattcgacggcttagattagatctaggggaaagttggccctcaaccgtcgatcgtgcagggaatggcctggatcaaatctggcgtatcccttcatgtcattaaatccgaaccgtgattcccatatctgacggcctcgatgcggtgccggttcgaagttaatctggacctaatccgcaccgttcatttgcaatcgtgcgacccagataccgccataccccttcgttgggtagatttgcgtctgaacccccgcagaatcacaaaaccaacccgccgtcctcactcactatttattgagtctagggaatcttctgcgctagcccctgacctatccaggaattgtgtcctag

SEQ ID NO: 3627 - DNA, 504 bp, Zea Mays
ctcccccacgcgatcccttgcctgcagccgaagatctgccagcgccatgctcttcgtgtgcatgcttggtcgtgcacaggaacaagtccgtgccatgcagcccaagggagaagaaaacaggaacccccacagtaaccgtccgtacaatcgtgcatgcatgagggaagaaggaaaccgtctagtggaccccacttgcatgcatcacgtctttacaatttaccacctgcatgccatcctttttttcctcacgatgaaatccctgccagcatcgactagagaggaaaaccagcctcatgcataatcgtggccatgtgtcaacctttcattggcctttctggtctgtgggatcttctgtggccgcaaccatgtaaccctctgtgtgacctatttctcgtccaatagaatcatgccacgtcgcactaaacccgcggtttattaattatgtgttaccttttgtgttagacgtccgaattattcggcttcaactccattataaggtcgtac

SEQ ID NO: 3628 - DNA, 511 bp, Zea Mays
atcttcttaagagggtgctttggtatgttatgtttttccacgaatgactcagttataaatgaatgcgatgctccagagtcaaataaaactgaagcaggtatggagttgataagaaacataccatacaccacatcgtcatcctcaggaactgattctgctatcacatggttgactctttctctactctggttctgtggagtcttgttctgtgcagatccatgagcgggggtgttctggtcattcctctggttgttgctcttctgaggtgtctgttggttgcgcctagggaagttgttagcataatggccaagctcaccgcacttgaaacagccattgggttgaactggtgcgttgttgttgcttttggcctgtgtgtttacggcgccaccttgatgagtctgcaaattcccaccagacctttggttggtctgagagctattcctctgttggttctgactttgattgctcctcaagccttgttgtccagagcgttgcatctgataactatttc

SEQ ID NO: 3629 - DNA, 595 bp, Zea Mays
tggcgacctgaggaccttgggcacaaatctctggactgacaggggttaaactgttaaaaacagggcccatatgtaatgttctttgaactatagcggacggcgggttgattccacaaaacactagggactctttagcaaaataccttgcccgaaggggtatggctgttttaatctcgaccatccatctcgatccaacggcgagggcttgttcttcttcccttattcctctgaatcaacagccgacgatgcattttcccccaccacgctccccagccgtggcggcgcgttcacttcacacggcagagctcgcctgagaagcgctacccggcggtccagtgctcgattccccacatcaactgcatctacaagatactgcgttcaaagctaatccacgggaagggtccttacccgatcttatcgcatggagaccaccgcccatggcggagtgcggcccgatggtggtgcccaagaaccgatgaacaattcgcctccccgatactcgatcctttccaccgagcccacggtcgacaccaccacccaccaacgatgctccccggcccgaccgcgtgcacagaacgacggcgcgagcgagttt

SEQ ID NO: 3630 - DNA, 706 bp, Zea Mays
gccaagcagctccccatccaaaattacgaaaaaaaactttagtagcaccatctccatcttgcgacatgaagattttattaactcttagtcctccatcttaagctgcagctgtgcccagaagcgacaccaatatgttaccctgaatgttacctgcaaacaagatttaggagaagatttattgaaagtcacatcattcctgcttaaccaaatggcccagcaaattgcagagttgcagttagtactaaatgacgtaatttgactgatggcaccgtcgcctagtccccaaaaaaatcgtttgcatcccgaggtggtctcaaccctgtgcttttcagaaccaaacgccagatgaaagacgcataagtaccaatgaaaaacaagtgatttattgtctccagtctgctacaaaagcaacatgtctcattaccaggccaattcctcctagtcaagttatcctttgttaaagttacacctcttttgagataccacataaaaacttttattttcagaggtatcttaagcttccaaagatccttgttatccctaaccgtcccattgttaagaattgcctgatacagggactgaacagagaacaacccattagcagtcaggtcccatctgaatgaatccctgttagtagtcaaattagtatacgccaccaacgtcactagttgaaaccattgagccctcatctggtgcacgaatcccc

SEQ ID NO: 3631 - DNA, 698 bp, Zea Mays
gagaacccaaggatgctgaaacaagaaagcagagggcaagatcggacctgaatcgagctggccacggcgaggcttctttcacggtggcggaaagtaggtttgggggaaatgagaaattagtgagctctggtgatcaattgagggcacgacttggtggctggatgcgtgactaccctacagacctgacggtgtgctcaatttataggacttggggcagtggctcgtgaatttgagttggcgtggtggcggtcggagatgaaaggggttactggccctcgcgatcagtggcatttaccgtggcaacctcaacggcgatgaccagacgtgctagagcgagtcactacgatgaagtactgcgtctaggcacgtgtcatccgagcggcacatggctaactcctgtgaacatatccacatcggccgtgacatgctcgtgtacggtggccggagtagaatagtggccggagtttatctcccgcgcgatatttcttatcgaggagcgcttatctgagttcggtcgggcgtgaatcgcgacgccgacgcggatctgagcgcaagatcattggcggcaaggtttctgagctggcgatccaatccggtcactgtaccatcgcaagctcattcagtcgacctgtcagagcatgtttggcatcgatttgctccagattttgtgtaatgactgaatcaactctctgtatcaa

SEQ ID NO: 3632 - DNA, 524 bp, Zea Mays
cacctcaagaggaaattccaagttctccgagctcagcagcaagaccgacactagaaagctcgatccttcgggtttccacccaagggaccaagcttcaatagaccagctggacccacttcgtcatgtttcagccagcagagtcagagctcctttcaggccccctcggtcgcaagcaaccaaccaccagcaaatgcctgttggcactgcggagaccccagtcacttcaagaataactgcccctagttgaaggcacagagacctacttactccaaatcggtgaatggccccaagaatacctcggcacccgcctccaaggcactctcctccaacagtcagcaaagcaagacccagtatctgggtagagcacgagttaaccacgtcgatgctcaagaggctcagcaagctccgggggtagtgctcggtgagttccttgtcgaatttactcccgctactgtactttttgattcaggagcatcccattcatttatagccactggttttgtgtaaaagcatgacatcccctc

SEQ ID NO: 3633 - DNA, 642 bp, Zea Mays
atatcttagggtttctttagcaaaatgtacccgcgaaggggtatcggtgaatcgaggccgctggattagaaaacaagggctgggattagatcttgcccacccaaaccggtacgcgaactcagccattggattgaggatctacgaccctgcaacactcacgatccgatcccgtctgatctgatcgaacggctcaaattagtcctaaccccacattcaatcccgaccgcaaaccctaagatcgacgacccacgctagttcaaatctaaaccgttcgctggtcgatcaatggtccaagggcatctctctcttctccccaacccgttcctgcatccatggacagcggtgaacaggcacagcggcggcgccatggtcgggtgatagcccgcacacccgaatgctccatttcctaatcaaacgatgctacacgaaattaggaacatgggttagcagtggagatggttcttaccgggattcgcagagtaattcctcctggccacgacacgaggcggagctgcgaccatccataacttcggcgagaaattggtcctactccggccacccacgctgcacatcaacgcgttgcggacgagcggcaagctccagctcccacgacacccgacggcgaatcaccccactgttctc

SEQ ID NO: 3634 - DNA, 561 bp, Zea Mays
ggggatactgtgatgcagtatctcaacaaatttaatcatttatcccaatatgtgattgaccaagtaaacactgacctgaagaagaaaaattgcttcatgagaggactcaacgaccggctccaatggaaaatggccacctgcctagatcttacgtacagtagagctttcagtacggcactggcagtagaagccaagaatacaggccaaggaaaatcaaagggatttggaggtgacaggtccaattagggacctgagaagcgaaccaggttggtaatccgaccatttaatcagaatcgttctttgcctcgcccaccttgctatccgttcaaacagtctgttttcattcgtcctaccactgcccccacttctacaaatcagccgagtgcccctggtgctcgtttccctgccctctctagttcttcaactggctgcttcaactgtgggaagtctggtcattttataaaagactatccatatccgaagcagaataagttcaacaatcaacaaaattcagggagttccaatcaaggcaaaggaaacgtggctaataatttagtgggc

SEQ ID NO: 3635 - DNA, 962 bp, Zea Mays
ctgtgactgcatattcagaacattttctatttccgtattgataatattcataattttattacatggcaaacaattttctatttccgtattgataatatttgatctgtgactgcattagggttgtttgactgtggcagaggtcttcagaacatttgataagaagatgggaaagtaatgtcatgagatgcttatgtcaagaagaacatttgataagaagacaggaaagtaatgtcatgtgatgcttatttcaagaagataggaaagtaagtattcactgcttgctactgtccaatttttagtgcaattattgttgcttgtcatgactttaaaaaaaaaaactcgaccacaggacgagacacctagggatttaagaaggtaccgtgcttcaaacctagattaggactcaagtttaatgactcctatagttcaacactactggtccacaacaacaagcttggctgatcaggcaagtgttaatggagtttcatggagaattttgtgggcattaaattacagaacacatcaacaattctaaactagggttcgaaggggattagtattcatgagaacatttaaattttctgttgcaaagcacgagcactctgctatatatttaaagcaccagtttcgtacgtcgtgcgtcaccgtaggtctcactacgtcaaaaacgctcaaaggggacgtgaccatctgtgacacttgttaaaaacacgtcactaatttttcacagtgacttcttttttaaaaaacgcgtcactaacaactgtgcacatgtgacatctattgtaaaaatacgtcactagcaaaatatggtaataactcagtgacatcttttattttacgtatctctactatgatctgtttagtgacatgtatatataaatgcgtcactggcttcatacgtcaaatctgtttagtgacgtgtatatataaacatgtcactgacttcagacgtcagatct

SEQ ID NO: 3636 - DNA, 533 bp, Zea Mays
aagagaaggggctagagggaatgacactagatgcttacaaattcaaaaagcctggctcaaccatgcatcagaggacactcgggggttgaaatcaaaggtggtcgtgttgctccctacgcctccctctaaacctccaaggcctggccaagccattgagcaacatccaaatcgctcagaaggacccctgcgcctagggacaattgatccttccccatccggtccagggcatagatcgagccttgaggggagccacccctagacggaggtagcgccaataacacccgctcctgtgacacctttatctcggaggataagcacccctgccagatggttttggagtcaagctttctcttcagtcgtaacattgcaactccaattaatgggaacctcggacgaaacacccaggtagacgctgagaagctacgaccccggtaagagcccttgaccaacatctcacaaataaaaccatcgcatgtgcgaacccttattaaacgaggaaaggggaattgagatatactcgtgcgaccttccgt

SEQ ID NO: 3637 - DNA, 846 bp, Zea Mays
caattactgcctgtgtgtttgcattgcatgcatatgcacaggtgtatatataccgctcccgctggttagcagttcaaccaccacacagtcttcagcgagtttggtttcagtttgacgaagaaccagatgccgcctggctgtggatccgatccgcctgctagctccaaactcatcacacacagtactttgagtcggtgatgaactggcccggccagtcctggtcccaacctgcttatgtgctttacgtataactagcatatctcttaaggttcttctttatggcaagaatcaaccagccgttgctttctgcagccagtttcagacagcttaggtgactcgctctcctgcttcagctttgaacatgtaacggcatcttcatgcatgggcccatggtcacaccacgtacgcgtctttctgacgagccacaggaagccaatgctcgttgaacgtacaatcaagttcgagtaatcttaccattaacacatgatatgctgctatataggagtatttgctgcttgcagctggcttgaggcagctagcagaatctcctggagccgcgtagccagcactccacaagttccactcgatcgccagtcgaagcacgcgccccggcctcacggtgttcagagacgatggtgttctaagattggccttggccatgagggggccgtatccctgcagcttcttttgcgacgaatgaagctagaaaaagggcagggagaaagacatatataagccgcgagcctcatgtgtgattcatgatatttgtgggtggccctgaaatcctgatgccatgggatcggaattgaacaatgatgccccccgcccctcatcacaaggccccgc

SEQ ID NO: 3638 - DNA, 417 bp, Zea Mays
gttttttaattgcagcaattaacgttgttgggttccacgcatgtgtatgcacatgcatggtttgcgccttttgggagttcctgcttgtcctattgctcctacatcacctgtgatttcagagaaggctactgacgagaaggtgctgcttgcagactatgatgatcgaatgtccccttatgagttatgactcagtttagtgcttacaggacttggttggatgaggatgtctgtgcccgtgctattcttgcctctagcatggaggatcgttttgttgctagagagatcctacaattgatgagttcttcacttagatgtatactatttgacgtcaacttgatactcttggtccccagttggccagttgtcaccgcatacttgtcaggcttgttagggtcaaaaggccggacttgagcttct

SEQ ID NO: 3639 - DNA, 667 bp, Zea Mays
gaagtttgtaagttttgtctctgtgatactgaacctcggttgctgcgcaggttctgaggttggagcctgcgcacgcaaccgctactaacaatactatttttgtggcggcttcgacagtggctgctgatgatgattcgtttggctctgtgtctaagtgttttgagtctgatgattctgggagttcgattgcgtggacggaggagtcttcggatgaggacttggattattttgcagcgttagatgtggctgcagcggagccttcgccgcgcgtagagggttccgaggggctcccgggtgcgagtactgggtataggcagcgaagggcgttggtgaaacggagagtgagtgaattgtcgcgaagtggtgggcatcatcgtagtgagatggagagtggtcgtcttcacgtggatgggactggtaaacgagaattgttgtcctcgccgattggggcgagtgtaggtgaacgggagctgcgaaatctttttgagggtgaggaattgaggataatgctattcaactacagggagatgggtatcatcccgaaggttgagccaatgtaatatatgatgccctcgctgtgtgtatgtaaccgtaatttgtatgataaggctgcgcgcctttgttgatccggccgtaccggtaggcgacttctgcacggagtattttg

SEQ ID NO: 3640 - DNA, 1199 bp, Zea Mays
aagaggagcaggtcagcgcagggcagccgaaggaaaacgcggaggaggaggaggacgtagccgtggaggagaagatcatacaggtggaggcggatatgctggagctgcaagaggagaggtcgtagagcagcgaggtcgtggagacagaaatagaggccaatgagcgcacggacgatggctcactgaccgtcattggagaagaagttgcaacacctgagggagaagacgagtggcggaagagaagatcgtcgaggagatccagcgagcagaggtgactgagaactcggaggcgaacgcaaactctgaggaaccagaccaacaaaactgacgtcgtctccgaagaacccaaggaatagtctatggtgatgagcacaggatctgggaggtgaatggagagcacgggatctgggaggtgaaggggatcgcgggggcaatggagttgattgcgagggcggtcgcggacgtgggaatgagcggagcggaggatgtcgcgggtgggagtgggaggcagaaccgtgcaccacactggtgtggacgcctacactatctgcttaagagtagtagagattgtgtaccccgtcatgttgtgtgcctctggatgttttttaaacatgtttcagtgctatacttaggatgacaatgagctctaaattttacattatagaatttatggaatcgaattaggattagattctagttttatttattttttaaaactgaaattaatttaaagcctaatctctactaatccttaaggcaatagtgtagactaggcacaaccatgcccctgcctccatatcgaccgtccgattgccggatcaaccccgcctctgtctcaaccgtccgattgcctctgtctcgctcccgctcctgcacccgaacctgctgccatgcgcgcagccgcccccgaccatgcgctcccgcccgcggtccctctcacatctcctgcaacacacagccccaatcccccacccacgggagcccacattcccgctggcttgcctatctgccctaggccccaacccatttgaatccactccgcgttggcgtgtattggcgattcaacggagggggcggtggaggtgtgtgacctacgcaaggtgtgggaggtccatgagctcaagaccaagctcgacgcgaccgccgcccaggctaccctcgatcacggcgccagtcaggtgcagcccatcatgcgccgc

SEQ ID NO: 3641 - DNA, 339 bp, Zea Mays
cgtcgtctcgcgacagagttaaagtgatatgcccatgcttggcttcctcttgtgagggaacattggcctatgctcccgcgacacatgctcggtcaacacccatgtgttgcctgatgtagtgtccaacgctttgcaaggtcagggctaggaccgggccagtgtatattagggtatcatgtggtcagatgcgggtagcccatcggacatcgccattgctcgatcatttcgatcgccacaggtgaccaaggaaaaatcatgggagagaaaccttgaagcacatgcacaccatacctttggatgaaggcaaaagcgagatatagggatcagaaagccgtcaca

SEQ ID NO: 3642 - DNA, 837 bp, Zea Mays
gatagccgccgcattgctgagttgtcagcagaggttgatcgtttgcagcgggagattgtggagcgggacagggctattgattgggctgtaaattcacaatctatagtctgggattgcgaggtgaatgcccgagcccgggtggaagagctaagcgtagccctggaaaatctgcaagcgtataacaacaccctacacgaggaagtgcacgtgttgtatgaccagttgcatccgaacgtgccaccgaaggttgcggcgatgggagctagaacatcaggagcagctagcgaaggaccttatggggaattggatctctttggagcccctccttcgatgatcatcgcggatgatcattctcccaaagctagcagtggagcaggagcagccaaggacgtagataactagattagtgtagtagtatgtaatttaaataaagaaaagtgagttgtataagttgagtatgtataattagagaaagtttggaataatgtaatagaagttatgtaatcgtggcatgtaataatcaagtatgttttcttctttagatgtcgtccagaactcgtgctcaagatggggctggaacttcccatggtggagaggaaactccgaacccgccgcctgcacctcccacactagcagaggctatcgctgccttaattaatgccactactgataacactcattttcttcgagaaatggctgggaatcaaattcatcagcagggaggcagaggtcaacaccaagcccatagagacactacgtacatggactttttagaaactcgtccacctattttcatcaaggcggaagaaccgttggaggtggatgcatggattcggg

SEQ ID NO: 3643 - DNA, 368 bp, Zea Mays
gagattggagattggagattttagagaacggacatagtgtaatcaccaaggtaagatcaagagatgagaaaggtaaaattaatacccaatcggagcacaacaaaggatggagttaaaaactcgcatgcgacaaggaaagggatacgaccaagggaaaataggtaaccttcaacttttaaaattgagacgaaagagagaagattttggagcacaggtataatataggcatcaaggtaagatatagaggtgtcaaaggcaaaggtgataataacgaaaggcacaacaaaggatagagttaaggcaagactagcgaaatgacgaagtggagaaaacaatcaaaggtaaaataggtaagggtccaacaaaac

SEQ ID NO: 3644 - DNA, 743 bp, Zea Mays
ccgagatctctcgccctgcgcgtgcatctaggcaactccaccgctgctctctaacatccaccgcccgttctacggtcgacgtagaacaccccgccgtgtttgttgccccggtaagcttcgccctatcactcgccacctggaacgccccttggttcgccctctcctcctctggttcgtctggtctgtgctcaccggagcatttcttgcgcagttggagaatcgccgccgtcgaccagcgtcctcgtcgcgccctggccttcgttcgtgagcccctgagtctccacttgaggtaaccatcctaaccttgcccttattttcccctgtcgtgcactttctcacccgcgattgctcgccggagtgccccggtccgccaaggatctccccctccgccgtccagtcgcctcacccccgttcctgctaccccgatcctgccgtagtgttcgctatgtcttccctaacctccttggccacccagaccacccttagcgcccctaggagccccagtccacttcgccgtcgtgggtgcgaatggtgccacccctggccgaccggagaagacaaagtccttagcaccaatcctgaccatccagtcttcatcggatggtccggatgcgcggataacgttttgcgtggacgtggagccggagccgttgatccacgatctagcggctagagcgccctgcgctctcagcaccttgctgacccttgggcctcgtgcaccagtgcctcagcccttcccttcc

SEQ ID NO: 3645 - DNA, 381 bp, Zea Mays
cccgggtgaaggtgatcgggtgctcagaccattggtacggggcaggaggacaggtggccgccaccagtatctgacgatcgttgagcttttgttgtctcttgctttcttgcgacccgtgtccgccgaagatgacgttgacttctctgtcaacgcgcaggaaggctccacctcctccctcctcctgctgctagggttgtcgaggttctcctggtcctcctcgcggcggtggaggaggtagaggttggaagggtcggtcgttccccacggaatgcttgaagtctctgcagttccggagggtgtggcgcatgtccttgtggtacgggcactgggcgtcgaggatgtcgtccagcgtgcgctcgcctccgtgaggtcctcctcgag

SEQ ID NO: 3646 - DNA, 321 bp, Zea Mays
gccgtaccgaggttagaatcactgtcgagtccaatgttaccactacaagtctacaattgacaaaacacctagaattatgcggagtatagggctaggggagcggtaattgctcgtcgtcgtatgaacatcgccgcttcgccgctccgtgttgtgggcgtgcttagtgctcagccgagccataggggaagtgtcactagtggattcgttagggtttcggctctaaataactcgaagcgggagtgagaatggtggccctggtatgcagccggggttcctccgatgatgtgctgccgcatagggagggtggcgccgccatttgtg

SEQ ID NO: 3647 - DNA, 498 bp, Zea Mays
cgatgaccttacgccgcgattaacgtcggtgatgcgattcgtgcccactggtgcctagataatgcctcggggtgaaaagatcttcaccgcggatgagcttgaagcactgttctgtcctatgccgtgcccacttgcactagcgacgtggccaagcagccgtcaccggagtttgcgcccttcaccgcggttgcgccatgccttaggccatttaccatgtcgcactaagccgctttagatagctgggtcgtcgccggtaagcttgccacggtgaacgccacgaatcccttgcaccagtgctctttcctctctccggccgccgcgcatcttctccaaattagccaccaccattcatgaatcctataaattaagcgtgccatcagctccgctaggtagttgtgcatccagtgaaccagctctcacctccaatcatcccctacagctccccaatttgagacttcccccaaatcggtcaagaacaccatgttgtgtgagctcgct

SEQ ID NO: 3648 - DNA, 614 bp, Zea Mays
aagtacatgccgccagaacggcaaatcaccatcaggacatcgaactacggtggtgctagagaaaagcatccaaaactatacgccggcagcagcagcagggagaaccatgaggctgccagagaggtggtgaagaagaagttcaagttcgttcacggggacgacataaggatcgtcctaatccccgagaactgcagcctgttgcaggtgatggacatcgcccggtacaagtacaacccgcacctcaagtcgttccttctcaagttcatggacaaggagggggacctggtgaccatcacctccaccgaagatctgaggtgggtggaggacctctacccgcaggtgcccgtccggctgcacatcaaggaggtgagccccgagcgggagatcaccagggacctggtgatgccccagcagctgtcctgtctccctgagcgagagccgaacctgaaccactacagcgcccacactacctccgacgagtacgagtgcgggagctcgaggagggacgacgagcggagtcaccctccttgcgccaccgacgagtggatggtgcagttcgctcgcctgttcaagaaccacgccggcttcgactccgacgcgtgcgtggacctccg

SEQ ID NO: 3649 - DNA, 561 bp, Zea Mays
ccagggtctattgcataaaacatctaagactcaggcatacagtcgatgggctgcgggtttaatatgaaagaatccagggtttcttttaaaagactgccagagccgaaggggtacgggcagtcgctggccgtctgatcagaattcggtcgtccagattaaattggttgtgcgctcagaccggtatcgagccctagccgtgcgatcgtagatgaacgcaccagatttaaaaacccctagatctaacttcgctcgtccatattccaatcaacgcccaggatcaactttgtcgaatcgttacgcacgatctaatcacggccattgccacaagatctgacggccctgatccaatgccaactgattgctttcccccccccccccacaaactaacggcgccgattatttctaccccggtcgagtgaccaggaacggcggcgcgcgcccctcacggcggtggactctccggtgtagccccacatggcgcgcccaaaccctaaaactaccgcaggcaggtgctacgtgaagcgcagaacacagtgaacatgaaagggtggttcccaccga

SEQ ID NO: 3650 - DNA, 475 bp, Zea Mays
cagcaatcctggacataggtccgtgcggtagtgtagcaccggttagaataccgaattagccatgggcgtgctcgaaacgggatcgccagcgatcctctgccgtggggcttggctgccgccggtgtctggtgcgtgcgtgaagaagacatgtccaggggcgttgatctgttaacgagtggcgcagattaaatggtgaatgccgattaggtcagatgtagtgtgggtcgtccgattctgatcgatcgggtgaaagtcaatttagggtatttaaatctagaacgtccgaatcggatctattggctcagattgcataacggttcgctggggggtagatctaatcggggccgctagcggttgatcggacggcccagatacaaccataccccttcggcgtgtacatttcttaaagaacccttctgtttatagggattcaacccgtggtccgtcctggcagatgactgagtctaaggagttt

SEQ ID NO: 3651 - DNA, 791 bp, Zea Mays
gaaactcctcaccggaggaagacctctaccgcaggtccacggtggcgtgtgggcgatgtggtggctgcgcgcggaagcctcagttccggttgaattcctcaccggattcatgttggtcgtagatccactttgactggaaacaacgatgtcgctgggcgttggacaagctccctccacggcttcaacggccggtaagtcagctacttacatactcaccatgtcatcctcagtacgggttgcggcttcggtttggacgaggctgacaatggcgccgccgtccttttgttttgcgtcgtcgggttggcaccggtggaagagagagaggaataagggaagaagaaagacaggagccgtccattcgttgatggacgggcgagattagaatgaggctatatcaagccggtttgatgtcttagccctcagatcgggatccgatggctcgaaatcagtcgcgtccatttttaaatcataacctttggccttcaatccgacagctaaatgcgcataccggttttgtgtggcgccagatatgatctgggccctcggtcttgatccaacggctggaaatcaccgatacccttcgcgagccatctttacataagagaccctatggaattttgaaatcaacccgtcatccatcctaagccaatacaaattgcagctgagcccagaaaattatgctttcgcccctgcgttccgagaaaattatgtgcctagtccaggatctttaggaaatcagaaattaataaagaaaatgaatttttggtataaaaataaatctaggaacttgc

SEQ ID NO: 3652 - DNA, 615 bp, Zea Mays
atcacaacaacttcggttgttatggattcattgctcgttctaatgcaagctacccggttccaacatttcggaaaaggtggcccgggtcctggatggagaaatggttttatgttaagaataatctaattgaaagagaggacataaaggggattatccaatgccccatctggtctcgctttggccttcgaaggccaaccgtggcgattgaaaatgatgccgaagcatgccaaaaggctttcaacaatgtctgtgctttcattggtacaagagacctgatccaagagcacatagcctacagggtatggccacttgtggataactgggagatgccgaaggagactgctgccgggtccagtccagatggattaattcgtttgaaatataccttcagatacagagactggtttgatgaaccaaatgacgactggctgaagtgtattgaggctactagcgacgagttacttggggcatacaacagagccgaagatgatgctttgtccttagctttcgggggtcggggcaagaaaaggttgaacatggttttcgatgcaattggttttatatatcctgattattgttatccctcgcgaaagcagggaaaaaaggggaaaacgg

SEQ ID NO: 3653 - DNA, 613 bp, Zea Mays
gtgacccatgttggcgctgcctcagcggtgatgatgaaatcaaagcccccaaagcacatgccaatgcccacgacccacttgacgacattttttaccatctgctacggtcgtgtggtgaaatatatgtcatgatgcacaaataatcccctacttggcatgccaactgttggtgttctaaagccactagttagtaaactacgtgctttgtgcatctggtgcgaatggactgcgaggaagtcacattgattttatactagttcaggccaaaggccaaaagtaccaacttctagtcgagtgagttgcgtaaccatgcactatgtttgtaatagggatggattacatactaattgagagagggctcaatgcccaagtctctagtgaatgaaaggcagagcagggtggattgctttgtgtgttacaagtatggaaagtacttgtgctagctttttgtcactttgcatgttgtggtctcccctaccttttatagaccaaggaaaggggaggccttgttatataagtctacggggctggtcaggacggacagaggccaagccttgtcatattggttcttgtcctccgggatactcatcgatcgaaggactccttcgactaa

SEQ ID NO: 3654 - DNA, 913 bp, Zea Mays
taattaaaagtcccaagcactattcccctctctcactgacacttgcaccgaggccctcaaacttctgccctttcgcaacatctcagccccgactccaacgccggtgaccaaacgtcgaacatctggtcgcgtgtgcacggctcgccaccggcgtccctctccggtgaatccaagtacacctacgcgacacacgactcatcccactgttcccccttggttaatcaaaccgtggtgacttcaatccctattgaccacggtgacggcggagaaccgagctccggtgaggtcgactggggtttctagcatggtagtgttcaatctaaggctacaacgagcattagtaacatgtttagcacacggtgctcacatgtgttggctcgagaaggatgtgggtcggtcagtcgacgtgaagatggcccatggcggcgttctagacaaaactcgacggcgttcttgccggagtaccacggtagcgttcaaaaggggaagctggccacggtggggaggacagtcggctggtgtggtcaccactggcagagcttgcttcagctttaagctttcatagtggaattagaggagtgggaaaggttgaggaggtggtctaagcgtagaagatcaatagggtatggtgaagaagctatagaaccatcagggcaattaaaattcagtcttcaggtttcaaacaaccatggcaagcaaccaaggaactggagcttttctgggttttcacagcaacttacacagggctaactcatgactaatatgttccccaaccccctttgcatggccaccacgcagggcaaggcacaagggggaatttctacacccccactgcatgttggacagcagggccacagtaaaatagctgagtcactcccttggataggcttcaaatttgttttcttcatgtccc

SEQ ID NO: 3655 - DNA, 646 bp, Zea Mays
ccagggtcgaacacgtgtgcccgttcgttctgcccaagttctggcgcgtgtggtcactcatccgagcctgctctcgccttggtcagtgcacaaaacctcttctcctccctacaagataccgatcttgtgtgggggacataggattttgcctactggtttcagagatttggagcccggaaatccggtctgtctctctgctcaaacccgaggcaaatccaaggttttgtcgtgtctagggctcgcgtcccaatgccatcttctggcatgcgatagaggggttagtgagacacgtttttgtcaatggtgttattaggatttgagctagggatcaaggtgaacacgcttgatctttggctcaaggtctgaaattcagaattctgaaattcagaattccctattgagtccccacttgagaagcttgcttggggttttatttaacttattttggccaagcttcctctatctgtattgttgcttattaattatacttcaatgtttatatttggcctaagtcatgattctatatttttcatactcttttgccttatctcttaaattttgctttgagagctcaattagggttgttattagggttccaacattttgcccttttgaaaactcatttgtttttgaatcatgatgcttt

SEQ ID NO: 3656 - DNA, 356 bp, Zea Mays
taatcaagcgaaggggtaccctacgttatgatcatcgtcgtccgctggccatccaacggccgagcgacatcgttcccatcccgagcgtggacgcggcggcgccacacaactccccggcggcagagcttgccagtgaacccttcctagcgattctgagcgccaaaccacgattacctaggtgctaagcgaaattgagggtgcgatggacaaaggatagtgcttattaccggcaatagcgaggtggaggggccgtgccacggtgagaggtggaaggacggcgcgcacactgctccgacgagcaattcacctaacccgccggcgctctcctatcaattgcggccgcggacaaccttccc

SEQ ID NO: 3657 - DNA, 715 bp, Zea Mays
cggtcgtaaagggtcttgaagttatgttgttaggctctggtcgggcacgatggtagtaaactgaaaacgctttcagttatcaggcgcagggaggtcgagctagccgacgccgttctttctgcaccatgattggcgtgagagttgagattggtgctcgcctaagtaaggatcgcaggggtatttagtgtgcgtttcctgcgctgttctgatgagatcgctgtcatgggggttcatcgtgtccctacgctcgggcacgcagctgcctgcttcatcacacatgtggcacgagcaggaggtggcaacgtctcagtgactgacccctaatggaagcaactagtgggtacctcattcgcccattctgatcgttccacagttcgtgcgccgccgcgccgttgtggtcaaaattcatgccaaagttttactcttgtccaattgcttgtcaccacagttaaaccagtccctcacgtcctgtttgcaccctactgtaccccgtgactttcaccagaaaccccgtatcacgtgttttcttctcctggccggtgaacgccgccgtggtccacttcaccatggccacgcccacacagaccgactccttcagctctctcgtgttttcgcttccttttctaatggtgatgctcactgagttggtactctgaactctactgtagtcaacgcggtcgcatcctcacgctcgccggaatatgcgtcctgcgtg

SEQ ID NO: 3658 - DNA, 382 bp, Zea Mays
gtggtgtgcactggaataaaatgtgccaccttcgtcaatcggtccacaatgacccagatagaatcatgatgacgagaggtgttggacagacccacaatgaaatccatgctgatgtcatcccattttcatgaaggtatcgatataggggttgcaaggcaccagctgactttaagtggcttgcctttatcctttgacaggtgtcacattccgatacatacttggctatatccctcttcatcctggtccaccaatacaggggcttcagatcatggtacatcttggtgcttcccgggtgcatggagcatttggagaggtgagcctcatccaagagtctcttcttgaggtctctatttttaggaaccaccaatctatcttcaaacca

SEQ ID NO: 3659 - DNA, 500 bp, Zea Mays
gaaaactcctttatttcttatgcagcttgggtgttacaatttccaaccccttaaaagagacttgacctcgagattaggatggagtaggaaaaagatggggaaattcagcttgcagttcatcctctctctcccaggtagctttatcttccgcatgatgactccactacaccttgcacattttgacaactttgtttctggtgactcgggtcagggtatcgatgatcttgatagggtactccgtgtagcttagatcaccctgcagtctgagttcttccattggtagtttctcttctaggacttgcagacccttttcaactgggatacatgaaacacatcatgcacatcagctaggtgactaggtaactccagctggtaagctacctacccaactcactttaggatcataaagcgaggcgacaacttccccttgattttaaatcttctcataccccgaattggtgacacttttaggtagacgttatccccttcctcaaactcca

SEQ ID NO: 3660 - DNA, 676 bp, Zea Mays
aagagtcttggcgatcgagaggtcaaacgacgcgaaaacgacgtttgaacgagaaatagtgccataggaggtttggaattcgaattgaggcatgaaatgatttgaaattgagctgatacttcacgaataggtttatatgggtaaatatgagtgaagtgtgtgcttggtttgaatttaggcaaagaaaatggaatttaggcactcggctcagaaacgatcgctcgaaacggggaatttggtgaaaatggagcctggtatatcggatgggcgtgaaatttggcgaatatgttactggaggtgttgtgaaggtgcctgaaaaattggaataaaatcggagcatatttggctggtttgggcatttcaccgaacacgtgacgtgcggtgaattaggttttcggagattgggctatatgaggattgaaaccctcccaaagggagctgagaacctacaaggatgttcaaggcacacagaggaacacattccaccacatggtttcacaggatttcacaagaatttgaaattggcacaaaaggggtggaaagggggtgctcactgcaaagacagacagggagaaaacaaaaaagatgcagggggagcagggctgctcaccaagcgagggcagaagatggagcacagggtcgccggagctaaggtcgccggagaggggaggtcgcc

SEQ ID NO: 3661 - DNA, 324 bp, Zea Mays
ccgacctggccacctgggaagatcttgaagctttgcgttaatgttttcctggtgctcctgcttggggtcaagcaggatttcaagggagcagaaatgttaccagccaggcgtcagtatctgatcacccacagaagcagccccagcgtcgcaagcctggaacgcgtgagcgtcgtgccaatgtccgcgtcataggaccggagtgggtgtagttgtgtgcgtggtgttcttgtccctgtctgatggaccagctgcgtctggtggagggtttctttatgtatcgctaactctgaactgggaaggcatgaaacaaacagaggaaatatc

SEQ ID NO: 3662 - DNA, 819 bp, Zea Mays
tcccctcaactaatttcactaatggcgcactaacacgcctgaccacggtgaccgtatggacaacggacaatctaatgcgttcccggcgatctacgacagctcagctcaattgaacgggtcagtgagcatcaggaacaagcaagggtgcagaaacaagaaagctgggggcaggatcggacctgaattggactggccacggcgaggtcccaagccacggtgttcttgagggatttgggggaaatcctaaattggggagttctaggggaggatttgaggcacgagttgcttcactagttgcgcaattacctagcggagcgaacgggggcggcaatttatagcctccaacggcggtggcatccaatttcacgaggatgtgttggcggccggaggggaaaagaggtattggcgctcgggacgagtggctttcaccgtggcagccctccggcgatcaccggacatgcataccatgattcatcgcgacgtgggctagtgcttaagcacgtggcgcacaacgatgagcgatcaacagcggcgaaatctatcccggacgcacgacgagcaagtgggtacggtgaatctcatccgcgcccgagcccgagctgatccattgctaagatttttactccatcgtggttatccccttaccagcgaacacgaatcgcggcgacggtgtgaatcatggcgtaaagatcaccggcggcgagggggatgcattcgggatctgattcagctactgtaccatgggacgtttcagcagacagcctgccaatcgatgtttaggacagattttctcccaatttttcatcgcaacacaaccaa

SEQ ID NO: 3663 - DNA, 445 bp, Zea Mays
attatggttacatacatatagcgagggcatcacacattacattggctcaaccttcgggatgatacccatctccctatagttgaacaacattatcctcaattcctcaccctcaaacagacttcgtagcctcgagccttcactgaatagggtcttcaccggccacattaagcacgggtacagccgaggagccttcactggcatccacgggtggcaccggattgacctccgtagcctcgagcggcgcgccggccagacctccaaggtcctcgacgtcctcggcacgcgccatctgcagcaccagcacactcactcagcaaaaccacacatacccacacacataaccacacaaaaacaaaaataacctttacctactctatcgcccggtcggatcgctccctgaccgcctcccgaccgtgcggaccccacatcctatcgaagagtgccc

SEQ ID NO: 3664 - DNA, 726 bp, Zea Mays
gacgagtgggggccgcccgatcatcacgttcgtgaagcagattaccgcaacagacccgcacacgattccgggaacctgttgggactcgtcgcgatgtggttgggataccagactccagcctcggacctcgtcctcaggcctagcctcgggtacaaatatgtgggcacctggctctcgtcctaaggaatcaagccaccaccgctgccgtgtgcgggagaggtcctccgctggggaaacttcgattcgtcggcgtttggcctctggtgcgtgccgagggttgaccacgggagccggggaacctattgggtgaagccgaatgtggcagtgctgaccagagcgcggtgaatttcacgccgacacgagttctccactgcagcgccacccttcaccaggaacacgaaccttcacacccctcccgcagtatgggccatctccatcgatttcccatcgccctctcgtcgtgtaaacacaattaggtaggcgcgtagggcattagggcacctgactggtgtactcgccaaaattatcagatgcggcggcgcacaaccaccgtgttctgcgttgggtagccaacaggagctcgggcagccgctgatctcctaacgggtggctctggtgtggccccatgcatacccctttggccgttgcatctgcgccctcggatctcgatccgatgactctgggcaaagtggggtattctaaatccgcgtcgccgattgtcgatcg

SEQ ID NO: 3665 - DNA, 781 bp, Zea Mays
gttttctgaactagtggtgtggacttcgcccacttgatcggtggagatggctagttgtttttgttttgtgacgtggccctcgccctacggatcagtggtggccttcgggttatgtggtggggaatgcttagtgacaagggcaagcttgcccttgttggcagcgagggctaccttggtctcgtcgtcgttcggtggtgagctaggacatgtgttcttttcgtgaggcaatatgggagtagtcttcatcgcataaacgatgtgagccaaatgttgggcactgacacgcgctggcgcactatcaggtggacccaaacacttagagacagtgggagagagctcaggtgcacgataaggcaaacaacatacaacagtaacttctcgttatgcgtgcccatctcgctacatgatgggggtatttatagggccgtacagggtaggtggtccaaagtacgccactgcccctagttaacggtcgttttttacaacacggactatacaacggggtaattacagtcccgcagccccctctggttatgtgcacttgcaaatgtacccgctaattacattgacaaatgggccccacccgttgtcactacgggcccgcgacttggacaagcaagtctaccacgctcgtagccttcacccggaggagccttcacgtctttcgccagtttttgttacgactgcgccttggcgaaggcttcttgtttccaaacgtctcgttcctcaagatgggtcgaggactcccacgcccgctagccgatgaccgatgtcgttgaag

SEQ ID NO: 3666 - DNA, 574 bp, Zea Mays
catcgttgggtgttcagatttcggatacctattatcgtctccagtaaagcggtgttgatgacatattgtgtaacgatatcatttggattcagaccttgagccctcttattaacgatgaaggcatcagaaggatgtagaagactcgtttctcttctatctctactactccttatgtttgtatcgtaggcgtccacagtccagccgtttctgccgtcgcgctccctccgcctccctccatgctccatccgccctccgcgctagatccccgattcccgtggctccaccatcatcgccgctcacgcaccttccttcgacaaccttccttccatgatgcctgtcgctccttccaaccttggcacatccttccatctacagcacccactgtgcctccgccctgccgcgcgtgccccacctcgtagcccccgccggggacctctgcttgggccacgccatgggtcactggtcggctcgtggacctcgaagccgtctcgcgggagctagcattctacggctgcgggagctagcgtcccgaccgaggtcgtcgccgtcagtcaatggccatgccccgcctccg

SEQ ID NO: 3667 - DNA, 748 bp, Zea Mays
cagagtgtggaggagatcctgcatgaacatccatggaagtacaagagggagaccccgctcggacaccctcgggggctgggccatagtttgcgctacccacttgagctggatcatctccggcagtaccctcgggggctgggcagtggcttgcgcttcccacccgagccgaatcatccccggcaacaccctcgggggctgggtaagtgtcaacaccatccttgaggaccaagttctctgcaacagccgcctctaaggctgaaggtccctcagttatttccatgggaacaagacgatccaagtcagtttcctgaccctcaagaccgcgctccaaggtcgatgaggcgcgggacgctgcccgggatgaccccaacccggcgtcgagcacatcagcacaaacatccgtcgcaccaccatccgccggctctgataacagatcctctggaaccatatcttcaagagtcttatcaaagttcgccagggacaattcttgtagaccaatgagggcagacagagcaggagaaggaactccactactttccccactggcgacatattgccggctgttcttccgagtcagagggacctcatcttcttcctccccgtcgtcttcatcagcgacacagacaacacccccattgggatcagcggcagatggagcacacccattgggatcagcggcagatggagcacacccattgggatcagcgatagatggatcacccccattggggtcagcgtcagtaaattc

SEQ ID NO: 3668 - DNA, 575 bp, Zea Mays
atgcggcaaagggttatcttagcgttgaatctcagccaaccgtcacacatctgacggccgagagcttgtcttctcaaccccaaacaccagggtggcgaagcaaagcaggtgcggcggcgcaagcatgggcgcggtggcgccatggttggagcatggtaaaggaaccagatttacttactgcggtgcagcagcggctctcaacttgactcccctatcaccggtcgcccacccaggacgcggcaagccgagggtatggatcgacggcggcccatggcgcaaagtaaattggaggaggtggtgacgtcgcggcgagaaatccttgctcctccagttacggttctcgccccacgaggatccggttcaacctagcgtgctcctacgaccccccctgttctcatcatgaggccagatcggcagcctaggcacgaatcacccacggcggcggtcggatctcaacacggcaccacgccctttggtgctttcgttcgatgccatggacgagaggaggtggccggtcttataggtagtcctgcgaggatctcggccgatccgttccttagctctgcgcaaatcac

SEQ ID NO: 3669 - DNA, 307 bp, Zea Mays
tcagggtgaccactatgccctactaacggagcaatcggcttaagtcggcgacgacttaaggcggtgcaacatgctcacgcttacgtaactcggggtgaccactatgccctactaacagagcaatcggcttaagtcggcaacgacttagggcggtgcaacatgctcacgcttacgtaactcggggtgaccactatgccctattaacagaagcaatcgacttaagtcagcagcgacttaaggcgatctgacgtgcttacgactactcatatagggatgacttctatatcccgtaaacaagtttcaaaac

SEQ ID NO: 3670 - DNA, 956 bp, Zea Mays
cgctcgccccacctcccccttctcatttgcgccctcaactgagctctctcgccccctctctcgctctacgcacgcgaccaggtagccccgccgcagctcactgaagtcgccgtccgttctgtgaccgccgtcgagcctgcgccatgtccgttgcctcggtaagttctgcctcgccgtcagctacttgagacacccctcagttcacccccagcacccctggtccatcaggtccgcgcttagctttttcctcgcgtaggtcagagttcaccgctgccacggttcttcgacgtccggccatccggagtctccccaagccacgccaagccaccccgagtcccgtcccgaggtgagatgtctgtcccacactcaatttctcccgattccccctggtattggccaaattgacttcgccggtgatggccgtgctggttcgccgtgcccgcgcggtggccggttgttttagtccgattccgtgcctctatgttagcccgtagtgttccccttaccctgttgcagctagcccagcccttagcgcgcctgagacctcctctcctcgttcggaattccttgccggaattgtctgacccgtccggagcaccttcccttcatcgtccttccttcactgggcccgttcttgcgacaggtagtgtgccagtgtgttcgccaggccctctggacccgttctagccctcctcggtaaccccagcccgcctggtgatcgcgtctgcctcgtctccggcgacctcaccgccgtgaaggagacaacgccggccaccaagtagttaagcctcgtgcgccccatcacgaccattcgccccagatccaaaggctcagatccgcagataacgattcgtgcccgcgtgctctgcctctaggtcacgccagtcagcgcctacgcctctagcgttgggccaaatcggtcagcccgcctccccctctagtcactgacacccgtc

SEQ ID NO: 3671 - DNA, 411 bp, Zea Mays
tagtccagataatctggactgtcagctatatcatcagatatgattatataattcatggtgtttcccaagccatgatatgatattcatggttcatctggactgtcaaccatgaattgacctgatgataagcacaaccatggatcatctcacgttaagcatcttaactaattgacctgattgcaaatgggccttgagatcttcctcctcttctggtctgcacacacaataaatcaacaaatagcagattggtcagctcataagtaccagacagggagcgaaaatctgttccgatcaaaccagtggggagaaaaatatacctctttgcggcagcgatgcggtcgtagcgcttgggccagttgctacacaccaagaaattttgtaaacctaagcgtgaggaatctcatgtcagag

SEQ ID NO: 3672 - DNA, 628 bp, Zea Mays
cggttataaggaagaggttcgacccacatatttgtttttctgttggttttattcttgaatttacaaccattattattatcttaaccacccatgcagtctcgctccctggctggtatagcaacatccgaattgagtagccaagcccggcaaccagacattggggtggttcggggccatgaagtcgcttagtatggtcaagtaccgtaagcctacacgccccaccactccgcagccggacctgttgcgtgaatcaaaggataagaaatactagctagcggaccctatgggtgcgctactaaaaattcctagccaagactgtatgcaggtcgggtccaagttgagattaccccttgggggccatgtcaccagttccttcttaagaatcctggcatccagcctcgacacgtcgaggccatatcctagggggccaagtaccagggaagaagttggtaacaacgcacacagcaaagaaaaagcagcatgcagataagttgtaatatcgcctgataagtagtgcttaaagagtatcttacaaaatcaagatatattacaacccgctccccagcggaaccctcgtttctccacgcaggcctggctactcatcgtcagtgggatcccgctggaagcg

SEQ ID NO: 3673 - DNA, 470 bp, Zea Mays
cagctggtctccatcccgaattgaagtaataaagttcttcctcttgcgaaatcttgagcaagcatgaaataacttggtgttggcatcgccgtccttgagccaagacagccgagatctggtcctagacaccgtcttgagcagggaagcaagaaacaagcaatgtttcttcaattgccgtagtagccagcgtttgagatcagaaagaggtctaccatccctttccgattctagctgcaacatcacttctctagctaactcgagctgtaacttgaagttgcccacttttttgtcactccatcgctatagccccttggctgtagccttgaacttgagggagagagatttaagggggcaagcattattctatacagagtgccaagcattagaaactgcatcatgaaagccctcaaattttgtccaaaaggtctcaaagtgaaatctccttttgccccaaagattatccttcaatc

SEQ ID NO: 3674 - DNA, 797 bp, Zea Mays
cgtgaccaccgtcaagctcaggaacgcgagcgggagctagctaaacaagatgctaggctccgacgggaaaatccgctgctcgctcgaaacctataccccgacttcgctcgggacttcgctcgagcaatgaacacgccgagcgaagttggaggggtcctggtgcagatagccgatggcctcccgtgaaccccagatgcggagggctatcgacgggtgcttactcaggcggccaatcttcttctacccgtcgcccaccctccgagcgatctgtgtcatgccatcaacagccggtgagacgcgtggagcaacatcagtgctttgcgcgatcgtcagcacaaaaatgaaataaggcactgggagttatacgacagagatcatggtgtaccggcacccagccgcgtaacccagattgagtcaacatcagcctctactaacagtccggtccggggacggtcgaggcgacctaatactcgctcccgtcttcgggatcagcggcatgatcaccgacaagaggatacgtgtggggtctctgtgctcacccctcgccttcggtccatccaaaggcctcccaatttcaaagtctccagcgtcgacaaatacgaacccaagcaggacccaaggggttggctggctgtctacaggaccgccgcccgggctgctgggcaacgaaggacgttgtcacagcatacttgcccatcgttctagggtaggacgcactgcaatgtcttcaacatctacctcgacactgcatggatgattggtgagattccagtcgtcggtttatcgtgaacttccag

SEQ ID NO: 3675 - DNA, 689 bp, Zea Mays
ttggtgttttagagataacgaccgaatggttgtggatgataccagcgttttagaagtaacggccgaatcctttggagctaccttaccgatttagtgatagcggccgagtgatggatgtgacatcggtgttttagaggtaatcaaccgagtgactaatggcaatgtcggcgttttagaggtaacagccgagtgattgacagcaacgtcagtgttttagaggtaatggccgagtgacttattgtgatgtcggcgttttagaggtaaatagccgagtgattgacggcaacatcagcgttttagaggtaacgaccgagtgacttattgtgatgtcggcgttttagaggtaacagccgagttagaacgggccgcgtcggccgttttggaaataacagccgagtgatgacatggcacgccagcttttttaggaatagcagctgagtgatgacatggcaggccagcattttttaaaaataaccgtcgggtgatgacagggcgctttctggaaacggtatctggcccaggaaaaccccatatgtactgcattgttgcgcgcctctgctttccgtgccctagttcttgcttttctgcatccaagccctctttgcgcccgtgcgatactgcttccgttccgctcgccagcaagattgagatggcgcccaagcagaaaacatcaagttcatccgttgttg

SEQ ID NO: 3676 - DNA, 492 bp, Zea Mays
ctaaaacaatgcttgaatcgggcagtgccttaccagagcgggctggccacggtggagctgttcttcgcggtggtggcgacaaatttgggggaagtttgaaattccagagctcgggtgaacgattaagggtgggagcgggtgctaaggcttcacgataacatagcgcagctaccccggccttcaatttgtagccggctaaggaggtggcgcgcaatttggtcggacagtgtgggtggccggagaggggaggtgagctcagtgcgtggaaaaagtgactttcaccgtggcagttgctccggtgatcgtcggacatgcatctagtgagtcatcgcgatgaagtccagcgcttaggcacgtgcgcaacggcggtagctcgacggcggtgagatttatccggtcgaccgacgagctggggaggaagtacggcggtcttagccgcagctcaatccgggcgccagatttttacgtggtcgagcttatctgctgcccacg

SEQ ID NO: 3677 - DNA, 384 bp, Zea Mays
cgccgccgcctggctcggtctcgcgggaaggggcgatcaggtgaccaccgatttcgatatggacgcgcgagatctgaacgcgtagtagtgaacacagaccgttggatccaaatcgtgcgcacacgagtagattggagcatttaaaaatcgtgaccgcggatcttgcatccgacgactgagagtgaataccggttcaaagtgatagaagtctaatctgggctgtcggtttagatctgacggctgatatcacgcgataccccttcgtgggtccattttacttaagagtccctccgaaatcctgaaaataaacccgccgtccagttttactatgcactgagtctaagatatcttgcgtagagccccctgcacatttcagaaaatgag

SEQ ID NO: 3678 - DNA, 601 bp, Zea Mays
gtgaagaattgagccccatgcagttcatcaagcaattcttctactactgggattgggaatttatccttaatagtcgtggcattcaactcacgataatccacacaaaaacgtcaagacccatttgccttgtgcactaagagcaccggtgaagagaatggagaacgactaggccgaatgataccttgtgccagcatctcaatacactaacgctcaatttcatccttctggcagtgtgggtaccgatagggtcggacaaccactggatccgacccttccttcaaacaaatgtgatgatcacacggacgggagggtggtaggccctgtggctcgtgaaacagatccttaaatgtgtccaggatcccctgcagatgaaggtcatgttcaacttccaaagtgcgtaactgaactgacttcccatgatgtagaaggccttacaaactgacatgtccaccctcgaggaaaaaagacatttggagggagtcaaagttccagctgatatcacccaatttctagagccattgcaccccgagaactacatcaaacccttccatgggaatcaccaagaaggaatctgagaaggaatgatcctgtataccaaact

SEQ ID NO: 3679 - DNA, 633 bp, Zea Mays
cgctccgtctcctgttctctgtcttctttcttgtggattgtggtgctgtgctccgtcgcccaaggctgcactcgttctgcgtgcgagtgaggagtgggggagactttttctcttgggcttgttcaccttcccatgttacccgcttttttgtgtgttttgctctgttattgtttcttcagaagctctgatctgaagagctggtagatgagtggtagaaccgcagaagaagtagcattcgacatgcgtgtttcatgattctggtttggaggcgcatcgttcttgttacgacaaaaaagaggggaaacagagtctttcatccaaacctttcctcttgtttggtgtgttgtccatgcctgcacttgcactgcacgtagttactgcactgggccgcacggcctgatgcggcgcagttaaagccacgccatcagagtccggagctggggagtggtggatgaatcggtgcgcggttggtggtttcgctcatgtttccctgtccgtcgtcctccttgcttgcctggttctttccgtggggggaaaggaagaaatcaggcgtgctttgtcctgtgatccaaccacgtctctgtctccctttgcttcctatggtatggtaccgtaccgctgctttgttccttt

SEQ ID NO: 3680 - DNA, 1084 bp, Zea Mays
ctcgaggctgagaggaaaactcatttcgagatgccatctagcaccgatgatgttgagatggatgtcgtagttagcttgctgccggggaattgtctgactctacccgtatcgagccgatggccattgcgactggacaagagtttggcgaggatgtggaaatccagaaacccaaaggtgcccaccagaagcgttcacgtcgagtgaaccgctcggttgcacctgtcgaggagaagaagaagaaaaggcgactccaacgattgtcgtgcctggaacaagacgctgacccttctgcattattccttggtaacgacctggtggacgccattcccgaggtcaatgctgaaagttgtgatgatgctcagactgctggcggtgtgtttgacgaggatgaagaggaataagaagaagaaattccgctgatccgcaagaacaaccgtcactacagaggcatcgacggggcagcgatattccctcccaagcttgtcgacactcgtcaaccttcaagggctttcaatatcagactttgatcaagcactggaagaggtcgttcccgaagatattttatcagagcctcctaaggctgacattccaaccatctgttcacaggtcccagatggtggtattatgctgcatgattctgctgggcaagaggtaacccgggtggtatctcgtgcctcgtcgaccttagaaggcggtattccttgcaaaagcgttgatccaggtcttccagctcatatggacgtggctgagggatcttcagccctagaggtggctgctgcggaaggcccagccctcgagggtggcgccggtagcgacccagtccccgagggtgttggagcgggctccctttctgctgcttctatggatgtccacgttggatcgcccctagtccggttcgaagaggctgtggtgacacacgtttctatggctctcgctggtcaagtcgctttagaagccagcgtatcagacgctaggagcctgccgcctactgatggggctgaagttcccccaagtcatgctcttgagattattcctgttgatctcccctcatcgagccatgcaccgactcttcctgctttgggtc

SEQ ID NO: 3681 - DNA, 547 bp, Zea Mays
cacaaactcaactgctgcagtgttgctgtacgcagcaagccggatctgaattccgatcctggcccaaaatgaattgctcgttcatgcatgaagcagcagatcagcgatccgatcacgaatccggactgcctgcacggggacagctccatagtgccacgcacgatccatgtgatctgattgatgcgcgcggtgtgctccgccaatggccatggcgccacagcgaaccgtagcaagtaccacgaacgaagcagcgagcgagcgacgacgtcttctagaatcggacgctgagctagtgagcagcgagctgcctcccgacaaaacgccaactcgcttttcgccatgacgaacaaaaaaaggcgcagggaaattgcatacgatacgacagcgtctccccgttcggttcgtaggcccagcggcccaacccgcgtctgagaatccccccagttccttccttcccacgcgtcgaatggcctccggtcaacgagctacgtgcgacgacgtgagtacgtgacccccgaaacccacaggcccagaacggagcgcggag

SEQ ID NO: 3682 - DNA, 862 bp, Zea Mays
ataaatcgttttggcgaaaaaaatggctgcaaaacgttttataggttacagaaaatgagaaaaacaaaatagcctttcgtgtgttgtcctccgcgaacatccgtccccacccaccaccccgtcggtagtctgcaacaaactgctcctcggatgtagtgaccgcctctatcatcatccatctaccccaataacctgctttgcgctgcgcctccccgtcgtcgctaacaaatgctctgccatcctccgccgggttccactctccttcctcgtcgtcatctatctacgcctcgccccctgccgacatcctcctctgcatccccaacatctttcgaccggttctactctacctctcgccgtcgccatccatccgtgcctcgcccccttcgctcgtcgctactcgatacacgaccgactcacgaacgtggatagacgcaaggacgcaaggtaggcaacgatgacacgagcatcgggaccagctgtgaaactgtggatgtactcgatctcggtaatgtagcaattttttttgtgtgtttaaacaagtcgtgtgtttcaacagtcgtgcgtcgtttgtgtgtagtccctaatgtgtatccggtgtctcacccatctacgcgtgtagtctgcaacaaactgttttgcgaatgccacgatcaccctcgtcgtcatccgcccacacccgaacaacctgcttcgcgcctccccaccgtcgccaacaacttgcttggcgcgccccaccatcctttgcccgagttccactctccttcccctgtcgtcatccatctgcgcctcgccctccaccgccgccaacaacctgctatgtgctcttgccatccttcggaccgggttccactctccctccccc

SEQ ID NO: 3683 - DNA, 309 bp, Zea Mays
gaaggccttagtggaccggacgactggtttcgtgggctggccggctaacttagacccagagacggcgcaagacttgaagtccaaggcatcatggcaatccttttcgataaggacggcacgaagctctgcgtcgcacacaaatcagaacggatttccgagcatgcaagatgggtgatcaggaagaatgccaatctataatcctgaactcgtcgtctatatatggcggattggctacccctacaaaagatagagcacctctcgtagcctgagagagcattctcatctcttagatactttgtaaccttgaac

SEQ ID NO: 3684 - DNA, 426 bp, Zea Mays
gcggattcgggcacgaaaggtgtcgcgggaggtgcgcgcatacggcggcttgtgtgcggtgatagtcctcagcattgggggcactgctggtctggtcactgcacactgatcctgctttgtcgtggcacgcgtaaagctggcaaacgttacaactgcagtctcatcgtgaaccggcggcaattgttaacaagcacagggcagcatttggccgcagggctagtggtgtagagagaataatactagtagtactgtatagggaggttgcctgcgagacgcgcgccacgccaaaaatctactactactgtagaggaggttgagtaccattgcccaccacctacccctctgtcaaaaatattaaccacggattaccaccccactccctcaaccgcgagacggccacgtggccgtctgccactggctggctgg

SEQ ID NO: 3685 - DNA, 734 bp, Zea Mays
tgcaaaatccgagccctaaatcgccctgtccacggagatagtgcgaactacggatgaacagaagtgttcccggcgatctagcgcagtctagcttaattgaatgggtcgaggagcattagtggtatgtaagagtgctgaaacaagagaacagagggcaagatcggacctgaagtgcactggccacggtgagagcttgttcacggtggtggaaaactaatttgggggaactgagcaattcgggggctctggtgagtaattggaggcacgagtgggtgtgttgagtgcacaattacatagtggagtcgagggtgtgctcaatttatagggcccttgagcggtggcccgtgaatttgcgattgtgcggtggcgatcggagagaaggggatgcactggcgcaagcgattagtggctttcaccgtggcgagctcaccggcgatcaccgaacatgcataacactagctactgcgatgtggtaagacgccagggcacgtggtgcaaggttgtggggtggctaactccggcgagcctatccaaagcggccgtgactcaagcgggtacagcggccggagtagaatagtggccggagtccatccacggtgcgatatttcttatctccttgccgttatccaactgcatcgagcacgaatcaccgtggcaggcgtgaatccgggcgcatggtcgctggcggtgagtcctctgagctggcgttctgatctggacactgtaccatcgcg

SEQ ID NO: 3686 - DNA, 906 bp, Zea Mays
gcaccctatagagatccagggtggcactgtccaggtcggtgttgagaccggccactacaccagctagggtgttgaggcgatcctcaccagcttcacctggaacgatgctggtctggcttcctccactcagacgcagagggagatgcctgaacctcatgtcatgcagctgctgccggtaggtgtggctgagagaacacagagtccgtctggcagcatcactgaccgaagcagcataggtggatagcggtgtcagggactcatgagctgacagagtcctgaaccctctatcccctgcatccatcaccctgacattaatgcgagtgatgtaatagcaagcccggggaggctcgctcactcgccttgtctcgtacaagggtcggacgtaggttcttaacgcgtgcagcacttcatgcagcaggttggggaagtgccccgtctcgaacattgatatgtaatgttcgacgacaggcccaaaccccatgaagtagtcctgctaggcgtagttggcctcctcgttgacatgttcctcgtcatcttcgtcgtcgtcgtcatcctcatcatcatcgtccccagagtcgtctggatcgtcacctccaggtgcaggagcttgaacggctggtgcaggcggtgctgaggttggtgacctagctgcgaaggccagtgactctaccaatggggtgggtgttggcagaaattcctccgagatgtcttccaggatgacttcatgctccacccgaatgcgagggagatccaccagaacttcctcaaccaccactgggtagacaaggatttgacgtggcggaggggcatagctagtgttaacccgggtggtttgaagggtacaaaccatctacaagagaaagtgtcaactcagttgaattttaaagaggtaaggctgataaaata

SEQ ID NO: 3687 - DNA, 797 bp, Zea Mays
ctacaatggaagtgtaccgaaccaagaaagtgatgggctcgcgcccggatcgcccgtggactaagtgtaatcttgagggattcatccgtctttcccgcgctcgacgccctcaaacgctggagatagatcgggaaggagccatcgggttttccttaagataagccaagttagttcgctatttgctaggagataagccggaagagtgtgatcagcgtgtgcgtagggagtgccccatggttgtgtatataaggcctaggccctagggagaaccccatcattttcataccatcagcacctctccattcgggaaacaccacttgtaaacataccacacatacaaagtcaccctaggaagtagggtattatgattctccaagaacatgtagaaaatcgcctgactctctccctctctctctctcatgcctctggcacgaaccatcgagctacgatcaacaacaccgtcctacccaaaagcaccacgagggtacccctgggcgtgcggtcggacactagacaccgacacgtggtgagaattcctatgtcccattcgcctcgtgtgtagcatcgtgaagcgcttacttattgccgagttgggataccagggtgccgtcaattgatcaccggagttcagaagccgcatagatccaattcgcgccgtggacagattggtcgtcgcctctaactgcgataataagccccccatgttgttcgccttgccctcctttttgcttagcaccaactggtctcgaggttggaggttgggacctccagttggccgcgcgctgaccatggtgccg

SEQ ID NO: 3688 - DNA, 550 bp, Zea Mays
cgctgggaatttctcaccgtcgtggtgtgttgtcgtagaatctcgcgacgccatggacggagctccctgcgtcgcgattcatggtaacacgaccctccatgcatccgttatcaccacctctccattttgcacggaccagctcgacggttagggttacaaggtaccgccgctgctcaaaccgtgctgtcacggtgggggttgggagttggaagatgggctggtagccgttggatggggaggaaacgaataggattagatctgacaaagtgctggccctcgaccatcgatcatgcggtggatggcatagattagatcgagcccctttaaaatcggaactgtccgatcgaaattcggtggccagggctgtgtgccggttcaggatttaatcaggtgcatcggatcctgatcgagcagttctggttgctccatacccattcgaccgtgcaaatatgctaaagagctcctgctttttatccatatcaacccaccatcctaccttatgtgaaaacccttactgataggtccatttatttacatccgagaccccgag

SEQ ID NO: 3689 - DNA, 715 bp, Zea Mays
ttctggtgtaagattcccgagacacagagaatagtactctctggatggcgggttggtttctgtttctctcgggggttcttatgcaattgtgtctgagcgaaagggtatctgccaatctgagacttcggatcgacagcggacgatggggattagatcgtatcttataacgaaacggtatgcaacgccgaccatcggatgttatttgaacgctctcgattttatgatgcccaaaccaatctgagccatgcgatcacgatccaagggttaggatccaaccggaaggtaccttcaatctaagccgttaatcatgaaatccacgccccagggatcgtcttcaacctcactggtcctctctctctctcttttcttccccagctagtcccccacggccgaacgccatagccgcgccagcgagcagttccgtgctcgccatccgagccctaacttccgccaggacgatcccgctcgaaccctacgtgaccatgaccaacaggcagggaaggaaaactcaccatggtgaaacttcaagccgcgcagaccttgtctggcgcaccgtctactccacccggggcgtcggcgctctgtgaggttatcaatccggaggggcagggcagcggcccaccgacgatgaccctcgccgaacactaaccccggttcttctctctcctaccggcgggtacgactgagtaattcacagcgcgcagctacggctcga

SEQ ID NO: 3690 - DNA, 514 bp, Zea Mays
agcttatggtatatgacatagtcaatatagacttgtgttcggtcttagggatggcaatgggtagggtttgggttgggtagagcaaaaaccctctcgcgatcgcacctgtgaagtctacctaaacacgcccgtgatctcacctacgggtgcaattccaaatcctcacccaaacccatcgggttttgggtggtgatggggttcagatccctgaggcccctagtggccacggatcagtggatggataagcaccatggtccatctaccatgggtcaatcgagaatccaccatgcgtgcaagacaacccccacgtcgagcccaagggtcgggcgaggctaatgagggcagaatgaggtgatcgaattggacataacccactcgaatgggacttgaacgtccatctgacgggccatgccatccgccttgtgtaaacctcattaactatgctagtcggcggacacaacacaaatagtatcagtcatctttccactcatgatctataggtcctaggcctaag

SEQ ID NO: 3691 - DNA, 1650 bp, Zea Mays
atcctgatcctcccatgttgctaatgaagcatccaaacctgaccagagaaccagcacttgtgccacaaaagagcctccaacgctgcaccatacgactctgaagaatttgaactggaatctaaaagacattagcatcatctggcagctgaggaattagtttatgatctctgctcaacacagtcttcaattgagatacatgaaagactagatgcatgttggaactgtcaggtaactgtaatttgtatgcgacatcaccaatgcgttgtagcactgtgtaaggtccaaaaaatttgaacgccaatttctgattggatcgagttgcgagagatgactgaacatacggctagagcttcaaatgcactttatcacccacttgaaatactcgttcagtccgattcttatcgacttgatatttcatccaagcttgagcgtgcaataagtgttgccgagccaacttagtaaccaactctctgtctttcagccaagaattcagatcatcaaaaggaaccaccgtggaatcctgaataccaaagtggcgaggtagatacccatacaaaacttcgaatggagatgtacccaaggaagagtgaatgttggtgttataccaaaattcagcaactgggagccactgaaaccatttgcccgggcatgtgtgaacgaaacaacgcaaatatgtctcaatgcacggattaaccctctctgtctgcccatcggtttgtgggtgatacgcagaactcatactgagtttggtgccagtgagagaaaacagttgctgccaaaactgactggtgaagatcctgtccctatcagatactatggtgaatggcataccatgtaatctgtagccttggtctaagaataatctggccaccttaacagctgtgaagggatgtgccaaagctaagaagtgactgtattgggaaaacttgtccacaatcatcaaaatgcaattcatgttagctgattgaggtagtccttctatgaaatcaagagacactgtgtgccaggcatgagggggagctggcagtggtgataataaacccggagattttagtctgtctggctttgcttgctgacagatactacaggtctgcacaaaacgatgaatagcttgcttcatgcccttccaatagaacagctgtttgattcttctgtaggaaaccggggctcccgaatgtccacccaaagctgaatcgtggagggctgatatgaccttattttgcagctgcacattagtgcccaaccaaatgcgacctttatatcggataactccatcctttaaggtgaagtctgagttagttgtttgtgaagccaccgccagttggctcaatagctattgagctaaatcatcttgttcatagccttgcacaacctcctgtatccagattggtgtgcagtgagacacatgaaacaattgtccctgggtatgaggatatcgtgagagagcatcagcagtgttctctgatcctttcttatagatgattctatattgtaaactagctaacttggaatagaccttctgctgccacatagtatgaagtctttgctcatttaattgagttaaactctgatgatccgtgtagatgtagaattcaaccaactgaagatatgatctccattgtgctactgctagcagaatagccatgtatt

SEQ ID NO: 3692 - DNA, 524 bp, Zea Mays
gtttgaagcctgggagtggagaatctggggttgccggctatggcgccgccgtccctgctcgggcgccaccgtgcgtggccggggcgagagatgggaacgttttagccgttgatctgtggagatgagtctgggattagaattacatacacgttcaactaggttagatctaggctgtcgattgggtgatgtgcgagtgagattagactcagtttatttaaaatcgcgtccgtcgatctctgatcggatggcaggcgtgtcgtaccggttcgcttgtcacgtgacctaatatgggtcgcagattgtcgatccaacggcggtgatgcgatgataccctttggcggtggtagtttcgtaaaagagaccctgaggaattagctaataaacccgaggtccacgcaaagtatagaactattagaaatcagtccttttgtttgcaaatgaaccccatgcctttctagaaataatagccaccatccagggagaatatttttttgtaaaacgaatcggaaaattcgactttatag

SEQ ID NO: 3693 - DNA, 372 bp, Zea Mays
gctccatccaagcgtgtggatcttgattcctctgaaggtccagcttgaatcttatccttcctcgatttgatgaggtcgatcatcttcgatcttcgttcttgaagttgttatccgaattagggacatgtaggtaagataaagtagtaggtggagcagccagtttagtaggtggctatgagttaaatgagattagtcagaatctggtttggatgttttgcttctaaatggtttggataggttatgtaacatattatgcaggtcaagttgctgggtatatccgagttaatctaagatcctaaacttgttttataggagcaaggtctaatgtatctcctcggcattagctaatcatgtttgagtgcctcacattag

SEQ ID NO: 3694 - DNA, 658 bp, Zea Mays
ggcggtggactcgtcttctcccatctcaagctcaagtgtggcgacgctgcattccacggcggggcttcccgccggcaatctacgacttggcgaccccgagccctaattacattgccgattgagcctactcaatgcgggggtgaaagcaaactcagaggggagagttttactcacaacgccaatggatgtggcgcagtccgcgatgatgcgtggcgcggcgtcctcctcctcgatcgacaagaaattcctcgagtcccggcgatgcttaactcgaatcgagggcacgggctgtcaccctagatcccggtgcacgccaccggccacgcgctgaggtcggtacgtcggcacggaaggagtcaccggtgtcgacgcgagcagtcccgtctttcgtggtttcggccatggtgattagcatatgacaaggagaaagaaggtgaaggctcggcactccgctttaacgttgctacaagggcaaattttatctccccaataaccacccgaacgagatcctcgcggagatcccgcccacgtctcgttctgctgagaccggatccgcggaggggacgacccgcctgacagactgaccccacgcgctagtggtaaactcagagtgtgcacttgagtggctgattcgcgggcccagtcggtagtgtctcac

SEQ ID NO: 3695 - DNA, 838 bp, Zea Mays
ttgctttccaccgcgtcgtcgtggctccttacagccgtcaaatcatcgccggtgagctcaccacgactgtggacacgaatccactgcgccacgattcttccttatctccgaccgccgcgcgtcgccgttaaaattcccggccaccgctcgctctccctataaattgagccctccaccagctccgctaggtcatccagcaccaagccacccaatattgccctcagtcgatcgccagtgagtcctaatttccaacttcccccaaatcaattttccgccacccgaaaccgacctcaacgcggccagctcccttcccggtcagtccaaccctccctctccctcgtttaagctttctcacatgcctacgatgcttgctgacccgtccaattggactaggggtccaccgaccgtcgggaacgcgttgttctttggatcatccgcgcggtcaccgtggccagggatattagggtcgccgttcatgcaattgacttaggggaaacattgattggggcgtgaatttggtttaggccaaagcagggtgccggtcttggtgcgattcggacggtctgtgagctcgccggagctctgccgtgcccctcgccgtcgaggatctggcgcggtaaagaaatagaacatggaggtcatttctgcgaaatgtcagcgacggtgttaaatagtgtgtgggctcctttgggttattaaaaaactgcagggccttattcgcaaagttgccgcgggcgcgcgcgcgtggacgtgtttctgctgttgttgggccgacttgggctgatttcggcccaagtctgtttattgtttttctttttctatttctagcaagctttag

SEQ ID NO: 3696 - DNA, 393 bp, Zea Mays
caatgattaaaggtaaaagtgataatgcagctgttggtgtgcgattgaggagcgagtctgtgagtgtacactaggaaaataacactagaacaatgcagtcgacacctgccacctggtaggatcggcgtgacgaaaccattttggtttcgccaaaaccagttcctggattagagcaaaacaaagccgagaaggagcaaatgagcgaggagagaccgccgaaacagcggcatacccatcctcctacttggcagatgctctccacctctagatatggtttacaacttacaacaaaatcggcaaatcgcagaggagagggggaaagaaaaagagcagaagacgacggtgacaaaaagaaaaatgtcagtaactgactaaactggcgctacctccgcc

SEQ ID NO: 3697 - DNA, 904 bp, Zea Mays
aggagggttgtcggtggtaggatttttattaggaggaggaggaacatccatggaagttagtagggatttgaaggagtatatgggtgtcgtggttccggagaccaggggcagtaagatttgtactcggagtgggaggctattgcagactcgctctgaatggtgaatcacggggactcgaacgatgaactagagacacggggtttactggttcagttcggtgccctagtccagtgtagtgtttgatcgtagtaatgcaataataagtgttacaactggtgtgcttgtgtgttgagaataaagagggcctgcccttttatagctcaagggccgaaccttatagtggtgattggttttctaccagagagagagagagagagagagatcaactactcacggtcatcgtgtagtccctccataggatcatgtgtagctataccctcaatatgtgtattgtcttaccccgctcgtcccacggtttcctatagctagtccattgtcgatgtctccataacagtgtgtggtgggtcccatgggttagccccacggtgttctcgtgcgtggcgtggctctgcttctcatcacgagcctacgtcactcgccggtgtgcgtaagcatacacatgttatggcatatctctcgcgtctcttcgtgtatgcgggtcactgttgatactccgatgtcgatgtccccaaaatcggggttgactggtcccacacctcgacgggtgcttgcttaagatagtgtgtgatgatgtgtcgttagcgcttgatggggaccttttgccattgtacccgaggcccagatgtggcttggtgatgacacgtcttgtcctgctgacgtggggtaacatcattggattggcccttcctctgcgccggcacgactgacgcgcgaattagttgcc

SEQ ID NO: 3698 - DNA, 575 bp, Zea Mays
gtcctgtctaatcggagcagggtgcaagagtaggttgtggcgtaggctgatgtggtaccacatgtaggggtgctcagacgacgtcgtcctttcttctctgcctgtttccctttgcctcggtaacacacatgctacagtgggagtcgtaatggtagcagcccaagcggcgcagagaatcaatggtcttgcctcagtaacatgtgagttactgtgcgacccgtgtaccgcggacacactgtctgtactggggcgggcaggtatacgtctcatttgcagttaatgcagatgcgcttcacacttagaggttgacattatgctttcccctatggcttatgtcacgcgttgtagaatacgtggcagcaccaggcttcgccttgtgtggggagtagtgactgggaccgcccttccttgtgacagctccggaccgcccttggctgggggtctggatggtgttcgggggaggtctcgtctcctctggtgttggccagcacatggcagcatcagacccctttaagccagaggtccgggtggcctgccatgagagtctaggccattcccaggggttcggcccccgg

SEQ ID NO: 3699 - DNA, 657 bp, Zea Mays
cgccgtcaaccatccgccgtccgcgcgccatcggggctgccacacgcatggtcaggctccttcaccaacatccgtcgatggtaagcacctctactgaattcgcctaagacaccactacgtgtagggctgttctaggtcagggattgatcactgggggggcatcgttgtggagctggccgctgtggttggagcatggcgccgccgggtgtgcgtcctgatggagaagaagtgcgctgaccgtcggatctctgtgggcggatgggattagcttgggcgtaccgctttaggcgactggatccgtgccgtcggatcggtatcctgtggatcgaaatagatcgtgtttcattaaagttgtagccgtcgatctccgatctagcggccaccagtgtataccggttcagggtgttgtgtgatctaatccgaaccactagatatggatcgaacggcccatatacagcgataccccttcgcgtaaccactatgcagaaaaccccttataagtttagagattcaacccgcagtccattggccactgttccctgagtctaggttatcttgcgcagagacccttgagctttctgagaattgatgcccagtccagaacctgtttaaaatgaataaattaattagtaaatgtatttttaatgcaaaaacaat

SEQ ID NO: 3700 - DNA, 378 bp, Zea Mays
ctcggagtcaccgaagtcctccgacgaaggactcggttcatgcttccatttgtcactggagcgacgcggtgagccctgacctttcttgtccttgcccatggctagatggaagagaagagggggttgagaaaaaagcaacagatgatcagaggatgtgtgaaaacaacaacggggcaagcaggctaattatagaggccggaggcaactgttcatcacctaccacgctcaccgaacaatcgaaagtattcaataagccattcaaatcgcctgaaggcaagtcaggcagcagacgccgctttgcgtaacacgacactatttggactaaggtcaactgcttgggcaatatgattacgccccgtggtcacgtcaagttactac

SEQ ID NO: 3701 - DNA, 429 bp, Zea Mays
gcggtgtggcataccttctgtgttttgatgaagacgacgacggaggcacaaatctctggtggccgcttcatcataattaccttcttcatcaatcactgcatcatcgggaagacgtggacgaggaggtggtggcggtgcttgttgttgcgtctccaacacagcaagtctatcgacgatctgggacaatcgtcgatccagcctctcgtaagtcctgccaaggtccatgttaatgaaggcatcatgcactgacttgtggaccgtctcctccatttgctccttcaggagcttgttgtttgcctcaagatcttggcggctaacacattcatcgaagtctatagggatccttgcttcttcgtcgtcgcctgccatcgaaacacaaaaacagggaacaaacggtgaaggttatccctaataatctcactacacgct

SEQ ID NO: 3702 - DNA, 539 bp, Zea Mays
tcgacctgaatcggatgacccacaacgttttcaatgaagcgatacgtggattcttatcacagccgttgcctgagcgatccacggccatggacccatctcctaccccacacaagccgggtggcgtcgcaaagcatgcccccacggcggcgggcccgccggagtcggccaagccgacacaccagagccttgctccaaaattcgatcgatcctacatggtctgtagagggcgatgaatcgatcgagaaggatcttacttgaagcaatgctacgattaatgtcggccatgatgcagcggcacggtggcgggacaccagcctccgatgagaaattgcatgcaccccgaagactcttcctgcccgcaaccgatatgcccgcgtccgatgcactccgacaacccttcctagccatcacctgcacccatattgcccgcacaggcaaggaccagcagcgatgcgccgaaccccccaatcaccgtgcgaggtgaagatgctccctctctttgtgtgtgataccgctccggttatggtaaaggaacggtg

SEQ ID NO: 3703 - DNA, 415 bp, Zea Mays
cagtgatgcactcacatgcgtgtcgatgaatgaatgatgtatctagcatcactaggtttggttagatccagcttggtaatagttagcaactaacaattaggcagagtgaaccataagataccgatgcataaaggtgtgctacccgtattagacatgtggcttaccttcttcttcttgtggacctttctgacttatgtgcctccttgtgttcaccatcaaggtcgtctgcgatgacccaaatccagcgatggttaggatttaggggttagcgagagaaatgtggatggggcgtgttaggtggaaggggcgagagaaatgcagatggcaatgagatagagcgggatgcggcgagtgaagtcggcgacgatgcagctcatcgacgcgatgagaggtaagggggcggcggttaggtacc

SEQ ID NO: 3704 - DNA, 491 bp, Zea Mays
gtttgcttgcgtaggcccggacaccaaaacctgcgcagcagccgatcttcagtatcatacataaactaagactatcaatctatcccccattacatccttttaacctacaccgaagtgtctgccgccgcgggaccctcagcagcaccgtctagaagcgtcatttgctcttcggctcccgcatcggctgaagcactctccgggacactgagctttcaaggccggcgaggtcctccatgtcttcctcgttcatcacctgcgaagacagcacaacatgtcaaaaaatgaacacacacaacacctcgccaaaccaacaacatacatgcgccagcgctcggtccgccctttcccggacgatgccaaggtcgtggggggcccacatcctatcataaagcacccctgccacgtcatcttcaatctggaatactccatgatcgaagtcctcattctcccggtcgaagacttcaaaatgcatgcatccctctcgaaacaaa

SEQ ID NO: 3705 - DNA, 428 bp, Zea Mays
gtctgggcggcgaggcggacttcacgtcgagccacagacggggatgctcctgtgcgtcatgttgctgtgccccgcgacagtggtatgcatgcagccgctggggaacgcgagagataggagagagaggcaaggaaccacctggagccgccaccggtaaattttctttgtgtattccatcctcgtggtgttgctctggacgtctctggcacatgtgtggtctcgctgcggactcgtgctcgatgtcgggatcatcggagcaagtccttcgtcgcggagccgaggtcggcacggaccgcaacaccaccgccacctattcgaggacttcgtcgtcggctttcttcctccgtcgtagttgacgccttggcatgggcagggctctacgctacactgatgaggtcgcctaccttccccttctgccttccgcgcgc

SEQ ID NO: 3706 - DNA, 271 bp, Zea Mays
gtgggatgtcgcgaagtgggaggcgtcatcggatgggtatggaacgatcccgtcttcgactaggtcggggcagccaacgcgatttactatcctcgacgtctggggcatgtattggggagggggatttgtgaaatctgtttgaaggcaaagagttaaagatgatgttgtttaatttccgggaggtgggtcttattccgaaggctgagccgatgtagcatgtttgttggcctcgctcttgtgttgcgatagtgagtgaaaatgctgccctccc

SEQ ID NO: 3707 - DNA, 1195 bp, Zea Mays
ctcactttcctctataccagcttccctttcagctctcaagggaaaccctgctccaatcccggaggcggtaggcgtggttttatccgaagccatctgccagggggatagagtcactattatgcacatgccaattgttttcaaccaagtcattttattcattacaccaatacattacaagcatatggctacaacaagtcgtactacacgcgagcgttctctgaggtactaccgaactctttttctaaagtgtccccaaattccttgagaaggtcatcaaggctagctagggacatatcctcgatgtcggacaaattctctatcctggcgggagctggtgctgggggagccttcttcctccgctcagcttgtcctccttggttcctggtcttcttttggattttcttcgtgggagcgagcttctttagcttcttatcatagtccatatttaaggttcgataggcttcacgggtgttggcctcctcgccttccgctatgtcgagacactcttggagggatgccttctccttcttaagctccttgacctgctgctctaagctttccacccgggagtttatgtgggtgcagtgggaggtgagatcatcgtagtggttatcaagagtgtggaggtatccggccatgtagacaatggtggggtctctccctgacagggtctgaagtcttttcctccaggtgggggtatttttgttgctgggtgggaagtaacgaatgggtgtttcaaagatctctctgctgtagttttggcatagctgtttaagggcttttcgggcaacactttggcaagtgtctgggaagcggtgcccgatgaaggtgacttggaagggagggtggtttgggtagcttcggctttctcccaggtaaaccgccatagagcacttctctattccattttcgcggtattccttccagacatattcgggcttcttgcggatccccatgcgtagtccacaactccataggaggtgaggaaatccttcctcctctgagcagtaggatgtcctaatgacccaagagccttccatctggtaggagaaaagaagggtctgttaatatcggggaaaggagagaaggtgtttcttggggggtaagaggtgttttcttgttagggcaacttttaaggtcagggctgcggtctacggccagtcctataggctctgatactacctaaagcgtcccg

SEQ ID NO: 3708 - DNA, 536 bp, Zea Mays
gtttaggcaacacacagcgggcagtcttgtgggtttctttgtgacaaatgtcacaccacaaggaccgaaagcaatcacgagcatggtggccatcaaccccacatttttgacaaaaaggacgacgcacaacctcaacctcttttttcagagccgcgagaggggttttgaggatacttgtgtgacctccctcgccagcagacgaagcgccaatgtcttccttgacgtctgattttcccataatcggcttcaatctccagctgggattccggatcttgttccacgattgggaaccttgaggagtctctttctgattccaccggtcccagttagggtttcgccccttcggatccatctttgacaccgacaccgcgcgagacagcgccgaccactcctcgtccacaagcgggggacgaatcggggattcaaaccacccaccgcggaagctagcacgaaacgacgacggcagcgaccaaagtcgcgagagcgaggaagcaagatgcggaaaagagtgcgagccaacaaagtccgacggaaac

SEQ ID NO: 3709 - DNA, 1237 bp, Zea Mays
gttctttcgacccaacaggttagctatatagtgtttacatgggccacatgggcctagccttaacaggcctaacactctaacagttctttcgactcatcaaggtggagagtgccactgtggtcggtgccgctggagatagcttgatgcttgcgtgtgataggagcagagcctcctccgcctccgcctgtgtgacgttggcctagccgcgtcgtggttgtcgactatccttggcccagtggccaagcttaccacagttgtgacagccatcgtctcgtgctggcttcttgttgtcgacgctgccgccttgggtgcccccacgggcactacccttagcatgtcctcgcgcctcggcctgggcgcctccgcacgccttgtgcggcttgccgcatttgcggccacatgtcgaggaagaggacttccccttcttgtcaccctggcaggcctcccactgctcccgagtgagatgtagcttcccatagatggtgataggtcagagagggcctgtggttcgttgtcgtcgacgaccttgaggcgacctatcgcttcttcgatcgtcatcgtggagaggtttagcagagactcgatcgagcgagccatctgtttatacttctctgggatgcaacataagagcttctcaacagctctctcctcaccgtaggtgtcgtcgccgaactgcaccatcttttgcaacagaacgttgaggcgaagagcaaagtcatcaacatcctcacctggcttgaaggccaggttctcccaccccttgcgaagcagtgtggtcttgcgggcacgatcgctgccgatgcgggtcgcagcgatgacatcctaggcctccttgacaatccgcttctgggaaagcaaaaactacatctcgagcggggctgcaacaatgagggcatccagcgcctgtcgatcctcgtagtagtcaacgttgttgtaccgaattgcttcccacatgtggcgaacctagagccgtaccctcatcaccgcggcccactcgacgtagttggtcttggtgagggtaggtcacccaccgcctggaccgatgtccctgacaacggcctggaccccgcggtgaccatggtaccaatccggggagggagagccgcgtcgcctgtagatgccgagatctccatcgacctggccgtcgccgccaagagcaccaccggcatgcccaagcccgtctgggttgccaccgcgtaagtcctcgccaggagcgctgtcgctgcgtctgtgccta

SEQ ID NO: 3710 - DNA, 868 bp, Zea Mays
attgaatgtggtcattcagtcggccagataccagcagaacctgaggcgctatcacgacaaagcagtgtggcatcgatccttcgcagtgggagatttggtcctccgccgagtgctgatgggagaagaacggcacaaattgtcaccaccatggaaagggccattcatcgttgtagaggctgcctcgccaggacctaccggctcactcaaatggatggcactgaagtgggtaattcgtggaacattgagcacctcaggaaattctatccatagcgatgcctcaaagcccttggggacgagttgtactttgtaaatagaaggtttcatcatcaataaagcttccatgttctaaggcatacaagttcttgatcaacaactaacctaggtcgggctcaacttgaaattggcacggcgctcttacatgacttagggtgatcactataccctactaatggagcaatcggtttaagtcgaaaacgccttaagtcggtgtgacatgctcacgcgtacatgactttgggtgatcactataccctactaacgaagcaatcggcttaagtcggaaacgtcttaggttggtgcgacatgctcacgcttacacgacttagggtgatcactataacctactaatggagcaatcggcttaagtcggaaacgccttaagtcggtgtgacatgctcacgcgtacatgacttagggtgatcactataccctactgacggagcaatcggcttaagtcgaaaatgtcttaagtcggtgcgacatgctcacgcgtacacgacttaggatgatcactataccctactaacggagaaatcggcttaagtcggaaacgccttagtcgttgtgacatgctcacgcttagggtgat

SEQ ID NO: 3711 - DNA, 446 bp, Zea Mays
aggcaaggttcgggcggaggttgcggaattgcttgctgagtgcgcagcacgccactatctggatgttggttttcccgcccctattgggattcagcacccttaccgctcaccgcctcgtggtcgcttcgactatggtaccccttactgcaggacccagatagatttggatccatagatcgatggagtcggagtctgtaataatgattaattcagtatcttagtcttagtcagtcttagttagagttagtttgcttatcatatgtttggtgcttgtcgtgatgaacatgtaatgaagttggctctttgtaatgattgtcatcaaggtgtgggtatcccctgcaacttggtgtagttattaataaagtcaattatttagttgggtaatccctttatttccacttttccctttatctgagagtctgtcagtgaagatgatcatgctatga

SEQ ID NO: 3712 - DNA, 964 bp, Zea Mays
cgtcaacaacccggacgccgtgcgcggagctcgccctggtttcgcgcgtgcttggcggaacaatccctgctcggtaacaactcccaatcggagtatgcgcgttgggaatcgggattcgatcaatcctagctcacccaggcctataaatcttgggccctcgcccctcccctagcctgtgccggcttgggcaactcacgaagaatctgggcgtggacgcaattggaaagtggtgaccgcgagccgtgggatttcctcgtcggggttcgtcgtccgccatcaagggagacgctgctccgctcatcttcgccatatgctttcccacccctggcattccgggtgagaactacccctctgatttctcctttacccccgcatcgcgttggaccagtcggccatggatttgggactcgggattactggttcatagcgcaccggcgggagctccgccgtggagctcatccccgccgccttgcttcgacctgggtgtgggcgcgcatgtgcgaaccattggattcgcacgggatggccgagattagatgagagagaacgattggatgtgttagatggtggccgcccatctggatctgacggtgggtattatagcacgaggttgggaatcttcagccgtgggattgagatccgatgactgtgattcggcactggttcgagaagacctagttctaatctggggcgcacgtgttagatcgaatggccacggccagcccataccgcttcggcgtatgaattttgcgtatgagtccttgaactttagaggaatgaaacccgcagtcctccgcagggtaaatctgagtctagggaatacttgcgcgccaacccctgtcttttacagaatttaatgctcagtccagagaacagaaaatccaaggaattcatttagaaaatacattttttgtgtgaaaataattataggaacttaagtaattcctagaaaatacattttgac

SEQ ID NO: 3713 - DNA, 625 bp, Zea Mays
aattaatgttgttactgcgtagtaaatatttatacaaagctgacgcaactcgaacggatcgaatcagagttaaaatgtgatagttatgaattttacaagtttctagatatataaatattatttttatacctaaaaacaatttgggatttattttaatagattttggaccgagaaaacaaaatcctgagagtttaggggctaactcgtgaaaaacagggcctaagtgtagttatctttatacatgtggggatggtgcattagtttagataaagatcaaggccttttgcaactttcgcatgaccgaaggggtatcactacacctcggtcctccagattagatctagcagtcggcatttaatgcacgaagggtatgcaatgccgcccgccgatctagagatctacggccagcaattcaaccacgatatcagttaactcctgccatcggatcgtagatcggtggttatcgttgaaacggtatgaatctcttttaatccgggccacacaatcaaatccaaaggttcaatagatgcccaagctcagctctaatccccaccctccatcaccaatcggacaacccaagcttcgtcttcaacctcatgccaaagcacgatgccgcagggccttc

SEQ ID NO: 3714 - DNA, 605 bp, Zea Mays
cttggcaatataaataaatatatgatgccacacaacacaagcaaataaaatatagagctaaacaaaattgtttacgaaggttgcacataatgtgattttaggggcttgaacaacccaccacaatccacgcgagtacaagctctagcgtatctggcgtcaacgtgtgtgcgaccatcagggttacgacaacacaacaagccttcgtaataagtacaacaggcaaaattattgctcggtaattggggtacacgataaatccacgcaacgtgcgcaacaggcgtaatcgtggctcgatgatcacggcagacagacagtgcctacagggcatgcgaaaaatacgcgactccgcgatggcggttcgactcaacgggagttgtccgattaaacgagactgctatatagcaatcacatgacgcagccaagttcgtacgacatgaatactgcgtcgtgttgccagggcgcagccaatgccaaagctcagccgattattaatttagtccgatcggcatgtctaggtacccaccatacaatttaatcgctcgatgtgagttcaaaaagctcaacgcaacacagaaatttagagcgatttaaatattctgagtata

SEQ ID NO: 3715 - DNA, 386 bp, Zea Mays
gtcttcaatgccaaaggttcggctgaagtttgccaccgccttggacaaggcattgagctcggtggtcttctcgtcgacggcttgggagagtgtccgagatgtattgatgaaaatatcgaggtcccgcttaagctctaaaatcgattaaacaaaacatcgagacacagccaaagtgatccgagcgggtaagaaacacatacctcctattggatcctcaggacctgggcctcgaactactcagtcttaaatcatcgtcaagggatccgactcggtgacgaagctcctcccgctcgtcggacactctctggaggttctcctccgccgagtggaccttctccaccaaggatgccacctaccaccatgcgacatcatctctaagttctgag

SEQ ID NO: 3716 - DNA, 711 bp, Zea Mays
ttctcatccacaaaagtgcattggacatctatctttggcagaccatagtcatttatgttcccgccgctattagcaaaggcatctgagagtttgcgtatcaggagggacatgagttgttcctatggtatgttgtagttaggatttcccaatgtatctctaagttgtcgaccaatgtcatctgtaaaagatagccagtatgtatcaaataatgcacgcacgttaccaacagggcaaaacataactacggtcacaaaacgttgtctaagctggtacgatgatgcagatatgatcgcctcgtcaaacaacagcttccactcattatcgctctcaagcaacccacgcgcctcgcacgcatcacgaaatgtgtcatacacttgaccgttgtacgtcctgatatcaacatagcttgtcgaacccttaactatcatcaacaacatgtgtaagtagtatagttcgccaacagtaggatgtacatagtacatgcggccaatttttgtgcagcgagacctcgatttccaacatcgagctgaggcatcccatgtccatttctttgggaagtcgcaatatgttaagcatctagcttgttcatgcctcaaattagtctcaaaccattcagttagcattgtgtttttggccgcagagctagcaagcaacgcatgtaggtccgcgccaggttcgtagcgcacgtggtttaacctaggaagatgtaca

SEQ ID NO: 3717 - DNA, 557 bp, Zea Mays
tcacgggccagtcaggcgtagagacatgcgtggcagtcggtgtggccttgggcgggccagtagtaattgcatcaatgggcgcgcaggagcagcgagccaatcgccagtcaaactttggccccacctacaggcttgcatcctcccctgaggtaggcccgggggccactgtcgatactctgaatcaggggtaccccttactacgctatgaagacgcggtgcccatacggtgttccctagccatgcggtgaacagcgcatgtccccaccacgtgggccgctcaaggggcaccgtgtggcgaggaaagatgatacatcccaggatgtaccaagttgaaccggacctccacgaggggcaccggacccctgttcgcacagcccggacccccgattacggcctgggacacccaagtaagcatgcctggtcccttggatggggtccagatcccttcgagtaaggtccgggccacaacgaggtcccgggacaggggaaaccccgacgtaagcaaggttccggtactgccacacgtccaggccttaccctacgcgcatgcgctcccc

SEQ ID NO: 3718 - DNA, 609 bp, Zea Mays
cagccaacctcgaaatgaagcggctaagggcgctaatgatcccgtaagcttctggacatccttgacttgggtcgggggcctcatcgcctttatcgccctgatcttctctaggtttgcttcactgccttggtacgaaaccaggaatcccaacaacttcccggcggaaatgccaaaaacacatttgtccgggttcagtttcgtgcgggttgcccgcagcttgtcgaagaccagggtcaagtcttccactagggtcgaccctctcttagtcttgaccatgatgtcatcgacgtagacttctactttgtccctaatcaggtccccgaaagtcttactcatcgcccgcacaaatgtaggcaaggcgtttttcaaaacgtacaacataacaacatagtagtaaagcccatccactattacaaaagcagtatgcttcctatcttccctagacatctcgatttgatggaaaccagagtaagcgtctaagaatgataacagatcgcacccagaggtagaatccatgatttggtctatacgtggcagtggatacgggtccttgggacaggccttatttaggctggtgtagtcgatgcacatccgaagcttcccattcga

SEQ ID NO: 3719 - DNA, 474 bp, Zea Mays
ttcttgtcgatctagtggtggtgtggttgctatgagagagctaatgagctatgaggtggtgatgagctaagatgtgatgtgagccgagctgagagatcagagatgaaataggtgttcgtaggcgtacccccttggccttatatagatgaccagagggttatccctttacaagccatgatcactctcttattgaatcctccttttaacgtggcacaccttccagcttatccggaattcagtttcccttcatctgagtcatctccgggtatctagcacttctggtacgctcaacctccttgcctgaggtagcagcacatgactcggtcgtccggccttcagcttcccgggttgagcgctcaacctccctgcccaaggcatcaacgcatgactcggtcatctggcttggttgtcgccagagggcatgccttgctaggcaagtcatcgggaggcccatcaagagacccatggagcgtc

SEQ ID NO: 3720 - DNA, 402 bp, Zea Mays
gcgatgggtgcagtgccgggaatgagatctatatagaactctactcccctttctggtggcatcccgggcaactcttccggaaatacatcctcaaactctttgattacaaacatgctctctgctgttagattaaacatcattggatcgtttgcgggcggttgggcttgacaggaaactgcctttccttggtgatctgtgaggagaacagtcttgcttgcgcagctgatgatacccttgtgcttagctagctagtccattcctaggattacatcaattccttgggatggcaagatggttaagtctgccaggaacactaccccacttaaaaggattcggacttgggagcacctgagtttgcacaggaggtctgaccccggggttcgggtgaccaaagggatagct

SEQ ID NO: 3721 - DNA, 730 bp, Zea Mays
cagaatcaaactacacatttcaacctcttatttttagtaattgatgacaatctttcaaagatataaatacgattaaaattctaaattagcgtttcatacaagagtaagctattttttttgaatttatgctcctcatgcatcattaagcagttgagaaaagaatgaacaagttttacaaacccgacttggtattgttaactctcctacatatgcactagtgcatttggttctaaaattaagaaaataaaccataaatccaactaatatctctaaataaatcaaactttcataaacgcaaaaaaaatcacaaaaaagattaagatgaaattgcccgaagtagtatgatgtctatcaaacaaatatggaccgaagtgccgagcttggttaatatgaaaaatctaaaaaactatactttccccttcccatactattcactattcagcgcctcggcccacgtattttcgtgagaccgctcgatccataaattcaaaaccagcccactaacccagtcccccacggtcccaccacacacacccctcatccccttcttcagttattcccaatccgaatttcgaagggaccaaaacctcccccttcctttccaaccaaggtcaccgcgcgcctcccatggccacggcgcccctcgccttccgcctccccttccccttctcattcccctccgcctcccgccctcctccttccagaatcctagcccctccgaccccgcgcc

SEQ ID NO: 3722 - DNA, 618 bp, Zea Mays
ccttatgaagaggtcgttaaataaaattctgttttagttcgatttttttggaagagttagagctttgcaaatagaccgttaatttaccatagttgtttgtaaggttgagttgtgtttttatagagaccggtgtatatgcattgttttcttcaagaattttaagagtacaatgttcattggaaagtggaatacgcatggaaatatggaatgcgagggaagccacaccaacggacaagcagcgtcgtcggcgggtggaaagaaagatgcgtccggcctaccactcggcgatccgttgccttcgtttttgctttagcccgcaagagaatcgatgacgccacggctgagattcgctgcgaaccacgccaacgccacgcggtgttggtcaatacgcagaaacctcactaccagggcctacacacacagcacctagaccgtgcactgagcgagaaatggtccattgcttccgcgcgtcatctacgggtgcgctagtacagaagattcggactttcggaggcaactgccatccaacaattcccccagcaacgctacgcccactgacgtgtgaacccagccatagcctgggaccacgcgtcatacatgccatacgagccgtctcgt

SEQ ID NO: 3723 - DNA, 2373 bp, Zea Mays
tgagttacacaggtcaagatgaatcatgctttgcacctgggaatcgaccgggtgaagactgacaaggtcagccgcttgagggcgggcgcacgcgcctggaataaggtaagtgagtccggcgagatgcgccagcggagatgcctcgaatgggcctccatggagtagcacaaccaggacgcctgctagacctccatgaagaggaactaccagcgatgcaagaagcagaagattcggcttccatgcgcggaaaaaggaaggagagctggagggcagtaattgaggttgtttcaggtggttgttgtcagtgacggagaggaatggcgattggacacaatggcggccacccataggtcgtaggtgtggaagaagctatgggggcaaagcttcacagcaatggcggccactcatgctaggggcctacatgcaaatatgtcagcgccaagggcttggcctacatatcaaccaaagcactgagctactaatcatcaatgaaactaaaatgcaaaggaactaagaaagcggcaagaaacaaatgatgagctgcagtatggtagggctgcaactgcagaacctaaatactagcaaaggatcagtagggggaaaatatgctagcaagacattggcttaccagcaggcaggcgctcaagagttcatgtcccctgcgttcaggctaccatgcacctgctttgagaacaataagtttgaacaaatgcagctgaaaaattaaaacatgaacacattagatgcctggcttacctttacgttccaggttcgaagcacgaaacccatcctttccttaatgtctagcagccaggcgaatgcatccaaatttgccttgtctttaagtacttcattagctatagcatactaatcagaatcgcctttaatatcattctgtctaagatatttcattgcactcgagtgggtcatgcgatgtgatgactcatgcgtaccaacatctgagctcctccgccgagtctcgcgggtgaagggctgaatagaccctgtgttactgctgctgtgttttgtaggagacatggttctacatgtcattaccactggtgtcttgagctcatcatagaaacaaaagatttcatccaactcagtttcaaattccacaataagtgcgtacttttctgaggacaactcgtttttcttctgcaatggaaagccaaacttagtggttcaaacagaggaatacagcgaaatgttcaaacagagaaatacaatgaagtggttaagtgagtacatacttgttcaccatagacagttccctcatgtgcaagtgatgcgtgcatagtcatagtgtactttccccacaagcttcgtaactttttaaaccttttttccaagtccttttcttccaaatcctgacccgtcactgaggacatttgttgtttaagatcaccataaaaaaccaacggcgatgcttctagacaacagccacgctccttgagtttataacactctttcacgaaataccgatctagatctaaaggccactccatgaccaatgaatccgcgcagtctacacgggagaaaaaaatgtatccaaatgttgcggggaaatgagttacacaggtcaagatgaatcatgctttgcacctgggaatcgaccgggtgaagaatgacaaggtcgaccgatagagggcgtgcgcacgcgcctggaataaggcgagtgagtccggcgagatgcgccagcggagatgcctcggatgggcctccatggagcagcacaaccaggacgcctgccggacctccacgaagaggaactaccagcgatgcaagaagcagaagattcggcttccatgcgaggataaaggaagaagagctagatggcagtaattgaggttgttttaggcggcttttgtcagcgacagagaggaatgacgattggacgcaacggtagccacccataggtcgtaggtgtggaagaagctatgggcgcaaagcttcacagcaatggcgaccacgcgcgctaggggcctaaatgcaaatatgtcggcgccaggggcttggcctgcatatgaaccaaagcactgagctactaatcatcaatgaaactaaaatgcaaaggaactaagaaagtgacaagaaacaaatgatgagctacagtatgggagggctgcaactgcagaacctaaatactagcaaaggatcagtaggggaaaaatatgctagcaagacattggcttaccagcaggcaagcgctcaagagttcatgtcccctgcgttcaggctaccatgcacctgctttgagaatagtaagtttgaacaaatacagctgaaaaattaaaacatgaacacattagatgtctggcttacctttacgttctaggttcgaagcacgaaacccatcctttccttaatgtc

SEQ ID NO: 3724 - DNA, 489 bp, Zea Mays
tgcttttccacaaaactagtggctataaaagaatgggatgctcctgaatcaaaaagcacagtagcgagggtaaattcaacaaggaactcaccgagcactactcccggagcttgctgagcctcctgggcatcgacgtggtttactcgtgcccttccttgatactaggtcttgttctgctggctgatggaggagggtgccttgggggcgggtgctgaggtattcttggggccattcaccaagttggagtaagcaggtcctgatgccttcaactgggggcagttgttcttgaagtgactggggtctccgcagtgccaacaggcatttgctggcggttggttttttgcaactgagggagcctgaaaggagctctgactttgctgactgaaatgtgatggagtgggtccagctggtctattgaagcttggtcccttgggtggaaacctaaaggatcgagttctctggtgccggtcttgctactgagcttggagg

SEQ ID NO: 3725 - DNA, 648 bp, Zea Mays
cgagggccttggacttgatggcggttgtggcgacgtagctgatgtctaacccattgagctcgagggaccacttttcaatgcgtctagacgcatcccgattttggacgatctcactaaagggcaccgtggacaccaccgacacggggtgccggtcgaagtagtacattaacttccacttagcaatgaggatcacatagagcagcttctgaatctaagggtgtcatgtcttggacttcgtcaacaccttgttgacaaagtaaacaggtctctataccttgagtacatgtccctcactttcctttcaccactagtgtagcgttgaccgcctaggtggtggccgcaacataaaggaggagggtttcaccaggatcgagtgcgactaaaaccggcggcgaggtgaggaacacctttatccgatcgagggcctcctgggctttggtcgtccaagaaaaatggtcgcttttactcaagagcttgtaaaggggcatccctttttccctgagtctggacacaaaccaggtgagcgtgatgacacacccaaccagtcgttgtacccccttgaggttctaaatggggcccatgcgtctcatggcctctatttttctggcttcaatccatctatctaacaccatgcagcctaggagtttt

SEQ ID NO: 3726 - DNA, 673 bp, Zea Mays
ccctttcaaaaattgagttgtgccagcagtagtagctttactcttctttttctcgaacgtggacaccaattttggtatagcgaatttagatttcttttatggtcgtggatcccttgatggctgtggagaaggtggatcccttgctggtggagtagacaacgggtctctaagaggatgaggaggagaaggtggtggagtcctaaatgttgatgtttgtggcagagacggtgggttagaaagaggatgaggagcagcatgtgaagattcaggaggtgatgatggatgtacaataggtactaaagtttgaggaggcggagatggttggggatgcgacggagatggcattggtggatcaaccaattcgacatcccttcgtggccaaaggatgaaatttttgatggcttgtccaagtgtctcgatacctttgggcctagggatgtctagcatatcatcctcggatcattggacggtcgtcgtcacttctaccctgcaataatcatctggaatgtcgcttccatgaaactagcgtcctgtgatcacaacgccttgtcctactttcttcgtatgatgattgttaataccatatcttataactagtgtgcacgccacaggccttgtgatgtcatcaactagataacggaccttatttcccattgacgtgatagagcttggg

SEQ ID NO: 3727 - DNA, 382 bp, Zea Mays
cgaaatcacgagtggaaggtacacgaatcagaccaaataacacacaacaactgccatttttgggttggtttaggacctatcctcttcctaatagggtttgtagttgtgaattggttagtaacactgcacactgcacatgtttgtcatgcatgatgagtatctacgtttttccattagctttggaaatgggtgacgatcgaagaagggctatgtacgatggattcaacagtaacactctggggcactttgatgcatgggttaaggttgctgacgaattcgtggtgcgcacatttgctggggagcctcgtgtcgtaacctaatccgattggacaagtttgacctctcccttcatatttgcaaagatgactttggcgtgagcatg

SEQ ID NO: 3728 - DNA, 595 bp, Zea Mays
cctttctgaagattgcagtgtgctcctaaaaatattgtcttgtctgtcctaaagcaattataataagtcactagagagcgtatttgtgttttttttctgttggccaaaaagcacaggaataaatcctctgtactgctactgctctacccctatgttttcctatttctctgctcatggccataaatacaacatccaatgtcttcatggtttgttagaatctgcctactcagatatgtatgttttcttgtaagttccatcactcgctgcttgactgacttctatgttctattactcgctgcttaactggcttctttgttccagcatttcttttttaccttttgtagtgggaaacaccatcattagtactttatggttgtagaacacaggttgaactacaatagaagccattcgtgcacaattgagtttaggcaaagttcattcaggggttgtcttagggtgattagactatgggtatgatgactagggcagggcacttgtttcatgtcacctaactatctcttaaaaacaacaacaaagccttttaggcttttaatcccaagcaagttggggtaggctaactatctccctaaaggca

SEQ ID NO: 3729 - DNA, 896 bp, Zea Mays
cgaggtttaacttgcaaaagtctaccagactcagacttaacctgtggtggacagcgggttaattgctaataaacccagggactcttttacaaaacagactcggcgaaggggtatcctcaagtcttggtcgccgattaactttctacggttcagattagatttgtcacaaggctgaaacgacacgagccaatagccactggatccaagatccatgaccgagatccgactacaccaaattctcatctgaacccaccgatccaatctaacggccacgatttaatgcaccgaaacggtttacttgccgctaatcctagccgttcgggtgcacatcgacggacagcaaccgatcaccgcccgatccaccgatcagacggcggcgccgcccgcagcagtggtggcgcaacgccggcgagacccatggccacgccccgagggcccgaatctctcgtcctactgcggctacccaaccctggggtcgatgcgaacatgctagaagcgaaattaccgtggattacgccgcgacgttcactggtcacgggcggcggcggaggatgaagtccggtgagcaattcgaagtcgcgctagtggtcgaacccgcacgaggatctcacgtgtggactcccagtactacgacggagctccccgacacgatttatgggcttcagcggtgacagaattgaatatgggccgcggtggcgcacaggcagatcacacggcggcagaggtggctatgggtgtgctggtccagggttacgaaagtcaaggtggccgcgcagagcttcactttataccagaccaaccatcctccccacatcccccgtgagctgagcatcatggaaatccgttggtcaaccacccgcgccgagacccccgagagtaagatacacagggcctac

SEQ ID NO: 3730 - DNA, 771 bp, Zea Mays
ttcatagctttagggtcctgggtataaccggtcacaacatcagacaaccattggggtgtgctcattgatatcgccgcaagagtaagatgatggggacgtctggacagagcgtctgccgcaccattgtctacgcctttcttgtatacaatctggtattgtagccccaaaagtttagtaaaaactttttgttgccacggggtcttcagacgttgttcagtgaggtgggacaagctccgttggtctgagtaaattacaaaaggtcgatgctgaagataggggcgccaatgatcgacggccaacagtatcgctaggtactccttttcataagcggataatcccatgttcttaatgctgagaggtttgcttatataggccaatgggtggtgatcctgaatgagcacagctccaatgccaccaccagaggcatccgtctcaatggcgaaaggcttggagaagttgggtattgccaagacaggagccgtggataacgctgtcttcagcagagcaaatgctatttgttgctcatctgtccaaacaaacactgcacctttcttaagcaactgagtgagtggcctggcgataaccccaaaattcttaacaaattttcgataatagcccgccaatccgaggaacccacgcagatctttgatgttgtggggcgggggccaggaagagatagctgcaatttttgcggggtcagtagcgacccccgccttgctgatgacgtgacccaggtaagcgatctcttgctgagcaaaggaacatttagtt

SEQ ID NO: 3731 - DNA, 410 bp, Zea Mays
gcgacggcggcggtacctccccacggcggagcgccatagccgcgattcggcccgatccacgcagtaatcaagcttcaagtaggaactgctacatgatataaagacaaggtagagactagttgtggggtcctcaccgagattcgccagcacaggaggactgccaacgacacgaggtggtccatagcggtgcccagtaaatctggcgaggaattctacttcaaccagccatcctcctgacttggcacgaccctgagcgcctccctggtgacctggtgaggttctgagccaacacctgagagcccgtcgctggcgtgaatccggatgggagcaaatctggcggccaccatggttggtgtgataggagaaccgagcagaggataactcgagctcgaaggacaggggcgtcgagc

SEQ ID NO: 3732 - DNA, 488 bp, Zea Mays
ccggggtggtagtggatttcgaggtcgtaatccttgatcaattcgagccaccttctttgacggaggttgaggtccggttgcgtgaagatgtactttagactcttgtgatcagtgaagatgtggcatttgttcccaatcagataatgcctccatatttttagggcgtgcactatggctaccaactccagatcgtgggtgggatagttttgttcgtgcggcttgagtaggcgggatgcataagcaatgactttctcattttgcattaagacacaccctaagccttgcttggaagcatcacagaagatgacaaaatcttggtgtatgtctgggagagttaagactggtgcggttgtaagtttctctttgatgatttggaaactttcttcacatttgggagtccacacaaacttattgtcctttttgagaagttcagtcaagggctttgctatgctggagaatcccttgataaagcggcgataataccctgc

SEQ ID NO: 3733 - DNA, 580 bp, Zea Mays
gctgcaatcaattgcaagtttagtgagcagtagaaactaatttgctagatcatgaagctcaacaagaaattgtgcaactttatatgtttgctaatggaactctttatttcacaataggagttcatgaaattatttatctattgagaggtgttgttagagtgcgcacccgattcggtccaattgtctatacacatgagctagcgccttaggtccaccagagcccacaacataccaaggccttgttcctaactcaacccaaaagattagtcggataggtgagggctgcccttgcctatatgttgtgctacccccgccatcattttttggtgtgggactaaacctaagaatctcccttgtcacatgttgggcccaactctttacatcacacaaccctatgtggtttccccgagtccaacgctatgtcacactcaatccgtctggcctatgagacgttgacaggctccatcatcaccatgtgacccctgagattttctagttttttttaccatgagctttgataccacttgttagagtgcgcaatagattcaatccaatttgctatacccatgagcttgcaccc

SEQ ID NO: 3734 - DNA, 574 bp, Zea Mays
ataaagtaagggtttgaagcgaatttggaaatgtcgaatcatccagctgtagcgcttcatcttcattgcatgctcttatcattaatcgtgacagctgacacatctttgacaaagagccacacaattgtgcacagaagttactccttacatcataaattgtaaggctcctcagttgggataagtttccaagttttgcaactaatacttcacttgcagtaatggcaaacagagtttgcagttcaaccaaactccacaagcccttaaatggctccacagcttcccaatatttgaaactgctgtaaattacatctcgcaaccgtgaaaccataagatgtcgcaatttcttcaggtttgaaaacccttgtgggaacttcactaactctgcctgctcaaggctcgatgtttgtaggttttgaagctttgttatagatttagggagctctttcactttggtgtcatcgaggcacaaaagcctaaggttgaatagctccccaattgaatttggaatagtctcaataggcaagcctgataagtctaatactgcaaggtactttggtttggaggaaatagaaga

SEQ ID NO: 3735 - DNA, 492 bp, Zea Mays
ggatatccatatgggtatggaggagggtatggataagtgaaagatgaatgaggaccatcggtggtaggagtgggagcatcgattgtggtaggatttttattgggggaggagaggataagagtatgcaaacagaggatgtggatttagggaacgaggatgagtagaaacatccttccgatgaggatgtatgggagaaatgacgtcgaagaagatctgcaccacaccgatagggttgacgagacgttgtggagattggtctttgatcatgtgagattcggattgaatgattggacttcactttatatccatattataatagagagtgagaggctataatatgaaggaacatgagtgaattgatggataagaaatgtgaagggatccaaacatcctcccctctatttatagggcggattgtgactttttaactttaaaaagttaaaacagtgtggaccaatcagaaggcgacacgtggctgctagtaccaaccag

SEQ ID NO: 3736 - DNA, 786 bp, Zea Mays
gggatttagtggatgtttgcacaagatccttgtaacaatgttgtagttggtacattggacaacaactttgatacaagcagggtgagtgagttgccacacaaaaattgaagaacaaggccctgcaagttgcttggacagagggactgatgaagatagccatggtacagtgaccggaaagatctccggtgccgtgagcctgatgtcggtcatcttccgccgtaattcacgctcgcttgggaaattcgtgctgcgggagtgatagataacgtcgggtcaaggtgaaaatatccggggaggggtgaaccttgtcactggccggaccggccatcgtgtcccgtcgcggtcagtcgcgttggcatcaccggagctcaccatttgtccgacggtgacacgcaacgatctttactccgcatcataagggtcttggcaagcgaccgattatcatccctggactaattccctcccgcacgccatggtgagtcagccaccataaaatatcctggctgcggtaaccttgatctcaatccaaaattcgtgataagcttggctagagtctataaattggaagcaccccctatttctcctaatcgttacgaactcagtgaacaactccttgcccccaatcgtccaccgtagcagcctaatttggaattccccccaaatctattctccgtgccgccgtgagcacccccttcgtcgacccactgtcatgtccctccacctgtcttccaagctgccattattgagtcctggtatgttactaaagcttactgcgtccccaatttg

SEQ ID NO: 3737 - DNA, 4566 bp, Zea Mays
attgatagctgcaagcagatcgtccttaatgatatgccagcatgacttatagaatctccgaggggaaaaccatccggacccggagctctatctgaaggtaggcagaaaactgcaaaccggacctcttcctctgagatggggaggtccaatacacctagatcgcccatgtccctgtggcaagatcccaagtttagtgtgaattctctatgtttagccacccccaacaggttggtatagaaatcattcaaagcttcatgcttctgctcatgagaggtgaccacctgatcaccgactgtcaaactagagatgaagtttattttcttgcggtagcaagcctgcaagtgaaaaaaagaagtgtttgcacccccctccttcagatatctaacacgggatctgagatgagccactgtcctatctaaagaagcgagggccaaacaatgttgcttaagcctcctcatgagccataattcctcaggagacagcagcctgctatcctgagccatctcgagtctgtgaaggatttcccttgctaaagccaattgggacttcacattgcctgcattcttgtgcccccaggactgcaacctaaccaatcttcgaagcttcaaggatacacgctttagagggcaggaggtctgaactggctgcatccaagaatcagccaccacatctaagaaatcagcaatctttagtccagaaactttcaaagtgaaatctgcgctttcccttaaaatcttctttgagactgagagttaaagggcagagatctgaaagcctcgtggcactgctgcggagaatacagtccgggtagagttgttcccagcaagctgtgcaaaacaagtgatcaagcttaacaagagttggggatgacctttcgttggaccaagtgtactttctacccatgagaggtatatctttcagccccatatcatttataaatctcctgaacctgccatcaaagatctgtttatgttggtattgtttttgttctcagagcagaagatctgattaaaatccccagcaacaacccaagggcctgcacacaattccctaacatctctcaattcttgaagaaaaaactgcttaagattgtcctgatgcgggccgtaaactccagtaaaccaccattgcaatccagattcctcctgaagctgaatggagactgagaaatcacgcacaataccgctggcggaggaaaaggctccatcccgccaggccaccaggatgccccccttgtcccatgagcaggacagaagacaaaattaccataaccaacacccaaaatagataggacatcaaaagcagagatggaactcagcttagtttcttgcaaacagactagcagaggcttggaactaaggacctcagacttcacacaatctcttctagatctatcattcagacctctaacattccaaattagaaaaattgactgatacatgactaacaatatagaagaaaacgaccaaacagcgtcaggctgagacctggatctctaccggcacttcccagccgaacaaagcagccatagcctccacatgtgatctggagaggccgttctcgaataatttgacatatctagcagcattttccaaggagatttcctcatggtcaccacaataccccaaatgcctgcacaccttggcaactgaaacgtttccgaggtcaagaggaagcttagccacccttctactcctcctgggcatgaaatcctttggcagtgtcttcttttttctcaaattgcacctaggtggcgagagcagcccgttaatcggtttgatgataatttgtttgaaggcctccaggggcaaagactcaaccggctcctccagaatagatggatctgacccaaccttcgatcttcgagaatagacattgagacaacagcgatcaggacgccatctctgatcaaacaagtcctaaataggaggaacaagaacagggctgctgctggccgaagcaatagcaaacaagggtacaacatccatcggtccatggggctcaaccggagcaacctcctcaacagggacaacaacgtcctggaagagcattgcttctggagacacggtgaccgtctgtagcataccatcaaggacaaggcctgagctgatgagggcaacacctgtgctgtccatgacaataacaaggctgctgctggttgaattaatagtatacaagggtgcatctccctccagttcaaggggctcaacaggaccaacctcctcaataggaacaacaacgtcctgggggaacactgcttctgggccacggtgaccgcctcaatcacaccaccaggaacaatgcatgaattgctgggagcaatgtttgtggtgccagaaaccgatccatacatctccacaggaacaagctcctcgacagggacataattgccctggggaagctctgctcccagaaccgccatagcaggagaggtcacccaaacatcgccaggaagatcttctgcagaaacatcagcatctttggggcatcggacccaaacgatgcaggacagaccgcctaccccggtgagtattgtccacatcaggggttccacgaccgtcaaagtctgggggtggtgaacgagaacggtatcgtcgccgctgcctggcggaatcatcgtcaaccacagggtcccgaggaggggggagcaatgcactctgatgggcaaccactttaatatggatctggtataccagggccagtctccccttgccagagggaaggccgtgtggctcaacaatccaaaggttccatgaagaaggaatggttgaagggtcgtagcaccacccagaacaccgaaaaacatcaaggcttcttgattccagagtatcagcatgcacctcctgaacccaagcaaaagggttaagaatctggttgaccgtagaaagctcccatgcatgcagcggaatgccactaagctcaaaatcaaccggagtgataaggttggatcctaaagaaccaagtagcttggaccatctcttacacagcaaagaaaaggagcctgatctgataatgtgcctcctatccgttagaaaaatagcctggtgctcatagggtagcataagcaagaactcagatggggaggactgccttagaattaacgaaacagccccaacttcaagcttcagagcgatctcctccaaaatgtcagcagtggtcacaggaagatcgctaataaccgaaatagagaccgcattccccaggtcatctaccgccttggaaaaatgattgttccatccaataatacatgatccatgcttaacaccagaatactgatccaaaagggtctcgtcacctcccggttgatcaatgtgatcggggccaggatcagaaccaccccggatcgaggaccgacgcttgcgatgacgcctacgacgatgacggggagggagggtccctagcaagcctggatcgtccatatgagacggctccaccggagacgaagaaataaccaacgtaggagtcctcccactagaggcctccagcgcgtggccagagccattgcccccattctgtggggagaccctgcgccaaaccatcctccggacttcaactccacctggaggagacgtcggtgggcgaagacggtcccagacagagccaccagatgcccgggtgtgggccttgggcgctaccggaagccggacagggtctactgagaccaccggagagagtctgccccagacaggtcccttggacagccgccgatgaactggaaccttactggcagacctcccaacaggaacatggcagttgtacgaactatggcccagacccatgcagcggagacatcttgtcctcaaacgacaagacgcagcaaagtgatcttcagcgaagcagttgaagcaccggcccaacaagttccgaggaacagaggtgacggagagcgggagctgcaaacgacgcctcctagccttccgggattccactcgaatcaagccgtcctgaggaggctccggcgctctaaccagaccacgagaccgtaggcgtccagccaaaggagggggcaacgcagtggtctcaagtggtgggagcgcaaccgaagcagcaagcctcgacgaagaactgggtgaagccgacgaacagaggattatatcgcgaaacgtaggccgatcagcctcccccgcaggagttggagcgacaccgcgagacccagaaaagtcgcctaaccacctctgtaacttggacctcccttgggtggcgcacggagcagacccgccagagacaggggaaatgaggggagacgccttggatggggaggccgcattgacgacggcgtggggaaggtgaggggtggccgccggacccgggtggatgccagcgtgggctggtggggagtcaaagcgtcaggaaggcaatgcaaggcgtcggcgagagacaaggagacgtccatcccgccaacccctgaagtcaatgcaactcaaacgtcatgttataggaaatagaatggaacatttaagttagacttggaactacaggacttcatttttatatttctaggtagggttaggactcagagtatggaagcagaagcagtgatatgtagctattggcaatcacactcag

SEQ ID NO: 3738 - DNA, 410 bp, Zea Mays
gaggtcggtgagagaggtagtggaagaagaggaggaaaaggggaaatccgactcgtagaagacgacgtgacgggagatgaggactctgtgggaaaagaggtcaagacactggtaccccttaaggtctgggaagtagccgaggaagacacagcgagtggagcggggcactaatttatgaggggcggtggaagcgagattagggtagaaagcgcacccaaagacacgaagatgatcataggaggggtggatgccaaaaagagcgaagtaaggagtggggtgggcaaccgccttggttggctaacggttgagaaggtaggtggcagtggtgagggcctcagcccagtagtgaggaggaagggaagcctgaaagagcagggagcgcgtgacatcgttcactgtgcgaatcatgc

SEQ ID NO: 3739 - DNA, 482 bp, Zea Mays
cagtcagatgcgaaaatcttggagcccaacgcattatgcctccgatgtcaataccaagcacataaaaatcacacggacctttccagctccagccgaaagataggattattcatgatctaaagacactaatgtgcatccgacaactctaccctaaggaatggaggcaagagcaacaattcagataaccaggaccccagttcttcaggcaccatgccctagaaacccatataggctcagatgaactgcagaagcagacgaatgagcgaattacctgacagggctgataggacttggagggacggcccgaccagagcggcgggtgcacccgggtcaacgaccgccgccgccgcggcagcagcagcggcccctccgccggtggtgctcccaaacgggcggccgcgcttcgccggcgtgcccccaccggtcccgccggacttgcccgtctgtttctgcatagctagggttttggagctcggagcctg

SEQ ID NO: 3740 - DNA, 1131 bp, Zea Mays
gactgctgaagctgttgttactgactttgttttcaagaatattcagcctttgaaagacagggcctacccagcttatctgtatcgagggctagccgactcaactcgggttactaacagaagaattccctctgcagacttggtgagtcgactggagatgatccttaggggtaaagtgtcaaatgttggtgctcctgtggcatactcggcctggaacctgcctcctcccaaagccttcaccctttttgtgtcgaaatccacctattactgatggcagtttgggccttagagtgcgaccctctgctgaagaagttagtgctttggttgcctcgcttggggagattcctgatgacgaacggcaggtccattttgaggtgcccctgaaccctagtgatgcagagataagcgctatgcttgatttgctggctgaggattcttccgacgctgctcctgctggggcgttggtagtggcgcccctcccggatgatgatacaactttggatactcagaagcccgtcagtactcgcccgaggcgcccttgccgagccaatcagcctgatccttctgctgatgagcagaagaagaaaagaagacgcctccggcgagtatccagttttgatcaggacgctggtacctcggttcctgctactgaagaagtgcctgcgactggatttgctgacgctgaccccaatgggtgtacccaatctgctgctgatcccaatgggggtgctgcttgtgttgccaatgtggatgatgaggaagaagaaaatgaaattcctttgactcggaaaaacagtcgacagttcatcgccagtggtgaaagtagtggggttccttctcctgctttgtctgccctcattggtctgcaagagctgtccctggccaactttgatcagactcttgaggatatggtcccagaggacttgttatcggagccagtggatgatggtgcaatggaggtttgcgctgatgtgcctgatgctgggttgaggtcatcccgtgcctcgtcgaccttagagcgcgatctcgagggtcgggagactgacttggatcatcttggtcctatggaagtggctgagggcccgtcaaccttagaaatggttactgcagagaacttgggcctcaagaatgatg

SEQ ID NO: 3741 - DNA, 1077 bp, Zea Mays
cgaaggcagccatggggaaaccgcgaactacaccagcgagaacctcgcgagtagaacaaatgggtgtggtcccacacaaggccaagctcgggatccccccgataattgaagctcaatcggccatggcctccccgacgcggcgaactccgttgtccacctcgcccactaaggtgtggacacagatcactcgacggagagagatgagtgctccagacaaggcccagggagcgccaccgacaatcattccgactactctgccctaaagggagaacgagaaaggatgcaccgccgctcccccctctttcttcccatatgtcctcttcattcaaggaagagtggagacagtgcccatctatgatgacgagcccaccgtgctagggggaggagccctccagcgtgaggcacaacgacgacaaaataggcgtcgtaacgtacgatgtcaccacaaagctagagagcatgatccagcccaacccgtctctcgagacaaagcttctgagatgggggaaaccccaacgaaaggacacactgagagtgccacaattcccaccatcatgatcaccgccactctaaggagcacgagtaggaataggctgagcaggatgcccggatccgacgcgaaaacctgctcctcgctcggaacctataccctgacttcgctaaggcactaaatacaccgagcgaggttggaggggtcttggcgcagatcgccaatggcctaccatgcacgccagacgtgtagggctatcgacaagtgctcacccatacagcaaatcacctcctacctctcgcccacccaccaaacgacctgtgtcacaccatcaacatccaatgagaagcgcgaagcaacatcaatgcttcacgtgatcgccaacacaaggacgagataaggcaacaagaggagtatgatcgggaccacggtgcaccagcgcgcagccgtgcgaccagaaccgagtcagtagcagcttccaccagcagcccgaccctgggatgatagagccgacatgatgcttgctcacctccccaggaccgacgacacgatcactaacgagaggacaggggggtatgcggagtctc

SEQ ID NO: 3742 - DNA, 669 bp, Zea Mays
ggagactgtaattgggggaaacgagtgattctcggtcccaggtgaataatccggggcaaagtttggtgcaactgatgcgtgattatcctacggagccgcggggacactcaatttatagtgagggtaagcggtggcgtctatttttgcgcagagagaccggcggccgagacgaagggtgagtcatcggcgcggtctatcgtggcgtgccccgtggtgattcctccggcgaggaactaaccttcacaggatgtccttggcgacgtggtaagacgcccgaatacgtggcaatcgaccggcagtcagccaacaccggcgatcttatctatacaggccgcaattcatgggggcacgacggctagccaccggagttatccaaaggtgaagatcttttgccttggggtattatccggttactggggagtgtgaatcataacggcgatgaggattcacggcgaggattcaccggtggtgaggttcactgaacctgacccgactagggcactgtaccatggcgatgatcttcagttgcctgaaccgaccatccacacccgtcttgatctccgaattcttgttaggaacagagcaatctcccttactaagatttgttcaccatgtattagtctacaaactaactataggattcttggactaaaaccgagtggattcaaa

SEQ ID NO: 3743 - DNA, 282 bp, Zea Mays
ccggcggacctgccggacgtggagaggcagctcaacaacctgaccaacgacatcgcagtcaccatctccgacaagttcagcttctgcgttgccgacctgtaagctgctcgatcgccgtcgtcgcccgtcagtacagaataacccgtgtagctgatcctgattcgtggcggcgtgctcagggaggaggactggaacgaggccttcaactacacgtccgacctcagcttcgtggatcggtgcctcacggagacccaaggtaagctcatgcatggcctgatcccg

SEQ ID NO: 3744 - DNA, 881 bp, Zea Mays
actgacttgtgaaggtaacaggtataagtgctgcaacagtgaagtatcacagggtcgtaagaatgtttgttttgtttatggcatgctgttatgtggggacattaataccagaggagaaccaagaagcagcagaacgggttagagattagttagatcagttcaagtttattagaatggatagaatcagtttgaatacagtttattagattggatagaataagtctgttaggatatgcagtcgagttattagataagtgttagcacttagatctcctatttggagaatattcggttggccttaggcctatatattcaagattattgttagcaagaaaaggcaagcactgaaatcaatctattatcctctaccctagcttacctagtctccctcctgctagtcaccattgatcatttgatcgatggcgtccttccggcgatcaccactatctgcgcagtgaggggcctgcgcctccgccctacctcttccacctcaacaaccgtaacacatgcaatctttagaagctacgtgggatatgatattgaacatacttgtctgcatctcactctggcagcatggaattgtatctttttgcaataagaagcccaaaggagctgcaattcattgtttaggagtgattatacttaatgaaatcatgaagatatgtatacctataattttagctccgaggtgactagagactagagcatcatatggatttttttgaagtgataatcatgtttcataattcgttggcctatcaatgtacatagaaggcgagaatgtggaacattgaaatttggagcttgaccagttcggttaatgtaacaatatgttgtacaagtctgtgcagtaaaagtaggataattagtacttcattttt

SEQ ID NO: 3745 - DNA, 436 bp, Zea Mays
ttttccatcgcacgagggtaagactagggaaaatacacgcgatccattagctgcaatttggcatgaccaatcccaaccactttatgggatgtcgatggacacatatctaggacaaccatagcctcctacacagatccggggtaaatccaccgatctgcgcacaaccggaccgtttgcgcctaagtgcggacagtccggaccagcggtggtcggccccgttttccaaaccgagttaccgaaatccgcgccggggctaccgcattttacgcaaaccctaacagactcttttggatcgtccgtgcatatggttggacaatctgaatacatcaccggacgatcatgctatacggtcgaacagtccgtgcacacagtcaaacgatccgcgtatcagaccagatagtctaacgcagagtatacagaacgtaatattaattac

SEQ ID NO: 3746 - DNA, 316 bp, Zea Mays
tagcattccacttagcggtagagttaattcctctaacgttgtggctcagcacagaccactccaggaagttaacagaattgggattactcattgagtacaccagaagtttttggagcataacaatacccagaccagtgggtaaagcccgagtcagtccacaagcaaaatattaacagaacattaaaacaggcacgcacaggtgccagccaagagtccaaaagacctgcatgaaccaaaagtaaaaccgagcacacccaaaagttaatggggcccacaccgaagcccagatcccccgccatccgcctagtggttgtct

SEQ ID NO: 3747 - DNA, 1228 bp, Zea Mays
tgcagcgcaaggagtccgtcgagtgggtcaacatggtgctcggcaagctctggaaggtctaccgcaccggcatcgagaactggatcgtcggcctgctccagcccgtcatcgacaacctccacaagcccgattacgtcaacagggtcgaaatcaggcagttctacctcggcgaggagcccctctccgtcaggaacgtcgagcgccgcacctcaaggcgggccaacgacctgcagtcagttccccttccccaccacttagtatcatagtaatgttgtttatcactactagtgtctctactagtatcttctctttctctccaatggattagctattggttccacccaggtaccagattggcatccgctatgccggtggagcacgcatggcattggcactctacttgaagttcaccaaagtaccggtcgtcgtgccggtctgggttcgagattttgatatcgatggggagttgtgggttaaactaaggctcataccaacagaaccgtgggtgggagccgtatcttgggcttttgtgtcccttcccaaggttaagtttgagctttcgctgttccggctattcaatcttatgggtatacacctcctcctccaaactgttagcatttctagttgcaactaaaatttcatcatccctgctgttggaaactgagcatagttggtgccttctagcttgaatgtacttatgaatttggactattgattctcttatgcgagatgcatgactttggtagactgttatatataaacgtgtccttgtaaaacaccatattactttgttctgcacgtaggtctggagctatttctgggatactatcgggtgtttcaggtttataagcagtttttgtaaaacaccatatacttgtgagcaattggtcatgaaactatcacataggttccattattgttacatgtcattatggtcacatagtttttaactattaaatgaaattacaacataaaaggtgcttcttatattaagatcaaaatagtatcaatatcctccatttctctagtatttggatggttggcgaactccttgcaaagtcagaaacctgttaccctttaccaaaaataaatctcttcccaaattcaaaagccactctcaatcataatcagcccgttgataagccacaaataaaattttttaattcaaattgactctttttggtcaacattcagtttcgtgtgtagtagctagtaggtgttgttatta

SEQ ID NO: 3748 - DNA, 692 bp, Zea Mays
cggcgacgcgacggaggtgtcagggcacgtggcgccaagccgtgcgacgactgtcaccggcgagcttatctgcagtggccgtggcaagtacggtacggtggccggagttgtttaatggccggagtctatccacagcgaggactcttattcgatcccagacgctatccacacgattcaagcacgaatcacggcgggatgagcgcgaatctgggcgcggctcgtcggcggcgagctgagttgttgatctgatctatttcagttgcagtactgtaccatgggacttcctcattcagttggactgaccgagcaagtttggcgctaattttcttccgattttcaatggcaaccagtggatcgaccagtaacaaagttgttgtctgatgatctaacaacaatcttgctatagcaaccatagccaaattcttattagatcaaggttgatttccagttcaaagttgactcagtaccactgttagtctgaatttcatactccagacagcctgaaagttcaactttgagtgcacttttctccaaattcttcacaacaaccatgcttactctcttaagcaaagttattcacctaagatagatctacatagttgatgtggtgacctagggcaaattctccataatttggaagatatagagctccaaagttgagctaatatcactgaaaatcagacttaatcatt

SEQ ID NO: 3749 - DNA, 609 bp, Zea Mays
acctcggccccgtccactgacaagcaccacaagtgaattctgcagtagctcctccctctccaagcttcaaccaccaccgccaaccgcgcgccgtgacctgcgtgggatcccgagcccattttcctcgcgccttcgtcgacgccctcaacgcaatgccggtcctgagcatcgatcctttgggcttgggcgcggaacaaggagccgccgtcccggaagcagcgcactcaggctgttcgatgaaataccaccgttgaatcggatcctcccttgggcgacaagggaggctgtcctgactcctgaggttcgtacgtacggggggcgggcgtgttgaaatcggacaggccgagggacactccaagcctcctgctatgccgcaggtcgacactgcgcgctgcaatggattggattctcttgcatagttgcatggttcgtactcggaccttggatcgtcgaaatgcattgtcatgttagcttgtgatcctacacatttatacactctcttcagcaggtggcaactttttatcccaaacgacaaccgggacatcgtatactgctctctttccaaaccacaaattgttgctctcattccgaatccgaaccacaaattgt

SEQ ID NO: 3750 - DNA, 463 bp, Zea Mays
atacatggccatttcaacgctgggggctggacatcgttggacctctgcctatggctcaagggaacctcaaattcaccttcgtcgccgtcgaatatttcacaaagtggattgaggccagagcagtatccacaataacatcgaagaccgctcaaaaattcttctggcaaaacattatctgccgcttcagagtcccgtctgaactcacagtcgacaacggcaaacagttcaacaaccaagacttcagggatttctgcttttccatcggcaccaagcctgtcttcacctcggtgtaccacccacaatccaatggcgtcgttgagcgtgtcaatggcaagatttttactgccatgaagaaaagacttctcgacgataaaaagggcaaatgggccgaccaactacctgaagtggtatgggccctaaacacgacagaatgtcgggcaaccgggttcacacctttctgcct

SEQ ID NO: 3751 - DNA, 341 bp, Zea Mays
tggaggcacatccccttcagccgggttggcgttcccttgattccgagaccgttggcttcagaacggaagacaccaccgatgcggaagctatgaagaccctaacgactttctgtggctaccatcccctggagatggtgatgcaccccttgggactcttccccgctgagaagagggatgaccccatgtggtgcaaccgtgtgagccatgtgaaggacgtatgggctatgtatcctgacttggttgggaggatcactgtttagtgcatgagcgaactgtattacctattggccctgcagagcgatgctatggcacatcttgctaacctcgctcagaccaccaag

SEQ ID NO: 3752 - DNA, 368 bp, Zea Mays
cgataaaacaacgtcatgatcctcagagaagggggtatgagaatgatcagaaatgagagatttaggcgagatcaacatccgatacttgagaacaggttatagcagataaccagataacagggcagaatcattggatgatctagagatttggatgataaggccacaacacgattcataaaggtaaaggttaccagatttggacaaaggagaggtaggcaaataggaccagctaggatgatcaacagaaatgctatgaagttttaggggcaaggatttatggaaagaaacatggcttggtcatggtttgcgcaactagacaccaacaacaaatatatatttttgacacaggtgcacaaggagacttgggt

SEQ ID NO: 3753 - DNA, 489 bp, Zea Mays
gtcacatctgaggagggggcgccgagttgccgagtccttcatagtaagaccagaagagtcaaactcgacagaacaagaattatcagcagtaaaacgacgaatagaaagaagattgtggaccaacgaaggagcaacaagaacatcgggaatgcaaaaaaagccgggagggccggcggcacccacagatgtgacaggaagacacgtgccattcgccaccatgatagacgaaggaagagaggaagaaggagggcgaacagaggtgagtataccagggtcaggagtgatgtggtaggtagcaccagtgtccgtgatccacttgggacccattggcggagtcagagtgggagtctggaaggcagccagggcggccgcgtcccaaccaatcagcccggacgggggtgcggccggcggcgtggtccacgacgaagtggtaggcgacgatgtccagggcgacggagaatgcgacggagaggcgaatgcaacccccgg

SEQ ID NO: 3754 - DNA, 403 bp, Zea Mays
cgaatccgtccgatcacgatctaagggttcctatcagttctatccgaagcaaaacgcggcaacagatccggcccatcaagaagagatccaacggtaccagagccttcttcctcccccggctggccagacaggggccgcgcgaatctacccgcggcggcaacttcgccggcacaagacgagccagtgccatggtgtccaaccgaataattgaactagcgcaatatcaagaggaggcgatgacgaacacaatggatggatccttaccggtcgacacgcagtatagctggctgcctacgtcacgcatcgaccgcacggcggagagacaaccccagcaagaaattcgtcctccccggtcgctcagccgcccgagaatgtcttctgcaatgcgccccgggtgtcgcgg

SEQ ID NO: 3755 - DNA, 668 bp, Zea Mays
gtgaggaggtccggaagctgctgcgcgctggcttcatcgaagaggtccatcacccagtatggctggccaatctagtcatcgttcccaaggctaacgggaagcttcggatgtgcatcgactacaccaacctcaataaggcatgtcccaaagacccacatccacttccacgaatagatcaaatcgtggattctacctctgggtgcgacctcctgtccttcctagatgcttactctggtttccatcagatccagatgtctaggcaagataggaagcataccgcttttgtaacagtggatgggctttactgttatgttgtaatgccttatgatctgaaaaatgccttgccaacatttgtacgggcgatgagtaagatttttggtgacctgattagggacatggtagaggtatacgttgatgacatcatggtcaagactaagagagggtcgaccctagtggaagacttaaccctggtctttgacaagctgcgggcaacacgcacgaagctgaacctagaaaagtgtgtctttggtgtctccgcagggaagttgctgggattcctggtttcgcaccagggcattgaagcaaacccagagaagatcaaagcaattgagacaatgaggcctccggcccgcatcaaggacgtccagaagcttacagggtcactggcc

SEQ ID NO: 3756 - DNA, 389 bp, Zea Mays
aacctagagaggtgtgatatgtagtattgtaccaaaattcagccaatggtaaccacaacttccacttagtaggagaatcatgagtagcacatctgagatacatctcaagacattgattaacacgttcagtttgaccatcactctgtgggtggtaggcagtagacaataagagcttggtctgcatcagagtaaacaactgcttccagaaagtgctagtgaacactttatcgtgatccgagacaatcgatttaggcaatccatgtaacttgcagatgttgtcaaacacaacttgagccacttgaccagctgtaaatgggtgcttgagagggaaaaatgagcatatttggatagcctatccaccaccactagaataacagaatagccagccg

SEQ ID NO: 3757 - DNA, 523 bp, Zea Mays
gcaaaaccctggcaaagctgcggcgtgcgtgggcacatgcgtcggtggcactggccaccacgattgtttggttggcatgggcgcatgtatcaagattcgatcgatcccctcttcctccagctccgtttcacactactagctgcttgaagatagcaggatacctagggtcctgcgcactgtattgcacaacgggggtccccctgcactgatgatggcacagtaccgcgttctcccattcattgcatggacgaccatcccatccatgcatttacttgcctgaggacccccccagtgcatgcaagcctataaccagtgtcatcatgcatgacggcaaattggcaaggttgtcttgtgtcgatcgatcgtctgccgaccagggaactgctaataagcattgttcacatatttgtcccgtgtggtgctgcttaaggggttctattagatggacgattattagattatgaaatgtaggatgatgataataattctaatacactagagtttgtcggtgttcagaacaagc

SEQ ID NO: 3758 - DNA, 1069 bp, Zea Mays
atgtgaatgataggttgatggcaatatcattttgaacccaaaaaaaagtttgagacagtcatttaatgcattaggtttcacacttcaagaaaacaccaagaaaaagttacacgcttaaccatttagtcctcatttctaaacatttacggccaaatttcaaatagcaaactaagctagttagctagaagtttcatcagaaagcaggactggcccagctgtgaaaactatttactgttctgaaaaatgtgaccttgaatgggatggtcagacaaaagacacaccaaccatttgtcatgaatgcttggaagaaattaacaacgtgatcagaaaaatagtatttttggtatttaaatgccccacacagcccaattgaaacttttaacgtgtaatggtgaagggtaacactgtaacaggaatatccccggtaacatcaacctaagcacagtgacagatcttcagcagccattctgtagtaacaaatttgatttgagctattcaagttgcctacagagtatatttttgcatcccatgctgcaacttttagcagtcacccattaatcaaggcaagctgtaatgtgggctgaatttacattagtatttttgaacttcacaaaggagctcagcgtatatactgtcaatcggcactaacattatccaaagttcgctcaggaagggaaaaaggacataatctgaagttacatgcctcaaagtttgaagaaactgttggagtagaagctggactagttctgagggcatctgaatcagcagaaccaaacaaagatttggtaggatctctgcaaatttaggacatttcagttaccattgcccacatacaggcaggcaagtgcaaacacgtattcacaacaactcaagcgcaatatatgatggaaggcaacatagcatgtatcacaaatcgaactgatacacgattacaagttgaacaaggaagccacacctttcatttataaggtgaaggataggataaaatggaccagcaagtagagccaagaaccgcacgctgctttctggggtgtccacgacactattaaggtcagcctgaactaaacag

SEQ ID NO: 3759 - DNA, 920 bp, Zea Mays
tattcctttgcagggtgaggtccccgaccatggacggcggagcagtggctccggcgagcctgtactggtcggaaaacacaacgaccggtgctcaggtatggccgacacctaattcaacccctaacgactattacccctgaaacaattgcaaagttctagctcctaatctctctgtccacggtgagagcgcgaactacggatgaaccgaggcgttcccggtgatcctacgcattctagctcaattggtcgggtcgagaagcatcaagggcgcacaagggtactgaaacgagggaacagagggcgtgaacgggccttgagacggcggtccacgacgtgatagctcatggcggcgcgaagaagcgaattgggagaagagagaaattgggaggctctggtggataatccgaggcaaggactgatgcgttggatgcgtaattacctagcggagttcactggggcagcaatttataggttccatcggcggtggcggctaattttgagaagacgtgcggcgggcggagagaagggtagtcactagcgtaagtgatttgtggctttcatcgtggcttgaccaccggcgatgaccagacatgctaaggcaagtcactgcgacgtggtagagcacctaggcacgtggcacccgagcggtaggcggccaactccggcgaggttatctggaccggccgtgaggcaagtgggtacggcggccagggcggaacagtgtcctaagctcatccccagcgcccgatttttcaccagggatcgttatccgcgttcaaccgggcgtgaatcgcgacgccggcacgaatccgggtgcgagatcaccggcggcgaaggggcagaacttgtgatcttatttagtcactgtaccatggcaagcaccatcagagcatctgacagagtgatttcaggagccagtg

SEQ ID NO: 3760 - DNA, 592 bp, Zea Mays
acgccacctacaccccgacaccgaaggcccatgcgcgccaggaagccgaccccggtagccacacccaaccggccgaagaccgaccgagcgcccgacgcgacaaccgcctgaccaagtcccgagctgaccgcgcgccgtccgctctccctcgacgttattggaattcatggcttccgtttccccttcctctcccattgaagctgcataaacgacatcgatgaaattcattgccctggctgttactctcttccccggccgtctctctcccctccatttctctataaaaaacctagtcgcaccatagagttctccctcccctaaccgagccctctccctcttcctgcccgagctcgctctctcttctcgcgccttcctcgctctcgcagtgtagctcaccggagttcgaactcaccgttcacatccccggccagagctccactcgaacgcttgcccacgcagcacccgctgtcgaacccctgcccacgccgtgcccagctcgtcgtcggacagtctgcgtccatccactgttcactggagacgtgcctgaacactgaccaacgatcgcgcggttctctgcccgtcgaaccccgct

SEQ ID NO: 3761 - DNA, 610 bp, Zea Mays
agtcatggcacttgcccaaccatatcaaaggtgattcgccaccaaatttgggaaaggaaaacttcatgaatggaggaggtgcgccaacaatctattgatgttcagctccttcaacccgatgaccaccgcgaacatcatgtcgatgatgaggaggaacatgatgatccgctggaggaacaactcgatcaagagaacctcgaggacctccgatcctagacaaacctctcggtgtagaggtgtaaccatgcttgaatgagccgaggaagatgcagcagcatccaccacaaactgctccatgcttgttgccatctactccaacgtgagtgaggccacccatttgctagtatcaacaatgtgacatgccatctcatcccgatccttcgccgcatgttctgctaccgatttggctagcgctattgtcccaccaattgatgttgagtctgcttaacggactcgatcctctacacgattgtgtccaaagtgctcaacacttgatcccatttcacgacctcggatttcttcacacccgccatagcttccagcacgaacatagtctcaaccgatggatgcggatgtggagtcgtgatgacttgcatcaaccacgtccgac

SEQ ID NO: 3762 - DNA, 488 bp, Zea Mays
cgacgagtaaagccatgccgctatagaatcgtactatcgtagtcgtcgccgccgccgccatcgcgccgctccggtctctggcggccaccgcatcatcttctcttgcgttgttctgtctgttacactgactttcttctgctcagcgaccgacgagttttgtcgtatcgcttcctcccccgcctctatgggtccttttggcggtgtcgagctggaattgggggtggatgtggaagcggaacagagagaggtgcaggctttggcctgcttcgctgatgcgacgccgcgggcgagtcagtgctggtgctgtggtgccgggtttgtcgatcacgtctgcaaattttgtggggaaacaccaattttgcagttgtttggtcatcggttaagcagactttcccttttttttaatcttagtaaagttgcagagtagaatggttgtccattactaatctagcatgttgtataccagcacatcaaagctcctttctgaa

SEQ ID NO: 3763 - DNA, 411 bp, Zea Mays
aatatccttggagtgcgatagaaattaaatgacagctttgctagggttggggtatattcctctgagcaaaaaatcatccgcgacgaccctgatggagttgtctagtggatcagcggggaagccgaagcttttgatgaaattttaagtgactgaggagatttctgcgcctttgctggtgcatggggggccatgtcgatcttagagaaagctggatgcaaacattccaaggctgtagttcagccagaatttgttttttcaacggatgacattaaaaaccctttagccgaagcttctgcactaggcgggaaattttactccgaggtgtggatgaagggcagccgtgagacagatgatgaagctattagaaagaatgaaaaagaatctcacgacgctcaagaagaagccaaacga

SEQ ID NO: 3764 - DNA, 392 bp, Zea Mays
ttgtgatcggtgaagatgtggcatttgttcccaattaggtagtgcctccatattttcagggcatgcactatggctgccaattccaaatcgtgggtgggataattctgctcatgcggcttgagtaagcatgatgcataagcaataactttctcattttgcatcaggacacaccctaagccttgccttgaagcatcacagaagacaacgaaatcctggtgtatatccggtagtgtcaaaacgggcgcggtcgtgagcttttcctttatgatctggaaactttcctcacacttcggggtccacacaaacttattgtctttcttgaggagtttggtcataggtcttgctatgctggagaatcccttgataaagcggcggtaatatcctgccattcc

SEQ ID NO: 3765 - DNA, 354 bp, Zea Mays
ctgccggtggtgatccggctccgatgggcaatgcaatctacgacccagcccctgagggtgtccgagtgggctccccttctcatacctccatggatgtccacgtcaggtcttctcctccacattctgattgcatggcagcaacacgtgcttcaaatcaggaagtcgccttagagaccgacacacccaacgctagagttttgattcctgctggtgatgttgagttgatccccaatgatgctcttcagattgcctcggctgatattccctcatcgagtcaccaactggtttctcatgatttggggcttccttcattcttctccaatcttcaggtaacttggtttttcctgatctggc

SEQ ID NO: 3766 - DNA, 767 bp, Zea Mays
gcaccaacgaactccaatctcttaaagcttacatagacgaacaacgagagcagttgcaacgtaacgtaggggatatacaaaacgatcataaaaggctagtgcgtgcgcttgataagtctactattgcaaatcttccttcgcacgaggttgaattgagggaatacacacgtaattcatcggctacagggtgtcacgaccagtcacaacccctttatgggatgccgatagacatgtaccttgggcaacaacagcctcccacgtacatcggcgataaatttgccgatctgcgcatgtccggaccgtccgcacgtgagcgcgggtcgttcaggccagcggcggccgatcccatttttagaagcgaattaccgagacctgcacccaagccgccacatgtcgtgcaaaccctagataacccattcggaccgtctgcgtatggcgccagacagtccgaatataatgtcgaacggtctggccacatggtcggacaatccgcgcacggagccggacggtccgtgtatttaactggacggtccgacacagagttttttgaggaggatagatatccaactctgtatctgtcccagctagactccccatctcaccatacgatacaccagcaccataatataatctaccaaaaccgtgagagtgagtactttccggcccccagaaggccagaaaggaatggccagtcctatgagcctcatagggcatgtattaacgcgtcgcaaaacccaaaccaatggggaagaaaacaacataccaac

SEQ ID NO: 3767 - DNA, 614 bp, Zea Mays
gcgcggagtgtcgcacacgagggtagccagcgctgcccctcgcggtgactttgtattggtcgaatgccgaagaccgtcgatgcagtcttttttcgacgtagatttttgcgggggatttttcgcgtgtatattacatggctccgcctcgttaaaaacctcaccccccgggaggaaaagagtgcaggccggaataaaattgttttgcgaattacaagggcgagctggccctgaggagtcaaacaaaaaatttgcggagattatcaatgttccaagaatgctctaggtcctcgccggatggcgttgtgagcctgtacgcgctgggggacgccttcgtcttgacgatgaaagggccctcccacttgggctccagcttgccccgggactctgtccgtgctgtccggacgagtacgaggtctccttcgccgaattccctcgggatgactgtgtggtcgcgccatgcttttgtttgagcttggtatttgtttagagcctatagggcgaagacgcggtctccgtcgatgaggtccttcgaagtgggctcgtccacatcggggacggctgacgggactgtccgtggtgacccatgttttatttcttgcggggtcatggcctcc

SEQ ID NO: 3768 - DNA, 542 bp, Zea Mays
cctcgactcaagctcatcttcttctcccaaatatggctttaaatctgaaatattaaaggtgggactaatcccaaactcaggggcaactcaagtttatatgcattgtcattaatcttctccaaaattttaaatggtccagcagcacggggcattaatttagactttctcaaatctagaaatctatccttccgtaaatgtaaccacactaaatcacccggttcaagttttactgcctttctaccttgactaccagcaagtttatatttctcggtcatcttttctatgttctctttagttgaagcatgcaatttcaaaataaaatcagcacgctccttagcatcactatgtacatgctccatagtaggtagaggcaaaagatcaataggcgcacgagggttaaagccatacactacctgaaaaggacttaccttggtggttgaatgttccgccctattatatgagaactccacatgtggcagacactcttcccacatcttaaaattgtgcttcaatatcgctcacaacattgtagacaatgtgcg

SEQ ID NO: 3769 - DNA, 625 bp, Zea Mays
gatggttgtgcaagagggagctattgccgaaggtacctctatcgccgaagctgaacaagttgtggccgaagttgagagtgataacgaaagtgaagtggacgatagtattctatgcccaactaagcctagtcatgttgagtttggaaaatccacagtaaagcagaggatctggttgcaatgaagaaactaggttattttgaagagaatgacaatgaattgatttgctttgctggagaataaatagttcagagctgaaggaagatgaagttgtggtattcaagagcttcttcagggtggggcttcggttccccctttacgagatggtaggggaagttttaaagaaatttgagatctatctccatcagctaaccccgaacgctatcgtcaggcttaccatttacatctgggttcttcgaagccaaagaaagagtgctatgtcgaagggttctgccgggttcacgaacttcattatcagacaaaggcaagagctgacggtcttcacaagaattttggatgctacaattttgcataccggaaggatacgaaggcccccgtgataggctaccataccaagtggcccactggttggacgagtgaatggttttacgtcaaggcagacaagaag

SEQ ID NO: 3770 - DNA, 329 bp, Zea Mays
tttcgtataggcccccaataaatcatcagtggtcgcctcaatggcctcgagccattcttcatctggctccccgaactgacttctgtagcggtatgtatatttcaaataaattagaccaccttcgcttgaactatcagtggtctccttcggcatctcccatccattaacaaggggtcataccttgaaagctatgtgctcttggaccaagtctctggtgccaatgttctgcacacagtgttgaaggctaccatgcaggcttgagccttatcactattcacgatcgagggccttcggatgctgaagcgtgattgtattggacactgaattat

SEQ ID NO: 3771 - DNA, 672 bp, Zea Mays
gcagaagaagctgagaataagagaaaggctaaggccgaagaagctgagattaagagaaaggctgtagctgaagaagatgtgaagaagaaggctgatgccgagaagaaggttgaagcggaggagaaaatgatacaggttgcaatccagaaacagctgaaggacaacatcaaagctttgaaaaagccggtgctcgctgccaaggtaaagaagatgttccagttacaaatgtcaaaagaatatgctcagtagcgccaacagtacgaggataggttgaacatgcttcgtcaggaggccaaagctgagattgacagtttggagaagagcattgatggccaggcaggatccagctcatcatttgatgatatccagttccctgcggagtccgatgatgatatcaacaatttgacccaatcaatccgactttctcaagacgaagtctcagtaggccatgctgatttcagcgagtttcaaaggatgatattcaagcgcctaggtgatagagtgctgaagaagcctagggagtacatatccccgttcaagatccctcataatcgacctgagatacccctagccaaggctgttgcacttaggcggaagatcgcctctgatcctgagctgaaaaggttttttttgttttcccaagttgcaactgctatttactttttattttgc

SEQ ID NO: 3772 - DNA, 643 bp, Zea Mays
gtgttgcccctcctcgcgtcctggccatgaggctgatcaacacctgaagacttctaagattccatggtgtactgatgctgcatctccacacccaattcctgctccaccgtagtacaaaaatccaccagcggaaaggcacccagagcatgcctgatagagggtttcaggccctgacggaactggctcaccttttccatttcattgtaagccacatgaggaacaaagcggacaatcttgttaaagcccacttcatattctgtgactgacttcttctcctgcttgaaagactacaaatctatcttcatcttctctaggaaggtgactgggtagaatctcctttcgaactgcctgataaaaacatcccaggtcaggactcccggtgaagaggagtgagctgcatgcacgcctctccaccaaatttgagcctcccccttcagcagctgtgtgccaaaacgaacacgatcctcatacacaatctcaaaaacatccatcttatcttccacataagtcagccaatccaccgccttaaccggagtaccactgccattaaaggtgtccaacttcatgcccatccactgcatcagagagagaccactgacgggaaggggcacctcagccccacaacctggagcagcacctgcag

SEQ ID NO: 3773 - DNA, 608 bp, Zea Mays
gtggagatgcgcatcgccgtgcagagtgccagtggagtggcaggtgttctatctgcagtcaggaccacaaggatgtggtgtgtaggaggaatcccaatgggaagctcagatgggagccggtgacttcctcctcttcttagggcactatcaacatgatgtcaagtgctgagcagcagttttcagttcctcttcctccacagcagctttatgtgcctgggacctctcaatttgtgccgatgcaaggttttccttagtatcaggctgtgcctactcctgcaccgtctacccctgtgctgactcagtttggagctctgcgccagcctcctccggtggctcagtggggttcttctgttaatttcactccgggagcttcctcttctgcgggtatttctggagcttatgtgctacccgctgcggatggcagggagcaaggagacgtggtgacaggtacgatttcagttgattcgtttgctgcccatgctctttttgaatctggtgctagctattcgtttgtttcggaggattttgtgtcgcgggctggtcttttggtgcagaggctgggtcacccaattttggttagatctgctaatggctccattagtagctgc

SEQ ID NO: 3774 - DNA, 694 bp, Zea Mays
acccaatgcagaagagaagcttaaagatatactataccaacttacctaccaacgaaaacttgaactatagtactcaagtactcaaccagtttaaacaaataacctaattcctgttgcatttccctccagtgaataacaatggaaaagccaaacaatctgatgattgcttagttttgtcacaacacgatgtttatttaaaatcaggaaggaaccaaatcattaacatttcagctaaaacagagcctcttcattaagcatataaaattaataaccatcttagaaccgaattaattttaagttctcaaacactgcatcatggatccatttgtcacactgctggaaatctgcttcgcttcgtaagtcataaccagatttcaacacctgaacacatgttgtaaaatgtttttggaaaagacacctgcacatctagccatgccagtagcaataatagaatacctttcaaccattcttgacacaaccacatcactaagaaatagtcctagctccaggataacttctttattctaacacacagaaccaaagcaaccaaataccataaaaaaggttaagcgcaaccaaatgccacaaagttaagcacaaccaacctgcacacactctttctgaagaaatgctacatggcaactagcacttgacaagaaaatacaacatgacctaaaagcaaagctcagtaaac

SEQ ID NO: 3775 - DNA, 554 bp, Zea Mays
ctatccacaccaacgcccgtgcgggtcgtgcaacaattgagactggagtccaatcgccggcatcaacgtaatggtgcagccgtaaaacccggattccaatccccatccccggtgtataagtatcgggccttccttctctagcctctcaagccgcaaggtatgaacactgccaagatgaaccgtgagcgccacaagtaccggagcggaagaaagctgtcaccatcgggcgcgaagtatgtcgacgattaaaccttggggagccgaggattggagtcgcgggcatctcttgaagcactgccaattgctcgacggagcaatggcgccaccgcgagcagcactgctccgtgcccgtagttggtctcaacaccatctcgggtaagaaactagcctccaacatctccgagctttgttgagactatatcgtggatgattgagctcgagacgtggccggttcacggtgaattcctcgccgtagctgggggccaccattcaccgtggctgaccctctctccatctccgccaccggtatggaccctctattaagttctccatca

SEQ ID NO: 3776 - DNA, 473 bp, Zea Mays
cttcggaagacgaaggcccccaacagtgggtacattctagcatgtaccacaatagatgtagtgcagtaatgccaggtaggtgacacttaatctactaagctattgtgacccaaaagatcgtgacctaaaagtcgagtattccatattttctcatttgtcttatctgcaaatctatcttaccctatgcatctaacctagatggccaataccaggaagggaggtgccgatgtacctacacgcattcaccgaaggagggcagtagctaaaccagaaccggagatgaattgcccaaatcctctgtctgctgggtcagaggcctttttcaccacccaaatccagttgttgcaacaaatgtccaacaccatggcccacatgcaagcttagctccaccataatcagcagcatccatcaccaccaccaccacctagggataagtatcgtgacttcatgagtcataagccacccactttctc

SEQ ID NO: 3777 - DNA, 314 bp, Zea Mays
ttcacttctagatggagtccttttgatacttggggtgttcagtaagttggtgttcaattggagtatgttgcataatttcgtagctttcttaatatgccaattatgttgatggagctttacagacatgccaatttataaatggagcatgttgcatttagatgtagtctatttcagaattgagtgtacaaatagattttacttataatgtgttgcataataggactaagctttaggggagtgcttttgtaccaatggtagtaattggttagtatctgatgatcttcatgagaaatatgacatcattatatggttgt

SEQ ID NO: 3778 - DNA, 2340 bp, Zea Mays
ctggggtgtgcgggtgatcgatcgtgtcctcatttattgatttcctttttgggtcgatgctgattgatcatcgaatgctggttaatgggtatcggttttgcaaacctctggatgttttcagttctagtctgtagcttcatttgtttgcggttggcttcagttgaaatccctggttcagttttcacaatctcacccgaaatccatttgaatacccccacccacacccacacacacactttgatcaacccaatattgttttcattgttgtaatctctggatcacgaggtgtttcttaccgatgccattctcactgacagacacggctcttcaattgttaacgtagaagtataggatggctgtatcactatgctatttctgccccgggctcacaacacggtcccggatgcccgtgaagcggtacaagaagatccttgctgaaatcttccccaaaacacaggtcgggacatgctgtgtccgttttttccctttgtcgaatatgagcatgttgacgcttgaactgtgttgcggatttatttatttaatgagcatgtttgtttcggttgcaggatgaagagcctaacgagagaaggattgggaagttgtgcgagtacgcttcgaaaaaccctcttcgagtgccaaaggttcactccccttgcttcctcattggaatttcgttgtttccatgccaggtgtggaggttctgaccttttgagcgaattgatcttgctgctaaacttagacgacccttcagaatacagtttgctagctttgtagcttctgtagtactgattataaatgcaatcgaggatcgagtggtataacttatcttgaaactggagatgcctcatggatcattgttctaggcctctaaacttaatgttttcagtatagttcccttgtctccttggtgccctcatttcagagtagtagtccttgttaaacatattgtcaggcatgattgcctcttaagcaaattcaggctctgtaagcttgctgtcttatgcatgttgatatctgagcagatcacagtttacttggagcagcacatttaccgggacttaagaagtgagcagtacggctttgcaaaagtggtgatgttgatatatcgcagactgtcggtttcctgtaaagaacagatgtgagtcttcttttcaagtttctcttgctcatatagccctgtattctgtgaagttaatatttttatttggtttgcaatggatacttcttacactttgttattacctttgctggttacaaatgaaattgttattttcttaattcaggcctctgtttgcaagtagcctattaagcattgtgcacactcttttagaccaaaagaggcaggacgatttgcgcattgttgggtgtgaaaccttgtttgattttactgtcaatcaggtattcctaatggactagatgccaatgcccgttagcaggattaagtttatataggtatgtcccattattggtgatcttgagtctgtctattccaggtggatggtacatatcagttcaatttggaagggctggtcccaagactgtgtgaaatagcccaagaagtaggagaagatgaaagggcaagtgccctacgagcggcagccctgcaatctctttcagctatggtaagttctgtgattgcgccttatcaaactgatgtcatatgttagcatggctttctaaaagttttggataaattaataagaaaaaactcagtgtaagagagctgctatgctcatatttccaagaggaagttaaagcattcttccagcataactctaattcacagtttacttaatatcttatgatgcaagcaatgaaatctcaaaggcaataagccaataagtactcgtgcgttgactaatttcatatgcataacttatatgcataagttatgaaactaaacctaactcagttgtgtgagtgtggatgtatgcctatatcactcaatttcaaaccctatttgatgcaactttcactcctatttctgctttattaattaaacatgacaacatgtagttcggcggaggtggattatgtattgttgtaacttctcatactccctccagtcacacatgcatgtagttttggacatcagcatgttgatgacatgatttgttttgactggagggagtagctatctagaacttaaatatcttttcaaaaaatatttcagtgtatgcatgacatcttcttaaagattactgcttttcttattgttctattctgccataaccactgagtatttaaaattttcaaacaaaaatatttttggcagtcataatatcatgtagttttctcgttgagcagatctggtttatgggggagctttctcatatctcg

SEQ ID NO: 3779 - DNA, 579 bp, Zea Mays
ctttgtagtttacatttttccgtattggacatgaaaaatgatcgttcgaatgtccctacacaggaatggcgattggcggctggacgaaaggccgatggagttggtcgttggtgcctggctgtgctcgcgatatcctccgccgccggcttcgtgttaaataccgacgagctagatctgcgacggagggccaataaagttggtcgaggacgagctagatctgcgacggagcacccgatgtacacctcgccctcccctccttgcggccgctgcttccccgtccctgcgagtctgtgaccttggccagcttccacgacccctcctacttgctcgagagctttagccccggcgccatggatgagagctttgccagcaccaacagaaagctttagccccagcgcgcggagtagacgaaggtgtcgtttagcggatgcccgagatccgctagctttagcgtgtatgaggacgtgctctaaatttaccgaactttttagcgtgtgttgctggactcatagaggaggtaattgtccgctaaatttaacttacagaatcatttatcggtcgttgttggagacagcctca

SEQ ID NO: 3780 - DNA, 735 bp, Zea Mays
aattcccgacgagtcccgccattccccaccccgaaaggtcacgcaaacacgcggtgtatgtcggtgaagcactcagccctcccaatttagcctgaccggcaaggcagccgaaaggcaccggcaatgcctcaatctctctctcacccgaggtctctggcgtgatactttgggcttacgcggccatctatttatagaggagggtgagtccgcgtagagggaaattcgttggtggggaagggaagaccccgagatctcctgcgacggtcatggcggccactagaggttgagcaatttccgcccaaggccaatgccagagatcccggtggcttctgttgaagcacggtgatcccggggcggtgaagaccacccaggcgagctacaggctgactccgcgtgggcggttgccgggcagctcggattcgttgcgaggttcacggcgtgggttgcacatcaaaacggcattccgatctctacggcctccaccgcgttcatggtggaaggaggcttctgcgcgacagggcccaaacggcagagaccgggtcagtgctgtttttctgcggatggtccaaggagtggggtcgatccggtagcgttcggcccgtgattcctggtggcagcaacacattcagccgagcctgcgtgactttcgcgcgagatggggaagacgcacccgaccagcgggtcccacacgcacgtggctatgcgcgaaaggaagggctggcacggtggggcctg

SEQ ID NO: 3781 - DNA, 550 bp, Zea Mays
gggttgtggatcttcgggacagtcaggcaaacttgagggtggtggtgatcgaccgacggcaaaggagcaagccggtccacgggcgcaggcgggtgtaggtcgtcggcgagcttcaatccgggggcctggtgcagtagagtctcgcgacaaccctcggggagcttagcggggccttggtgaagctgtccccgggctcggattgggcggtggaggctcagagtgatcggtcctcgtgctccagcggccgacagtgagtggcggtgccttcctagtgaggtagcgttcaatcaagcgaggctacgagctccaggaagatgcgggggagcctctggcgagcttggttgggcagtggggtggctggagcgggctagccatggtggctaagactcgggcagctctagcggggcacgttgagctcgctggagtgagggagtgaggtagggtgtagagtggatggctatgcactcggggagggttatataggcatgcaaaggcgtgggcgcgcggtcggtctgacgagcgctcagggcgcatgtggggacaactagtg

SEQ ID NO: 3782 - DNA, 561 bp, Zea Mays
atgtgaagtggatacgatcgattgcacacatcatcagtcgaatcaatcaatccaatctactttatttcccttgttcttcatcgcattagaagtaggcgtaatttagacctagcttagcctttttccccaacctcaaatattcatcccttttcgactctacgtcatctagggacgtcccgggtggtctaccgatcctggggtatcctctagaactctcctccctaacaaggtccttctcgagaggcgagatctagggttcgtcgacccaacacactttttttatgactccactagggacgtaattaggtgtgacctgccaaagatcgaccagagatggtcggttcaaaggatcgcactaacgtttctcccagcaacatcatgaagtcgactcttgaaagctgtcggttgaggatcagcagcgattcgaggaatacctgatgcaacaaagagaagagacattgtgacgagacgcacaagaaatcaaataagatcatcaagcaaggagagatcaaaatgtcatccctcctacctctgtcaaaccccaatgtgagtaaatcaaac

SEQ ID NO: 3783 - DNA, 383 bp, Zea Mays
gatttggataagttcgccggagatagcctcttcgcggccttgcgccacgtgccttggcacgttaacctcaccgccgtgactcacgttagcccgtccggtggtcgccggagagcttgccacggtaataggccacgaatcaccgcgctggtgactcatttcttctccgaccgccaccgcgcccaacccaaattcactggccatcgctcaagcacgctataaattgagcatgtcgtgagctccgtagggtaatcacccatccaaagcaccaacaattgcctccaattgttcaccagagaccacgaattgctcatttccccaaactgtgtttccgccaacgtgaaaaagtcctcaccgtggtcagctcgtctcaggtccgctcatac

SEQ ID NO: 3784 - DNA, 513 bp, Zea Mays
aaagtcaattcatcgcaatgaacacctctctgatggatccataaagtaataacataatgggggtaccataagacaacaaaggccacctagaatgtcgaaagatcttgaagaaagatttgcttggcaccaagggtgctagaagaggtttagtcataaaaagggtaaaattgttaatagattatattttccaattagatagatagatcactgagtttcccatgaccccctttgtttgaaacgtattctacaaaccattttcacatttcccacaagatcaaaggagattccaataattgacctcgagtcggcatgaagacgtgcaaccgaggtatgttttctagaggttacaatgatcaacaaggggttgatctcataatcattgttagaaaactaaccgataaccttcactgtttgaaccccaattaattcattattaacatgttgccctttgtaggagttgcatctcctaaaatcacaatttctggtacatcaactatcaaagaggtgatattg

SEQ ID NO: 3785 - DNA, 561 bp, Zea Mays
ggtaaataaaacatctcgtacccgccttcatatcgggtaaaacccactgagtatttgggtttcgggtacccatcgccatctctaatgtaaccacgcctggatcgaccgatcccatatcgacaaccctgaatacaagcttaaaccgatttctaatctcaaccacgagatcaaggatccacgacccgaacgccaaccatgacacccccactcatggcccttggatcgttgatccatgaccagcactccacgtgacaaaacgatatcctcgatctgcgggtgaacgctcgagcatggatcgacgacagggatatcctctaccacctcctgaccaactagccacggtgaacaggacttctgcggcgacgaccatggtcggcgtatgccaacaagctacccaactgcttaaactcccatcctacacacgatacaagatgcggggacgaagatgactcgataaggataggtattaccgatgatggtgatgtagaggtcatcgtccacagtgcgccatggctcggcgaagaagctccttgccgatgcgaggttcctgacactacaaac

SEQ ID NO: 3786 - DNA, 325 bp, Zea Mays
caccccttggtgacaatcattacaaagatccaacttcattacatgtgcatcatgacaaacattccaacatacgataagcaaactaactcgaactaagactaactagactaaggcactgaattcattattacagactccgactccaccgatctatggatctaaatctatgcgggtcctgcagtctggggcaccatagtcgaagcgaccacggggcggtgaacggtaagggtgctaaatccctacaggggcgggagaaccaccatcaagatagtggcatgtcgcgcattcagcacgcaattctgcaacctctgcccgaaccttgccc

SEQ ID NO: 3787 - DNA, 695 bp, Zea Mays
tgggctgccatccgcccgattagaaatggacgcccagatcgaatccccacacatgaacaagtggcatgttatacgagccctcggatttcaatcacacggcccacgttgcatctacgtcataatcaatcatgaaccctccgatctcattctaatggccaggatcgcaccgagtgaaacggtatgcaaattctaatctcagtcgttcaccgcgaaatccatggccagagagccccctgccccaacagacaccgtaatacgacggcgccgcgccagacccgtggcggcgaccatgtccggccaaagctaaaccggcgaactatggcctaaactttgaataaagtgatgctacgtgtaacaccccaggtgttaccaaggtgttggcttcctaatggcacatatacctattattacatgtggttaaaacttggaggagagggagtacttaagaccttggaagcatgagtgagttaagtaatgccaaggaccaaagtattacccaagcttttaggcaatgatcacctagggcaagggaggattgaaccttggaccccccctctcttgaagcctttagttgagagaaagattaggcaaatgcacatttcataatttaaaccttaaccaaagtttaagagtaccaaaatgtttacaaaagatagcaaaggaacaatacaaaaagacccctataacacccctaa

SEQ ID NO: 3788 - DNA, 382 bp, Zea Mays
tagcgcaggaacttccaaaaccttctgctgtacgtaccatggcgaggaaagaaaaggcgagagcgacgcagctcagctcagctcagcatacggcggcgggatggctgatgcgtagcaaagcttgcatgcctctcaaaatcctttcaggcatagcatttcgacgcctctgtaataattctttcatgacgtgcaagtaagtacctttcaagtacgcccgtgctcggtgctcctcacaggcctgatacggcggcgtttctttgccttcatggactgtggtccgtgctcattcttcttgagtgacctatgccaaagttcctagatagtagtagcatataatttggagacaaagaaagcagccctctagttgtgattagggggcctc

SEQ ID NO: 3789 - DNA, 413 bp, Zea Mays
cggataacgatcacggggtgaaagatctcgccgtggatgggctggaatgtactgtgtgcgtgatggttcatcagtgcacaccaactacgtggccaagcggcaatcaccggcgtgttcgccgttcaccgggtggatgccacgccttaggaggtttatcgtgtcaatatgagccgaggtgactatccaatgaccgccgtagttcagtcgctctgcggttgccacggtagatcgccgccgtgactcattcccctctcgaccgccagcgcaattcgcccaaattaaacaacaccgctcacggactctataaattgagcacgccataagctccgtagggtagtcaagcaccaagccaccaagtcgtgccttcaattgatcccgagagctcgctaatttctcatttctcccaaacctgc

SEQ ID NO: 3790 - DNA, 681 bp, Zea Mays
ggcgcctacaggcacatagggtgttgcacgtatcgtgagtgcccccgggagcattgttttagcaccacacttggccttttgctagcgcacgagtcctatcgttcaggcacaatcatgccaacctttgcggcgggcacgtaccgacctaggtgttcccgtattgttttgtgagatgctctacgtgctagcccatgacatgcttgaagagcgggtgtgcctccttgctcgcctcaggaatgagatggttgctaccccagtcaagccctcatcgatgcagccaagcgatttgtaggcaaggagatcgtaaatcgatttcggggcaaacctggtcatgcccacggacttgatatttgcggggagttagcgtgggcacgacttctagcttggcggtgggacctagaacgactgtacactttgttcgaggactccatggggacgtttcccgcatgagtcatcaaactatggagatatagcccctagaatgactcgatggtgacactaacaatgcactgcatgggtgtcattacccgcgctagagctcccacaacagtgatgaaattgaaggccccaatgtacacgtcggtgcctaggacccaattaacggtgtttttggccatatgcagccatgtggtaaaaagtgtcgtgactcagaaataatcccctacctagcgtgccaactaa

SEQ ID NO: 3791 - DNA, 680 bp, Zea Mays
acatcgtcagatcaatggtttagattgagcctagccgaatgggtgtgcaacacgtaatcctaatcgtccatttggagatctacagccccaattgtttcttgatcccccacgacagacagtggcggcggaagtgcccagagtggcggcgccattgccggcagggcccaaagctccgattcccgatcgagcacccgagcggacagtgcagcatgcaacggagacgatgacaaaactgatggggaggagtctcaccatagattgtcgagcaggtgacgcagaccacggcgagcggcgggtccatggcgaaggactgctccgatgagcaattcctacatcgatgcgaaccaatcgcgctcggagtggccatgaacttcttccaagaaatgcgacccattcctcaaaccccgaccgaggacccgacaatgacgctgaccgaaagtagcttgcagtggcgccattctttttctcggtcctaggcaaggctcactcggcggctatgttcttggtgctatggtggcgcggtggtccataagggtgcggcaggctcagatttttttatactccgaagccaaggtaggtccaggcgaagggatatcccttgaccaggtcatggcggatccggaggaaacggtgaggtttgttcatgccgcgctatcttcgcgggaagaagaagatcggac

SEQ ID NO: 3792 - DNA, 448 bp, Zea Mays
caagaatagttagaaatggaaaatcggtgtcaggggaaagatccctgggcccatgggccccctgagtcagcaaaaggacgagggaaatgtccatcctcgaatagtctcgaggcacctagcccaggatcgagcaagacggagccagaagggagggtcagatgaacctagaggaagccacccgagttgattccacgcctgacctcagactgatccatcataagtgatcgaccgcattaactacgtctagcaccgagccgcaacgggagagtcgatcctcctactcatgacatatggacccctaggcctatgacccactcatgacctatcaaacctagacctaaatgcacttgtcatctataggacctgcaacacgacgagccacgccaagacccaggctacgaaggccaggggtcgacatggtggcacaaagatggtaatgatggtgtcg

SEQ ID NO: 3793 - DNA, 495 bp, Zea Mays
aagaatgaggaggtcgacgcattggccaaggcagccgctagaggcgaggccctgccctccgatgtattctaccatgtcatcggcacgccagccgtccgtagcccaaaagggctccaaataaccaatgacagcgagggccaccgcatagtcaacctcatcatgaccgaagactggcgggcaccaataaccctgttcctgcaggggtactatcacccaaccgatatcaacgaggccaagcgcctcaaacattgaagccgggacttcgcactcatcgaaggccagctttacaagaagggggtcagccaacccatgcttaaatgtgtcaccgagaccgaaggcatccagatcctgcacgaagtccacagcgggacttgcggctctcacgcagggcctagggccctagccgcaaaggtgacccgtcaaggcttctactggctcgccatgatctgcgccgcaaatcgggtcacaaggtcctgcaaagcttgccagaagttt

SEQ ID NO: 3794 - DNA, 400 bp, Zea Mays
atttggggaaagaagctggcggccggagaaaggggtgagttaccagcgaacgctatcgtggctttcaccgaggcaatgtttcatgcgatggacaggcttcctatgacagtttactgtgacgtggtaaggcttcgaagcacatggcatccgggcggcagactccaacgaggtcacctagaccggccgtagggcaagtgggtacgacgtccagcccacggtctcatccacggtaaagatattttcactgtcggtcgtaatccgcacaccagagagcacgaatcgtagcaccggcgaggatcgcggcgcggagatcaccggcggcggtgcactgaacctggcgatctttgtcaggctactgtaccatcaagaccttcatcagtctgtctgacagagcattttc

SEQ ID NO: 3795 - DNA, 447 bp, Zea Mays
ccacacaacaagtaccctgaactacgaaagatggttatcaagcatatgatgcatggcccatgtgggtcgttaaaccctaactgcccatgcactaagggccatgtatcgtgcaagaatcattaccctcggccttttagtgacacaaccttgcaagggaaggactcatacccgatttacaaatgtcgtgatgatgggcgtaaggaaaaggttcgaggttgtgaattggacaatagatgggttgtcccttacaacccttacctccttcgtctcttcaactgtcacatcaatgttgaggcgtgcgggagcatcaaggttgttaaataccttctcaagtacatatacaaaggccatgatcgtgcatctgttgttatgagagatgcgagcaaggcagatgatgatgtagatgagatcaagcagtacatagatgcaaggtggatgactcctcta

SEQ ID NO: 3796 - DNA, 777 bp, Zea Mays
gtttggttccgcttctggcgggcttctggccgctagaagctgaagctcctcccaaacgcgccgcttctcctcccgcttttccctgtcgcgcttcgctgagaagccagccgactacgcgaagacagaagctgccctcaggacgcttccgcagaaagccgcatcatttgggtagggttcgcaccccgctgcccctcagctctctcgtccccatcgctactcccatcgccgccgcagctctcctcccatcgcatctcccgccgccgcgcgggtcgtcttcgcaggtaagctacctctcatccataccgcccttctctactttctcgtccgccgccgcagtcgttttgatggctctgtaacccttcacagcgctagggttttaaccgccgagccgcaactctgtcgtgaactccctctgctgtcgtcaacctgtggactcctccccccctttcccatctcggcgtctacgcaggtaccatcttcgtctcccccatcgctactcctattcgcttttccggatccgttgcatccctatgtcttgattagggtttaggttgcatctacgtccttggttaagatgttatgccccctgtattgactcgtaccaacgtgatgcacagatgctattgaacgattgatggttacggtttaggggaaaccattgaaaggtgtttatgtttgttagcagccgacccaataatacatttcaataagtgcattctagtagattcaaaccatgtcaagtttttcagtacatcagaacggattaccatcgacgta

SEQ ID NO: 3797 - DNA, 527 bp, Zea Mays
gaaacacaggggctcggaacaatatttcctaaggcacagtactatctacgctggactgcgagttgattcactaaaagcccgaggactcttttgcagttttacagggtcgaaggggtatcagtcgttcagggccgtcggatctaaaactgacgcaccagattttatcgtcgcgttataaaacgggtaactagcccccaccgtccgatccgaaatcaatggatgaagggtgatcccaccctgatctaacctaaaccgtctgttaccgcatcaacgctccagatcccacagagcgaattggtacgtcgtgatctaatccagccgcccgtcatgaatcctacggccacgatctaatcacgcgaagggtatcctatcatctgatcgcaatcgccaatgtcggatccaacagccaaaaggccatcgtcttccttcgggtcgtggcgcggaaaaaaacccagaccccacggcggcgctcgccggtgagcaccaaccaaactccttcccagtgcccaaactaataaccgaacgtg

SEQ ID NO: 3798 - DNA, 722 bp, Zea Mays
caatggtaaacccaagtcaggggagcgatgtcatggcttgacggaggaatatcagcaggaacaatttgaagaacgttgccagaggtgagttcagccccaccggcggatactagacttctcgcatctagctcactgacctccaaggcgacttgtttgttcgaagccgtagaagcatgcatcgccgtcgccccatcggatcgaggtagagacgacctaacatggacgtccatggaagtgtgggaaggagagctcacctgaacaccctcgggggctaggttgcagctcgcgccacccaccagagccggatcactaccggcaacaccctcgggggctaggttgcagcttgcgctacccaccagagccggatcactaccgatgacaccctcgggggctgggtaactaccagcaccaccctcgggggctgggttttctacaacagccacctctaaggctgaaggctcccctgtcacctccatgtgagtcgggtaactcggaccaacgtcttggcattgaagactgccttccaaagtcgacgatgcacgagacactgctcgggatacctccaatcccacgtctgcaatttccgaacaaacaaccatcacgtcatcagcagttggctccaacagcatatcctcagggacgacctcctcaagggtttgatcaaaatctgatattgacagttcctgaaggctgacaagagctgacagagctagagaaggaat

SEQ ID NO: 3799 - DNA, 485 bp, Zea Mays
attcaataagttggcatcatctaaagaagcaaaaactcgagccaggtccatttgaccttgagaatacttctcctcgagctcagagtaccgccggaccacatctagcaaagaaatggttgaagaaagatattcagtaaaaagcagattaatcaaatagccaaggaggaaacagaggcactaaccagcatttgtcatctccaaatcagatactcgccgctgaagtagcatcagattccaatgcgtcagagacagcactctttctgggacagaggcaccctatgatctcagctgactagccatctcgccaaccaaagcctgatatcgaaaacaaatgagtgcaaagacaatattttgcctggagtatagccagatcgggaaaagccaaattacctgaagattggagaagaacgaaggaagccccaaatcatgagaagccagttggtgactcgacgaaggaatatcaaccgaggcaatctgaagagcat

SEQ ID NO: 3800 - DNA, 657 bp, Zea Mays
tgcgcgtgccctaatcccacgggattatatcctggacttcaagggatttcctcgccgtggggaaatcatcgtcgcggtccgctttgcgccgtgggcgggaccttcagagcatcctccctccggtacgaacccactcccagttttgcaataaccacggtaaccttcgttgtcaatttactccgagtttctggctcgggatcgtagagttgggcggctctgcaatggcgccaccgcgctaggcagcgcaccgccgttcggacaccggaggaaggagatgatggtcatccggtcaaaaatagaagggaggtagcgtctggccctggcccttggattgatctacaacgatcacgattgagtttaagggcgatgggcgcgtggccgttggatcgggatcgcacgcgttaaactgatcgcgacacattaaaatctgggccaacggattttgatccaacggttgatagagcagaccggtataatctaatcctaaccgttgaaactagatctggcggctctagttgcatcttaccccttcggtcgtcatctttacagaggagcccgtgcgtttcctcagtatcaacccgcagtcctactgctggctctctgagtcttaggaacatttgtgcagtagcccctgcgttcctctgtttttgaggccca

SEQ ID NO: 3801 - DNA, 404 bp, Zea Mays
ggagggggagggtggcgccgctgtctggggctgtgtctctgatgacaacagctctggggggatcctcatggtgtttctggctactgctgctgatagatgtatccttccttgcacaatataatgcaggcaaggggaagaggtgacgcactcatgcttggcattagagtcaggtgctcggtggttccaacatgcatggcctcgtatgtttgttggctttgtgcgtcatctgtgatttgtgtccctttcagtactttggcagtaccaccatgctgatcgatgatcccgtccaattttgttgcttgctccgtttgtccttaataattatcattgagtgcctaatgtgaaggctatgccatcctttgttatgaatgcccatcaatgtaaaagtctaaggtgaggctccc

SEQ ID NO: 3802 - DNA, 428 bp, Zea Mays
gctggggtgagctggccgcggtggccggagctcaggcgacttggcgggcggtggagctctcggttcacggccaaggttccggcaattgagcgcggaaaatgtgcgaggctgaggcaaggatgtccaagggctattagcatttataggcgcgggcgtgaggagggcacgtggtggactttaccatgcgtaggggtgagcgtgcatgggggttgggcgaacgccggcgtgccgaccagggtcgaacacgtgtgcgtgttgtttttgctcgagttctggcgcgtgtagtcactcgtccattcctgctcttgccttggtcagtgcacaaaacctcttcccattcccttaagctactgatcttgtgtggtggtcaaaggatttggcctactggttctagagatatggagcactcaagtaggatctgtctcaca

SEQ ID NO: 3803 - DNA, 369 bp, Zea Mays
ctcgacttcaacgaaatccatctaacgcgcccgccctaatcccgatcgaccatttatgatcctacgattgcacgagccactaaacgaaggggtatggtcttctaatcgcggccttcaagcacagatcaaacggtcacaaaacccttcgccccctcctcgacgcagcgacacagcggtgacacaccaccgacgacggtgccatggccagcgatcgcctcgacccgattgccaaatctaaactctaattcaaaagcagtagcgcaaagcggtaatgatacggtattgcggaggatgatactctccaagactcaaagaggtaaccaatgcttcccacggcgcacggcggaaaccgatgtccgatgatgaatt

SEQ ID NO: 3804 - DNA, 582 bp, Zea Mays
gttctcaaagtctgcatgaaccaatcaaaacatttcaatacgatatattgattgtggatagtcctaccagccctgctggcacgttttcattacaaaaccttgatggagcaactacccttttccccatccccttatcacctaacaatctcaccgtcaagtgtctggtactctggttatccaacgcataaaaaaacaatgtcttgtgttctctatagtataggaaatcagggaaagttctcctaatgttagcctgcctttgggttttccagaaagctacctttcttctggcaatgataaggtgctagtttgtcaccttaaacctttccagtttgtcgccaagtccagtcaggttgttattttcagtttttctccttcgttgccataaagctagagacgcttaagcttcaatgtggcatctactcatcacatgccctgtttgatgttcacagaaagttctttctccttgttctgtaaagatatgtttggtactcgactactggtgaaagtaatttgtttaattccttgatgagctatctgctatagtaaaatatgaagtgaccatcttaatttgttaagtgatgc

SEQ ID NO: 3805 - DNA, 756 bp, Zea Mays
tggtggcgcgagtgaaggagagcggcagcggagacccgagaggtagggagagaggggaggctggggttgtaattctgggacgggattgacgatggtggcgcgagtgaaggagagcggcagcggagacccgagaggtagaaagagaggggaggctggagttgtaattctgggacgggattgacaataatggtggcgcgagtgaaggagagcggcagcggagacccgagaggtagaaagagaggggaggctggagttgtaattctgggacgggattgacaatggtggcgcgagtgaaggagagcggcagcggagacccgagaggtagggagagaggggaggctggggttgtaattctgttgtaattttgtacacgtgacgtgcgtacggcgtcatcaggcaggcaggtagccggtttcgacgtggacgtacgtccacatcaattcttgtgtggcaccgttggcgccctgtacgtacgtaccttcctctagctagcgatgttcaacgtgcatccttgtcgtatggcatcatgataaaccgttaatgcgtatggtgcaccggccggcctttacgtcgtaccttgtcatgcattgtcccgcacctagctagctattagctagtcgctgaattcatggagagtaggcatgtgctgctagctgcttgtcctcctactgcaccactcgtcattacatgctgccgctgtgtccgatcgatccatccgtccgtgtagccgtcgtatacatgtactccctcccctcc

SEQ ID NO: 3806 - DNA, 777 bp, Zea Mays
gcgaggttgattgcaagcaaacggtttggaggacgggagacagagagatcacagcggcagcatgcaattaagaatccaagaacagcagacgctaggggggttgtggggaggcaacgtggatgctcacacagtgagcagagctgctaggccaggcgcggccgggcggctgcagcgagcggtggcttgagctttataacgggcggaggagtggaggacacggatggatggatggatacaggaagcaaggagcaaccccgcgggtggggtccgagaaaaggcgggcggcgaaggaagaggaagagaaggcagcagggtaagtggtggttggagacagcacaggaagaggacgatggcggaggtgggggacaatttactgacaataattgccgggaggcgagctgctgtccactgctcactcgactcctttgttgtacctagcgatggcagtaaacatatatacggtgtgcgtgcgtgatgcctggtcggggatgcatggtagggcggagggagaaggaactcggagagacagcaagcggatggaatggatggacgtgggcgtcgcaaaagattcagacagggaagggggatagaaaaggaaggccgaaggagaagcagcagctaccactctcgtcgtcggcgacgaagcagcagctagcaagaggagggagaggacggatcggctgaggcacctcttcgccttcggtggggtgctgcctttcgtttccgttgctttgcttgctccctcagcagcctaggactaggagtttcttgcagggc

SEQ ID NO: 3807 - DNA, 528 bp, Zea Mays
caagggccacaccccataccctatgaattcctcaactagatcacgcccactactcgtacgagcagcgatccgaagggccctttcattctcatcatcctccgccacttcaaatggcgggtacgccacataataatgagagcacataatggctgcggggagccttgggtggtcttcgactttggcctctgaaacataaaaccagtaatcccaccagttgccccacttatttcgggcataggggaccagctccacgacttccatcgaagtcttcccggacttcggtgtgaaagtgcacgatccgaattgtgcaatcttatgtccattttttctcttctaccagtgcagacagtattgcttggcgaagacttccaccgaaggctgactgccatacgacgtcgttgcccagacgtacttcgccaacgccaccacggcgttcggtgtcagctggtgaacctggacttcgaacttctgcagaacctccgacacaaaacgatgtgcaggcagacgaaggccggcgatgaaaaatgc

SEQ ID NO: 3808 - DNA, 392 bp, Zea Mays
tcattgaccttaaccctgcagtgggcagctattaattcctctccctcgttatcactcaaagtgcacgcatgatactgctagatagacctgcaaaggatataagattacgaaacagggttgccccattcacaaaaaagaagcatagcctacaactacaaagataccatatccaaggacaggagcggggaaaaaaagccttttgcacaccatatcatccaaggacgacaaggtagccttttgcacatgcatggtcgtcgcgttcacaccatatctcttcactctttgggggtgttgaaatatgtcacctagcttgcacaagtcagatttgcattgtggttgtggagccgtatattcgctctgtttaaaatgtggtcatccagatcatggcaaag

SEQ ID NO: 3809 - DNA, 1164 bp, Zea Mays
gccggctcgagccaagccgagcccgagccaaatttccacccctaaggacaactataggtattgctacaaaaagacgggaaaattgattaagatgttagccatagaattaaagcggatggatgaagtggcatcaagcatctaacgttctatatgacgagggtactacagaacctaaaaggcaatcgggtcatggcagcgacaacacttccctaccctactcccccaaaatctcccactgcatcaaagggcttcgccgcaccaatggcgtcccaatcgtcgccagaacccgcaccgaccaagacggggctggaaagcatggagggccttcatcatcgacaaagtcatctctagggtcgacacatgccccataatggcactcgtctgcgccagcacgcacctccacaccgtcgtcaccaacgactccctctggcactaaggatctggggatcgatgtgcccgtcaatccagagggtcggcctattccctcctaggttcacaatgttagacctcagtcacctttgtctctcttatagcaatagaggaacgagttgatcatttcatggagtccactatcgattcttcatctgtgatgttgctcgttgattgcttctgtttggccatctttcttaagacggtaagacgagacaaggcgctgaaccaccacctggacgcttaggcggcgcctaggcacttactaaggcgaccaaggtgaaaccttaccgataagagaaacagtagaacaacaacatacttaaggaagaaaaaggaaaaagaaaaaaggagaaggaaggggtaggagatgtataagaaatggcccagcccaccagctagcccatatatcctcctctctagtggtggttagggttacccccgacctcatctctatgcgccgctcactcccatctcagcgtcgtcgctcctgcttcccaagctctacgttgtcgctcccgctcaaccaaggtctacactagcgcaaccctgagtctctacgttgccactcctactccccaagctctgcgccactactcccggagtccctacggtgtcgctcctacacccccaagtatttgctaggcttattggttgatctcctccttttcttccccttccactcttgcctcacttgttgattcttagctaggtgacagggacgcctagaatttt

SEQ ID NO: 3810 - DNA, 522 bp, Zea Mays
gtcaacaaaatcctgtggtcatagacagataagcaaaaaatatatttcgccagtacgaacaataaagagcaaaaagttgactcacctgaagattggaaaggaataggggaagacccaaggcaggaagagtcggtgcatggctcgatgagggaagatcagcaggaacaatctcaagagcacgactcgaggtaacttcagtcccatcagcaggcggcatgctcctggagtctggctcgctgacctctaaagcgccttgaccagcgagagccatagaaacgtgcgtcaccgcagcctcctcagaccgggcttagggcgatccaatgtggacgtccatggaagcagtagagagggagcatgctccaacaccctcggggctgggccgctaccagcgccacccttaggggctgggtcttctgtagcagccacctctaaagctgaaggcccctcagccacctccatagaagttggatgactcggatcagcgcttttgcatggaagactgtgctctaagattgacgatgc

SEQ ID NO: 3811 - DNA, 403 bp, Zea Mays
ctcaaaactgaggtagggaacctactgatggttgtcaagacgttgaagcagcacggtctctccggcacgcgactggtgcgtactttcatgcattgccggatctagcatctgatggtttgtcagaggtcgatgcatcaatactctagggtcgacgaccatgaccatcattcccctgcacggctcgctctatcgaagattgaggccagggtcaaggtcgttacggcgttatcatcgggatccttcatggatgaagacctgctccctcccgtgtccaaagacgttgtgagcactctggtgagccccttctccctggtgtgttgcttcatttctttccttctcccttttcctctgatgtgcgctctattggggatcgaacccttggtggtgtgccttccaccccttc

SEQ ID NO: 3812 - DNA, 495 bp, Zea Mays
gggattgtcacggagaggatggaggaaaaggtgaaggaatcggaactgaacaaggctgaagaggagaaggagctgggcacggcgtgtgaccaggcaattgcatggcgtcgtcccaggcggaggaagagcagaagaccgagaagcgtgtgcggaggcccaacgtgcgtttaagcggcccagagtggcgtgcgtaatgctcctgcgtgagcggcccagatacgaggcgcgcgtgtggctcctgcgtgagcggtcaaatactggacgcaatgaataaatacgctggccgaggggaagtctgtaagcaagattttgatccatcttcaatatagctccatcccgtacctgctcctgcttccttctaccttcttacccctcctccacgttacagggttgaagctggggggctcagtggggcgggagtacggaactccagcgtactctcggtcgaagtcgcgggcggcgccaccatatttggtggtcgagttggagatgaag

SEQ ID NO: 3813 - DNA, 646 bp, Zea Mays
gggaatttaatgtcgttttggttctatccacctttgtgatttgattgactcctgaagccgtaatcccatgctaatggtcgatctaagctctgcccacgatgaatacttcatatattgcagctttataagttacaattgcaaactcctttttcggttttcgaaaatgatgttcagtagtttcagtgccgatgccaaaactgactgaactctgtgtcgatctgttaccttgaaagcttaagcagctggtgtccctgcaaccgcctctgggaatattctgttgaatatcttaggtgttgatgcttgtggtgctggtactctggtagtaattcgatgacaccagacatgagttataactacctgactataagagtagggattattttctgttacctatgactatccatgatcgtttagttcattccagttcagctggactcttatgttggatctgtgctgggcactctgtaggcccgtactgaatgtagtagatacatgcacaggtttaaaatgagtagcatgtctttttttatactgtaccaccctcagggtatgatttccatttctgtatgatatccatgcaaaagctggtctgcatgtggaatctcttttattttgtatgcacacaccataatgataaatattccca

SEQ ID NO: 3814 - DNA, 883 bp, Zea Mays
ctggaactggatttagagcactgtggaaggtattgaaaacattcatggaggcaagaacattagcaaagattcaggtagtatatctttttgtttgcatattgtttgacaaaatagagtgaatgcttacctctatgttacttgttaggttctggggaccaattaccttaacacagtattagaagctgttgacccaaggtaaaagtgcatcaagtcttgtgcaacatttgcatctttagctgcttgaatgattgctccttctgcagcaatttaccagaatttttaggcggaacttgcacttgtccaacaggaggatgcttactccaagataaaggaccctggactgacccagaaatgattcgtgcttctaaggtaaggtatgtttcttttataggtcatttgaaattttctgggatgctgaaataaaaataataattgttggagtgaatctatttgtgatttttaggaagcattcggtaaaggtcagaagtctttcaatgaattggctgccacaattgcctgtgaaagctttacaggttgtcaggtattagggtatatactgttattattgttctttgcactttagctttaacagttaagcctttatcagcatagacctattcctatagcgtggttgtaatattggtgtgtggtcagcagccgttgatatgagtgtattaagccttttgaagtgttacacactcagcaccttatcaaccatgattaatcagtttataagcctgattgaacatccgttgacctagtttatagaaatagatagctgggcttgggtcttgtaggtcctgttgtcacatctattttattttctcgaacacacaagagaattgcgcatcatgtcaatgatcttcctttcctctaatttgat

SEQ ID NO: 3815 - DNA, 822 bp, Zea Mays
ttgaaattggcctgtcagacagccttaactctgaaaacctaagttcagtgacatttggttaactttgggagcagttcatggttaattcaatggagatacggtcagggtcactgtggcaaaattgaagctctaacattagtgaaaaactttgctataccaaacttgactaggtgctgaacaatttttggagtaaatcgctctcaaacatgctctgtcgggcgctctgaatggagttctgatggtacagtacactgaaaaagatcgcaggttcgatgtatctcgccgccgatgactccgtgccgcgatcctcatcggcgctgcgattcgtgcccggtggagtgcagataactacacaagataagaaatatcgcatatgagatgaacttggggcactgtttcgccctgtcgccgtgcccacttgcccgacgacgtagttgcacgatcatcgtcgtggctgccgccgttcatttggtcgcgccacgccttgggccgttttaccacatcgctttgagccgtggaggctaaccagtaatagacgtacgcctttgtccaatgaacgccacgatagatcgccgcggtgactcatcccctcttctcggccgccagcacgatttcttcaaattgggtgccaccgctgatggaccctataaatcaatgccctagtgagctctgttaggttgttacgtgtccagtgcaccagccctcgcctccaattagccactgtagctcgcaaattccaaacttcccccaaatcgggtttccgcgccaccgtgaacacctcgccgtggctagccctctgcaggtcagttcaagcttttttgc

SEQ ID NO: 3816 - DNA, 597 bp, Zea Mays
aaaattgagaacatgagcctcaactacataagaagcatcatgaataaaggacatttggaagcaagcaagtggggaggagaatttgggagagattgtctctagattgtcgcttgtgctctagcatctgacgcgagcaagtggggaggagaattttggagagattgtcgcttgtgctccagcatctattgctcctacagttgcaacaacgcgcaggtggtgcccgcctagggtgagtgcgtctccgcgttctgcactgcgatctagagcttctcccgccggccctatgtcaggaagcacctgtccttcctcagcgaatggggaggcgcggttcgagcaaggtggagaaggaggcggtggcagcggaggagagggtttgtcccactcgtacctagggtttcggtcctagatcaagtaggcgccctcgagcccgtgcgagagatttgtgtggtgagacggacgagggatgttgctttatccttgtgacgaagctgccgccgtggaattgcgcgaagatgggcagctttcggcgtgttgacacggcacgcgtctgtggctcatactcatgaagaccgaggagtttgtgcccgtgcccgtgcc

SEQ ID NO: 3817 - DNA, 691 bp, Zea Mays
cagagcccgccgtctggtccacgcagtttgttggctggtaaagccgggtcacgtactgaagaaagaaagatagctagactctgtctctctgaaccgaatgcatggaatgctgaagatctctgagatctgaaccagccactgccggtgtggaagcggagctgggagctggagactggagtggaaccttcttttttcactgttgtttgttgttacagcacctttttttattattgttacagactgacacttaggtacagcgctgtggtaactgttactgtaacgtcatcccagctcagcctcggcttctgctacagcaaataacggcgttggcgcgttgccaagtgctaagctagcagctatgtactgccagtttcattcaggtccatgcctccgcggctccgcctgcctgtcttcgtactccttcctgctactccagtccggctccggcgcggtgctgcacatggaggcaggtccatcaggtccgtgccgtcgccatcagtggccaatcagtcagtagatcatttgaccccaattccaggaagacgaactccggtgcggggcgctcacgcgaagcttcagtagttcagtatccaggcttggcccttggcagcgccagcgctactggaactgagactgaacccggaattcacagcatcttgtgcttcgaatcagtctgtactctgtagtctgt

SEQ ID NO: 3818 - DNA, 683 bp, Zea Mays
ttgccattgggagttggggtgaagttgatgggcggggtattatttggggtggcgggggagttgtagtctttcttggtggggtagttgtgggtggtagtttggggaaaaataaggctagggttgttggatattttgatagttgggagcatagtggttgttatgtgtgttattgccttcgctagttggtttggaactaaccttgtcatactttccttagccttttttgtgattgggaaatccttggttcagtgcctaacatcctctccatggaagacacaatatgtgtccttcgctcctgactggatcccctaatgcagttgtggcctctaccagcatttcctcccttgctaggtgctagatatgatcttgggttcgagggggctttttgttgtggtgtcactgattggttatgctattgacatcgggttgccagcggtcatgttgatggcttttggtctatagccggttgctagtatgtggagtgtcatttggcttccattgtgtttcgagctttttgattgtgcaattttttgaagatttgatagagctcttggagcttgttgcgagggtccctggtgtaatgattgtagaggtgtcctactcaatgactattgatagcgtcatgaattgcaatacattcttcaactaatggtagttaggacttgagcagtaggaacttgttg

SEQ ID NO: 3819 - DNA, 793 bp, Zea Mays
ggagagtcgtatagaacgtagagagagatggagagttgtatagaatgtatagagagggagagatggagagtcgtatagaaagtatagagagggagagagggagagtcgtatagaacatagagagagatggagagtcatatagaacgtatagagagggagaggtggagtcgtataggacgtagagagggagagatggagagtcgtatagaacgtataggaggagtcgtataggacgtagagagagagagatggagagtcgtaggcagccgcttgatgtgcggcccacatggtgtgtgaagggaaggggtgccaactaggctcgcccgctactctccgtgtgtcctcattctcacccgtccgcatctctttacttagtattttttccgcgtctcactaaaaaccatatcagagatcatgtgctaattctaatcacaattgtcattcatgtaccacatgcgattatgaccacggtaacacggtaactatggcaaaggaaatggcgttgtatgcatgcttctcatttgtgcgagtggcaactaagtaaacaaattgaggaaatgtcgttcggtgtacattaatactttctatacactccctctccctcctctctcttatctctctctctctctccctccctccactctctttcctctctcttccctttccctctctcctctcctctctcttccctctccctcctctctcttccctctccctctctcctctctctctccctccctccactctctttcctctctcttccctttccctctctcctctcctctctcttccc

SEQ ID NO: 3820 - DNA, 276 bp, Zea Mays
cccgtttgatggggttcgagggctcgatgcctccctacgatgggacaccatcacgaatcattcccgagggtctcagatatgccttaaggtacctcgggttgcgacccgagccagggccatgtacgggcgtacctacagccatccctaactctgtgatctagggcggttatggagcccttcctagggaccaaccttcgaacccctgattagtaatgggctcaaagccctagcttcctgaggtggtttttccgaaccctgccgagggcctatccttcg

SEQ ID NO: 3821 - DNA, 565 bp, Zea Mays
gccaactttacaagagcagataatcatggcacagattagcaaaaagggtattcaagtcattaaggaaatgctcaatcaaaaagtggataagtataaatgctttcgtcaggacagcaagggtgttctatggttgaagaccggctggttgtccccaagaatccagaactcaggaacaaaatcttggacaaagctcatctttccaagttttccatgcaccctggaagtaacaagatgtatcatgacctcagatccttatattggtgtaccaggatgaagagggaaattgctaagtatgtatctaagtgcgacacttgccaaaggataaaagcaagccatttgaaggtagcaggtaccttgcagccactccctataccatcttggaaatgggaggacctcagcatggacttcattgtgggattgcccaacacctcccgacaccacgattctatttgggtcattgtggataggctaaccaaaacagctcatttcttgtcagtgcatacaacccacagggcagaaaaatatgcagaaatctatattgaccaaatagtgtgtttgcatggaa

SEQ ID NO: 3822 - DNA, 388 bp, Zea Mays
ggggtggaaaggagacgacgacgggagcgggggaggatgaagggggggcagttattgttcgccttgtctgctgtgtgctccgcaatgctcttgtgcgagtgaggtgggaagggccaaggggactaggggagtgtgcgtgttccgcgccgcgcctgtgctgtgacgggacgggagtgaggagggaagggatggttggtggtggtggcgagaatctcgtgcggttcggaatccctgtgggctgtcgtgccgtggtggggtccggggctgctgctcaaacctccttgtgccaaaatccgagctttaactatggtgttgcactgcatgtgctgatgttaacctgcaaagcggctcagccgcgacgtcttgccgagctgccgtcacactttgc

SEQ ID NO: 3823 - DNA, 424 bp, Zea Mays
aaacctcttgaggtatgaccggtgtgtttcatcgctctggtgcctgatggatttgaggtcccatggctgcgccggcttgtcagagagagactagaagttggtgatgaagcgtcgactgaagtcgctccaatcgtcgatgcagtgtcggagccactgtagtgcgtcttgccctaggacgatgggcaaatacgccgtcattacgtctttcgtcgccccagcggcctgggcggcggtcatgtagacggccaaccagtccctcggttcctgcttgggctcgtacttgtcgacgttggagaccttgaagttggggggccactggatggctcggagacgcgaattaagcgtggagaccccacacgtgtcttcctatcggcgttcgtgaggtcggtcccagggaggggaaccggtagtgtgtcgtctcgac

SEQ ID NO: 3824 - DNA, 1057 bp, Zea Mays
gtctcatttgcaccggccgagctccaggaatcaacggaatccggtgatcacaatccctgacaggaggaagaccttgcggcaccacaaactctgatgaatagcgatccaacaatgactgtaattctggtggaagtgaatgaataatatgttggtcggtgtctggaagttgtgaaaggctgcacaattgaaccaaagcactctgtccatctgaagcttgtactccatataacttgaccagcgaagaccccactgttaaagacaaccatttgtctgcccaatggacccacattgggctatgttcggataaccaatccatgccaatgatcatgtcaaatggttgaaggtcgagaatcttgagggtggaagtaaatcgatggccttgaatggaccagtctgcattgttgagttcagcacaacaagacagcttagagccattagccacttggaccagtaacggctgacagctgaccggcagcagtgggacatgaggtacgatggacgaactgatgaaggaaatggagctgccggaatccaacagaataagaacagatagtcccccgatctctcccacaaacctcatagacttggactgacggtcatccctggacaaggactgacataagtgtaagcaattcagagtttctgattgatcagcttcagatatggtgtcttcatgtggaaactggaattgctgccacagttcttccaccatgtgtaactgcactgtgtccggacatgtgtgacctcgagaatatgccaagccacacttgtaacaaagacccttagccttcctgtaagcatatactgaagacaaccgatcgggttgagcagttgctggagtcttaacgtcaggacgagtggttgggccccctgttggaggaggaggcaatggcatgggagtcctctgagacgtcttggaataagatctggggtcgaatttgctgaattcccttggcttgtgtgtcaccccaatttcatcctgcaattgggcaagaacataggcagtatccagatctttgggacgttgaatcataacaacagacttaatatcgtggcg

SEQ ID NO: 3825 - DNA, 389 bp, Zea Mays
ggagtagaatgaaagacgttgttgccgatatgcatggaagctatttggaggatacaggagatttaagctaaacaaagatcgagagataagaatattaagaatgctgacagtaatactgcctattttccagaccgttgctaatcaaatggataggaaaaggagaataacaagtttagaaggacctgatatataaggttggttagaggacgataaattcatgcttgagcatgccgtatatttttataagaacttgtttggacaagaaccggatattgagcttaggttgagggtagatttttttggggggttatagtgagaaggttacctccgtgaagaatgagttcttacagtagcttttgcaaaggaggtgaaagggaaatgacctttac

SEQ ID NO: 3826 - DNA, 744 bp, Zea Mays
gtacaagagggacctccagaggctgtgcgccagggagctggaggcatttcgaagggagaagaaggtggccaggagggaggaggccgtgacccagcgggaggccctcacaacagagtatcaggctaagctgagcaccctggaccagactctggaagcccagcgggcccaacaggtcaaggctatggagaggttgcaaaagtggcaacaagagctcgagggcaaggccagcgacgccgtcctcgccgaggagaaccttaaggcgaaggagcagtccttggacaggcgagagacggacctcgccaggcgagagacagatctcgccttcagggaagaaatgctcacctagcgatgcgagttgctggccgagcatgagctcgaagccgaggagaaggagaggaggctggaggagcagatctgctagttcaatgcagcgcaggcggcaccgggtccccaggcggtggaggccaccaggaaggctcttgaagatctccaagcatagcaccgcgccggggtccagcgcattgccgtgtgggccggcgaggcaagcacgacactggtgccgctagggatgagccccatcctagtgttagagctacctgcgtcgatctccgatgcgctccctgtgctagactccgccgctgatcacctccgatgcttggatcagatccttggtgcctgcctggaggcagagggcagcaagctctaccgggcggtggttgattacgtcctgacgtgcttccggag

SEQ ID NO: 3827 - DNA, 965 bp, Zea Mays
ctgcgggttcatataacaaaagggcaggggctcttatgtaattatgctcggccgaaggggtacggggtgatatcggccgtttgatccaaaatctgcgcgccagattagacttcatgctagttattcatccgcgctcaaccatggccgtcggatccgggatttgcggttctggtttaatgactcgaaggggtacgcccagattcggtctaggccattcctttcatgatcaacggtctagggccaactcaccctagatctaatcctagctctacagcgattgatcaacggtcttggggcttcttcctccccatgaccccggacggctgcgtcacgaactggggaaacgtctagctcgcgtgtaggttgactaaccgcccaggagtatggatcggagcgtggatagaacctatgcagtaaggatgaaatgttgaattacatggatgtcttcttaccaagttcgaagcacaagtacagttgcccacggaggcttgcggcgtgatggcgattcctcaacaccgcccgcgaagctcccgatttctgacttggcgaatacgtgaatgagtcttcgcgcggtacggggtgatatcgcagcttgacaacgcccgcaagtcgttggagaacccggctcccaccgcacgacagagacgacgctcacaccctcactcacgacggcggtgaaacacggtggcacatgcacgaatggcttatctgctggcaaccgggacggcgatttctagggacgagggttttgtagggtgagggaaggcggggtttgcggcaagcggttgaagcccgcttccatctccagagagaaatacaagcgcaattacggaatgggacccacatgttattggtggaggcaccgtagagatgagatcatccgtgacctcagcgtgacgtcaccgcccaggatatattaaagaattccggcggccgaaaaagaatctgtacgcgcgggatgggcc

SEQ ID NO: 3828 - DNA, 463 bp, Zea Mays
aagaaacccagggtttcttatgctaaagtgccagaccgaaggagtatcggccgattacagtcgtccgatctgaaacgaggcgcctagattagatccgtgacaacgcgaatcggtacgcaatcacaaccgctggatcgactacctacgtccaagattcaaaatgaccttgatttcccctcgcctgcatgatttctaccctgcggtccagatctactagcgcgaaggcgtatccttggcctaatctcgtccattcaaccatgatcgagccgctcaggttcgtcttcttcctttcccccacgaaacggcggcgcgagtccgatacacgacagcgccctgaccggtgcaagccagtacgactctcaggcgagctaacaagtccatagttcgccccaaaacaaggcgaagattattacgaacacgtgggaaacggtttcgccaaccgccacgcagttggacacccccg

SEQ ID NO: 3829 - DNA, 461 bp, Zea Mays
acacagtcggaggatatttagacaaccacaacaacaacaagctgagatggatcctccaaatcctccaccagccggagctgacccagcagttgcagcccagatgcggataatgcaacagatggcggatactatggcagatatgcacgctcagatgtggcaggaatgccaagagatgcgccaagatagggaggagatgcgccaggaaaggaggggacaacaacaacaagcaccattgccaccaccgccaccaccacttccaccccgggacaagcaccaggaatttatgagccacaatccgcctaccttcgccagcttaccagatccactacatgctgatgattggttgaagtcaatagagaagatgctaaacattgcccaatgctctgactgggagaatgttctatatgcttctggtcgtctgactggtcctgctgctgactggtgggattcttatgttgctg

SEQ ID NO: 3830 - DNA, 1601 bp, Zea Mays
tccaccactacccttagacctagcccaagtcctagccaatcaaacccgactcatcgaggtcctcactcgaagtctggaaaatcaacggccaaatggtggaagaccgcaagacagaatgggggatttccagagactcaaacctcccacgttcgtcggatcaagcaaccccctcgatgcagacgattggatgcgcacgatcaaaagaaagctggaagccattggttgcccagaaaaccagcgtgttcaactggctgcccaccaactttccgggatggccttagcctggtgggacaccttcaacttcaccatcagagatgctacctgggcggaatttgaagcagctttccaggagcaccatgtgccccaaggacttgtacagcttaaggaggacgagttccgagaactgactcaaggcggaagatctgtcagcgaatatgtgcacaagttcacagagttagcccgctacgcgccagaggacgtcagtaccgagggcaagaagatggcccgtttcctgaagggactcaggcccgaactcaagacaattctggctagccaagacttcctcagtttctctcacctttccaacaaggccatgcaagatgaaagggcaaaggaggaagaaaaggggcatctcaaaagaaagttccaggttctccgggcacaacagcaggaccggcaccaaaagactcgatcatttgggtttccacccaaggggccaaacttcagtagaccagctggacccaccccatcgcggttcagccagcagagtcagagctctttccattctccctcagtggcatgcaaccaacccccggcgaatgcatgttggcactgcagtgaacccagtcacttcaagaacaactgtccgcaactgaagccaccaggacccgcctactccaactcggtgaatggccccaagaatacctcggcatccgcccccaaggcgccctcctccgtcagccagcagaacaagaccccgtacctaggaagggcacgagtgaatcacgtcgatgcccaggaggctcagcaagctccgggagtagtgctcggtgagttccttgttgaatttactcctgctaccgtacttttcgattctggagcatcccactctttcatagccactagttttgtggaaaagcatggcattccctctactcctctagagattcccttggtcactcgaaccccagggtccgaccttctatgccagctcaaatgctcccaagtcagaatccttttaagtggggtagtattcttggcagacttaaccgtcttgccatccaaaggaattgatgtgatcctagggatggattggctaactaaacacaaaggcataatcagttgcgcagacaagacagtcctcctcaccgaccaacagggaaagtcagtctcttgtcaggcacagccacccgccagtgacccaatgatgttcaatctagcaacagaaagtatatcagtggtagaagaattcatggatgtgtttccagaagaattaccaggaatgccaccagaaagagaagtggagttctacatagatctgatccctggaacggcacccatcgcaaagagaccataccgcatggctccaaccgagttagcag

SEQ ID NO: 3831 - DNA, 907 bp, Zea Mays
cggagggtggccaggccactgaagtctggaggtgataccgtaatccacaaatggtttagtgggcctcggtcctactactagtttggcccatggaaggggtagtgggccgaaggcgtattgtggattctagttagctcttgcacttggactgttcccgtgctcacaaatgtaggattaattttgtattttgccaagtaccgatgattggggattgggtagaacacgttttggttaactcgaaggcgtattgtagggtgtatttggtttgtagggactagtttttagtctctaaattgtcaaatagacaaatattttagtttctgtatttgacaatgtagggactaaaatgaaatacaatatggatacaagatttggaggggaagaggtgttgacggaggaagaggtctcctgtgcttttgtgatgatttgcgtccaccgaaatgagaagcgtgggtattcatggtgtgagactccatattggtcctggcagcaatgcccatattttgttttatcaaaggctagtccatagaagagcttcaagagcattgggggagaagctactttgcagccctagcagaagccaaggagagatggtgctaagtggtctgcgtttcctggcctgggtgcaggagcacgaaggcgcacggtgtccgttgttggttgctctctgtactaggctgtgtcgtactgtcgttgctgcctgtccaacgcccagacacgccaagtagccagcggcagcccaaaataaggagccgtcttgcgtgtggctactggctacacagttttgtttttgttgtttcttttccaaaatctcgaagttgctcactttggcagcaatcaggacaacttttttttattgaggattgccccgaatccacgaccgatcgatcttgcaacgcttccgcgc

SEQ ID NO: 3832 - DNA, 548 bp, Zea Mays
ggctactagcatcttgtgtttccatcgaccctaggtcaagataaaacgatcccctgactctccccccattgcccctctgcctccacccccgcatagactccctagccttagctatagatctttcttgttgagatcgattgcctccccactagtctcatcgccctcattgacgaccggggtgcatatctaccatgtcgtcaccctcgccaccaacaaaagatacctatctcatcaccatccccaactacataacagagcctcgactttcgtaatcaagattgtgtgtgaagttggacatggtgaggcacatgagccttccacttgatctctaatctcttgccattataagtctccataacaacactcatgttcactccattcctatcttgtctttgtgtgctccatgggccacgatgttggaagtgctcatcggcttgagcggtgtcgacattggttttgttgggtacccgattgtggtggacgtaggacaagaattcatgggggccaagaagattgcatgacaaaatcaagcaagaaccataaaaaac

SEQ ID NO: 3833 - DNA, 1128 bp, Zea Mays
gttcttcggctagggagaagaagacgggctcagctcgggttgtggtgcacgacagcgagttgaggaggtgccaggcatcacggtgcggcgtcgggctcgctttatagacggggaaaggcggttcgcctgagaaaaatctcagcagacgactgtgcgcgacgacccgacacagtgtggcggtgtcttcccgaggctggtcggcaacttgcacggagctgggcacgacttcggtggtgattgaggtgagtggctggtcttcgattcggctgagcgcgcaggggcttgccgggctactgctttcactgcttgttgcgtcgtttcaggtcttctcagctcgacaacatggtctcaactcccagaccagcatcatggcgtgtgcgtgtattggttctggtcgggggaggtagaagacaacttgttttacttgagcaaggaagcatgtgggctagccggactgcacgaagaatcatctcaagattagcagtgaggctgcttgcctcggcaactgacttctagaacaaggtcgagttatggcgatggaggttggtgcagcctactggttcacatgaacgtcgagtgggccggagacaaccttacagttcccacacggaagcttcttgccatggatgtgtgtccttatcgtcggggtgtcagtaatggtgagtaggtgctactaccagttgactgtgagttattgaggtacggcttgctcgagaggcttccgaggcaaggaacagatagctagcttatcttctggaatcactgtgtcaaggcgtgtgttgctcctgggaagaggagatagtttgctagcaagtgcaatgttacgaaggtgggatccttgtgcaaaagttgcattggagtagagtgttgacgttagtacttgagatggattaatttatagctagcgagaaaggaggtgaaatacttgtaaatagtttgcctagtcacttgtttactaacatcatgcgtgtaaaagttaatatatcaggatgattgcgaaataaaacaagattttacttagcggcgaaaatcagggtgttacaaacctaccccacttaggtcaaatctcgtcctcgagattcggctaattactaaagagattagggaactcggctcgtaatgcgtctt

SEQ ID NO: 3834 - DNA, 544 bp, Zea Mays
ccttggcacctttcttgaccagccgcgaatctagcacttcttcaggcacctgcaactcatgtgacatgtcaggcaaatcggcgcttacggttatatgcttgccgagaactggtttcaattgtgaaacgtgaaagatgggatgaactgtgctgcccggagggagttgcaactcataagccacccgattcaccttcttgatttcgaaaggcccaaaatatcgaaatgacaacttttggttcatccttttcagtaaccgattgttgacagtagggttgaagcttcaggaacacatgatcacccacttcaaaattttgctccattcgcttcttatcaacttgcttcttcatctggtcttgggccctttgtaaatgcattctcacctgctgaagtacctattgtctggtctgaatcaagtcctgtaggtcaggtactgaacactggtccaccgatatcagtctcaactgtgaaggagcatgtccataaaggatttcaaatggtgactttgccagtgctgtgtgatagcacatgttataccaaaactccg

SEQ ID NO: 3835 - DNA, 400 bp, Zea Mays
caaagcttaggcccccaaaaaccagtgatgttgtgtcgcagtgtcccatcgtcaatcggcattctccccgctgcactgccactgttcccttgcccttgcccgcagggaagagcgacggagcagctgctttcctctttccacgtctccctacacctcattgcctcatcataaaatcccctcgctcccgcactctcagctcccacctcaccacaccacgccacactcgcctcgtgccctcgtcctcacacagtcacagtcctcccccggcagcggctctccgctgccaaccaactccaccaacaccccccacaacagcaggagaaaaaaagggacgagccatggccatggactcttcctcctccggctccgagcccacgtcctcgtcctctgctgaggctcc

SEQ ID NO: 3836 - DNA, 1239 bp, Zea Mays
cgccagtaacgtcaggttcgggtgcatgcggcggcggctactcgcattgccgccgtttcgcccgtgggggtggtgcggggggcggccggcggattcggtgccttcctttacgtccttgtccggggatgtacgtgtccacggctgttgccgctcgtggacttggatgcccattgtgtgattccaatcgcgttgacctgtccgtgtgggatgtttattccgatgcgcctctttgtttgccctggcggtgtggccgcttttggttgatggaggccacagtatgttgattttgtctggtgtacagatttaccagagggtttaagtttgttagtggagtgtacttcttaccttccattgtcgcagaggctctgcaagtagaaggttcctaacaccagctaataataatatatgctgggggctactgtagcagttcgtgaaatttggatgtccattgggtgattcacaccgcattgacctggctgtgtgggttttattcgcacgcactgctttgttaccttggtagtgtgtttgctttaggttgggcgcaacattgcgttgatttcatttgttatacatatttacagacggtttgagtttcttaggagagtgtatttcttgccttccattcttgttgtctataagtagaggctgcgcaagtagaatgtacccaatcttgctaataattttgtgtggaacacatttatagctccataaaacatgcctcatatgtggtgccagaatctgaattatgtagaagtgccatgcaggtctattagaaatggtcagctacaaaaggcctatatatactgggaaattataagtagagttgttatattttgtaccgagtgcttaattcgttttctgtttatggaatatatttgcgcgctttccttttttatgcccctatgttacttttttcttctgtgaaacataatatgttagctaagttgttagtcacggtgtcacccctagactactctcatgcttaactgagccttaataaaaattgtttttgctaagatatttgttatcatgtaaaaaccattgtggcatgtaaccggcatacttaagcatggtatacatattacatatataacacctgtaaatgtgcattggcaaacaaaagaagcttgattacacatggttctgttccaacacttttttgtttgtttatcagtttcaaggattatgttggaatgactaccatatagtctttgcatccagtatatcttttccttggat

SEQ ID NO: 3837 - DNA, 528 bp, Zea Mays
cagtgatgattcggtcgtttgttcggttcttgtctgagctgttgccaatcattagcgggcgaacgggagtgttccggcggagattgcgcagcccttttttccagctaatttcccatgcccgtagcggcggggaatagataggactatacagctcatctataatctattgcggggacagccagtgccaggaaatcattctcggaaggatcctgaagccaaccacgagtagaacagcatgtcgacctccttggcatggcagaggagtatcatcacatcggcttatctttcgaggaccgttccttccgatgagatgcggcaggcagaggataagcaaagggggtggggccgcaccagaaactgatctttcgaaccgtacgcacgagacggtcggcatccatccttcccaggatccggatcatgccatccccatatccgcgagacgtcaggcacagcccaaggtcgtctgccgcacgacgacaaacccgcagtgtcggcaaggctggtagtcactctagtacgagtgatcac

SEQ ID NO: 3838 - DNA, 659 bp, Zea Mays
gcaggcacaggcgtccaggtccaaccgtccacgggcacgtaggcacagtggcaggagcaggccgatcaggcaatcaccgatcgccaacgagggggcgggcaggtgctaggcggaggcggcgagatcgtgatccaacttctagtccaagagagttgcacagggtttatgtaattgagttcgatacgtagacacagtcatctagtcaaaaggctgacgagcaaggcagaggcctatgtttttgagtgtgggggcccatttctttgggggggcggtgccgttgcacccccagcaccccctaggtccggccttgcctgcactcgtgcccccaacacaaaagggtcattgccggcatgcccacccagccttagccccttaccgtcgacgctcgccttgcactgtgtccgcaccacgccgtgcacactatcgtcatttgctgcatgccagaaccacacatgtccatttaccccctagacatcgctcatccaccccctacgtatgcgcgttcgctatctccccgccccgctgttgctcgcgtcacgtcatcacgtgtgtcatcatgcatcattcacgcttgtcacacgtgttattcgcacattgttctcgtgttttcgcgcgcactattttcgtacgtcgcgtgccttgccgcacgtcgttaaccc

SEQ ID NO: 3839 - DNA, 520 bp, Zea Mays
ttgtaccgtgtggttgtagaggaggaagataaatcacaatctgttgcttctgggtgcttgatgaagttcagagctgtccaatcatgaatcattaagtaacgtgttgtgtccattgccatgacaagcttgcattcttctatttcaagtgttccttctgtgctttcccagaagaatggcctatatgttatgtgacattgtcaatttaagttagagaagatactaaaatttgaacacttatgtttcaaattttacctgatgtgcattccgacttggatttgcctaggttcttaatacctgagttagtaccaagccagtgaatgtgtttctcgacagggaaacaagtgctagctctcaaatatgaatattgtagtgttaggcatggaatggttaggagcatgctactatatgattttaatgaggagtcctggtttcatggatggatattatttgtaataattcagtgcactgttagatttgcactagattgcaaaagcgaaaccaaagttgagccttagcagta

SEQ ID NO: 3840 - DNA, 650 bp, Zea Mays
atgataagtaaatgggcataaatcgcatttatatatgtgtgggcgagctatagacgtcatgtaacctgaaggaacaataaagttttcatcagacagacaactctcgatccatccatcagcggccagcagcatcagtagtacgtgcctggtgaccagctaatgcgatatgtcccatatgcgtgacatatgatgaatgaaagaggccggtagctactggtgcatatgcaaagtatatggcctgccggccaatgagaccatgttgttgcaggcatgcagcaatgcatgtacctactcatgtgtgcacaaacagtggcagacacagacaggtttttagacacggtagcactggccggcactgaatcgattcaattctccaattgtcgtcgcggtaaaaactagctagctccactgggttctgctacctacctaacagcacgtactgcttcttctctggagcacccactaagcatgaatgcattgtctgtttggaactagtagctagctagctgcaaactgaatccatgtaaatgccctgacagtataaattaaaggccagagctgtagtgcttaacttggaggctgcatgcagatgcaagtagatactgtgttccctgcaatgcttgctactacctgcagggtttattaattcg

SEQ ID NO: 3841 - DNA, 348 bp, Zea Mays
gcataggaggcggaggcggaggaggaaccccaaaatcatcatcatcatcatcatcatcatcagcggctgtaccctgagtgtcaaactgtcgaagagctgcatcctcggcctgagagtcaaacacagaagcagaagctggcactggaatctcaggagcaggacggtaagatccaaatacaaggcgtgaggcctcaagagtgctctgaaattgaggtggctgaatcagctgcacaaagatgtggcacaagtagtgagcataaggtagctgccgacgagcacgaatcccatccagaacggtgtcctcgatctcacagatcagaaagtccacaacatcaaactcagagtggg

SEQ ID NO: 3842 - DNA, 443 bp, Zea Mays
gacgccgtcgcacgccagagtcctcgcctgccccaggcccattgtcgagcagggagtcgcgccccatcatcaccgtcacgcccatcaacatcgtcgggcccaaagctacctacgtcaagcccatctcacgccgaggtgagaacattgtctacccgtcgtcgtctacccctaaacgtctaccaactcccgcgcctcgcctttgcgtcgtgccttcgcatgaaatctgaaattattaactaagcattagctttcgcattatgtatttgttttgatctatttgtgtggcgttaacttcataataatggtgtatacacgttaaacatgttattttgtcatgatgtatgtttgttttatttacttaattgtcagtctatccgttggttattagcgtagcaatgtagtcaaaactagtttatgattttaagttgcgcgtctagtaaaat

SEQ ID NO: 3843 - DNA, 831 bp, Zea Mays
ctgcccctcgcggtgacttttgtgtcggtcgaatgtcgaagaccgttgatgcggtctttttcgacgtagtttttgcgggggatttttcgcgtgtatattacatggctctgcctcgttaaaaacctcaccccccgggaggaaaagagtgcgggccagcttaaaactgttctgtggattacaagggcgaagtggccctgaggagttagacaaaaaatttgcgaagattatcaatgttccaagaatgttctaagtcttcgtcggatggcgttgtgagcctgtacgcgctgggggacgccttcgtcttgacaatgaaagggccctcccatttcggctccaacttgccccgggactctgtccgagctgtccggacgagtacgaggtctccttcgttgaactccctcgggatgactgtgtggtcgcgccatgcttttgtctgaacttggtatttgtttagagcctgtagcgcgaagacgcggtctccgtcgatgaggtccttcgaagtaggctcgtctacgtcggggacggccgacgcgactgtccgaggtgatccgtgttttatttcttgcgaagtcatagcctccgatccgtatagaaggcggaaaggggtgaacccagtcgccctgcactcagtcatgttcagcgcccagaccacttcgggtaacaggtcgggccacttgccttttttgtcgtcgaggagcattttcttgacggctgtgaaaattttgccgttggcacgttccacgactccgttggattgggggtggtacactgaggcgaaggcaagcttggtgccgatggagaagcagaaatccttgaagtcttggctgtcga

SEQ ID NO: 3844 - DNA, 527 bp, Zea Mays
cgacgcctggggcccactagccagtcacctaatcctgcgccatgtggattccagctgaaataccgggccaccagtcaggttctagccgcgcgcgtgcttgactcggtgtcactgccgggtgggacctcatccctgctcatcttctatccgcgcgatgagtttgcccacctcctcaacgaactccgagatccagccgattgtgccggacacgcatggagaccgtcccctccttgggcaccagagtataagatgaaagcacctatcgcgccctctggtactaccacaaattccctcgccacaccggaaaggacggattaatcgcgcacttaggccggcagaaccgcggcttgggtcgaccgccgccatcgttgggactcctctgtagctgccctgggctgtggatcggcttcgcgagggcggcgcgtgtggacctaccggtagctgggacggccgggcaactcctcggtaagaaaaccacctcgcacctgcttggcatgccatcattagcgaggcatgtatagccatag

SEQ ID NO: 3845 - DNA, 594 bp, Zea Mays
atccacagttttgctatgctggtcaccaagctgctggccaacaggttgggtccccgtcttcatgagttggtggcagccaatcagagcgcttttgtgagagggagatcaattcatgataactttatgctggttcagcagtctattaagtcgctacacaagagaaaggttacgggtctattcttaaaattagatatctccagggcgttcgattccgtgtcatgggccttcattattgaaattcttatccatcttggctttggtccaatctggtggaatcttatttcctccctaatgttcatgtattctacgcaagtacttcttaatggctcgcctggtgatcgtattgctcatcggcgaggccttcgtcagggtgatcccctttctcctatgctgtttgtgatggttatggacgttcttaatagtctgttcagggaatctgaaagcagggggctgttacaagggttggaggaagctggggtccggaataggctctcgatctacgctgatgatgtggtgctttttgttaaacctttggtggatgatctgaattgtgatagattgattttggattgctttggtgaagcaacggggctg

SEQ ID NO: 3846 - DNA, 672 bp, Zea Mays
acatctgtgtcctcctcgggcacgaacggtgaacggtggtgcgccaatttctcgccggaatcctggcgcctccgcgaacgggtcctgcgccatgggtaggcttcgcccatgcctcaaatcccggtaaatcacgctgatgttgttcactagggcgtctgcgtttagttgtttttgtgggtgattcggaatgctagggtgccgtttggccatgccgccgacaatacgccgcggtggcgcctgtgcgccatggtggttcgagtagcttggggggagagagtgaggtgatgggcggctggtgaccgttgatcttgtgactgacggccagtagtcgatcctgaataccgtttgagcagggtgaatggtggtcgtcaatctttgatcgggtgggtctgtgatggcaccaaccattttgaatcctaaccgtgaatccaagatccgatggtttgcgtcacgtaccagttttctggggcgaggttatgatctgggtcgtcgatgcctgattgtgtggcccaagacgtacgcgcgttattcggaccgaagcaaaattgttaaagagcccctctattttggaagaattgacccgccatccacccagttcatggaagataatagtggggccctcggtttttacaaaacagcccttggtatttgcaaataggtccctggttggag

SEQ ID NO: 3847 - DNA, 570 bp, Zea Mays
gaatcaacgcgcttactcgactcagggtgaccactataccctactaacggagcaatcggcttaagtcggcgacgacttaagacggtgcaacatgctcacgcttactcgacttagggtgaccactataccctactaatggagcaatcggcttaagtcagcgacaacttaagatggtgcaacatgctcacgcttactcgacttagggtgaccactataccctactaacggagcaatcgtcttaagtcgacgacgacttaagacggtgcaacatgctcacgcttacttgacatagggtgaccactataccctactaacggagcaatcgacttaagtcggcgatgacttaggacggtgcaacatgctcacgcttatttgacttagggtgaccactataccctactaacggagcaatcggcctaagtcggcgatgacttaagacggtgcaacatgctcgcacttacttgacttagggtgactactataccctactaacggagcaataaccttaggtcggcaacgacctaagacgatgctacatgtccacgctaactcgtcttaggggaaccacta

SEQ ID NO: 3848 - DNA, 428 bp, Zea Mays
cttccccatagcatttcctttaggctgagctgatttcccagatccttgtgaagcattagattgattttgcctaggatatgggcagtctttgataaaatgtcccgacttgccgcaattaaagcacccagttgaagaactaggcaaggcaggaaatcgagtgcctggggcacccggctgttttggggtagtgggggtattgtgggggcggataatgattggctgtttaaagggaaatgagggtggacgagaaaaagtgcgattttggtttgaaggtcggatcacaaaccgttgcttcttcgcctggccctgattgggcctctcaccaccgaatcccttgttcttcccagaagttgtgtatttggcttccacagataaggctgtgctgacagcctttccatacgtgagatctatgcatgtggccattttcc

SEQ ID NO: 3849 - DNA, 515 bp, Zea Mays
cagccatagtgcatgccctgaagatatggaggcattacctaattgggaacaaatgtcacatcttcatcgatcacaagagtctgaggtatatcttcactcaaccagatctcaacctccatcaaagaagatggatggaactgatcaaagattatgaccttgagattcattatcaccccggtaaggccaacgtggtagcagacggccttagccgaaaacctttcaggataaagggaaccaactttttcgaagattggaagaaggaatcagctcaactgaatgcatgtttgggaaacaacgacagcctcaaagtcaaaccaatgctagaagacctcatatgcaaagctcaacgcctagactcagagacaacaagacttgtggaaaaagctcgcaaagaacaacttccggacctcaggacagatgaacaaggagccctttggttcaagaatcgtgtgtaccaaaagaggtggcacgggaagtcctgctcgaggaagctcacaactcagcctactccatcc

SEQ ID NO: 3850 - DNA, 530 bp, Zea Mays
gaaggtgtctctactctctactctctagcactgtgtatgacagacagtggactaagaaatgattcacctttttctaatctaaagaaaagtcatactcatagtttataaaactaaaccatacaagccactcgacagtgttggctaggattgctctaatcacacaagccagttaacaagtagtggcaggagtgttgattcactggaagtaagctaaacctaaagctgcattaaaatgatcacattaaacttattcacatagccaacaaagccattaaaccccaataaactggcagtttctttgcacaccaattaaactggcagttttcttgcacacctctggatgactcaggctttatctatgtttttcataatcataaatactggatgtctaggaatgctttccttggagtaaatgtaaaaaacaaattgctagtacttcaaagacacaactaaaccactgtgatgcatcaatgctactttgtggtagaattattctgaattccaatgtttatacttctaaatgggcttga

SEQ ID NO: 3851 - DNA, 627 bp, Zea Mays
cgagttcagcaacaagaacgtcaccagagagctcgaccctttgggcttccacccaggggaccaagcttcaataaaccatctggacccaccccatcgtgctacagtcagcagagtcagagctcccttcaggcaccctccgttgcaagcaaccaaccgccagcaaacgcctgttggcactgcggagaccctagtcacttcaaaaacaactgccctcagttgaaggcactcggaccgacctactccaactcggtgaatggccccaagattccctcgacacctacctccaaggcacctccttccaacagccagcaagcaggactcagtaccagggcagggcccgagtcaaccacgtcgacgctcaagaagcccagcaagccccgggagtagtgctcgatgagttccttgttgaatttactcccgctactaagctttttgattccggagcatcccattcttttatagccgctaagtttgtggaaaaacatggcattccctctacacccctagctgtccccttggtcacccgaaccccatgatcagacctcctgtgcaaactcaggtgctctcaagtcagaattcttctaagtggggtagtgttcctggcagacttaaccatcttgccgtccc

SEQ ID NO: 3852 - DNA, 1120 bp, Zea Mays
tgcgagagtgtggaatgtaccagactttaatcgcagagcaaaagtccaaagaaagtgagagaagtcattcagaatgactaggtagtatttgtaactagagaggttgaagacaggagatgtccagagatcacaatgaacaagatgaaatgcctgagcagctctggatgtggaagtagaaaagggaagacgcgaatggcggctgagctgacatgcatgacaaaggttctaagaggggcccttggtccaagatatatttgagctactggagagtttggacatgacgtcaggtccaggatgaccaagacgacgatgtcaaatggtggaggtggtggtagtagccagagcatgaggggaggacacgtcggtggggcaagcagatggctggagcgtgtccagggcataggctagggcaacacaagaggagggaggtgggtcaagacaagagatagagtatagtggaacggagatgtcatatcgagcgagcacgacatgggtggtatagtgtcgtatagggagtccctagagatcgaactacataggacaacagttgtcagtagtgaagggacgaaccaagagaaggggttgaatcatatgaggggcaacaaggacgtcgttaaggtagaacaatcccggaaaaaccgaatcaactactgaggtgactaagagggtggaaccgttccccacaaagatcgaggaaaggatgagaggggtagggaggcgccggagtcgaccacccaatcggtgggaggagggggtggcgaagacatagggtgcgagaagagagccacgagatgtgcccctatagagccactagaaggtgggggagacaacaaggtctcgatcgttagggaggcaatcgtagcattggggaaaacaagcggcccaggagcatggtgacccgcctgggggtggagcgcgacgcaatcacggagaacagggttcatggcccgatcaaatgccatgaatgtgctctagagaaactagccgtcgtgaagggagacacgtgcacagtagggaggcatgggaaccgcaacggaggtaggggtccctagaagtgagaggtggggcgaagcaggaggtgccgagggcggtgggacacaataggatggcatcgtcagaa

SEQ ID NO: 3853 - DNA, 337 bp, Zea Mays
ctgatatattcaaggaacgagcaggagcatactaaacacttgcatacagtacttcagagattgcgcgatcatcatttatatgctaagttgtccaaatgtgatttctggctgaagaaaataaaatttttgggtcacaccatttctcaggatggggtatcagttgatcctgagaaagtgcaagaagtgatggattggaagccccctaccactgtacggcagattcagtgttttctgggattggcaggatattatcagcgattcattctggatttatccaggattgcaaagccaatgactgaattgttgaagaaaggagtaaagtatgaatggagtcaga

SEQ ID NO: 3854 - DNA, 776 bp, Zea Mays
gtagccggcgggggaccaaaggcttcaaaaccctagccgcccggaggttctctggtcgcagataccggccgcagtggagagaagcggagagagagagggagaaaagtaccaccaccacaattcaccaacacagttggcgttcggggctagatttcaggccctaggtgctcatcggtgctggtagggctgatgctcggaattatcccagtcggtgtgggggagcgcgatcgccagattgttcatgcccgattatcatccgccacgaaagccgcgcctcgacgaaattggacaatttggtggcaaaatctctggtatggcgacccctgtccagttcgcttttgctccctccgtgcgtagcggttatctgtagggtaagaaactcaccggggcggcgttggagcgtactccgacgtcaccaccatcacgcggagagctctgctcgccgtggctcgccgtcgggaggatgatgacagcgggtggccgttggattaaaatgaacggttgtgatcaattgctacgtcgcgattcagctggatcgtttgggaccatggatcataggatagagggacgagattagaccggggatgtaacccttcagtcattggatctgggccgtcgatcttgcatcggacggatcaagtttcttaccggttcgtagtggccggaattctaatctgggcccttgggtctggatcggtcggctcttgtgacccgataccccttcgtggcctcaactttactaaagaacccctggcttttgcactactcaacccgtg

SEQ ID NO: 3855 - DNA, 392 bp, Zea Mays
agccaacaaaagtgcatttttgagctctaggtactaccttcccattgttaacatgagcataagcaggacaaccaaagattctaaaattagaataatcaactggttatctatccatacctcttctggaatcttaaaatcaatagctgaattcggagagcgattaatgaaataacaggcgacagatgcagcttctgcccacaaaccatgcttatcccataaaccagcattagaaagcatgcaacgaacacgctacagaatagtacgattcatcctttcagtaacaccattctgctggggagtacctggaacagtcttgtgtctagcaataccatgatcagcacaaagagaattaaactcactattgcaaaattctaattcattgtcggttctca

SEQ ID NO: 3856 - DNA, 342 bp, Zea Mays
agaaaacctatgcccgtcactgcttcgtcgaccattttgtgttgtgataatgtgagtgatgtatatttgacagtcaatccatcacatcactgtcacatgaagcataatgaggtttacatacttcgtccgcgagaaggtcaccttgggccaagttcgggtgatccacatgtcgtcctctcaccaattcactgacatcataaccaagggcttttatgttcaattgtttactaattttcggtctagtctttgtggccgtgattcttcttctgcgattgtagacgggtgttagagattgtataggatagtatctaggcatatcttttagatttgtaagtgccttgt

SEQ ID NO: 3857 - DNA, 545 bp, Zea Mays
caggtctctagtgccaataaaagtgcacacaatgttgaagcttctctggcatgcctctatattgtttccaagagcggtggctggcctcctgatgccgaagcgagaccaaatgggacgttgaataattccttttgtatcttctctctcaatcaaattattcttaacgtagaaccattcttccatctaggccccgggccacctttttcggaatgttgggaccgggtaactcacatcggcgcggggcacgaagccataacaaccaaaattgttgtgatactgctccttgccagtagccttcgtcttgtacagtagctcgtgcatattgtagaagcattttgcgcttggctccatcccttggcttctcacgcccaaataagaacccccatcctaataatggcttcgggagtaatttgatgcaggaaaatcttgaaggccttcagcaccttagccaggaatttgctcaatgggaaccgaagcccggccttcataaaactcctataaacaaccacctcatcctcttcgtgagcaggtgcagcactatctcc

SEQ ID NO: 3858 - DNA, 846 bp, Zea Mays
acaagaatcgctaacatcagcacatcatgtatttagtcacctgagaaacataaaccttgtagtcgagtagcatctggggcatcttcttcatatgatctaggtcattcaaagcgggctgctagcttctgctacccaacgattgcatgtggcgcatagtgcagacgctagagccgggcgcggttgatggtccaccagtgggaggaggggagcaggaggacgacacgtagagtcgtcagccgatgtgcggatgaccagaggcataggcgtgaggcgattggcgagacaagtgtgagagagccactgaggcagacatggagtctaggactgccctgccattgctgagcgcccaagtatcagtgtcgccgtcattgcgtgtcgagggtgactcagggaagaagcggaagctagtgaggatctaggatgacaatagtgatgtgggatgaagacactatgctccaggaactccttggaaggtccgagcggtgggggagactatcgtcgcctcgagcgttgcccgaataccattcgttgccaacctcggcatgaacgcgggagacagagcgaagttggcgaccgcttggtagagcccaacttcatctggagggagagagaagcctaccgcgatttggcatgcaccatatggggcaccgctgtggcgtgtagcgtgctcctgtagccgctaaagaagtgatggggacacctcgcagtaccgctgcaggtagccttaggttgtctccaacaagagactgtaaacatcatgtaccctaaatatagaggttttacatgtctagtatagctccaacaagaaacgctaaaacttctgctaaaatatagcatgcattcctg

SEQ ID NO: 3859 - DNA, 1597 bp, Zea Mays
agggaaagtcttgcgaagaaagaatggaatagccaataatgataatgaatttttgctcctccaagagtgtggtaaagcaccttggcttgttttcaagttggaaagtcaagccacgtcaccttgtcatcgactagtcgttcaaatgtccaatcatgattagacaatgactagccataatttatcgatgagtacaaatatggagagcacatcttcactttgggggaaaggttacttggagatggttttgaagcatagccactagtgacaattacaacacattgtctatacatagttgactccgagattgggaaagagaaaactttgacgctcaaatcattgcaaggacattctgctaagtcagtgtcacccaatgcctaattgaaaccagatgacaatcaagcatcttagctggcctctcaagttgcttcacaaatacttttccgatgtctaatcgctaacaaatgaacgattagaagggtctcggtaaggtcttgtttcttttgcctagctatccaaaaccagtctagatagaagaagagaacattggaagtgcacttgtgactcatccaatcactagcctgacgaagtaaccgaatatagacaaaaatacataaaccctgacggtatggttggttagagggaataggagtttagaaatatagatgtagaaatttctcgtctatttttatggcagcgggagggactataagggcatgtccaacatcgtggttttgtcgcctatttaggtaaaatgaaccacaattacattgttgaatgaggagagagaacacatgtcattgtgtcatgaggcgacaagcctaacttgtgctctctgagacctagagtaggcaacgacttccaccaaacatgtgcgagcaagcatcattcgtgcaagattgagtgcaagcgcaagaatagttgcagattgttttccccttcgcgaaaccttctatgtatacacatgcttcaccaatggcaacccttgtcaatacaaaaggcgcaaggttgtggacgcaagcatatatggcgatgacgatgctaacacgagtagatataagggcgcgaggtgacatatctacccttagtgttacaaggaacgggttctatgggactagctcccaccaatcacttcccttaccagagagaagtcggatgcatccatgtcgttaatcgtgattagatacatggcccgcccatcgattgctaaatgcaccgcaaggcccaccaataccaattattgtgtttggttgccaaaggaattacataatagcaatcgcatgaaaacactagatcatgattgattgcaaaataaatggaaattgtcatcgatttacacatctagatgtccaccgtattatgcaatatgtccatcttccgttcgtcggctcctctctggtcatcgtcgttgtcatcgtggttgggaccacgatcattgttgggtctagttcatggaaccaaatgagaccaaagcttccttcgtcccatattgctccacctcttcttaactgccacttctcaactatgagaacaaagatgagaatgtgatggatcttgatgagaaagatgatgtcaataaaggatctcaacataatcaact

SEQ ID NO: 3860 - DNA, 381 bp, Zea Mays
gacgaagaagaagaagaagaagcctacgttgatgatcgcgagcagtttgccccgcctccctaccatggggatctgggtcaatcatcctctcaccctccgcctccctactcgggtcagggacccactcccggtgaccctaggccgtccggctctggtcactatcctcctccctacccgggtccgggacccattcctggtgacccgcggccatccggctctggttaccatcatcaccctccacctcctcctcatcatcgtacatctttggcatctggtttttctgcgggtgatgagccccctagggactcctcactcgaggaagacgtgatgaggaccttcttccctgactacacatcataccctccatcataacctccgtcc

SEQ ID NO: 3861 - DNA, 711 bp, Zea Mays
gtggtgatccgagtacgtgctgcttgtgatacgtgtagtatccagggtggtgcccctctgcctgtgttcatggtttagatcagctagtttgcccctgctccagtttctatgggtgctcgttggattgtttccgttccgtcgctgtgtcttgttgttcccttttcgacatgatttgtctctcccgacggatgtcctgcgccacttcgataccccacctcgtagcttccaagtgaatcaccatggatctgatttgctctagcagtggctcttctttctttcttggtcctgttgttcgagggatgcagctaatctgtatccgtcgttctctcaacgccacaaatatcgttgttctctccttactccaacggaaacatctggctcggttgtggttgtcgatgccgggcttggcgtggtgcagcaaggcatggtcgagggtggagatggatgcgagctgacaggagggctgtggctgtggaacccatacgaagggaagaactgaagctgtggctgctggagggagaagctaatcatgtgaggtgcgggtggatttggggtgggcaatcgagcatcgaggttgagatcgtcacgaggacgagggtccattatcattccttggaggtggagcttgtgtccacaagatttctctgactttcgatcttcagcgccacaagtcacttattacaggttacaaatctcacctctgcgctacct

SEQ ID NO: 3862 - DNA, 776 bp, Zea Mays
gtttcttttccctcggacatacgacagacgcaaggatggatcccagacgagacgacgcccagaaggaccgacgaacaggaggagaatgtggaggccggagcaacaccgacaagccaagacttagctaggactccattctgtaacaacctccaccacgaataagagactttagagcctcttctccctctctcgttcgcttataactcctactacgagctttgatcatcaatggttacaggtagcgcaagccgtcgatgattggaagtagggacattatgcccgaaccagtataaatcctgcaacaactgtgcacaccggggatgctttaggtagtctaaacagagggatgctttaggtagtctaatactagttaaggaatcaaataaaacttacacaaaactgtccatcgtgaatatgcataccttagatgaatatttaacttaatagtcttcatctaaacaatggtatatcaaataagtcaagaactaggagcatacattgtgcacctttgaaatttgatgatattattatattaatagggcttggcctatataatagttcaacaattaataaaaaaaatttaaaggcccacaatagatgctaagttagagtaggattagtactacatggtactagagatgtcaattaagaattctccataaggtttggacacaatccccatcccatgaagctgtatccatccccatccctatacacatactcatcccattctggtattgggtccccaatgtatcctcatctccgacaagaaaaac

SEQ ID NO: 3863 - DNA, 532 bp, Zea Mays
attagagtaggactggtacgacaatatttttactttgtttgatacttaaagtcggctgctgcataggttccagcgtatgggcctgcgcaagcagattttagtgatattaggaatgatatatcgttgatgtgccgaagttcgataaggtttagtagcggggagtctgattttgatttgtagtcattgggaagtgaggaattactgagtccattcattaggatggacgatgagtcttcgaaagacgacttagattttttgtggcgttagatttgtctatggtggagtctatagcggcggagtcttcgtctagggtttccccaactgcggcaaggtgcaagagaaggatcggagtgctcaaacggagaatgggagcctttggcgagacgttacaaggcaccagaggctcctgaaggtgtcgccatatgggaatggaggggcctttaccacgggcaggaatgcagtcggaggaggtgactcgccggatcatccttgcgccgacaactggacaacgtttcaaagagggagatctgag

SEQ ID NO: 3864 - DNA, 551 bp, Zea Mays
gccaggagccatgcgcgcagcgcagctgccgcgaccccgatgttccgggaccgctcgccaaaacgttaatgcttttgtttcttcttctctctccctccatacaagctccatgaacgccaccaatggtgccttaaacccgtcggccgccctttattctccctctccccatcgacgtcttctcccctccctctccggtggctatataagccgatgctaaccacacttctcaccttgccccagctacttgtctcacctccattgccgtactctcctctgcgcagtgcatgatttggtcttctctgagttctccactgccagctgctcccatgtcattgtagctcagtccctttcaccggtcatgaacttcctggcacagcctcgctcgcactgctgctcaaggcccccatagttctcttctagtgttgttcaccgcgtacctcagtgctcgctcgcactccccacactctctcactcacccgcgcagcacctcgccagagctccgcctgaacactcaccaacgatcgcgtcgtccccgcccgtcgaaccccgct

SEQ ID NO: 3865 - DNA, 1320 bp, Zea Mays
tggaatttgagatctaaaaggaattctagaatttagaaaagagaagaaatgaatattatgaggagaaaaataagtaaataaaaatatattgttccaaaactagagtttgaaattgtgtaattaactcaagggaggaactcataaccaaatccaaattcaagtttgaattcaaaaaagaaaaggaaaaaaacggatattgggctggaatacctactttcggcccactaagggatatcctctgcgcagcccagccagatcaacgctgacactttgggtccaccatctagccacacactcgcgccccctctcaactcagctcgctgtcgcatggtcctggtttgtcagcgttgtatctcttacgcagcaaccaccgagccgcttccctcgccgccattatcgtgcctctccccaactcggttgaccgttcctatgtgtataaaggcaatgtggcgtggactcgttcgcccctccactattccgcctttcccctacctcgttgagcgccatcgccatgagccgtgagagctgtaattcgtcgctgcaccgaatctatgtgccaccgtcgtccgttgtgctcgacgtcaaattggagccttgcgcgcggccaggcggcttcacccatgtttccggttcgcattggtggcgatagcggagcaggagggtgaccggggcgcgtccaatttatctccgctgtcgcgcattcacggtacgccgtggactgaccaaggcaacgccggacttagggtaatgaccagctctccatgttcgccttcttctcaatttcatttcgcgcctggtatatctaacgattgtgtaccatggagcgtcgtgggcattccagccatggtggctcgccgcggcactctgcgtcgtcaccgaagttcagtcggaggtaggagatatggtcgtgcccgttgatcatcgcgtggacggctatgattagaaataggataccccttcggctgggttagatctgtgacgtcaagcgataaacggagagtctggattgaatcgcggtatgggggtagttgggccgtcggatctaaatccttcgatcgctgttgattaccggttcgtggaagggtggcttctaatctgagccgtagggttgtgatcgggcggtcgggtgcgcgcgataccccttcacgggcgcggttttgcattttgacccctctgtttttatataaccaacctgccatccactagtgttgtgcgctgtatcttgggaaagtttctccgagacccttggactttccagaaattgaagcccagtccagaatgtcataaaactggagaaatttatttatgaatggatttttt

SEQ ID NO: 3866 - DNA, 606 bp, Zea Mays
gtaaatttgcagaagtaaaatgctgtgtgatggttttgaaacttgtttacgggatatagaagtcacccctatatgagtattcataagcatgcgaaatcgcctcaagtcgttgctgacttaaatcgaatgcttttgttagcagggcatagtggtcaccccgagttaagtaagcgcgagcatgttgcaccgtctcaagtcgttgccgacttaagccgattgctccgttagctgggcatagtggtcaccccgagtcaagtaagcgtgagcatgttgcaccgccttaagtcattgccgacttaagccgattgctccgttagcaaggcatagtggtcaccccgagtcaagtaagcgtgagcatgttgcaccgccttaagtcgttgccgacttaagctgattgctccgttagcagggcatagtggtcaccccgagtctagtaagcgtgagcatgttgcaccgccttaagtcgttgctgacttaagccgattgctccgttagctgggcatagtggtcaccctgagtcaagtaagcgtgagcatgttgcactgccttaagtcgttgccgacttaagctgattgctccgttagcagggcatagtggtcaccccga

SEQ ID NO: 3867 - DNA, 416 bp, Zea Mays
gcaggttatgtttagtatttagtctctctaccagagaaagccacgtatatcacccaggataatgtatatcacctaggatagattgttttatttgtttcttactcaaaaatcacccaactaagttacagattttgaggagggagggggctcggagttagtctcatttcataataggtcctatgttgaacatcgcataaacaacttctccatgctacatagtcgagcagaataatacgcaggcaatgacatacacctagttgtcagacaccaacattcataggatgtcggtgtggcatactattccacgggtctgatgaagcatattgtcgagcaggtgttgggcatcaccagtgtcaaaatagcacctacacagcaaatgcaacatcattggacaacaatatcgtcgtgggagtgag

SEQ ID NO: 3868 - DNA, 515 bp, Zea Mays
ttacaagtattttgggccattcaaagtcttggaaaaggttggttcagttgcatatagattggagttaccagaaaattctttggtgcatccggttttccatgtgtcccagttaaaggcctttacgccaaatgttgttccggtgttctcagatttttctcaaatggtggatttatctcaagttgatgtcaagcccttgtacattgtggatcggcgaatggtgcggaaaggtagtcatgctgtcattcaagtacgtgttgtgtgggctcatctgccagaggaggcagcgacttgggaagattatgaggtgatcaagaagcgctttccagatgcccttgattggggacaatcaagctcgggcgagggggtgatgtcagtgatgtgactgattgactgagctcgatggaagcaggaggttgattcattgtaattcatttgtgtaattgggccctatgatggccatattagcagtgggctgtattggcctagtattgttgtactataaatactggacaagt

SEQ ID NO: 3869 - DNA, 672 bp, Zea Mays
ctttttctgaatggcgacaacctgtgcaaggtgcatctcatagtggcattatgtacaattctcgagttgaaaacacacgcactatgtcctcgaattggtaggaagattgcaggttccaatttacatggctatttacattcttgctaggaaaagaatgaacaaactgaatgagcgaatgtgtaaactgaacattgctgaagcatgtgtttgctaccgctgaagtattgagcaatttaactggtgttatgtgattatcacacttgaagctttgataatagggggttcatgtatgaaactcagtgctgctagctttaagactcaactttggagcataagaccatgtacaacacagacgtttagcaggctcttagagtcagtttcattgttttccttgtgattgtggaactgagcacaagcgcattgcaggtgttgccccttgatgagttttttgatggctgccttgaaacttacatgctaggtggatgtctcccaagaacagtaattagctcaattattacattacctctgctaaaccgtttagtctgcatttgagacaaggctcttttatgtgtgcttaatgattcatgtcctaatgcgccaacttttgtgacaatttgaggaggtttagattcctaggtcaagtctttgcctgacatttctgatcatacaaca

SEQ ID NO: 3870 - DNA, 546 bp, Zea Mays
cgcgtgtgttgaccggatgatggagcgagtgaatggcggtgcttaacgagcttcccatggccgccccttttttgcatgcttttggatcccctctctctctcctgcctgtgcctgaccgaacaaattccttattagcctgttgccgatgacaggacgccgctacgttatctttcttagccgttagccctagccctcccttttggtctttggctagcaacaacagatacaatggagaatctatctttctatccatccatccatccttgagcgcatgcagccccagctcgcccatccatcgcctcaataatgctatgctatgctatctatccatcactaccctgtctcgttgcttgcacaacagtgtcactcatcacgtcacaaaccagcgatcttgggatggtacacacagcatatcctgcctcgacgtgttaccgcctgtctgattgtatattgcattgcttggattcagtggtctctggtctcatgcacacgtcaacaacgaacgttgttctctatgtcagcagttgttgttcatcgatctggccg

SEQ ID NO: 3871 - DNA, 445 bp, Zea Mays
caatgctgagaggtgaacgaaatctgtggccttgtcatagaagtagacatggtgcggttgccatcgtgtgagaggtccagtgcttcgttggtttcatcttcgttgcaactgatccatcatccatcccaagtgattcggatcaatcgggatcttctgtgacttttattgccttcgtaacaccatacttcatctttggcctttggggtcacgacgtcacattgcctttggggtctttaaggaagatcacgcactattattgtacactaaaattaaaatgcattcttcgccacgtctattggacacattcatgtatgattaacttaccattttggaactggcaaatttattaataataattgaatgtttaacataatgtgctctaaagagtggttcttgaaatggtaacaaattgtttatatatttgtgctcatgtccagatacaact

SEQ ID NO: 3872 - DNA, 379 bp, Zea Mays
ggaccaactcctggaatatcgatctaatggccacacactcttcataaagttgcttcacctcgatgcacccttcgcgatgatgccacgtgccgcctctaattcatgtcggaattgcatcaccagatttttaggcccaaacccggtgaaaccagtgaattgtagtgttggatggtttagaggctcaaccaccaaaacctccatgggtagcgtactctatatgcgtcccccacgtcctgaacatgtgtcccactagtccgtgattgcaccgatgacacgatctgctcctccacgtcctcgcctccattagtgtttatagtttttttgacaacatggctggttatgcagcttctccagtccctcggtcaagaatcaatgcttg

SEQ ID NO: 3873 - DNA, 419 bp, Zea Mays
gacccagacgctaccgcctaccgtagagtaagaaaactttagagagtagcacgttgccatctatcttcgacaacccactttccccgcaccttttcccaccgccagtcctccacccacgcgtccgcgcgcacacggaccccaacccaaaccggcaaaccccagctccaagcgaagcacagctcccaaagttccaagtcggacactgtaggcgcggcgcccgcggacacccatactgcgctcaccgagacaccgacccgcgatcccgacggcagctcccctccccctctccaggtctccactgtacgtctgaactgcatatcgcgcacgccgctccggtgctcccctcggcgagcgagatgcgggggccggcgtcggtgaaggcggggagccggccgccttggctggggctgggggcggcc

SEQ ID NO: 3874 - DNA, 505 bp, Zea Mays
gccttcgtccacagttttgtcgaccagtgtcagacctgcttacaagccaaaccagatcgtgcagcttatcccggcaaacttcaacccctaccagtgcccaaaacagcatgggacacaatttccatggattttattgatggacttcctcggtctgggtcagccaactgtattttcgtggtggtggataagttttctaaatatgggcacttcattcctttactgcatccatatactgctgcaacagtggctcactcgttcatcgacaatgtgtacaaattacacggacttcccgcagtcatcattttagatcgtgacctagtattcactagtaagttgtggcagcacctctttaaattgactggcactcagcttcagctcagctcttcttaccacccacaaacagacggacagacggaacgcgtgaaccaatgcttggagacctttctttgctgtttcgctagcgcctgccctcgcaagtggaaagagtggttgcctgctgctgagt

SEQ ID NO: 3875 - DNA, 529 bp, Zea Mays
ggactccactcagtaccctcgatggcgcaaccaggtcctgcagaccctgcgtcgctacaccctcgccgaccacgtcctctctccggtctctgacccgacggaggattggctcctgatggatgaggtggtgctttcttggatccatggcatcctcaccgcgaactctaagacatcgttcatgtgacgaacgatacgaatcattggatctggggtgcccttgaggctcagttcctcggcaaccgccagactcggattctgtacctcgagattgccttccgacagcttgctcagggcgatctctctgtagatgattactgtcgtcagatgaacaccatggcgaacactcttcgcaccctcggtgccccatcactgatgagagtctcgtcctcaacctcctacgcggtttgagccctcgcttcgatcgcgtgactcccatcgtcacccacatgaggtcgtttcccacctttgcagaggtcaagaatgaccttcttctcaaggagcttcgcctctcttccacttcgacctccac

SEQ ID NO: 3876 - DNA, 330 bp, Zea Mays
tagatttatagtaattaaaatcattttttgaccctagagtcggtggcggcatgacctatagcttctactccaactttgatgccataacctatggtggtaagatcgttgccacaaatcttagtactgaggtccaacacctatctagatacttcttttccctgtcctacgcctgtccacgcccatcctccatttttttctctctctttctatcttactatccccaatccttccaacatttattggtctattgattccatattggaagtttgaacatttttttagatattcgagagcaggtatctccctctccttctcaatttatatgcattg

SEQ ID NO: 3877 - DNA, 310 bp, Zea Mays
gggaaacacatccggaaagtccgacacaaccttgataacctcgagcgggttggtctccttgctatcaactgaaatctggtgacagactccctccgctgatttaggcatccttagctcagccactacctcctctccggacggggacttcaatgttacggtcctcttgtcacagctaacattcgcttcatacttcattaaccaattcatccctaggatgacatctatcccaggggtgtctattactattaggtcactggggaatcctatcccccttatttccacccttatatttgagcatattttatctgtt

SEQ ID NO: 3878 - DNA, 496 bp, Zea Mays
gcacattttgactactattgaggtgacattgaaaggaaacagacaattatacatacattgttagatatgctctaagtaacacatggcaagtataggaacaaggagatattattcatgacacgcttgcacagttatgttccatatccagctacgcaacaaatttcttgatgttaatgttatcaaagtagaattagacggaaacaacaaagatggtacaatagtctctggacacaaggtacttctgaaacctaaaaagtgaaaaatcataacgtttcctcccatataaatatgtaagtttctgttttcagtatcctatagtcctgataggatctggtactactgcagacaacaatcaagcagttaccggctgaatgctagcatatgaacaaaactaaatattcgctttcaatgtaagcacatcttgaaatgatggatatgggaccagaagactggatcacgctattcagtgcccatagagatgcacaccttcatattg

SEQ ID NO: 3879 - DNA, 599 bp, Zea Mays
ggatgtgcatcgactacaccagccttaataaggcttgtcccaaggacccgtatccacttccacggatagatcaaatcatggattctacctccgaatgcgacctcttgtccttcttagatgcttactctggtttccatcaaatctagatgtctagggaagataggaagcataccgcttttgtaacaatgtatgggctttactgctatgtcgtaatgccttacggtctgaaaaacgccttgccaacatttgtgcgggcgatgagtaatattttcggggacctgattaggggcagagtagaggtatacgtcgatgacatcgtggtcaagactaagagagggtcgaccctagtggaagacttaaccctggtcttcgacaagctgcaggcaacatgcacgaagctgaacccggacaagtgtgtctttggtgtctccgcaggaaagttgctggggttcctggtttcgcaccggggcattgaagcaaacccggagaagatcaaagcaattgaggcaatgaggcctccggcccgtatcaaggacgtccagaagcttacggggtcattagccacccttagccgcttcatttcaaggctggctgagagg

SEQ ID NO: 3880 - DNA, 861 bp, Zea Mays
gccggggagtggcagctgctgtgctgcagttcttggacttcttttcaacgagcaagcaggtaatgacacgtgagcgagtgttctgtggcttgatgtgcttctgcactgttcgtcctcttgcttcatatgttctgtgctcaccaaatgtttgtacaaatgcctacagaaagtggcgtttgatatcctcctgcacatcttcagtgattatgatgaagtgaatgcgcctaaggccatggaggctgtgcctgcactgtgtaacctcctgcaaaattctgatacaatggtaagtatgattatatatgatgaaaagtgtgtgtgacaaaatacattcatgtgttgttgatccttgtggatgctagattcttgaatctgttgttccgtgcttggtatcgattgctgttggtgcttgtgaaaatgataaatacatgagtaagctcatctatgaaacgaatgtggtcaaggcaacattgaccttgatgtgtaatgagaggtggaagagcctcaatgatgccaccttagaggtatgtctcatcatccttccttgatttcgttgctatcttttagctttcttggaacctgaggactcaatggaacatgtctggcagggcattctggggctgtttagagatcttgcttctttctccgcaaaggctgtgaagtctctctttgaattaaatttttgtgtattgctcgaggagatgataagttattacagctatgtgcaccacgatagtaatatggtactctacttcttctctttgtattacttagtgtaattttgtggccatgcacttgcagttaaggtgccttaactaccccgtaacgtgccaagtttcacgcgataattctaacatcatgtgt

SEQ ID NO: 3881 - DNA, 891 bp, Zea Mays
gtttcgctttggatttcgtgatttgtttaaattctttttgtatacagttttgggtgcttatttgatttgaacggtccatcccttttttcttgctgggactggattctcacccactttcagtcgtcttcctgtgctgggattcttctggttctgttgcgggatcccatatgaggtacggggatatctcaaatggattatttggattcaattctccgggagctgcatttcggcatgacttgaatcagttcgcgctgcgaccaagcgcaatctgagctactttgcttgcgattctcgtgatttggagttggttatctcggatcgaacgattttcctgacaatctttaccaaatccatttggtgttccttggttattccgtcagacaaggaagcagagtttgaagttgttcaggttggttgctggttgtggtttggatctcctccgttttcccctgtttttttgtccggcgatctgcatcatattcgtcaagtctacatttcagtcttttccccttctacaaggaagttatcctcttccttgcttgattggtctttcttgttcttatcccaaattgtgttgtcgctctctcaaaatttcctttccacttgtttgttgaattatcgagaacgcaaaattgggtaactgtatacaatacactaaagagtatttcatttaattgattgcttgttttgttcgattttactcttgtctctggggttaatgagtgaaattgagcttaattacatttttagtccaattcgatctcttttagcttcctctgatgatctgatctgtcatgggtccaatcagaaggccagcagtccaccatatgtgatcagtcagttaaagtcgagttggaattcagtggtcgtcctgttttatatctggatttg

SEQ ID NO: 3882 - DNA, 636 bp, Zea Mays
caagtactccatgccgacccatttgtttttccagcaccaacccaacatatacccacgcgctcacggactcgcatcggctgacctgtgagccctcgtggccagtgtctgcttgtgcctgcgtctcataccgtgccgccctcgcacgcacgcattggcccactgtcctgcgggccccacctgcctgcctctccctctggtcacgcggttttggccagcacccgcgtatggtggagttcaagccgctgacgccgtggggcctgcacgcctgtgagtctcacccgtggcgggattcctggggtcaccgcctaggcggtggggtcagtccgtcagatctaatcccatccttgttccaccgtagaaatcccaacagaccccgtaacgaaccccgtaccgtgtggagaccctcctaaccgccatgaagtgctagctcgcgctaaccggactatgattccgtgtcccatctcaccctcccctgtgcctataaagctcaagtcactgcctcctgtcgtcccagcagatcaccgaaatcagatttcatcgacaggttacccgcgtcgtggccaagctttaccacacctcggactgtttcgggtgaaacctcaatggattcaccagcacgaatggagcatgcacgtg

SEQ ID NO: 3883 - DNA, 863 bp, Zea Mays
ctctttccatagcaacagcgccttcaccaccaagaaaggttagcgctaccacctccaccaccacaacatccaaaccaacacctaccacccctcccaccaccaccaaagcaagaagactttgcagacccacccttcaggggagtgattcacatgatcacaaagggtccagctctgacttcgagaacaaacgacaaaaaagggatcactactaagggtcaatcaagtcgcagtcacaggacccatcgtttagaagaaagtggtctcacgtaccattaaccttcgacgcaagagacaccaaccttcgcagcttgccccacacagacgcactcgtcatcagttgtaatgtggcaggatgggagctgcacatggtcctcattgacaacggaagccaagccgacatcattttcctacatgccttcaaccaaatggttttggagggaaggggacatttccacttggcaagatagagctccctctttccgtcggcaccaaccacaatattaggtcagagcgggtaacatttgacatagttaacatggtctaccaatacaacgccataatggggagagggtccatcaacaaacttgaagcagcaattcacggtcttcacatgtgcatgaaaatcctagaacctctcggcacaataacaatttacggagaccaacatactgctcgcaacattgaaagggacctcgtcctaggacaatgcaacatccagtaccttatttctgagaacgaaagccacgttgtcccacaccctgagaaagcagtgccaaccaaagcctagattcaaagcaccgaccaggccaaaaaagtccctctagaagccacagtaccaaatcagacagtgttaatcagcgaag

SEQ ID NO: 3884 - DNA, 1004 bp, Zea Mays
aaaacccacggcttgggctggcttcctgggtcggtccactaactcaacccacgctgtggcccgggagggggaatgaagtgccgacaggcgggccccactcgccaggatcaaccgcacactgatgtatggaccagatctatcagcacctgcgtcgtctattgcctaagctctctatccaccgggccccacacgtcatccaccagttgtgaccgggtctctgtgtccgcattgccggtgttgcgggcgtcgtaaccgccattccgtagctctagctggcataaccgccgggtgagatcccctcatcgttggcttcgcccgcaggataagtggacgaccctctcttctcttctccccatttcaccattagctccgtgaggatggattgagagaagcagagtgtcgatgccactgtcgctgcgctcaggtctcgccgtgattgcgacctcgaatccagccaacgacgtccgccgcagcatgcagatcaagattatatcggtgttgggcgcggggtagtacccatcaagtgccaattcctcaccggcgtcgaagcaaatccctcgaccgcacgtggcccgacttcccctccacctgggattcctggtatgggcctctactcgattcgtcgtgtacctaggaatcaaatggcgcttctcgccctcgtgcactgtaccgacatagctgcgaccaccgagctgattggcgtcgtgaactaggcgtcatccgccattgggggttgagtcccctgcattaaaccctgcagtagaagtctagctgtgggagttcaccatacttccctcgccatgaattgcctcgcggggtggagaaatagggacccggggtgccggacgtgatctccggccatggccccaccgttcgctagtgtgcgccgccgcctgggttcggttggctatgaggatttggggtgggttttgcgctggaccatgatctggattcgggtggccacgattagatctcaggttaccccttcgtcattttaaatcggg

SEQ ID NO: 3885 - DNA, 1083 bp, Zea Mays
aagttacatctttacagattgatagctgcaaagaccgcattactgaagcacttgaaacaattaaaccaatgtcttcctgggaagtagcagcaaatgcgcacgatggacaggatcatgtattgcatcacatacgtggttttggtgtagcgttggatgttcttatcaactacctaagttcagaatatggaaatgcatttgagcttggtatgttaatgccttgagcctttgaccacagcaatgtttcatattttgtttgaagactgtgggggtctgtggtacctgaccttatctgccactgtaacttgtcctgatatatatatttttaaaaacagctaggatatttgcgtttttatctggtccacccaattatggggctgggcagctggatataaatgaggaccaaaattctggtaaagcaaggggtgctgatcatatattgcttcaagagcagacaagtttctacagaaatctggtaactttgcacaaagatcagtcaatatactatgataatattttagaatatatctgattggcatatcacaggctactagtgctgttcaagcaggtgtatgcgtggacctttttgcaattacaaatgaatacactgatcttacttctctgaaagttctgagtgttgagagtggtggatcactgtttctatattccagtacagatgaatcaacacttccacaagatatgtaagtttagtcactaactttatgtttatctatgtattcagtagttagatcattacttaaaagatttattggataaatgcttaagcacttcttctttatactcatagtggaaagctgtcccaattaatagattatcaatattcttattgtgtggtcaatggtttagtactggattatgttgaattgatgtttgttcttggttgtgtgctacctgaatgtccatgctataagatagatactcaaatgtatgaaacacggaatgcattatgcatattctctatgtgcacatggttttataaacgtgtggtatcataacatataaggtcccaatacacttttgattatggtttatggaatagtaaaatcaaggtggtagtgatacaaa

SEQ ID NO: 3886 - DNA, 557 bp, Zea Mays
cgaatggtgaatcactgggactcaatgatgtatctgagatggggattatactggtttaggctggagccctagtccagtgtagtgctcattgtagtattgtgatggaatgtgttacaacttgtgtgcgtgtgtgcctagcatcctgacaggaagagggtccatcccttttatatcctaagggtcagaccttacattactctcttttctgagagagagagagagaaagacagaataaaaaagagaagaagtccttcgtccttgtggcgggccccttctcctgatcgtatgaagtagtgcttatgggtatggtgccgcctgttactcttgtccctgcggtacgttcgtggatgacgtccccgtggtgatgcgcggcaggtcccatggtgtaggcctgagactcgactaatacgacatggttcccctccaccatcttgggcaccatgttgtcctaccgtgcatgtggatttgtccattcgaaaaggcgccatgtcttgtcgtttctaccatacttgcactgtagatgctgaggttgctcctgatgggagagttgtgtctgt

SEQ ID NO: 3887 - DNA, 312 bp, Zea Mays
cctatgttggaccacattaggggggtctggcacttttgtccatacaatgcttcaaacggtgacatcttgatactggcctgatggctgttgttatacgagaattcagcatacggcaaactggactcccagtttctgtcgaacgtcaacacacaggctcttaataaatcctcgagaaccttgttgaccctttccgtctgaccatctgactgggggtgataggcggtgctgaagtctaacttagtgcccatagcttgctgaaggctcttccaaaattttgaagtgaactgtgtccccctgtctgacactatcttc

SEQ ID NO: 3888 - DNA, 586 bp, Zea Mays
acaaaagtccaagatctaggcattgcaattttgtctgtcaggcgctctgaatcaggatttcgatggtacagtgttcggatcagattgccaggttcagttcatctcgccgccggcgaccacgcgctcggattcgcgcctgatgctacgattcatgctcaacgaagtactgattgttgctcggggtagtaaatatcgtcgtgtggatgaacttgagccactgttcactccggccgccgtgtccgcctagctcacggccgattcggatgaactcaccggagttagctgctcaacgatcgtgcgccatgtgccttggtgtctttccacgtcgcagtagctcatattacacatatccggtgatcgccgatgagcccgtcacggtgaaagccaccaatctcttgcgacagtgctcttttctttctccgaccgccaccgcgccatctcaaattcatgggccaccacttggggatcctataaattgaacatgccgtcagttccgcaaggtagtcaagcacccaatccatcaactcgtgccttcaattgttcaccagaggccctgaattgctcacatcccccaaatcggttttcc

SEQ ID NO: 3889 - DNA, 322 bp, Zea Mays
tggacagaaggcggagcccagcggatggggggtgcacatgcataagggcccagtggcccaaaacggatttcccttcccatcttgcctgaaggatttgcggcttcagcgatttggaggcccaccccatgatttgacccatcttgcctggtcggccctcctgattgctcccgccctcagcgttactctgcacctcctcttcgacctgggcccaaagaagcaaacaaaacgacgacagaaaacttcaggaaaaagtccaattttacttcttcaactttggcgtacgtccattttttcttcccgaattataaaattagaaatcttt

SEQ ID NO: 3890 - DNA, 547 bp, Zea Mays
gcggaggacagcagtcctcggtgaacatggcctccaagggaggccgtggtggtggcaactacaacaacaacgctcgcggtggcgggcgtggaggccgtcgtggtggccgcaaaggaggtcgcagcggtgggcgatttgaaccgggcgtctactgccaagtctgtggcaaggagggacacccggcctaccgctgttacaatcggtatgattcatcttatcaaggccccccacaaaagactgctgctgctgccactagttcatatggtgtcgacacaaattggtacatggacactggagctacggaccatgtcaccggcgagttggagaagttgactgtccatgataagtatcacggtggtgatcaggtgcatgctgcaaacgggacaggtatggagattgctaatgttggtcacagttttttgcattcacctaatcttcatctccgaaatatccttcatgtcccacaagcacacaagaacctttgttctgtcaatcggcttgcacgtgataataatgtttttcttgaattccatcccaaccacttttt

SEQ ID NO: 3891 - DNA, 361 bp, Zea Mays
caggcacgtgctggatcctaccaatgtcgctggggccagtaaaccagcaacacagacgcggtctctcctgcagtggcatgacccgacgcttcaagaaatcaccgagtgcatgcattgaggtcaggccaccaaccgccagttccttaatcctatccaggacgggctcaaactccggcacgaggcatggtttttccctccactgcttccggccgagtctgggcccgtcactcggaagggcaaggcggtcgctgacctcagcagtggcaatcacccagtcgtgccgccagttctcccacctcgcgccactgagggaggccatgtaggtcaccgttggatccgtccttgtctagaagtagtaggc

SEQ ID NO: 3892 - DNA, 339 bp, Zea Mays
tggtgcagcaatggaagtgtttcttctaggaggaacgttgtaacaatctgcaatcttccttttcttctgtattctcacctctccgttggtatgccaattgggtatgcacttgcacacgcattatctcccaacgagacaggatgcagtaaaattcgtgagatcaaaggcacacagaataacaagtaggaagtaacctacgtcctcctcgccaagaacaacaccggcaacctagacatagtaggtccgatcgaggcatccggctcgatcacaagagaattcatgtgtaagcactgcacgacgatccatccaatccaccctctcgttcaccgctagcagcga

SEQ ID NO: 3893 - DNA, 707 bp, Zea Mays
caaaccattctcccacccaatggtatgcccaattttgatttcccacagtattcccctcattttggttcggttccacattagtcaggtggccaaatgttccctcaaaaccatagcccaccccacctcggatccctacccaaggtcccatttccctccttcgatggcaaaaacccacgcctctagatcagtcgatccgaggactactttgatttctatgaaactgagccacgtatgtggatccgtgtgtccacaatgcatttcactggcactgctgcccgttggtggcaatctatggggaggaaactaaagggtaccaccaggagcgagttcagtacctggttactagaacgctttggccgagaccaacatgaacatctcatcagacaactcttccatattagctagacatcgtctgttgttgcctacatagaacaattttttgggctcattgatcagttgtcggcctatgaaaccaaaactaatcctctgttctataccatgcggtttattgatgggttgaagcctgcaattaaatctaatgttcttttacagcgttcatctacactcgatactgcttgtactcttgcccaattgcaggaagaagtcctcgagcccgtccggacgaatgctcgtcggtcattgtactctcgcggcaccaacaatactccacagccgcttcctcttcctcgaccaccggctccggacac

SEQ ID NO: 3894 - DNA, 491 bp, Zea Mays
cggcgacgtggctccttggccatcgccggagttgctgttctgcgccgtgattgtgccacgcttccagccgttaaacacgtcgccactagccgcaccagctcgacgatgaccgccatagctcctcaaccaataagtgccactgtaagtcgcgccggtgactcaccctttcattccggtcgccgcgcgtcctccccaaatccactggccaccgctttacccttctataaattgagggcctggtcggttgcgccatgtaatcgtcaagctatagcacccactcccatctccactcgttcaccgtagctctgcatttcgggttttcccccaaaatggtccgccgcatcgcgaagaacagcccgcccatggctgggccactctggtgagttcctattcaattcaagtgtcgtttccatgcctctgtatgcttgcgaagctcatggaggcgcccgtttgctctgatcgaccatggtttggcgggaacatgtactccc

SEQ ID NO: 3895 - DNA, 463 bp, Zea Mays
ccgaagtcataattaggaggacaatcgcagcaacaacacacctccttactcgtagtgtattgtctactaggacaatctaccataggtttcctgtgatgataggtactcatggtggttatggaggaagccatggaggtcatgcaggggatcatggtataggctatggtgtcccttgggccaattggactaccatagaggagcttgggatccatctctcgctttgactggggaacaattgtagcaacaatagcaatggtaggagggcaaggtatgtgagacatcaaacaccacctcaactagccctagttataccaccattcactttggtaacttcatcaactatgcccgcttagacaaaggtactcaagcataggcacttgcatccacatatacacatgatatggatgggtcatagatcgaggagcatctaagggatacctaatttgtttaagacatacaatcc

SEQ ID NO: 3896 - DNA, 295 bp, Zea Mays
gctttgcatatgaggtcttctagcattggtttgacttctaggctgttgttgtttcccaaacatgcattcagctgagctgattccttcttccaatcttctaaaaagttggttccctttatcccgaaaggttttcggctgagggcgtctgctaccacgttggcctttccggggtgataatgaatctcaaggtcataatctttgatcagttccagccatcttctctgacgagatctggctgagtgaagatatacttcagactcttgtgatcggtgaagatgtgacatttgttcccaat

SEQ ID NO: 3897 - DNA, 718 bp, Zea Mays
ctgctttccaagcaacttgaggtggtttttttgcatttatgtctgctcctctccaaaggcagtgccgtctgaatttatcaatctgcttgatcactgtttttgggagtttcaaggtgcacatgaaataggttgggagagaggagaataccgcattaaccatttgtagtctgctagcctgaaataaaaagacagaagttgacgcaagtcttctttcgatcttctgaatgagggggagaaatgctcccaagttgggttttttaaggcccaagggaatcccgagatacgtgaaaggcatagctccaaccttgcagtgaaacgtatttgctaagattgccaatttctggtccgagacattgatgtgataaatattagatttgtgatagttcacatggaggcctgtagaatctgcaaatgaattaagcatcgctttgaggaagaatagttgtctagggcaagcctccaagatcaaaatagtgtcatctgcatattgagtaaccggaaagtctgccccacatgcattcgggattgggagcctgaggatgccacagtctttagccttgttaacgattgactgaaggagatatgctgccaggacaaagagaagaggggacatgggatccccctgtctgacgtcaagcctgcagtgaaaacgtcttccagggacaccatttaaaagcacttgggatgtaccagatcctaaaatcagtgatatccagtg

SEQ ID NO: 3898 - DNA, 700 bp, Zea Mays
ccgcggcgtcccgatccgctccacgcaggtgaggtgttgcccccccatcgcgcgggattggtgcctgctattttggttgcgattttgtggatctgacgggcgacgattttccgttagagtctctagtgggagccgaggcaacctcctccggcgtttctccatcggcggtggttcgggctacggatccggactgtgtgatggaggagcgggaagatcccgagcggacggagtccccggagcagcgcaaggccaagaagggggtaaacctccgcaagagcttggcttgggacagcgaattttttaccagtgaaggttcatcttcgcttttgttttttcctggtccccacccatgtgaaactctatctgttttctggaattattgcctctcgttatacactctggtaaaccttaattatgcagattgatcgcaactcttaatctttcctggtctatgcaggggttctcgacactgaggaattagccattgtaaacagcacctatcgtaaggcccaaggttccaggctgcctggaatcattgaggaaacgaggagatcaggggagtcaacaacctcaactctggaaagtgaaacctgggcgatggaaagccttgagactgaactatttgataatgtccgtgcttcgatccagagatctcttggcaaacctgataaactttcaggtcggcccgttgctgcctcaa

SEQ ID NO: 3899 - DNA, 277 bp, Zea Mays
ggctactgaccctcagaaaaccgacgctatgctcaagtggccgcacccacagactgtcacggatttgagaggctttctggggttgacagggtactacaggcgctttgtgcaagggtacgggatcattgctcggccactcacgaagttactgcagaaaggggcttttaagtggacatcagcagctgaaatggcttttcagtgtctgaagcaggctatggtctccactccggtattggcattacctgactttaacataccttttgttgttgagactgac

SEQ ID NO: 3900 - DNA, 736 bp, Zea Mays
gatggctccaacgggagcccgtcccttgcttgcctccaacggcgcttctccaaagcttcccgagctcgcatcctctcgcgagctcgggccttttccgcgtccttcttctccttgtccttctccgcggcgagcctacgcgcggtccggcccgccgcgtcctctgggactggtggctgggagagtttaaaattcctcaacccctggggatgaacgaaaatcccaacagtaagaactaaagacgtaagaaacacggcgcaaaatagaaagagggtcagccacttaccagggacacatacccatggtcggggcgcatcaggggttggctaaggacgccagcgtccagcctccctaccgtgcccgctacccgtctgaggaggtcgtcggcggagagggaggaagaggacatccgtgaaccctccaaatcaacccctagcttcatctccgaaagccgcaaccgccgctctaccaatgggagcaccctccggcggtggatagcggcgacaacccccgcagcggtaaggccctcggtgtgtaacttctgcagagcacggagaatgggctggagcttctcttggttttcgcgtgtggccccccagcgccagttgtcaccggcggcggtcaccactcgttgagaaaatggtggaagcatcccgtcgtcgttccagagataaacccaccggttctgccaccccttgttcgaagacacaagggaggcagggatgtactgatgtgcccg

SEQ ID NO: 3901 - DNA, 561 bp, Zea Mays
cgttgtgtgaagccgggagccgccaacggagtacctggagccgcaaacgccgtgcaccctcgtcaccaacctgggacgcttgtggagccttggggaaatcgttggggcagtgccaaccaaaaggggagccgggcgcgtcagtatttgtgcgccggtggtgctccgtcatttcaatgccgccccgccattctcggattgcgtggcgattcggcgccagggttggattgagatcttcacagtggggtcgtgttcgctgtggtgacatccagggagattgaaggccatcagagtacctgcaattcctcgccgtcgtttgccttggccgcaaaatccgagcagctcgtggacagctacaaccgtctccaaatctctagtgagtttgtccccaaccgttccgctttcgtctggtgagcgcgtaggatcgattcgtcatgcatctagggctccagcgtgccgaaccatggtattccagcgaggctaccacggcggagctgggcgcgccgccgtatggtttgggcgaaggtgagagttggttgtcagccgttgatcagttaatgggcg

SEQ ID NO: 3902 - DNA, 768 bp, Zea Mays
gagggagaagagggccgccaccagtgatcttcgtccgtgtcggcgttccgacctcggcgtgtgtccgtcgacgtgcgttggtgcctggggaagccgatcgtgtcctccggacgggccctacgtctccacggcgcgagggaattgctcgttgggcggcaaaaaaaagcaccgcgccgcaggtcatcgcggactgcctcccctgcatcgacaaattgggtgagaaccgcacctataatttcgcgttgaactccgcgtcacgtaggctaaagtaattgagttttggaccactggatgtagtcaccggaaaagtgccgcgccgtggctcgccgtcgggtgcgctgcgccgccgcggtttggttctggtttggagaagacgcctctgccgtttgatttgaacggacggtagagattagatgtgctcacccgttcagcttggacgactgctatccgtcgatcggcggatggacgccccgatttacgcacgcgtaccccccttcgctagaatttccccggatcgttagatcggaatccgagggctgcggtgagatctcggcttcattatatccgtaccgttggatttagatccaagggccgcgatcgcttaccgcttcattagaatgtcgatctgatctgggccgtccgtgtttgatctggcggcccacaacatcggataccccttcgcgacgcgcgttttgtaaaagagaccctggaaaatagggaaatcaacccgccgtcctttagtcactatgcgctgtgtctctggattct

SEQ ID NO: 3903 - DNA, 717 bp, Zea Mays
agaaaataagatctaaagaagaccaggtacaaggacttccttacggaggtcgaaaactcaaaaatcagaaaagaaccatctaacaaactacactatgcaactaaccaaaaacctcccgcctagaactaagcatcaagggaggaggccgccaatagaggcccttggccccagccatcccccacatcaatctatcttccctagctaacctaagagctagagaaacattgggggtccacccatcaaagatacatttgtttcgatgattccagatgatccaaacccctagggcaatgagagaatttagccccttcttaataggtccgttgacagaccctgaagcttcttctcaccatatcatgaaggagggcaaacttggttgtggggcgagcacttgcagccccacttgtctcagcagcttgaaccagaaatcgcttaagaaaacacaagacactaagagatggtccaaggtttcagcttcttgatcgcataatgagcaaagatacatttgtttcgatgattccagatgatacaaacccctaaggcaatgagagaatttagccccttcttaataggtccgttgacagaccctgaagcttcttctcaccatatcatgaaggagggcaaacttggctgtggggcgagcacttgcagccccacttgtctcagcagcttgaaccagaaatcgcttaagaaaacacaagacactaagagatggtc

SEQ ID NO: 3904 - DNA, 1055 bp, Zea Mays
ctggagctcccgtgcgacagagaccaattagacccctaccgcacacttcccctcaatcaatttcatcaatggagcattgaatcaatcagtccatggtgacagggcggatgatcggaggggtgaacatgttccgaccaaccgacgacgtgaatgaccaaattgaatcttgggaaagcttcacaggtttaccagagatgacgcacatactaaaatttggactgggcacgaatagaaatgtggggcgacggagagggtgtcgcggcggcattctacagagcaattgtgtgttccggtgaaaggcttcgaccgaacttagattggttggtactgagagcaataggaggctacaaacgagctagaacagggagtaattgggaagttactaacccgaagagcgctgaccatggtggagtcctttacggcggagttaagaacagaggaggagggaatttgggggctacgtgagtgctccggtgaaattgagccgattgctcagtcactgaggtgcgggatgtggtgaagaagcagaacccgggcgcaatttataggccatcgaccggaattggatgaggatcgcggattttagattgcgcaggcgagctcaccgcgcggcggaatccggtgatggcacggtggccgccgattaaccggggcttgccacctcagtacctctctgccacgtcgccgaggacctttaccgtggccgccaacgacccatcccgagccgcggtggcatccttatcgccggcgaggggctgatccttatctccccccccccgatgcactgtaccatggcaaccctccatcagttggcctgaccgagcgatttgaaatcaaattttctcccaattccatatggcaccaagcccaaacacctataacaaagttgttcctctacaatggctatacaactttgctatattgacttggggcaaattctttgaacctttcaatcaacagagctccaaagttgactcagtaccactgttagtctaaattttcagactccaataacctgacagctcgactttgagtgtgtttttcttccatttctt

SEQ ID NO: 3905 - DNA, 352 bp, Zea Mays
tgatgatacagaagactgaacttgtcgagtgattatgtgcatctacatctacatggttgtccgaggtccttagaacaaggaaatttgtaggtgggcctaataccttgcgagtttccatgacagagcaccagtgagtcgtcacgaagtggaagacatcgccgaatgggtatgtaaaggtcttatcttcgattggattggggtggtcagcgcgaactactttcctcgacgtctgggacatgcattggagagggggacttgcgtggcctgtttgagggggaagagttgaggatgatgttgttcaattttcgtgaggcgggtcttattccaaaggaggagcctatgtgacattttt

SEQ ID NO: 3906 - DNA, 671 bp, Zea Mays
gtttttttcacttacccctaaataatagggttgtacatgctcttagggtgtcgtcccagatagtcaccacccaacccatgccaccaccatccgtcgtttggtgctagcggcccccttctccatcttcttcctttcttcttccaactcatctccaataatttgtgcctccattgttgtctcctaccatggatttgcaatagatggatgcatcacccctccatgatgacaccattgtacatcgttgtcacgacgacagtagcctcctccttatcatcatcaccttccttcatatgtcgtggttgccctcaccaaacttgcatgcctcagcctagcgcacatggacactaacacctagagactgggcggctcgaccgcccggacactaacgttgcaagtggagcccatgccaactcaatcaatggttagaggggcgttgccccctcggcccctagcctctttggatgcccttgcatcctcccatatcaaggtggcttggtagaactagatctagggccacatagcccactataaggacgacgatgcaccctagtgtaccgcgactgctggccccaacatcctccaactgcttcggtggctccgacccctccactccaactccactaagtctagctcctccacgactgatgttgggttgtcggggctcatttacc

SEQ ID NO: 3907 - DNA, 586 bp, Zea Mays
gttgtttcctgtaaatctgatcagaccatacgtaggtaaccaatcagacgctaatagattatacctttggtattgaaggatgacgatattagggcaatcaggtagccatgatgtcatttctttcaagttcgatccccttatggacatccaatcgctgagggacataaggacgggttggttggcaactagtgaagcctctccctcggattggccaatggcggactggtgagtctgccgcgagatggcgatgatgtggcaacaacttgcgggaggtagcgagggcaggtgacgacaagggacaaccattagccattgctacattgcgacagtgtggtgggactttagtgagatagcgagggtaggctgttctatagaaccaaggcaggattccatcgatagtctgcctgcccattaatgtggactaggaggcaaattagtgtcactgcatgcagaccccgacgacgtgacgagctgacgagtgatgtggagacaagtgggatgacatctaatgggttaagtcacccactaatcgattagtcaattatcaaagaagcaagcgagccacgggtgagctagccactagagg

SEQ ID NO: 3908 - DNA, 384 bp, Zea Mays
gatgtctttggccgaaggggtaaccttttcagaagcagctctaaccgagttgaatatccccttaagcttgtctacacaccgggcggcaaagtctacacacttgtttcgaagatccttaatagactcgtgtagccttgtattcttttcaacttcggcttcgacccttgttttaagttctttcgtctcttggtcgaagtgtcgtgaactttcatccaaaatcgttcgagctttgctcagttccgggcttaacttagtattttgggatcgtgattctgtaagggaaccgtcggctgtttgcagcaggatgtctttttccttcagagaggtttcaagttcttttattttatcctctaagcccttaattatgacttcgttttttctgtc

SEQ ID NO: 3909 - DNA, 781 bp, Zea Mays
ccatggttcctcacaagtcacaacccccagaaactcagcccctggttcattaccaacaaggggccgagccaagggccctgccacccccaaacttggacactatccctaggtgatcgcatcttatacttcacttagttacaaaactattcctcaaatagtgccttcagggcacgtaagcagacaatggagaaacatctgagtttgcttctcttactgcacatatagctagctgaaagaacttcctaatctttaaaacaaatccatgaaaatacataaccctcctaaaacccttgatccatccttaaaagggaaggttggttacaggttgccaataatgaattgagcaaatcggtaactcctggggcacgaaattacatgttctaaattctcaggcctttcaacgacacagcactcacaggctaccttagcatgggaagatgttcgggtcaagcatttataatgcaacataaaaccaacaccaaatcctaggatctagacaatccattctccagaatgcccgtgcctattgtcaatacggttctcccacagcaaaggcacctaatccaggttactattcaaccaaacccagtgtgcgtattttttctcaaggggttaaaactgactgggtacatcccatattctgtaaacactaaaatctcccgaagcaaccaagcgtctcgcattgctaggtgcaaaccaaaacgagaaatcatccacagttccacaccagtatccacatacaccaagatctacacgcacgatccaccgcacaacagagcac

SEQ ID NO: 3910 - DNA, 414 bp, Zea Mays
acggagacgaacgggaaggaaaaatcaccagaggaggtttctcaccttgatacatggccgggacgccgatggtttggacatgagcgatggtgagcgcggcacggctcctctgcccgacggtgagcaagacgtggggtggctattgtgcggtcgggagatggctgcgctctatgagaccaagggaggggagagcggataccagcgatacaaatatgggcgactgggtgaacggttggtaggaacgtgcgtcgtggccgattcaagcagaagagacggtttccatggaagggattatgagtggggatcgcacagctgaacgaggatgccgcggtgcagctcatagctggtcttgtggcacagaaagtcaggcacggcgtgtaggggcatgggctggctacgcacaacagcagccat

SEQ ID NO: 3911 - DNA, 904 bp, Zea Mays
gatcgtcagccagtctccctcgcgcgccgacggcgtggccacactggccagctcttcttgccgcattcgctcaacgactttgtgactgcatgcggacctacgcgtcggcctcaccacgctcacgctctcccgcctgagtcactagcaactaggctcaggatgtcagcaccatctccctcctacctaccgccgagatcttctccgctcctgtgtcaccgaccccgcgaaaaccatgggccattctggactactcctttttttcttgttcttccccgaaccaaccggctgtagaccccccacgccggagtataaagcgggaccgaacccccctcgtctgcagccaccgcgagccgagagccaccattgccgcagatcccaccgtcgccgacccgattattctgcgggtgaatctcaccggtaaagggtgcctggtcttgcttcgggcctgcggaagctcgtggtagcaacgtccggtgcaaagacaacttgggacctattggattgctcgccggagcaaatactcggctgcggatttgtagctcgccatggaccattcccaccaggacaccattgccggtaagactacctccttatcactcgccttgtccttctcaaagtgtagcaccgttctaatcagagtttagggtgttacgcaccgggatggccatctccggccatggtccgtcgccgtggggcgatgctccgtcgctcggcacggtctgtatggtgctgatgcacgaccgccgttggatcgatcaccggtggttaggattagagctgaggttggcgcttcggttcattaaatctagggcgttcagaattgattgggtggataggatttagccaaacacgtggacgtctcgtgtgccatggacctctgatccaagggctcatattgcatact

SEQ ID NO: 3912 - DNA, 277 bp, Zea Mays
gccggttcaatatatcgcggccggtgggtcagaaccttcattttcttgcctttcagcataacagtggtgaccgaagcgacactttttctcttcttcccttgccttcgcagcgggtagtgatagtcagggtatacgaagccaattgcatcaaatactctgttcaatcttttcttcccccggcccccgaaggctgcggacaaggcatcatcttcggccttggaatatgtcccaagcagctcgtcactggtagcttcaatacatttcaaccagtcatcat

SEQ ID NO: 3913 - DNA, 898 bp, Zea Mays
gagagagtgactaagcacagagcaaaagtgaccgatagatttagcaaagaatgagatgactacctggaaagctcacacgagaggtgacgatccaggcaggacgggagacggcacacggtcaaacaaggtcactgaaatgacagaagaggtgagcacgtattagtcacatagtcataagcatatgaaatgtgaataaatacatacacagagagatatggcacgagacgggacgatcaagaagtcaaatgatgtgaaaacgatgtttgacggataaatagtgccataggaggtttggaattcgaattgaggcacgaaatgatatgggatggagccgagacttcacgaataggtttatataggtgaatatgagtgaagtgtgtgcttggtttgaatttaggcgaagaaaaagggatttgggcactcggctcggaaacgatcgctctaaacgggaaatttggtaaaatttaagcctgggatctcggattggcgtgaaatttggcaaggaggttactggaagtgttgtgaaggtgcctgaaaattttggattcaattggagcatttttggctggtttgggcatttcaccgagcatgtggtgtgcggggaattagggttttggtgaaacggccatttgaggagtgaaaaccctcccgaaggagctaggatcctgcagggatacataatggggacaaaggaacacatttcacaacatggattcactgggattctcaggatttggaatttagcacaaaggggtgtgcactgcctaagagacagagagatagagaggcaggggagaaaacaaagctgctcaccgagggggaagaagagcctggcgaggtcgccggaggatcgtcggagatggtggccgccggtggagggagttcgccggcgggggga

SEQ ID NO: 3914 - DNA, 704 bp, Zea Mays
agggaatcgtctacccaagaagcacgcaccccagataagccccgaggcaccgagcctagggttgggcgtggaggagcagcagaagggagccatgtgaatcgaaaggaaaccactcgagtgggttcctcgcctggctcgagaccgacccgccataagtggttggccacattaagtacgcctgacaccaggtcgtagtacaaccggtctacctcccaatcatgacctatgccacccctcgacttatagcgcactaggacctacataaccctttggtcaagcggtgcactcatgacctacaatcccatcggcctacgaagcactcataacctatcaagcctaggcctaagagcgcgaaccatccacagggcctgcaacacgatgagccacaccgagacctgggctacggaggctaggggttgcgtggcacaaaggtagtaatgatggtgccaagaccccgtgccatccgctgtaatgagcacaaatagagacgataaggcacatacggacataagacactcgacggaaggtgaccacacacacggtgagacctaaagaactagaggctggagccaaggcttagtgtaggactccagttctgttgtattagggccacttccacataagagacttgggagcccttcttccctctcacccgcttgtatcccgcttgtaacccctactacaagcatggagcaatagaggtg

SEQ ID NO: 3915 - DNA, 848 bp, Zea Mays
tggagttctaactaagccttggtttgacggtggggcaccgacctccgagtcattctcatgttcgtcagtccttctaggcatcgtctcctcttggatccgtccttgcatccatcgtgtgttcgagagaacaccccgtgtccggggaccagtctcctccttttataggcttaggagggggatcgaccagtggtggcttccttagaaaggtgccactgggtgatggtaaaactaggtgttttgccacgtggtaaagccacgcacgcttgcggtcgcctgactatcttatattctttatggcggacggcacgggcagcgtggggccctagcgccatcattggggctatactgatccatggcctttgtagcatagggctcggcgcggctcgtcgtgttgtgtattatttatgatatgtgcaattgtgttcagttgtattcttcaattgtgtgcttatgttttatggtgatctaattccgagcttggtttatgtgccagatcactcgggctggcatggtattcattcccgtgctgaccgggcacggttggacccgtcctgtggagtgctcgttcagggatttttggcccatcagacacctcagcccagcagcacaaagagctattcgggcttaaccctatcgtgcttaagtgggttgtgcttcaatggcctaggccgagtcgggccaggcagcccgtttagacttctctagctacttcacgtggataatattggagggcaacgtctaccagcaccacactacctccatttttgcaaatttgtctataaataacactgagcaaacaaacactacttttcaagaaaagaacatcatgtcatccatatctataccac

SEQ ID NO: 3916 - DNA, 491 bp, Zea Mays
atagctctgttttcacagcggaccagcatgggtcgtcaaattgcaacctggatgacggaatggcctgaccagtttccccctcaatctcctccaattctaccgggatcctggatcaccaattcagctctaacggtgtatgctgggacgaaccagctgctgctaatcattggtggagagaaccgtagcatcgcaattatgcacccatcatctcccaccgtgtcataatttaattccgtggattccgctgtaatgacggcaattatagctctgttttcaccgcggactagcatgggtcgtcaaattgcaatctagatgacggaatggcctagccagtttcccctcaatccccccaattctctcgggatcccggatcaccaattcaactctaacggtgtaagctgggaggaaccagctgctgctaatcactggtggagagaaccgtagcatcgcaattatgcccccatcatctccccccttgtcataatttaatt

SEQ ID NO: 3917 - DNA, 540 bp, Zea Mays
tgcttgtccggctgcacccttaggcggcttttgcacggatttgtcgcacgcgagggtagtctgcgctacctgtcgcggtgacctcgtacatgtcgaatgtcgaaggccgttgtagcggtcttttttgacactttttggtaatgatgcatggagttttttgcgggggtttttcattggtatattacatggcatcgcctcgttaaaacctcgcccccgggaggtaaagagtgtcggcccgaataacatagtttggagaattacaaaggcgcttgggccttggatcttaaataaaaaacttgcgaagactatcgatgtttcatgagtgttctaggtcttcgccggatgatgttgctagcctgtaagcactagggtacgcctttgtcttgactatgtatggtccctcccactttggatcgagcttgccctaggactctgtccggatagtccttacgagtacgaggtccccttcgctgaattttcttggtatgattgtgttgtcgcgcatgctttggtctggatctggtacttattgagggtctg

SEQ ID NO: 3918 - DNA, 414 bp, Zea Mays
ccgctcccctgccaccagcaccaccctgagaactccggccgccgtccatgtccgccgccctcagcacgtcagcgtaggagataggtttcctgcttggtatgtgcggcttacggaacagtgtcgcacgcggcccagtgcgtgaagtgccggttctagcaaacaaagaaaccagaccgggaatgggccgaaagtgtgacctggggccgagaacatagttgcatctagccgcactgtcaggccccgggcgcccgtcacgcagcatgctctgctgccgtgattcccgttccgttaactcggcactgtttgaattcgaatcctgtagccatcttgcgcaaacgtcgtgattctcatgcatgtacccagcccctgactccggcgagctgcccggcgaggtggtaaacctttcagctacac

SEQ ID NO: 3919 - DNA, 588 bp, Zea Mays
gtcgaatgtcgaagaccgtttagtcggtctttttcgacgtggtttttgcgggggatttttcgcgtgtatattacatggctccgcctcgttaaaaacctcaccccccgggaggaaaagagtgcgggtcggctgaaaactattctatggattacaagggcaaattggccctgaggagttaaacaaaaaatttgcgaagattatcaatgttccaagaatgttctaagtcttcgccggatggagttgtgagtctgtacgcactgggggacgccttcgtcttgacgatgaaggggccctcccacttcggctccaacttgccccgggactctgtccgagctgtccggacgagtacgaggtctccttcgttgaactccctcgggatggctgtgtggtcatgccatgcttttgtctgggcttggtatttgtccagagcctgtagggcgaagacgcggtctccgtcgatgaggtcctttgaagtcgtctcatctatgtccgggacggccgacgcggctgtccgaggtgacccatgttttatttcttgcggagtcatagcctccgatccgtatagtaggcggaaaggggtgaacccag

SEQ ID NO: 3920 - DNA, 436 bp, Zea Mays
caccggcgatgtactgtaagtcgagaaggagagctagtccatgccatacccgccatggtccgtggatgacaggagggagagaagagggagatcctgtgagtcgccggtgattgatccacaccgacgaggcgacgaccgagcggcgagcgcgatgcggtggccggcggcgggactggaaaccgtagggtggcggctagggtttggttaacgccaacggagtcgtcgagggagcgggcgccgcgcgacagagggaccgagtgagggggagtgctggtctttgccagtttgccgtgtgacggtgtgagagtgagactgtgagtggggacagtccgggcctttgccggcctggggagtgggccatcgggcctttgccatgcctggtcagtaatcgggtcgggctagtgccaaccagtgccggccctgtgggggtccagca

SEQ ID NO: 3921 - DNA, 596 bp, Zea Mays
aacacctgggctgcggacacaattttcggaaagcacagggtgcactttataaaaaccaggggcctataccgaattacttaacatggaaagggatggcgggttgataagtcaaaagggcgagggttcttttagaaaaggatcatgactgttataatgtgcgggcgaccagagccgttcagatcgaatccaatggtcacaatacaacgcgcgaaggggtacgtaaggatctaatctcatccactggtggttgatccgatgactcacgcgcatcatcactcccacggccgaactcgtatgccaggagcgatcccagccgtctgctatggatccagcggccgcgacttcatcttcctcccgacggcgcaacaaccactggagcagagcggggcgcggcggcgcgccattgcagaggctaatctacccgcacaaccgagcgccaaactcacgtccgaagtgctctacacgaattagggattaagacaatcaccatggggaacttctcaccgaagctgtagatgcagcagcacccggccgcggtggtgagcagtagtggtgcgtcggcgaagaattccggcagtcctggagcgcgggttgga

SEQ ID NO: 3922 - DNA, 1194 bp, Zea Mays
attccgttgtacagaaaaatctgtcaattcttgttagcgttggattcacttgcccgttgctccaagtgtagcggcggccattgaggtggatttccttcatctgtaggttgtccagtgctgatctgaacgcgcccatgaggcgccgattcaagttacaattatttttatttcaggcttgatatatgagattgaaatctcctaacgccaaccactttgcccaacgttgtgctgcgaggccacttagttcttgaaggaaaacaagtttctcagcgctcgactgtggctaataaacccctgtgatccaccaagctgaattgtccgccttcatagtgatcatggccgagacagtgtgtgaggtggtgtacacttgcgaaagtgagaaaaagtcattcgaagctgcaaggagaatcccacccctagatccatttgcaggcagcacaacagtgttgtttagaaaattctgacccaatgtacgaaggatggttgcatcgtcgattgtggtgagtttagtctcctgcaagcaaacaatggtactaccggtatcccaaactagttcttgcatagaatcacgcctggccacttcattgagcccccgcacattccagctcaaaattttgcagttatgttgagacattggtagacaactgagacccaagataaaacagaccaagccaaggaagtggcaaattaattccattacactcaaactagatccagaacaaggggtactgggatgaaccttgaagttcccagaacactgcagatagtagacaaacaaacacttgtgacgacgaacgacgactgctaagctgagtggttcagcagaatcgcaacaattgaaggcccctggctgctgccgtgattctgggccaccgaacaaattggttgtgcagatacaccatgacacattcaggacaaaagaacgaagaagtgctagacattgcaaaagactaaggcccccgtagagcgtgccagaccgcatgtcttaaacctatgccgcaggtccctgtggtggaaggatttcgcagaggtccattagcgcttgcagcaccatgggcgacagtggacccttaaagaggttgatgcaggtctccagcgcggcacttgtagtagcctaatcagacggctgaccttccttaggcagcaagcccaggcgctttagcaggacctggcatgcacgttcctggatgttcc

SEQ ID NO: 3923 - DNA, 600 bp, Zea Mays
tataggggtccctaaaatgcactagtacttataaagtggtgcataactaaaagactgagcccagcgcaagtacaagccaccaaaaaaaaggctaactggaaacatatacaactcccattacatatggatggaaagccatgacataccaaccaaccaaacagggtgacctgaaggacggaacaatgattccacaacttaatggacaagattgacaatcgcagaacagagacgacaccacgcgcagttaagcacacaataaccgaaatgccttggtcatttgatgcccctaactttctcagcaccagcaacaaacaaacagtaccacaagcacgcacatctggtggaatgagaggctcgaagcacgtacaaggatatgttgcggagccgaaacttaccgatcacccaaaaacagaagaaaaagacacaatcctgcgaacccgtgctgattagagtagggcaacaacaaaattcgaccgagaaacgtctctcccacacgcccaggcatagcaaaccgcgaccttcgtcgcgcctccacgttgggaacaaccggctcctcgcccgaaccggcctagatccgaccgcgacgcaggcgggcagatc

SEQ ID NO: 3924 - DNA, 523 bp, Zea Mays
ggtggatctcccacgcattcgagtggagcatggagtcatcctggaggatagcttggaggaacttctgccgacgcccaccccattagcagagtcactggccttcgtagctaggtcatcaacctcagcactgcctgcaccagccgttcaagctcctgcacccggaggcgacgacccagacgactctagggacgatgatgaggatgacgacgacaaagaagatgacgaggataatgtcaacgaggaggccaacgacacccagcaggactacttcatggggtttggtcctgtcaccgaatatacacatcaatgttcgagacagggcacttccccaacctgctgcaagaagtgctgcatgtgttgggaacctacgtccgacccttgtacaagacaaggcgagtgtgcgagcttccccgggcttgctactacatcactcgcatccacgtcagggtgatggatgcaggggatagggggttcaggactctatcagctcgtgagtccctgacaccgctatccacctatgctg

SEQ ID NO: 3925 - DNA, 623 bp, Zea Mays
aaatctggaaatgcttctctgggtagaatgattggactgttctgtggttggattgaatggaatttagcagttcagatgttagtactttgttaaagcgaggatggcacttcttctaaaacaagtgaatggagtatgagttggatgattgattcaagtttctgtttgatgtgatgactcttgactcatggtcactgtattatgaactttactatataaactcaaacatttgaaattgctataacctgtaatctagtgatagcaatttttgtttgggtcatcttggcagcagactaatttatgttccgtcaatcggaccgcgcgaggatgcacatttattagtgtttaatggaataactggttttgactcgaaaacctatggggaacataacattgggttttggctgggtggtcgacaatcatcaaatggccaggacacccaattgtatattattcctactgtcccacatgcgaatcatgacacagatagaaaaaggagggtacacgtcaaaagaatcttgctgaaatggatacctgtaaccatggacatggaggggggactgcgttttataagtagtactctgtagtacattgcgagtggttctactgagaaaaaataacctgag

SEQ ID NO: 3926 - DNA, 614 bp, Zea Mays
gacccgcaggtcagtcaccccgcgcccagcctctttattccactcgctcgagccaacgtcaatgacacgcggggccgtgacgacagtctttgggggttgccggtgttcgctgtcgtgtggggcgccgggtcgtcagatctctcttccccgctttcctcgcgtcggtaacaaacccgccgagctactcgctgacttccgcgcgccatacccgccgcgcgagatccgcggtctcgggtgacccacgactcctcctcccgactcatccgcgcaagagataaaaagcctctcggttgctcgagagctgctagtacccatccatctgccatctctgagaactgaaagcgagcgaaacccgccaccgttaccgtccttcactggtgtcgaaattggacattccgtgccaaagcctgaaggccgggtgggcacggaaaggcatctgccccactgaatctaccgaaccgtgcccgagggccgagcaatttctcgctgtagtgcttcaccgccgcggcagccgcggaatcacggggtccggcttcttcgtcgcttcaacccttcggtatggccttcgactacctttaccgcgtttgtaggaacgttatgcatctacccgttgt

SEQ ID NO: 3927 - DNA, 492 bp, Zea Mays
cgaggagcgaagtaattaggagagggaggtctggatggccggaatcgccgcgcgccggaggaatgtcgccgcgggcctctgtttcaccctccctagtcgtccgaggtggaagagcgttcgcacgccgtgggtttggaagtggatggctaggattgaatctggtgagggagacaaccctggatcgttggatgaccttcgaacgatcgggattagggcatcgcgtaccgattggctcggtttggtaggagccgtcgatcgcgtgatctgcgcgtaggattagattctgggttcataaaaatcctggccataggatccagatcgggtggaatcggtgcgctaccgacatgtggcgcgtctagtttaatctgcgccatcggtggttgatcgaatggacccgatttccccataccgcttcgacatatgtattatgcgtatgagtccctatgtttagtcaaaatagaacccgccgtccaccctaggtttgggctgagt

SEQ ID NO: 3928 - DNA, 493 bp, Zea Mays
gtcgaggaaatccaatggcgcgaaaaagtctgggtgacggtgaattcctcaccatcgatcatgcgccgccggggatcctcctgacaccgtggatgggtacattcgcgccatctctctggtgagaacccctcccctatgttcgtcgtgttattctttaagcatatcgtgccttggattagggtttatggctcggcagcgtagcaacaccgctctccggcgaggccgccaccacgtccagcaggcaacacagtcgtgggtgtcgtcgggggagggagatggaactcgggtcattgatatcacgacgtacaaccttgattagaagttgcaataccccttcccgtataaaatctcaatcattgatacagatattgacgcgtaggattagatcagggcgtgggagattttggaccgtggatctgagatccaagggccaagataggaaactggttcacttaaaaagttggtctaatctgcaccattggatggtgatcaa

SEQ ID NO: 3929 - DNA, 728 bp, Zea Mays
taatccacacatagcctcttgcttttatccttcttctcaacaaacaataccaggaaagcccaaggagacctgctaggcctaatgaaacccttagccagcagatcgtccaattgctgcttcaattcaacctgctcctttggagccatccgatacgaggccttatgaataggctgcgtacccagaatcagtttgatttcaaaagctgcatcacgctccggtggaatgcctggaagctccgctggaaacacgtcggcataatcacacaccacacggatgtcctgcacccgcaaggcagtctcactctccaccaccatggagaaaaagattcctgacttccttgactgacgatccggaagtaattgagacaacaaggatagagtgaactttggagaacttcccaagaataccacctccctacccaacgacgcctgcaataacactgtcttccaaaaacaggatataactatgcgatactgagttaaccaatccatacccaagataacatcaaatgaccccagggaaatcaccatgagattagctgaaaagacctcatcagcaagaatgacggaacaacccgggcagactgaatagctactaatggagccattagcagaactaaccacaattggatgacccatcctctgcaccgaaagactagcacgtgacacaaaattcaccgaaacaaacgaataactagcgccagagtcaaaaagagcatgggcaacaaa

SEQ ID NO: 3930 - DNA, 411 bp, Zea Mays
gtggacctcatgcgcgatgcgagcgtgggtgcgctttgacaaacggggtccatgggtcagcgacccaaagagggaggggagagaataggcgtagggaggctgttaggtggggcccactggttgggattgccgtcaacctcggtcatgcgcactgcacgagcaccatggccggattcggcaacttcacgcaggcaaaggagggcatggggcgatggcggttggccggagagccctatcacgatggcgcggtgccgttgctggtgatcgccggtggctactcaatggagcagggaggacgggggagagagaaagggaactttgatggggaaattcacatcgggtgaagcacagacggcggcggagctccgttcggcggtggtggaccacggtcaagaacggcagggcggcctt

SEQ ID NO: 3931 - DNA, 344 bp, Zea Mays
atagtggtcaccccgagttaagtaagaatgcaggtcgaccatgaacaatatgggtattcttgaggtctctttattgatgatatatttccagttcatagggtacattgtcatcccgatagcttttgaaatacagctaggggtaaaacttcctgaggtgttctatgttccatgagtttccaatttccgtgacatccatctgagtgagacgatatgatcccggccgagtgacttctgctactatgaatggtccttcccatagaggtgacaacttatgtcgtccctcccccgttagaattcggcggaggacgagatctcccactgcaaaggatcgacgtcgcatggcc

SEQ ID NO: 3932 - DNA, 570 bp, Zea Mays
ggcgtttcgggtgaaaactgtcagacctctgaatatccaaagcttcgctagcttctgggaggggcgctaccaccggtgtttcagcacgggccgcatcagaggaatcttcagctaacatatccagcatggcacttatctctacatcactgggattcaaaggcacctcaaaatgaacctgcctctcgtcgtcaggaatttcttccagtgaggcaaccaaagcattaacttcttcgggagagggtcgcactctaaggcccaaaccgctatcaccggcaggaggattcgacacaaaactggtaaaggccttggaaggaggcagattccaggctgagtacgcaacaggagcaccaatgttcgacaccttgcctctgagtatcatttcgagccggctcaccaagtccacagcaggaattcttctgttggttacccgggttgaatcagccaggcctcggtacaataggccggatatgctctgtctttcagcagctgaatgttcttgaaaacaaggtcagcgaccacagcttctgcagtcagacccctttctttcaacaatccaacttcagctagcag

SEQ ID NO: 3933 - DNA, 388 bp, Zea Mays
gtcgtgtaagttggagtgtcatgagatgcatcaatgtcacctccctgacccaaaaacaatgatactatgtttaaagcctcattcatgtgtcaattaaatttaatcgataattgagattacaatggagaaaacaaagatgaaacatatacatgtttttgcggtgtggcgtcaaacatcggcaagtgggaagacggatatgagctcatagggttgcagtctggtacatgtcgatgagacatgtttatgtcgctcggcatattattgccaacattaaaatggaaatcctgtatacattattatggttttgtctaatattttggatgcaaattggaaattaacatataatgtaaccatgatgagactgcataaaataccttgcttttccgcg

SEQ ID NO: 3934 - DNA, 398 bp, Zea Mays
cgagacagaagagggagggaatatcagaagaactggcatttgtaactaatgctgtaagtaaaacaccaaagtaaaccaagaagtctctagagggagtgaatggatacatactccaactgagctagtgaaacttgcaggagaaagaggctgtcttgagtgacatctttcttcatgtaacttctcatgctccatgactgaagctggaatttgtgctccaaagccacctgaactccgtggctgaaatgtaagaagaaacttatggcattcagtatgcatgccttgttgaaatagcaaaaatcaagttgtgacatccagagtggaaagcaagattgccactaattgatcccaagtcaaattcagaatgaaggggacaggattaaattaagggtccacttggc

SEQ ID NO: 3935 - DNA, 595 bp, Zea Mays
tggccacgaactccccagcccctggactagcgctgcctcacctgaattgctcgccggtgcccaagtttcgtcccgggccgcaccatagcgtggacaggtgtctactggtagccattcttcccggtaagtctccgtgcgcgttcgccttttcctcccctttaattagtgcgaagtgcgttcgcagtggggtagtagaaagcggggtcgaagctagcggcgatggcgccgtcgcgttctgcgcgcgccgccgtggggaagctcggctgcaggcggaggatagagaacgattcctggccgttgatctgattgtgggtggcctagattagaaggtagttaccccctttgttcaatggaaccgtgaccgtagatctgtgcttcgatggatgagagcgtgcatgggtattttaaatccggaccgtagacagggatccaacggctgcgatctagtttctgtttgatgcgcgcttgatctatttagaaccgttcgatgataatctggcggcccgaacttcgccataacctttcgcgctggtagttttgctaaagagtccccgaggaattcaccaatcaacccgtcatcaagtggaactattcc

SEQ ID NO: 3936 - DNA, 318 bp, Zea Mays
gaactccttctctaaagtgtccccaaattccttgagaaggtcatcaaggctggccagggacatctcctcggtgtcggacgagtcccttaacccggcagggggtagggttggagggttttcttccttctgctcagtctgacatccttggcttttggtcttcttgcggatttttcttgcgggggcgagcttcttcagtttcttgtcatagtccatttttagggtgcggtaagcttcacgggtattggtttcttcgccttcagctattgagaggctttcttgaagggacgccttttcccctgaaagttctatgactttttg

SEQ ID NO: 3937 - DNA, 455 bp, Zea Mays
gaggcccttccggaccccccacgggtccgagctgcagacaggtatatgctgaagtgaccacagccagagacgagggctcccatgtcaaatacagatgagaaccctgggtcggggcttagccccacagcagataccataccaagaggggctccgcaactctcccccagctgggaaggacccttcaaggtaacgggagtacaccgacccaaggggaaccatctagctacgaccggaggagtaccttaccctgatgccaaatatctctgtaagttctatccatagagcaagactaaggggtcgagtctgtttccttcttttctgtaactagataacacatacgtgtacgacaacccggtgggtctgcccccatgaacccagactattggactacacacatgcacgacaagttatgaagaagaaactaccccccttagccatgctcttgtgatagttcc

SEQ ID NO: 3938 - DNA, 484 bp, Zea Mays
acgcacgaagaggtatgatgaatccaatctcagccgcaagaataccgatcaatggcccaggcacactcactcgaaacgctacccacaatcaaatctctactgtccagtctcgaatggacggttgaggtgtcgtcttcttcctcctgtcgcaggggcacaaccgcgcagggtctccatgcggcggcgcccagatcacgacggtgggattcaccggcctcgcgacccgacggtcccagcacctatcacctaattcgacacgagcgacacgtaaagggtaacaaaacgaagttgtgagagttattctcaccgagatacgcgtcagagaatgatagcccacagtgaaggcatatccactgcggcggtcggctcccacacactccccgatctcacggtgcaggtttcgatgggggagggaggtcgcatgggtttgtttttatagcccgggggcattggcgagtcggtcagatcagaatggaaagggggc

SEQ ID NO: 3939 - DNA, 693 bp, Zea Mays
ccggaccttagggcagatgaacaaggagccctttggttcaaaaatcgtctgtgtgtaccaaaaggggaagcacgagaggtcctgctcgaggaagctcacaactcagcctactccatccacccaggaactaccaagatgtaccttgacctcaaaaccagattctggtggagagggatgaagaaagagatagctcagtatgtggcctggtgtgacacctgccaaaggacgaaggccgagcaccaaaaacctgtaggcctattacaacccctccccgtgcctgaatggaagtgggaagaaataggcatggattttgtaaccggactaccacgaacgcaaaaagggaatgactctatctgggtaataatagatcgcctcaccaaggtagcccatttcattccagtgaaaactacctttggaggagccaccattgcccgaatttatctcaaagagatagtcagactccatggcatcccaagaaagatagtgtcagacaggggaacccagttcacctccaaattttggacaagccttcagaaagctatgggcaccaagctagatttcagcaccgcttatcaccctcagacagacgggcacacagaaagagttaacaaagtcctcgaagatctattaagagcatgtgtgctagcattcgatagaagttgggaatccagtctaccctacgcagagttctca

SEQ ID NO: 3940 - DNA, 946 bp, Zea Mays
gacttactgagttgagttgtcgaatccgagattgtttgtaatttacctgctggcgattcccttgtgcatcgtagtcccttcctccctggaggcatcttcgttttcggatggagaagctgaaggattgagaggctacgaagcctcctgtgccaaggatgaggaggtaattagtcagggaagttgggaggaaataagccaactgatttgctgcaggtgatgggagcaaacgccgccagccgcgcgcgtgggggtggggctgcggctaggccgccgccgctggacgtgactgtcgtcgccgcctggagtactggacgactcaggtcaggggttcgctattctggatcgggagtcagggctgtcgggtggtagctgggatggggattgggtgattggtgaagggattatgaattagataataggtggttaccgaatgtggcgcggcgggaaagtgaaaaaatgccgccaaatcccacggataagaccaaaattaacaaaatgacatgattatagaactcactattggagtaaaacaaatttgttggatcctaaataaattaaaccaggtcctattttacctttcaggacctatttttaggactctttcttggagatgctctaatgtaataaaaaaccaattgaacaacttcacataattgacggatacccacgggcgagaggtaaatctcgtacctaacttattttatcatgggtcaggtatgcgtgagactcgtgggttaaattttgtgcccaaacccaacgcgtcagatatccgacggatatgtgaacccgcgtgtaaaagtgtcatccctaatcacgctcgcactcgacgacgaccttctcgtaggcacgtgcattagtgccaggaagagacgcatggcgtgcaagtgggccaactcgatggcacgagatcgacaacgctttaggccacacggagcccgatggtgaa

SEQ ID NO: 3941 - DNA, 409 bp, Zea Mays
ggaaaatggataagggaattgccctatgtcgtctggagcctaagaacccaacctagccgagctctgcagggaaatactcctttcttcatggtctatgggtcggaggcagtgttacccgctgatctcaaattcggggcgccaaggttgatcttcgaaaacatagcagaagtcgaagccactagactagaagacattgatatactcgaggaagaacggctgaatgcggtaatccaatcagcacggtaccagcagactctaaggcgctatcatgacaaggccgtgcgacagcaatccttctcagtaggagatcttgtcctccgccgaattctaacaggggagagacggcacaagttgtcacccttatgggaaggccccttcgtggtagcagaagtcactcggccaggatcat

SEQ ID NO: 3942 - DNA, 385 bp, Zea Mays
ggcggatggtgtgcagctagggcctggatggtccgcgaccctccaaaggtcagatctgacacctcaacggttatgtatgacaatccaacggctagatcgatgcttgtcttccctcggtggcgatatgtggacgatctgtctttgaccctagacggtccgcacgggcctctaaagatctttttactcaacttatcatcttcaggctaaaacaaatcaatataggtagtcgatccatgaattatagccagacggttcgcacaagggtccggacggtccgtagtacatgtggtattgtcaaaaagttccgatccgggacagtccatactagagcctttgacggtcagcgatatgctgttttgagtgttgatcttccttgaagtatctt

SEQ ID NO: 3943 - DNA, 980 bp, Zea Mays
gaaagacacaactgaacgccactggtgagaaagaacgagcgggaggcgtggttgtcgaactcgcggccattatcgtaatgtagggcacggaccgggcgacggaactgggtggagacccaggcgaagaaacgtgtgaggatggtgaatgtgtcgaacttcaactgaagaggaaaagtccatagaaaattggaaaaatcatccaaaatcaccaaatagtatttatatccagaaagactgagtacaggggaggtccaaagatcacaatgaaccaggtcaaaagcctgctcagctcgagaagaggtagtaaatgggagacgagtatgtcggcctaactgacaagcatgacagagaccctcaaaatgtcccctatcacaagatgaatcaagactactgaaaagtttggtcatgacgtcaggtcctgggtggccgagacgacgatgccaagtggtggaggtggtggtggagaccatgacgggtagtggagacgcgccggtggaggaaggacggagcgtgtataggggcccagtgttgtcagagcaatcaagaggggtcctggtggccagatccttagaaaaaccagaggggtcaaaatcaatagaacaagaattgtcgatggtgaaccgacgaacagaaagaagattgtgggtgatgtgggggctacaagaacgtcattgagatagaacggtctgaggagaaccgaggcacctactgaagtgaccggcagagtggaactgtttccaacgacgatcgaggcggggtgggaggaatggggtgggtgagagcgagatagcatgcctgcggtgggggtggtgtggtaggaagcaccggagtcgatgacctagtcagggctggttggggccaacgccaaggtgttgtaggcggcggcaagagaggcttggtcccaacctccagcgagcgacgaccagggagtcatggtgtgggtccccggaggcatgagctgaggcggggtcgggtcgtcg

SEQ ID NO: 3944 - DNA, 985 bp, Zea Mays
ctcactatgcaaagtgttttcctagttctcacagggttgctatatctgatggagagggcaagacaccttatagagtattagagttgatatgagggggtatatatagccccaaatgcccaaactagtccatactatttgacttggattttttgtgtgcatcgaacatgtctggtgctagcaccatacatgtcggtgctactccaacggctacttcttcaaaactagccgttagtgtatagacatctggtgcgccactagtgtcacaccggacacgttcggtgcatgcaactggatggagcacagtcacctttttatgacaatgtttcatgagatatttctttatcaataactttcctctctatgacaatgttttctttagtggttgcatctctcaaatcttttctttagcttctcattctctaatgtgattaggtgaatcttgtcaaaaagttttttctcttcctcttgattgcatatatgatcagttgaatgttcatgattcatactcagtcatcatatagtagctacatcaatcttaacaatgttgttaatagcctcatatatttcaatagataaaagctcatgtgtaacaataagattgtcatgatcaattttagtttgagtgtaatcttattttagtgatgcatgtctatcattggtctctccatttgtttcacttagtttgtcatatttctctttaatatcttttagatagatcttaaacacattattaatagatggcatatttttactttcatttttcattttatcacttacttttacaactacgtcattttttaacaatcaatgatatattcttatttttttaacttagtcacatttagggatttaggattcattaaaaacttgagtatataatttaataaattagctaactcatcatatgttggtgaagcgtattactcaccactatcactatccctagtcatcaattgttgatttttctatctcagcatgataaaag

SEQ ID NO: 3945 - DNA, 434 bp, Zea Mays
aaattgatagcaataatagtcttgcattgtcatacgaactcttaaatttgcctgtctgttttgtaagccgctatacataacaccaatttggaaacctcgttctccatatggaaataggagtggatattgaagggccatataagccggatgtaacgatgaaatacgttttaattcataatttctggtttctatgataatgtctcgtttgaaggtttcaagggagaaatcaccgataactagcatggctaaatcatcagttgttggcatgtcatattgcacaggatctccttctttggctccaataattctgatgataaattcctcgtctgcatgttcgataagcctttccttagcaattctgaattttttagcgaaaggattatgggtgcccaacatctgtaatagttcatgaacaatttgtggctgtataggag

SEQ ID NO: 3946 - DNA, 422 bp, Zea Mays
atttgagcaagtttggctggtttaggcatttcactgagaagttggtgtgcggagtattgtgtttgaggtgaaatggctattttatggtttgaaacctccaaaaaggagatgaatacctgcaggagggttcaaggtggcactatggcacacaatcatgcacttggattcacaaatattgcatagattttggatttgagtcaaaaggtggtttgaagaaacttcactacctacacagattgaaaggaaagagggggaaggcagtgggggtgctcaccagagaggaagaaagcaggggaagcaggggcactttgctggggcagagctccggtgattgccggcggtgagcataagggagaagtgtcgccagagagctaagggcgccagtgctgagataggaaagggagcctctggcttgggctcgg

SEQ ID NO: 3947 - DNA, 1049 bp, Zea Mays
aggaaactaaagggtttcacctggagtgagttcagcacctgattactagaatgctttggctgagaccaacatgaacatctcatcagacaactcttccatattaggcagacatcatctgtagctgcatacatagaacaattttttgggctcattgatcagttgtgggcctatgaaaccaaaattgatcctctattctataccatacgttttattgatgggttgaagcctgtaattaaatctaatgttcttttacagcgtccatctacacttgatactgcctatactcttgcccaattgcaggaagaagtccttgagcccgtctggcgagatgcatgctgatcattgtattctcgcggcaccagcaatactccagaaccgcttcctcttccaagaccaccggctctagacactgccctgcgcccccgttctatggacgacaagttttcatccttgaaagcttaccgtcgtgcacgcggactgtgtgacaagtgtgctgagaagtggtctcatggtcaccgttgttcaccaactgtgcagttacacactcttgaagaaatgcgggaattgttctagggcaattgagaggagccccctcctgatactgacgccaaatctgcatctgatcagttgctgaccatttcaatgtctactctctcaggatcttgtgttccacacactctccaattatctggtgaatgtcaagggtaccccatctccatctttttttatttaggcagttctcactcttttgtcagctcaacattagcttccaagcttcatggggtctcactgctcccccctttagtggcagtcaaagtggctaatggcagtattattcattgcacttgtgtgattcctgctgctatctggataactcagggctacaattactactgatttctgtgtctttcccctctcagcttatgatgtagttcttggtatggattggatcgagcacttcggccccatgaagattaattggagaggccggtggttagcgttaccatacaatgggaaaattgcggtattacaaggaaaagttcacactt

SEQ ID NO: 3948 - DNA, 362 bp, Zea Mays
tttcatgaccatctacgatgaccaactctccaccaatcagctctggccgacctactcaccgtcgagcaacccagtgaggccaagatctgagtctagagctactaatccacatcagctacgacgagacgcatcaccatcaagtcacgccaggacatacgcacagcatgccaaaagggcaccggggtctctacagtgacccgtacatcggaaggaggtgacgaagggctcatgacgacaagagaagccatgccacatacaaccacaccatgagattgatctgtggaacccactgcgcaccactacaaagatgtcagtgatggactcgctataggagccaaagtaatggacgatgccataccagg

SEQ ID NO: 3949 - DNA, 366 bp, Zea Mays
gacgagagcaggtggagcggcatggctgcgctatcaactgggaggggcggtggcgcacccaagggaacggagaaaagataggtgttgggtacatgaaagaatggctgccttcagcaccggccacacaacgcgcaatggcaacaccttctacggacttcacgcctcccgcgaccgtcactcaagccgcacaggtgtgctcgtgtttcgcggccgacaactcgtggactccctcgtcctccccactagctgccacattgttgtaacggatgagctggtcgccatcgagattgtcacaaacgcggaagttatcagggttgccgacatggatctcggctgcgggcaccgggtgaagaagtaaagtttatt

SEQ ID NO: 3950 - DNA, 482 bp, Zea Mays
gaaaagtgccttcctctatgaccacaactgatcgtcatagaatgaattcacttccatgacaacgtggctttcgtcacagaatgtatacacatcgatgacgaaactgggtagtccgtcacaaaacaacaaatgtgacacgacccctatgaccaaatcgaactcgtcacaaattcgtcacaaacctttatctgtgacgatatatacacatgcagtgacgcaatacgaacgtcatcgatgataagatctctactagtgtgttgatcctcgactgcttgaccttcagcgtgccactgtagcctgggtacgtaggttcagacatgtacccatggagtcctggttgccagctcagagggaccctgcaaagcagctctcttcagtaccaagactcatgagtccttctttcgggcatagttgtcagcgcagatcgccttgcgagcgcatcggctattggatctacctgcttttctgctcgtagccggtgc

SEQ ID NO: 3951 - DNA, 729 bp, Zea Mays
gtgaggtcgagggtgttgcggtggtcacgtcaaggtgtcggggatggtcggaatcgagctatccatgcacgcatgcagagaggctcgtcggtggtgagtggtctggtcagtagagagctgtagagctccaattgaggggtcgcgagcttcaccggaggttggtggagctggctgaggcttgaattggatggtggtgctctgagttggctggatgacactcaatagggagagaagtctccgacgaacggtggcgtgctcctgtgggtcggtagagtgttgacgagctgactggcaagcttcaccaagacacaaggaatgcagcactggctttggctaaggtaggggtggttgggatttggcggatcgtgatggctgagctgtggtggcggtggcagatgatggcaagctcactagaatgcttagcctagggcatgaagtgagggaaacggtcacgacaacaaggggggcatagcagcaagagctcgggcttttgtaggcatgatggctagaacagaaggcacgacgtgtcggtggctgaccgacaggcaggggcgtgcgcgagtgtggtcagtgtgcgtgctagcatgtctgcttgtgtcaaacacgtggcacaaaagcatctactggctttcaaacttgaaatgtcactaatccaagccaaaatcgagcaaaatatttacacaaaagatgttgcttacactttaagctaacacatttgtgggggactat

SEQ ID NO: 3952 - DNA, 469 bp, Zea Mays
gcgggtatggcgcgtccaccgtgggggcggtcagttaagccagtcacggcgccccggtggccctcggttgctctggtgctgtctagcggagagagaatatgggaaacgagaggtggaagaaggcccttggccgtgggatttgcaagcagcgggcaggattggtctgtgacctcagtcaatctgggccatcaaacttatgtggacggttaggattcgcttacagcataacctttcctgcggatcgatctcggccaccggttgtgtatcgaacggctagaacctgatttgtgtagatcaccacgctaaatcgcctgtgtctaaggaatcattcagtatagtccctagacttttaggtattaatgcgcgcagtcccgagggttataaaaacacggaaataattatgaaaattgatttttcaatacaaaaataatatcagaaacttggataaatcatattaaattcattgtag

SEQ ID NO: 3953 - DNA, 807 bp, Zea Mays
tcggggatggccaaaggtagggtcgcatcctcagactccagcaaagcagagggaatatctgaagacaagaaagatttcgaccaattgaagtagtccttatgcagcaggttagacatgaaaaaaggagcccatttcttggggatctgcacagagagctcaggattaccagcaggagcaaagtagttggcccagattctatagaattgggcattcctttgcctttccaggtgactcagaagaacagggtcaggccgccaatcctgggcaaacatataattcatctccacaatattggggtcattgatgttaggcccccctggctgggcatcaggtaaaacaatatcccctggcacatgaggacctccctggataggggacccgtcaatctcctgaaggtcattcaagggaataccatccacaacaggaatggcaggggcattaaaggggagcgctagcccaacaacatctaggtcagcaggaatctgcccattctgaatctgtccattctgcaccggaacacccagagcgggaccagaagaactagccgaggacaagtcagaatgagggttgctgacttgttgctcgtcaggtggcaggtcttgatggggctgtagcacaggcggtgcattcacaatccattggtcccagtccccctgaatattatcagcaggctcggcctgggcattgtcaacaggtggcaaattgaggtcccaccccacagcaggcacaggttgacccagaccaaagaactcaaggggaagctgctgaccatcctccggggccaccgaaaccgggtcctcatcctgg

SEQ ID NO: 3954 - DNA, 621 bp, Zea Mays
ccacgagatccctattcgctcaactctaggtcttccgaggggtcagggcttgggaccaccctagaagaaaatggctcgcccgacctagggttcgaaaactacgcccaacccatcaaagatcattttgtactaaggtgtgtcatgaggatggtatgatgctgccagagtgacactcgaatgagaggacatgggttaaaaattgggcacacgagctctgacgaacagacaacctgaatgaccactccggcaagagcacacgcgtgcgactgctggtacgagggctgaccgatgccttatcgtggcatgacctgagagacaaccgggtgtatgcactaggacaaatgagacagagcatgactcaacacgatgacataaaaaggggagcaacatcgactgcaaactctggaggatgaaaagtaacaagacaagatcgatgccccttccgaccggttcgagcattgtccctatgtatggaaattgcccctcctttgacatataaaaggaggaggagcagtgggtgggggcaacagacacaagtaactaacacttgcagttcatcaaactccatacttcctccgctctccactttagaggtttggacctcgagtcctccctcacccg

SEQ ID NO: 3955 - DNA, 294 bp, Zea Mays
aaaaaatagaggtagtagtaaagacaaaacgtaacgttggactaaagggttccaaataaataaaaataacggacgcggatagttatatacacaaatctgaaatctctcgacagcaggtgggaacggaatgacatatagacacatagtttgttatactcaaaagtcctaggtccgatgcaaatgtgagtgaggcccatgcaggctcctcgccctcagctctgttttgttcttcaaacattgctataaaccacccaaccaaatgatttatgcggatatatgtgtaaggaaaaagga

SEQ ID NO: 3956 - DNA, 779 bp, Zea Mays
gccaacttgacttgctgattatcaccattgtactttaatctattatgtcctttttaatttgattaggttttcaccatgaaagcgtatcatttaaggtttgtttgcatggttccaaattaacatgcattactagaaactatggaatgaagcctaaaatagtttgttttgttttatgctccagtttttttaccataaccataacacttaaaattcgtagtggattgagatgtcgtcattgggatcatttaaaactagagccgttatcttggtaagtgttttcaaaatgtttgcttgatctgtctggatactatatattcccatcttttgctataacttgtaagaacacaccatcactatttagatcacgaatctgtccttatttcactatctctgcactatcacagctcattttatgtctatggtctatcacggatcatttggtcctaatatatctttaattcatttatctatggaaggacctatctcctatgcagtataggaagctaaaattattgcttgctgtttagttgtgggctcaaaagtgtatagtttcttattcccgttaaattgtatcgtgtccctaacttcataatatgtcaatagattttctagcactcatttgagtgtattttagaatcaaaatttaaatcctactttaaagttatttcataatatgttgaccttataaactatgatgccagttatttattcattgtatagttgaccctgcttaccaattgagatatatcgttagatctgataggacaatgaagaggaaa

SEQ ID NO: 3957 - DNA, 1233 bp, Zea Mays
cggggggaggagctcgtgtccgggatccgccagatccgagaacgtcggcggtagtagcagtggcgggggtcgccatggaggcccacgcgccgctcgacttcgcgctcttccagctctcccctcggcgtcagcggtgagaaagcgagaggctagcaagcaaaactccacccatttgatgcgttcgtgtggttcttgcgcgctaaatgcggccccttcggggtctctgcgcaggtgcgagctggtggtgtgcggcaatgggcggacggagaagatcgcgtcagggtcggtgaagccgttcgtggcgcacctgcgggctgtggaggaacaggcgtcggctcagccaccgccgccggccatccggctgcagctggaccggcccgccccgtggtttagtaagggcacccttgagaggtctgctgattgtggcttatccgtcggttcatgggttggcggtgccggaaagattggattctgatggatgttttgttggcctgtgcctccaggttcgtgcgcttcgtgagcacgccagaggtgctggagttgacgagcacctatgatttagagatgtcgcagctggaaggggctaggaagatatatgcgcagggagtaagtgccaagcaattgtttcagatgctgggtgtttttcgtcttctgtttcttcgtgtagctattgcctaaatttctgtaccttattcagggtactggagacgctacctcaggtggaactggtatgtaggatgattatgttcagtgtttggattggcattccatcatcaattggggtttcgatattgctagcttattccatctatgttcatacctgataacgtttctctgcgcctttttattttggaaattttagtccatgttaactcgagtgacattgaaatatcaaatatctaattgatggtaaaagtcagaagcaaagaaggaaaatatagatgggaacacaactgggataattgatccccatggaattttaggagctcttgactatgaaacgatgcattggatagcaccaaatttgcattggaagcaatctatgtctaattcaggaaagacataaatactgtaattaattgctaactgtttgtggggttaacgaatattgttataatgttgcattgctagtgtggtctttcatatctgctgtgtctgaatctaatttatgtaatatctggccatgcttattggcagctgaaaatgttacaggctcagcagcggcggtggcag

SEQ ID NO: 3958 - DNA, 546 bp, Zea Mays
cgttcggtcgccggaaccgtgtgggtgaacatgacgccgtggaagatctcgggcagcgcaatcgctcgctccgggcagttctcctcctgcttcgggatcgactggatgttcgccgtggagtgccgcgccgccgggtgtgtcgcgcgggccactgctgctgggggctgagaaggaagacgatgggagaaacgtcgatttctggtggacgactcagattgaacgatgcgtacacccctttgctggtttgatctgtgcggttggttccgatcggacggacctggtgtgatcacggttatttaaaatataggtcgttgatctggccagggacggttacgattagactgggcgcttacctcttcgttggttgagtatgtaccgttgatctatgatctaacggttgcgatgcgcacggggttaggcagccgagccaactttacataagagccctcaagatttaaggtaataaacccgccgtccatttttcagtataaagaaagtaaaattaaatgaagactttgcgttttagcccatggggtttgtttttag

SEQ ID NO: 3959 - DNA, 391 bp, Zea Mays
tattttgcacaaccgcgacatattattcacgtttctagcaggtcacagatatcgtcgagcaaaatgtgcgatcgatcgcgtagtcgcgtatttccatggattctctctcctctgcggaagacgttgggcatgcacatgcgcgagccatgagatgagatcaccttttacatcatgcacctgacacgtattttgcacgtgcacatgtcggtgccaccggacacaaccttagtcgtgcttggatcggcacgcccacctcgtctcttccgaaaagataatccttttatctttcgtttcactcttttggttgggcatgataagggcgcgaaatattccgcgtgtttggttgcatgtatgtatggagaagttgcacccactggttcccaaagcggtg

SEQ ID NO: 3960 - DNA, 638 bp, Zea Mays
catcacatggtcattttccatatggtgcctcaatattattggacctttcaatatggctaagggaggggtcacatatctctatgtatctattaacaaattcacaaaatggtttgaagctaagctggtggcaaaaatcatgttaacaaaggaattcaaatttattcaagagatattcaattggttccacatgctaggatcaattattactgacaacatgagaattcacctcttgggtattcatgaactattgcactaataaaggaatcattatgaactttgacttattagcacatcatcaaagaaatggtgaggttgagcgagataatgagctcgtccttaagggactcaaaccccggatggattaacgatggtttgaggattttctagccatcttgtggggactgcagacatctccaagtttggtcactagacaaacatcattcttcctggtgcatgggtcataagccatgttgcctaccaagatcgagctccaatctttcagagttctcaacttcatggaggctcggtcactcgatggtcgagttgaagatctcgacaaacttgaggagtccagggactcgaccatgatataatctgccaaataccaacaagccatgcaaaggtatcatgaaagaaat

SEQ ID NO: 3961 - DNA, 465 bp, Zea Mays
agtagcgcgggatgactgaccgtagaaattgagcgtaggatcgtgctcgctgagaactaccggatcggttggaaccgagagaggtcgcccttgcacccgatcgccggatttcggcaggcgcactccatgggcggcggtggcatcgccgggaggttttgactggtgacggtgaagactctcgtgtgccattgattggattgttaacgaccaggattgtacgaggggcgatatgtgttctggattggcgtcgtccgtccaatcacaatcgggcgaacccaaggcgatcgcggtagcgttgaatccaagccgtgggttgcggatcggaaggtcaggggcgcgtaccgattcagacaatggtggatctaatcctagcggccaagtgttgatcgtactgttggaatctagcgttacccctttgtcgtgtctgttttgcatatgagcccctgcgctttccgtaaacaagcc

SEQ ID NO: 3962 - DNA, 625 bp, Zea Mays
ggttcgtctttagcaaagatcaccagacagacagtgacaacataacatctctctaatgagttaaggttttgtgaaataacgagaaacacattgaatagaatgcatacaggatggtaacattgggagggggcgaaagaggagttgacagattgttgagagcattgttctggaaatccctgtaaaattcaacacagaattagacaatacattaccttgttctagaaaagtgagatgagtgaagatttggtcttacagtacaagacttttatttcctcttagatcaatatcttgccagatattagatggaacagaaccagtcaaattgttgtcgtcaagtgacctgagcaaagacaaaatttgggtctcagttcagcctgatatgactgcatagctagtccagtagtgttgacaaataaagtatcctcagtgaaagctgaaaggaattattttttgtaagcatggcatgggcctgcagaaggtactgagaacacattgattttgtcttgtggttacactgtttgtgtattagattaaattcatataaaaggagagtcctctataaggaggcatattgtaaccattagtccgttactattaagaaataattgcatcaaggcttccacta

SEQ ID NO: 3963 - DNA, 318 bp, Zea Mays
tccggtgaagacaactaggcagaccccagggggacctcgtgctccccagcctacggagctgaagcatgccttcctccggaaacccttctggatcccccgcgggtccaggccttcgacaggtacatacaagaacagtcgtagccaaagacgggggctcccgtgtcaaatgcagatgaggacccagggtcgggacctagccttgcggcaagtaccgaaccaagaagggctccgcaactctcccccagctgggaaggaccctccaaggtaacgggaacgcaccgacccgagggtagccacctaactacgactgaaggagta

SEQ ID NO: 3964 - DNA, 336 bp, Zea Mays
aatgaatttagttgtccacagtgctcaaggggtctgtttcttggattctgtggactgctccgctgtgaagaaggatggcaaatatatttttgatcttgtggatagatgcatccaagagataggagaggaacatgttgtccaggtggtcacagataatgctagtgtcaatacagcagcagcaagtctattggcagcaaagagaccctccattttttggaatggatgtgctgctcactgccttgatctcatgcttgaggaccttgcaaaaattggagctgttgaggaaacaatttctagtgcaaaacatgtgactgccttcttatatgctcatacaag

SEQ ID NO: 3965 - DNA, 731 bp, Zea Mays
aaaatgaattacttatgaattaaacaagtgtctggaattatttttatactacgaatcattttctattttaatttatctcattttatttactatctggactgcgggcactattcttgagaagctcagggtctgttttgttaattccagggcctgacagtgatgatctttctatagctcaggactgcgggttgataaaccaaacatacagagtctcttttgcaaatatctatggccgaaggggtatggaggattctgagccgcatgatctaacatcggtggcctagattagacttaaccctatatgacccggtatgcaatctctcccacacgacttggaagagacgaccctgattctatttggttggattcgatctcacccgtgcacccatgatccaacgatcccggtttactaacctaaatcgttatactctcctgttaatccactcccttcatcggtcgatcgacagccccagtttttcttcttcctcaacgcctagtcacattggtggcctccacaccgcgaccgccattaccggtgtgcagcttccgccacctaagtgccccgctaacagttcgactagatgctacttaagatagagggcaagacgaacaacatggagacactcaccggtgaccgaaaccgcggcgacattgaccccgacccaaagcggcttgccaacgaattctagactccagtacacttcggcgagcactgatgcacccatccgagc

SEQ ID NO: 3966 - DNA, 921 bp, Zea Mays
agccacacctcccgttcaccgcctctgtgtgtaagtcactgccatgtggggcctatttgtcagtagcttcttctagatcggtccattgggatcctccgtatcttccgtaactcgtctccctccccgcgcttcaataaactgcgccctgaaacccccctaccacctcggactataaaatcaagccctcactatcccctccatcgatacggaagcattagagagacatcactaaagagatcgttgggggagaacgagagagatgtgcagccgccgtggtcgggatcatgttgcgctagcgtcggagccttggagcgtggactgtggcagtcatctgtgctcgctgcacgagtccgtaacttcaccaagtggtttgggcgattggagttcatggcgagctcgccaaagtacaggaatcatattcttgcggtaaaccacccccctaatctgttagcttccgtctctaccctatttcatgcagcatttgccggactagggctctaaatcaccgacgggcctagcaccggtgtgctcgccaccacaaggcgttaaacgccgccatgtctggccgctataaggaagaaaggttcatagccgaggttctcacaatggacgatcaagattagattgggttatacccttttgtctgtcgaatacgagccatagatcgttgatcgggggtttgggttgggtagcggataattaaatatgggccgtctgatgtgatcgggagaatccaacagctcgcgcccatttaatgatctatgccgtcggtattggattcatcggctagcgttgcttaccgcttgggagcagctcagatgtaatctggaccgcgaacttctaattggacggctaggattggccgatacctcttcggccggcaatcttcataaagagcccctgctctttttcgtatttaac

SEQ ID NO: 3967 - DNA, 419 bp, Zea Mays
cggtggcagaaaatggatttgggggaaatgcgaaattgggaggctctggtggatgattagaggtgcgagctagtgcactgggtgcataataacctagcagacctggttgatcactcaatttatagaagccaacagcggtggtgtccaatttggagaaggtgcgctggcggccggagagaggagaagttcactggcgcaggctgtcgtggctttcactgaagtaatgacttagacgatggactggctatctacggcggtttgtggcgacatggtgaaatggctgacggtgtggcaggaccgcgaggaatgacggcacgacggcgatggtcgcgcggccacgttgcggtgcaactgggcacagtgacagagcaactacagtgtcccatcttcatctcttgcccaagatctttcaccccgcg

SEQ ID NO: 3968 - DNA, 983 bp, Zea Mays
gtgaaccaaaacagaaaatgtgaagacaaatggtgaaacaatccttatcacaagttgggctaataacacaagttgaagatcatcaaaatatctatcagagatagtaaggaagtttccccaaaacaagtcctaaacagcccccaaatcgataactaactagaagaaccctaaggggaaaccagtttttctctaagttcccaacccgaattcaaaaacatgtcatgttcatctagctcctcagctcaaatccaaatggtcaaatggacaaagtggcgactaattacctcagacacgacctggtaaagtttggcactgaaccaagaccgtttgacatgccatggcatgactttttgtcacgacttgggtacagtggcagaccagacttgacactggtgtatctcctcaccctaagcatatcacagctcgggactcacatgaaaaagaaatgatttggagcagggaagagatcctacatgggacccttgccaagataggcatgctagggcagctaaataggcgcttggacatgagtagaagtgatcctccacgtgtttgaccgcagttgagcgcgcgctgaccgcgctgcgcacgccacgagctctgatcgactcgaccacgcgctcaattccacacccgtgcctgagccctcgcctataagaagccctagccctcagccttaccctcccacacgccccatacctttttatcggcgactagacgccggtaatcgccagagcaccaagcgcagcatcgtccgcaagcttgctgacacatcgaccacctcagactggccactccagcccaaccccatccaatctagctccccggccagcttccctagaggctagcgaaacttccctagaggctgtgttgaaactttccctttttgtgggttggacccctagtagcccctcctcggatcctgaccacaaggctggtcaacacctaaagacttatgggactcatttgtatactgatgctgc

SEQ ID NO: 3969 - DNA, 598 bp, Zea Mays
tggcgcaaagtctgccatctgacatggtcgaacaaaaaccacctttggatataaccaaatacgtgtcattagcacccacacattgccgtggcaagcgaagtccccatctcatttcacaacaaacaatgtcatagtttacatacacacagcgaagggccactggccacattgcacaaataaatactaatcgcattttgctaccctccctctttatcgcgagccgagggagggcagcgtttttgctcactatcgcaacacaagagcgagggcagcatacacgctacattggctcagccttcgggataaggcccgcctcacaaaaattaaataacatcatcttcaactcctcaccctcaaaaagattccatagatccccctccccaatacacgtcccggacgacgaggacatcaaatctcgttggccaccccaatttacccaaagacgggttcgttctatccccatccgacgacgtctaccacttcacgacatctcaccaacactatgcttcgacaccactcttcgccgatggtgctcatcggtccttgccccagccgggggatcagatgttttgcgcacttccagccgcggcacggactc

SEQ ID NO: 3970 - DNA, 294 bp, Zea Mays
ggtcaaggaaactggtttaagctatacactaccaccagttacattttagcagaaaatcatcatgggttgagaagacagacactcaccatggcacgatgcttgggggcaaaccctaggaagccaccgacctcaatgcccgccctgcttcctcaggtacgaagctcataatgcccatcccgcggtcaggagaggagcggacggatctccagtgcttgggcttgggctgcgccggtggggagcggtcgtcctctcgatcccccattggtggagcatctcgatcccaggctgcctgcg

SEQ ID NO: 3971 - DNA, 1022 bp, Zea Mays
tggctgcatgtccgagctccgcgcgcggcgataacggaattcgaccgagattctcgccggtggcagtcgaccgctccacgcacaacttccacctgtggctttatatacggccgccgcccctgcccatcaccggaaaactaccgccgccagggacaaaggaagcttgcgcctgctgtgagctcgcgattgggatgagagagatgagtcgccgcgggtgattcacgtggtcaccagtgctgtgtccccgaaaaccggttggggagctccgcctggttcccgtgaaggagttcgtagcattgattggatgggagctccttctgtgcctctgtgattgctcgtcggtgaagcgcctccgccgcgggtccgccgttcgccgtgggcagaactgcctacaccgcctgcgatggtatgagtatttctgttagatttggcgtgttcccttgtgcgcgtagaacctggtaattgaggaatggcatagtcacgggcctgattgatctcgccgtcgacgtttgttcctcggcggcgcgtcgtgctgtgggaggagagtgaggcgatgggggagatggggtcggagccgtccgatctgctactaacggctctcatcagatctgtgggtaccggttgggtgttaatccctggtcgttggatcataatcgagcacagcgttcattaggtagatccaaaccattgatcctcaatcctgtggtgattattccgtaccggttcataaaaggtcgtgggtcaatccgatccgtagaactctaatcggatggctggcaatggccgataccccttcggccttggcgttttacttaagaagtcctcggattttaatggaatcaacccgccgtccagggaatagtgtcctgagtctagggtttatttgcgccgtggcccctgtcttctctggttatcttgtgcccagtccagaaaaatataaaattcagtaaaagtgattaggaaatgatttttaatgtgaaaataaatgctagaatttgtttaacccctagaaaattcatatt

SEQ ID NO: 3972 - DNA, 713 bp, Zea Mays
cagcataggtagatttcgaaacaatgtgaggtcgtcgaccgtgtccacagtggcactaaggtcgagatactgcaatttagaaaggttgccaagttctggaggcacactaccagcaaactgtatgccagagaggtttagatatctcaagttttccatggatcccaagaaccgaggcatagggcttcctgtttcccctcttcctcctcccaagtagttcatgctgaggtctaggtactcaagatgctgcagggaaagcagagagggacttatctcaccagccagaatatatgactcagcatggtttgttctggagtcgatgtctggatctggattcgcaagatgaagcttgaggacgtggccggtccggttgctacatgagacgcctctccagctgcaacagtcccaaccacgccatgaggagaggaggttgccaggatcactcgtgatgcccttcttgaaggagagcaaggcggccctctcggagggccagcatgctccgccgcctggttgctgcagcgcgccacctctgaagaacgaggtgactactatgatggtgaagctcagtatcaggggaggattggttggtgtgcgatgcatgcctcaagatacaaagtggttgttgctgccaatcaaccatgcaggctcaatgaatttatagcaaaagcagcttaagtctacggtccaagtttctgccttttccatcctattagata

SEQ ID NO: 3973 - DNA, 429 bp, Zea Mays
tggggccataagtgccaacatttgttctatcttgaggtcgctgactacacccgaggacgtgggcaccgaggtggccctagatgatggccctgacgccccagtcatctccctccacgccatcaccagcatatgcatcaaggacaccatgcacctccacacctgcatctacggtcaccagctccttgccctcctggacaacaactcgatccacaatttcatcaatgctggggtcatgcaccgcatcagattagcaacgacgaacaaccccaccacgtgagtcatggtgtccaatggtgaccgtgttccctgtgagggtatggcacgcaatgtcaccgtgcaaatcgatcaggaggagttcaccatcaattgcttcaacatcgacctaggtgggttcaaccttgtcttcggcatcgactacctctgaaccat

SEQ ID NO: 3974 - DNA, 779 bp, Zea Mays
gtcatgttgtaatcctgatgcagtattctggcctacatatactcaatccccctctcttttttttctctcgaacacataggagatctgagcatcattatattaagaagaagaatgggcacaaaaagccccagttacaaacacacctataaaacacacacgccaacgcatgcccccccaaaacacatgaaacacgaagcaacaaccaaaagacccaaaagaaactaatgaacatccagaggagctgttaggaaagatatcccttttgctcctactgcctcccatagatgtctgtcctcaccagcttggatcagtgcagtcacgatactaggtgagataccatcaaacacacatttgtttatatgattacagatggtccatgccccaaaataatcaggctgtttaatctccctgtcaattgttcacccaccgaatcattgactctgtgccaccattccaagaaactaaacatggctgtttggggggctagagaatgaagaccaaattgcttgagccaacggaaccaaaattgccttgagaagacacaggacactagaagaggatcaagagtctcgtcctcttggtcgcacaacaagcaactttctaggtgctccatccccctgcgggataagcgatgagcgatctgctgtccagcatttgttgtgtgccactaaccacataaagaaccgacatttagaaggtgacaattctttaaaggaacccaatccgaagtacacccggtggacgacacttgagaaacaagtcctcgatttcctcatgac

SEQ ID NO: 3975 - DNA, 1067 bp, Zea Mays
atggatggcgagttggttttttataaacagagggtcttattcgcaaggtggcgcgaccgaaggggtatgcaagcgcgccagccgttggatctcaacctgacggttgcgattagatcggtccatataatgaaccggtatgcgattgcggccacaggattctaaatctacggtcagcatttaatgggacgcgattcaataaggaccatccgatccgcccaacggctcggatcaaatcaccgaaagggtacactctgctcttaatcggagccattacttccccgatcaacggctcaaaatccaccgtggaaccatctactcttagccctccgataatgatcctatggcacagaagccatcttctacttccagggcgaggacacagcggcgaccattgttcccgcgacggaccctcgccgtcgctcaaccagtgttccccgtacacgcgccacagattccccaatctgaatcccataatcgctggcacactacgaatctgttgaaggattcataccgagggtgataatgacggcaaggctggccacttagatggcggactggcgacggagaacccgctccgatgagcaattcccggcaccacagcgactttcctctcgattaatcccttctacagctctgctagggtctggactaccatcgaatagctttgttggcgatcgattgatgttgtcagcgcagttccgcagtggcggcccttcctagcccgcgcacccacactccggttcgtccccccggcggctggggtggtttgggatgatttacgatgcatcggctcggcgcgccacaacttttatgggggaaggggagacccgagttggtcgggatggcaacggtggtgcgagaatgccgtcgcggcaattttggccaggttgttgaggtgcccgcgtactggaccccaccggtcatggtcacgagcgcgcagatggcggaatcccgggctcccggtcggtcgcctaggttgttacaggtccggggaaaacgcagccgcgagcaccgagcatggcggcatcggaatcggacttcggttgaaggggaagaagacggcgccg

SEQ ID NO: 3976 - DNA, 680 bp, Zea Mays
gtcgtggagggggaaaggacgtagggaggaggagaatgactcgcatctgttgggagcgtcaagctgctccatcgtcgtcgttgtagcgatcgcggtcgacaccctcttggcctcttcaccatggatagtgccaccccggcagccgagagggatccgccggcgggaggggggagctcctggcagggtgggggatccgccagcgggaggggggagctcatggctgcgttggagatccgtcgacaggaggggggcggagctcctggcggggtggtggagttgctggcaccgtggtccgtgatgggagctaacggagctcctggcggggaggtggaggggggccttctccggtccagaaccttcgcgagcatcgcagaacgaagatgggtaggcagatttgtcggacgttgatgcgcgatccgacagctgaaattttagacgctgacgtggataggctagggagcgccgtttctgacctgctttcaaatataggaaatgtcactaccataaaggagacagccgttgtggtcgttagcattttatttaggtacataaaggagacatatgtttaaacaactagtccatgtaaacatggtctacctatatctatactactttattaagaacctagtgataccacggcttcaccccctcagcgctgacactctgggcccacctaccac

SEQ ID NO: 3977 - DNA, 706 bp, Zea Mays
gatagcccagattcatcagggcgtgtttcaatctaaaccacccatacccagatccacggctgcgaccctgtcttccacctaatgctaggcacgacagtgcttctctttcacggcggcgtgccccaccagcgacatgcgggacgaccctcaggtgacctatccccaacatcgacgggcgatactccacgcgggggctagcacaagcgaggcagagagcttcttacctcgaattggatcagtggtgagggcgtcaacgtggaatggtggattggcggcagcgatatactccggtgaaggattcctagtcaccttgggcacaccccgtggccccaatgctcgtgatcaacttaaggtaccacccgcgatgcacctaggctacgtgcacaaggccgcgcaatgacaagtcatcggacggcttgcgacggtgagaacctatccccttcctccgctcccatgggcgatgatagcaatgttcaggagacgccccgcgaattagagggatagttgggagagaggaggctagttatagggctagacatggggaaaggggagagttgttacgtcggcaggcgcgtgcaaaatcggcggcgactgttaccgccatggatagtcgaagcagggcgggctaatagcttgggcccgcaggtaagccgcccaagaggggaagtgagaaggaaaagagaccggtatccggccccattagtcg

SEQ ID NO: 3978 - DNA, 687 bp, Zea Mays
gtaactgtggatgggttgtactgttatgtcgtaatgccatatggtctaaagaatgccttgccaacgttcgcgcgagccatgcataagacttttggtgatctaattaatgacacggtggaggtttatgtcgacgacatcgttgtcaagtctacggtagggtccacccttgtagaggatctcgcccaggtctttggcaagcagcgtgacacgcgcacgaagctgaaccctgagaagtgtgtttttggcatctcagctggtaaactccttggtttcttagtttcacactggggtatcgaggcgaatctatagaagattatggcaattgaggtcatgaggccccctgcccatatcaaggacgtccagaagctcatggggatgctagctgctcttagccgcttcatctcgaggttggcggagaaggcgctacccttcttcaaactgttgaggaggtccggtccattttcttggaccgaagaggctgagcaagccatccaggagctaaagcagcacctcacttcattgccaataccggtagcccccgagccaggtgaggccctgtttctgtatctcgctgctacggcggaggtagtcagcatggtgctggttgccgagaggacggtgcaacaccctcagtcgtgtcctgggtccaggcgtccggccgggtctccacccggtgaggaaaacaac

SEQ ID NO: 3979 - DNA, 541 bp, Zea Mays
cgcggggggcttcgcgaggttcgacccgccctcaccacttgacccctacgacgacatcgctaccacccaggccctcttccccgagttcaacgccgtccctgcggacgcgcttgctcgccacgaggacgaccgtgctaccatatccaacaactccttcagcagatcagcgacaacctcctcagcctcgcccatgacttccctgacctccactccacctcaggatggtgttcccgtcctctccatcttcaccgtcgttgtggatcctgagcacaacgtcacgccggacacggatgtgagctctggcaagccactgatgtcttcttcttcagcatcagccaccgtcgccaccagcaagctggcgtcacccttgatttggacaggcatcacccttgatttggactggagtcacccttcctcaatggctcccacgccatcacagaaggctatcctcacccttgatttggacaggcggcacagtatgcagaagggcgcttgcaacctattcgatgaaatgcccacgagcgcctggaggatcctcaac

SEQ ID NO: 3980 - DNA, 520 bp, Zea Mays
acgcaccctgcgatctcaattgaccagccatcccgtcgaccaaagcctaatattgaaaataaatgagtacaaagacggtaacttgccaggagtattgccagagccagaaaagccgaattacctgaagattagagaagaatgacggaaatcctaagtcacgaggagctaggtggtggctcgatgaaggaatatcaaccggggcaatttgaagaacatcgccagggatcaactcagcaccaccagcaggcatcagaactctagcatctgttatgccgacctttaaggcgacttcctcatttgaagcacgcgctgttaccatgccatcagaacgtggaggagaagacccaacgtgaacatccatggaggtatgagaaggggagcccgcttggataccctcgggggctaggttgcagcccgcactgcccatcggagccggatcaccaccggcaacaccctcgggggctgggtcgcagctcgcgttacccacccgagccggatcattaccggcaacaccctcggg

SEQ ID NO: 3981 - DNA, 542 bp, Zea Mays
aattatgctctgtcagttgttctgatgagcaatcccgatggtacagtgcacccaaatatctcagattcagttcatcccaccaccggtgatctcgcgccgggattctcgtcgccgttacgattcgggctcagcaatgtaccggatgtggctcagggtggtaaagatcgtcgtgtggatgaacttgagttcctgtttcactccggccatcctgtctcgccacggacgatcgtgctggcatcgccggagtttcaccgttatccggctaggccatgtgtcttggagggttaacacgtcacagtgaatcgcgtcatgcatgctcggtgatcgccggagagccgccacggtgaaagccactaatctcgtgcgctagtgacccctttcttctccgaccgccaccacgccaaaccaaattcactgggccactgcttagcaccactataaattgtcggcacggtctgctgcgttaagttatcaccaagcctgagcactcgctcctgcctccgattagccaccacaactctccaatttcccatttcccccaa

SEQ ID NO: 3982 - DNA, 694 bp, Zea Mays
tgatcctagtagtattgttaccttcaggaacttttaacccatcctgtctctcaagtgcatcagcaaggatagtgacatcatgtgcagacccctcccacccagctagtacatatgtgaacttcaaatcaaaatcaactgcagctaatacattctgtgtaggataatgcttcctccccctgaatgcagattgcatgctctctggaacactagcataaatgtgagttccatctattgccctaatgcagtcctatgtgttaacaaataaggtgagatcattgtatcatgaatgcatgtctatgtgttaacagaatcctaagaaattaccttaaaatatgggtaccatcttggactgtttctgattttaagtggggtttcaccagtgggtgccttaatcatgtcatcccttaattcaccaatggcatacaaaacttctttaaaatacctgctaactgtctccgcagacctcctccaactttggtgtatgaccctaaaacgctggttgtggccaactacatgaaggaacatggctacttgttcctccacattgttgtggatactatctctaagcaggttcctactcttaagcaactcatagagctagaaaaagggggttcttctcatgtgcaacatgttaacacactccacatcattgaagttgtaaattctattcaagtttctgtgcctctcttcaccc

SEQ ID NO: 3983 - DNA, 406 bp, Zea Mays
ctcggatcggttggatagcgcttggggttgagtaaatatcatcgccgtggatatactccggccactaaactactccgaccaccgtaccgagctagtcacggatgcttcggatgtgttcgccggagatagccgcttcacggccttgcgccacgtgcctgggcacatttaccgcatcgccgtgactcgcttaagccatccgatcatcgccggggagcccgccacggtattctccacgaatccactgcgctagtgacctcccattcctctgaccgccgcgtgtctcagtccaaattcaccggccactgctcttgcctgctataaattgagcccgtcgtgagctccgtagggtaatcacgcatctaagccgccaagtcttgtcttcaattgtccactaacgcccgtcaat

SEQ ID NO: 3984 - DNA, 1220 bp, Zea Mays
atcatatttatgaagatggagagcaaaacaagataagtaagcaagccgatgactatgagaggactgaaggtgaatccttctcaaaggaaggagcaataggagacagaaatagaaaatcctagtaaattatgtattatttccttccttttttcgaaaaaaaacaatgaactaagaatgaaaatgtatgtctgaaatgcaaattacaattctttgatggggtgcatatggtggcctgacatacaagctccaatatttagcaaaaagaatcattaacctttgtgctgcatctagatgtgagcgtaattggagtgaattttctcattaagtactactgctaagtaattggactttggtagcaatattctttgcatggtatgtgattctgcattgtattatgtgtaggactatacaaaaaagagaaaccggttagaacaccaaagattaaataagttagtatatgtcagctacaaccagatgatataaaactgtttttttcaaatagagagcttggttccaaagggaagaaatacaatacactcttgcttgagcaatttcattgggaaaatgaatgtgttgatgaaaattgcgaattagttcaagaaggtggtggcaatgctatgaattgggctcttgtggatgatgttattggtgtaactcagagtctagaggggcgtaacttgcctagggcggctgctgctgcccctatgaggcatacttatactaggaacaggaagcgtccaaggaagaaagtgactcaagataatgatgaagaagatgacgatgaagaccaagatcagcatggagaatctgattcagcaacatcaatggaagaggatgaagaatctattcgctgatggatctgcaccaacaagaacgggagatggacagaggcttctgtttgaatgatgatttgcttaattacatgactggttgtctacttgcgttggactattgaatgccaatgtagtactgaactagtttggttatgtaatatgctggctgtgtggctgctatggtcgattagatgttagttatttgctaatgcagtagtgttactgttgagctgctctacttataagttagtcaagaccaagactacattagtgttgctaattatgtcctactttggtttggtactccagcagcaagtcagcaaataaatgaagtttgggacatgaatatggagctctagacagtgcagaaaacaactctcacaagta

SEQ ID NO: 3985 - DNA, 930 bp, Zea Mays
aaagtccagaatcagcttttgattcaatggagtggatggcatccgacattggccacctgggagggagaaagcgacatcaagcggcattttccattcgctccagcttggggacaagctggcgtttcaggaggggaaaatgtcagcgtaccggcggatggagatgcaagcgccagtgcgggagagagatggggaatggagccaggtgtgcgcgttgatgggcctaggagaagccaacgggtgacacagcccaacgtccggctgtcgggccatgaatgagtgaaatgatttaggcccagatggtttagcagctagcagagagaaaatatacactgccgtggagaggaggagaggatcggactggaacttggaactggatccggctgcgtccggcgccgtcgtgtaatccccatacttactgctacctccgtaaacttcgagagaggatctgagcgccggaagcggtgctcgactcattcccaaccacgtgctctaacactccgtgtacctctcgggttgttgcgccctcgccgggataagatcgtgcctcgctaggttataaaattgtgctctgttgtctaaccgtgcggccgaaacaccagcaccagaagctaccgcgggggaaggatctaggttggggaaaccatgtgtcgccgccattacggctgggaaaactgccgccaccgcgggacctcgcctgggttgccgtttgggtcatgtggtctggcctgggggcttcacaacattgcctgggagttgatcatggttgttctggacggaatggtgctccgtggctccatcgattgctcaccggcactgaagcaccaccgcggcgccgcttcatgctgcgggccggcctcaccacaacgccttagacggtaataatttggcccgttaatttgccttcgctctcgcatcgtgtagcgtgtctcc

SEQ ID NO: 3986 - DNA, 519 bp, Zea Mays
gaggtctctagatctgaggtcaccattgtcatcgatgagagggctcagtcgttggtcggggagatccgaggtgttgacattgaggagagcagcttgaagtagttccagatcatgtcttgcaaccgggctcagatgcggggggaggtgccttgtggtcccatcagagagaacttgatgcacagacgcagacggatttttggcatggcttgtgagggcaggaaggcgatctgtgataggaccaaaatcaagccagtcatcagaccagaaactggtagttctcccattcccaagcttgacagtggtgatggcggagtacaggaggagcaacttttggatttgattcaagtggtctccagatggtttgacaccgatctctgattgaacccaagtgacccaagaagaacaagctggctacaacatcttgtgaaccagtttcaacataagacaagtattatgagtctgcatgtgattcacacccaagcctccatgttgtctcccacggcaaactttgtcccaaga

SEQ ID NO: 3987 - DNA, 576 bp, Zea Mays
tattctcaaatgggtgcagatctctgatgtaagcgattttctattcctcaggaacatgatgcataggctgattcgaagatagaacctcgttccacataatgggactatgcactttcctcgcactggtttgtacatacaatgagtcaagctcaagttagaacagagcaaagacaaacaacagtcgtatacgtgcagcaggcatagcagaatattacctagccatgagggcacctgcttcaggaacgtcaggattaatgtaccacttacagggtgagcctccagacaagcacagtccatctaaaacaaagggcattaggtcccaactttcaaaaaggactaaatgcaaaagttcaaagttagtatacccgcatatttcttgacaagcgtgccaacaaacatcaggatctgtggagaggactgaccatcattgtagatctgttctccaaggaataagctagcttgcccaccccagagaacaacatttaccgaactgttgttgctgtttttagtttaagtatgtaggaagagtcatataatgaagcatatgtagatgaaggcaaaggaaacaaaccccta

SEQ ID NO: 3988 - DNA, 391 bp, Zea Mays
ggagacggcatcttgaggaccaaatacccataatgggcaatggccatgaacctgtacagggccagcctgccaatgatggcattgaaggggagtttaacctccgcgacgtcgaactggacgttctctgtgcagaagttttcctcggtcccgaatgttaccaggagtgtgatgcttcctaggggatacaccggttgtgggcccactctggagaatggacgagagggtcccagtcgggaccctaggatctgcagctgcttgaatgcagcatggctgatgatgttgagcctagccccaccatcaatcagcacatggtgcagccgcatgttagcgatgacaggggtggtgatgagcggtagtataccggcctctgccatgttgtcggggcagtcgg

SEQ ID NO: 3989 - DNA, 914 bp, Zea Mays
cagaaggctgttttgatggtacatttgtttgatctctagtcttaaagccaaaggtcaatgttctgtgctgcaaaaggtgcactggactttctttatttcattatcaatgtcctagttctgtagagggcacatgtctcttgtccctccgtacctatttaggtatcactatagattttttttttcaaattaatctataattttttaataatacttctatctctaaataaagttattataaaataaattcaacaatctatttaataatactaattatgtgttataaataacatatttatttgtatatttaattaaagttaaatatatctgacttctcacagtacacatctgtaatttttttagttcatcttgctccagtccagccataggcccatagccctggggcctgggctaggtcctctatctgcttgcattggacttgagaaaatatattgccattgcagaacttttagcctctactcccatgttgctctattctatattaatatatggttatcttaatccagggacatggcgactaacagaagtccaagattcctttctcatggatggatggtcccaattgagttggacgttttcggtgggaagcggacaaaccaaagcaggttcccgtttgacacctaaactttcttatacaaaattacttcttgcaagaccttttccaacataacacttacatataaatctgcatccttctaaccctaacgctttctagttgtctgaattgtgcccatattttgaagcacatgaaagtctattccttgtcatgggagcaatcaagagattgcttagatcactagctcactgttgaacgttgattggttggcgcgagctttgcttcgatcgtgaggagtgggtgatttgatccattcatcgcttgttctgagcattcgggg

SEQ ID NO: 3990 - DNA, 728 bp, Zea Mays
gagttcgtgcaatgtatcttttgcatgaaagtggtgccctctagaataaagaggttcaaacagcacctcgtcggcggattgggcgatacgatgaagtgtgcaagggtcccagaggttgtttcaaaggacatgcgagcttatcttaagaagaacacaaggtctgcacttgttttggatgacgatgaaggtatagaaggagaagacgatgctcctttgttgtctctgctcctccgaagccaactactcaaaaaggtagaaaatcagtagctgccatgctttgcaagagcccagaagaagtgattgctgaacgacacaacaacaaagcttcccagtccactctagagcactgcacgaagatagggaaggaggcccaacaaattgttgatgactacgttgtcgatttcttgtacgagaacaatattccaccgaacgtggtcaactcaagaagctgggagatcatgttggagtcgatagggcagtatggccctagctatcgtggcctatcgtaccacgacattagggttctgtggcttgaaagggctgtcgagaggacatcatcgctgacggcaaagcatgaagaatcgtggaaggagtatggctgctcattgatgtcagattcatggacagatgttagaggacatcatctaatcaactttttggcaaacagtccagcagggacacactttttgtgctctattgatgcatcaagtgagatagctaatgccaac

SEQ ID NO: 3991 - DNA, 426 bp, Zea Mays
aaactaaagataaatgggtctgaagttggactgtcagactgcttggagtctaaaattcagactgacagtggaatggcatgaagttagggctcgaattcaatcatgatccagtgggaatttgactaggaatgctataacaaatatgaagatggtttgtagggctacaagtttgttgcagagcattggttgtgttaccaaggaaaattgggaggaaattggacttaaagttgatctgtcaggagctctgaatcacagttctgatggtacagtgtcccgatcaggtcgctagctctgtctctcgccgccgatgagccgcgcgcggattcgtgcctacgccgccgtgattcgtgctcggatcggttggatagcgcttggggttgagtaaatatcatcgccgtggatatactccggccactaaactactcc

SEQ ID NO: 3992 - DNA, 1135 bp, Zea Mays
aaggaagatgcagtgacactgtttatccgaagatttcagctaattccatcttcagataagctgaactgaagtagcatcactacaccataaacttcggttgttgcgaatttcatttatgctacaacctctgcctcatgaatattaaatttcaatttaacgtattataactacccataaaaaagacaatatcagctacaattgtagaccataggaacaatttttgaattgtagaccatgtgttgttttgcttgatacgacaacccaactaactcatggcaacgacattctgaattctgaagctattttttcatcaacagaacaatgctgttacttttacttcattccagccatattgtacaaatatacctgaaagactgtaatgcagaactccattcaaaccgcatcaccatctgatcttgccacatgatagaatgcagttcacaacaaagaccaatgctcaaacctttgggcgccaatgtttatgtctgaattcttataaaaatcaccagcatgctttagacatgtgattggacattaaaccgataatgttgccatagtccagcacatccacatgatggttcctcaaaatcttcattatgcatactcaatcccatgagcaccatcacatgttcgtcaccgggaacgtcgttcccattccaggaacaatatcatccccgaagtgaaaaaccttttttaaggagcatatcatgttcctcaatcccctgttccacgacctaatcatcctaggaactttatgactacgtccgcccatgagtccatttcatcctactaatcgcacataaagatagtaacgcaccccacataaatcaaatttatgcagcgctagaggaaaggtttgagcatgtaaacatgtgaacctctcgatatgaacctgctgctggttattgatgattcgtgtattcgcctcataggaattttatttttcaaaagcagcctgactgcatcatagtgatttgattctttctgcctaagattgaccttatggtacaaagcattttccttacatcatcgtttcagaattttatgacacctttagacacaacgaatatgcagattaaaattcacctacaacgtatatgtgttgtgaaattaccaggattggctcttgtagact

SEQ ID NO: 3993 - DNA, 1116 bp, Zea Mays
cgaaaccagcctaatccgcccaaacccacgcggaaaccggcgcgcccacgcccgctttgatcaatttgcgacggggtccctagagtattattcatgtgtttcaacgacaattgcgcataagccctctatttctatttcttcacgactcgggtcctcgaccacgcgccggttgagcacttggccggaatcacgtgtactcgccggcggtgacctgttccagtggtgttgagtacatgggctccatctctgacgctatccgaacatgtccatgggtttaatttgaccagtccaccactaatccatgtctgtccacgacaaccgcggagcaaactcgccggcgagcccgttccggtttacacaagttagttgcattcaatccaaggactcagaatgaattagtgacctacttggactatgatgcttgcacaatcttagacaggggcaacacggaacgaccgatcgacataagcaatttccatggcggcgttcccaggcgacaacacgacgttccctaagctacgacgtgataacgttcaatgggtcgagaccgggagattcactagctgtaaggaatgctaaaacatgaacccgggaggcatgaactgacctgagaatggctggccacgacgcgatgcctcactgcagcgacgttgaccgatttgggggaaattccaaattctcgggctacagtggatggattgaggtgagaagtgttgctctgagcgtgtaataagagggcggagcagggagggcactcaatttatagaggtcggctacgggtgttccgaattttagacgaaggcaagctcacgtcggtgaaaaggtgagtcactggagctcgtctaccgtggcgctcaatggggtaaggactcggggcagtaaatggccgtccaccacgacttactgcgacgtggaatgatggcgtatggcatggcacgatcgggtaaacggcggccatgacagcggtggtcgcgcgaccacgtcgccgggcaagtgggtacgacgagaccggctcgatccacaccccctcagatcttttcatcttcgcggtaacatctcacccaaatcaagcatgaatcactgcggccaacccaaatcaccgcacggagatcgccg

SEQ ID NO: 3994 - DNA, 523 bp, Zea Mays
acatttgagtgaaatattgcagaaccaactggtagaagagaggagggaactccaggttgttcatgctatattcgtcgttcattgataatatatcttttctatgcattattgtaacatgtgggtgaaatattagaggcccaactgaaagaagagaggaggcaccatttggagttggatgcgaggatgaggtccaagcagcagaggacggaggacattcttcgttacatacagtctgcaacgggtgtagctccaccaccttcgctattcactccaaatccacctccatctcagttttccactcctgtgagtatgactgttttagtttgtatgttcatgcttagggtcaaaccactgcactaattgaaacctagtagagtatgaaagttttcgttaaatataatatatatttatcttgtctcacacatgcaatgccttttcatttttgcagaatcaatcggcggcatcgaatgatcctcatgtttcaccaactgagcctaattgcgtgcgtcgtttgtgaacttat

SEQ ID NO: 3995 - DNA, 717 bp, Zea Mays
ccgaagtgtgaagaaagcttccaaatcataaagaagaagctcacaaccgcacccgttttgacactgccagacatccatcaggatttcgtcgtcttctgtgatgcttcaaggcaaggattagggtgtgtacttatgcaaaatgagaaagtcattgcatatgcatcacgcttactgaagccacacgagcagaattatcccacacacgatttggaattggcagccatagtgcacgccctaaaaatatggaggcactacctaattgggaacaaatgtcacatcttcaccgatcacaagagtctgaagtatatcttcactcagccatacctcaacctccgtcagcgaaaatggctggaattgatcaaagattatgaccttgagatccactaccaccccgggaaggccaacgtggtagcagacgccctcagccaaaaaccttttgggaagaaaggaaccaatttcttggaagattggaagaaagaatcagctcaactaaatgtatgtctgggagacaatggcagcctagaagtcaagccaatgctagaagacctcatatgcaaggctcaacgcctggacactgagacagcaggtcttatggaaaaagctcgcaaggaaccactcccggacttcatcacatatgaggaaggagtcctttggttcaagaactgtctatgtgtaccaaagggagaggcacgagaagtcctgctcgacgaatctcat

SEQ ID NO: 3996 - DNA, 383 bp, Zea Mays
cgatggctcgctgaaactgcagggagcaggcgcaggaatcctcttcattgcccctggaggtgaacaactcaaatatgctcttcagttatcatttccagcatcaaataatgcagcatatatgaggctctgatccatggattgaacattgccatatcactgggcattaagaggttgatggtatatggagattcactggtggtcataagtcagataaataaagactgggattgctcgactgattctatgggcaagtactgtacaaccgttcaaaaattagaagacaaatttgaagggctggaatttcatcacgtggaaagagatcgcaacgcaacagtagacgcgttatcgaaactaggatccagtcgagcccaggtcccacccgg

SEQ ID NO: 3997 - DNA, 585 bp, Zea Mays
gaagtgaggcggggtcaggggtgaactgtcacgcaccggtggagggatttatagatgctcccaggcatggctagacgcaggcacggggtggagccgaccgcgtgcggcgcgcgcagagagcggccattgcgtggccgagcactggagcacgcgatcgaacacgtggcgatactcattgtggtcgttttcaagcgtccattggctccaaatctcagcaaattttgacaggatccttatgcgatatttcttcccccgactctactctaacgtttttgtgtggaggccgagtggtttttgggtctgtgtgaggagtggtcatgtcaccaacgtgggtctgtctggctgcttcgtcccgagacaaaaaccatgccaagtcgtgtcaaccagattgggtttgttttcaaacttcaccagggtgttctaggggtcctttggcgcatttgtcagttgcgtcaagtttttttgagttttggaacatggtgaacacgtttgatctttgtgagagggctgaatttcagaattctgaaatcctgatttttatttgaagcccccacttgagtgtcttatttgagtattttgcatact

SEQ ID NO: 3998 - DNA, 534 bp, Zea Mays
ggttctcggccgctcgatcagggatggacgcgcaagattagatcaaccatattgtgaaacggtacacaatcacaaccgcctatcaacagatcaacgctcgagattctaagtaacctagatctaacccgatccacacgatacaagatcgacggcttccgagacaaccacgctttctactagtctcctccttccgatcagatctgtacggttatatttttcccctagcgaaaggttatcactgatctaatcgcaaccgtcggtgtgtggatcaacggtcatggttcatccctcccgtcggtggcgtcctcacgacggcgcgccccgaaccgtggtggcaactcgctggcaagagttgcgcccataccccgacgctctattcccaaatcccactatcttaaatgcacagggagacaaggcgagccaaatgggggattctaacctgtaatggagtgcccgaatggcttggccacagcgtggatggcttcacagcggcgatgaggtcatcgacgagaaattacggtgcccctgagaatc

SEQ ID NO: 3999 - DNA, 664 bp, Zea Mays
aagggagttctatggtttgaagaccgattggttgttcctaagaatcccgaactcaggaagaaaatattggatgaagctcatctttccaaattttccatgcaccccaacagtaacaagatgtatcatgatctcagatctttgtattggtggaccagaatgaagagggaaattgctaagtatgtatctgaatgcgacacttgccaaagaatcaaggctagtcatttgaaggtagttggtaccttacagcctcttcccataccatcttggaaatgggaggatatttgcatggattttattgtgggattgcccaacacatcccgacaccacgattctatttgggtcattgttgatagactgaccaaaacatctcatttcttgccagtacataccacccacagggcagaaaagtatgcagaaatctatattgaccaaatagtgcgtttgcatggaataccaaggaacattgtgtcagataggggagcaccgttcgtagcacgtttttgggagcagctgcaagagtcactgggaactcaggtgataaggagctcaacataccatcctcaaaccgatggtcagacagaaagagtaaatcacattatggaagacatgttgagggcatgtgtgttacactatggtaagaattgggataagtgcctttccttgg

SEQ ID NO: 4000 - DNA, 362 bp, Zea Mays
ggacgttggtccttcgattcctgttgttgaagaagtgcctgtgcctgaattcactgacgctgaccccaatgggggtgttccatttgctgctgaccctaatgggggtgctccatctgctgctaaccccaatgggtgtgctccctctgctgctgaccccaatgggtgtgttgctgatgaaaacgacgaggaggaagaagatgaggtccctttgactcggaagaatagtcggcagtatgtcaccagtggggaaagtagtggagttccttctcctgctctgtctgccctcattggtctacaagaattgtccctggcaaactttgatcagactcttgaagatatggttccagaagatctgttatcag

SEQ ID NO: 4001 - DNA, 472 bp, Zea Mays
cagggcaccgtggtcggacgggggtgaaggccttgtggtggaggagccctagcttgggcttcgagtcgggttcgagcgggtctagcagttgggctcaaaccatcctaattgtttatttgagtggtcaccttatgccctgtttgacacatcttatttcacatcttcacatacttaagtagaagttgtaccaaacaggacgcatctgaagtaacttatcaattcagttgcttctcaaaatgaactaaaagcagaaactgctttcactagtttcttagataagctgcgtttccaataatcagcagttgtgccaaacagcccccttgccattcagcccaagcttatccatccctctccaatccccttgtcgttattggtcgttcttgctcacggcctcccttcgacgcccgtgaatcgtggcgctccttgttccccttcctcagccacgacaccaacttcaaaaatatggcatcgt

SEQ ID NO: 4002 - DNA, 285 bp, Zea Mays
attcccagaattctgctaaaaattggttttattttgcttcgggtatgggcaatccttgatgaagtgtccggactttccacaactgaagcaactagtggaagaactaggaagaacggggaaacgagtaccaggggcactcgactgattggtaggagcgggggcagtagtgggatgaataaagacaggatgcttgaatgaatatgaaggtgggcgaggtgaagaacgattttgattaaaagatcagattaccaacctggttctcttctcaggtccttgatttgacat

SEQ ID NO: 4003 - DNA, 422 bp, Zea Mays
ataaaacgcgccctcaatcgctgacaagtggaccaaagccgtcatcttcccctcatgccttgaccgctcactaacaccgtggggccaactcgtcagccctcgggcgcatccatgccttgcgctatgtctctgactcgcggggccggatagttaggatttcccactcctgggaaccgcgggtgactcgggtcaccgcaacgtgggctcggttcgtcagctgccttctccgcccaatccctcgatgtcggctcgcgagtggtgatggcataacaggatttcactgatctcgtgtggactgcaacaaactcccctcgcgccgataaattccaagccatcacttccctctgctccattcaattcgaacttagacgggagaagttggatgcgccaggtcactgttgaggcatagccttgtgccgccg

SEQ ID NO: 4004 - DNA, 330 bp, Zea Mays
ggaggaggaagaatggagggcaaagagggctgagaatatagatagaagcggagcgagggcatatgtgtaaacatggaaaaagtctctctcttcccttttggtgattgtcctattggcggaaggttataggcgtcacagctccatttccattttgttttgctactcgttcctcccttttatcgatatcagtaattgcttcttccatataagcatatattctcctcgaaatggctgtacaagctagccaagcttgtatatatatgtgccgctttgttttcgtggtattgatgatgagactttgaaggcacggcatggaaggaggaggagaag

SEQ ID NO: 4005 - DNA, 496 bp, Zea Mays
ctgtgttgcttctccgactggctactgccatgtcttgccgtgtccgcaggtgggtgatggcttgttgcagtagaatacggagtagcctggtatgcctgttgtgcgtagaggcgtataggcggagccgttcagattccctccgccttagtaacgcatgagtaatcagcgggagtcatgatgactgcagtgcatgcagcattgataggaaacggcgagtaatggtgagttattgtccttgctatggtaacgtgtgagtaactgcatggcccacgcagcgtggactcggcacgccgcctgtcaccggaatggacaggcacacgtcttatccgtaatgaatgcaaagacgcgcatagcccagaggcttcatgccaggttctgcccgttggcttacgccgcgtgtagtaggccacgtggcaccatctggtctccgcctgggctgggagcaggactgtatgtgataaggtccggatcccaccagatcaggtatggacacgtg

SEQ ID NO: 4006 - DNA, 453 bp, Zea Mays
ggtcacacagttttactccgtttaggtttttacgatcttcccagctttcgtttcgatatggaatatcgaggtggagtcagaactttgacactttcatgccttgctcgacaagcaatctctgcaacgtcccaagaaccttgtgtgtgccggacaagttctcttcaacgacctttcttctgtccaccatcggaagaaggaaggccctagtcggcctcgtggcctaactcctcatcccctctttcctcactcgtatcttcctctttcgtttgtttaaaaactaaatgtcgatgtccctcgtagtactgctgagcctccaaccagtgaaagttcttcgtagcatcgatgaagccctatcaatcggagcttgtcctccacaccctttcacttatccatatccttgtttgtacccgtacggtgtccctccttcttatgctaccctttacaatgctctcc

SEQ ID NO: 4007 - DNA, 396 bp, Zea Mays
ctccggcgcgtcgcggccaggatgggtggggcgccgtcatgtctggtggcctggtggaagaaaacacctctgccgttgatcggatacttaacggccaggattctgagaaacgtaccgctttggtgggttgggatccagaccgtagatctcgtggttggcggctgtgattataaacgttatacccttcgtccaaatcgtacgcgggccgtcgatcctggaacgttcagtcgtgcggctggcatcgttgtttaaaatctccaccctcgatcgcccatctcacgatcaccagtgagtaccggttcggaagggtactcgatctaatctgggccgtgcgagtttgatcggacgactcaggattgaagttaccctttcgggtgcgaaattattcaaaagaac

SEQ ID NO: 4008 - DNA, 458 bp, Zea Mays
aggggagatctctgcactggagacgatcctgacaaggtgccatagccgccgtatttcgtcaggcgtagcaggtattttctttccaccatctgttctgcacttggacacccacatccatgtggtgctagcaggcctccaggaatgaccaaaaacttgggctgaggaaaagccttttttttcccagcccaacatccccttggtcatcatcatcttcctccctagaagcatccgccattagtggcccctccgccccacctgccagaaggccatcagaagtttgtgagaactggagtccttcagtgaacacaccgaaaacaaatcgctcaccagtggttcccgtggcagagatgagctcaacgcttcgcgtgggcgctgatgtcctcctcctgcgtgcagcgatgccctcttcgacgggatcctccgcccctcgacgagtgaatcccgtcgccactcgggat

SEQ ID NO: 4009 - DNA, 465 bp, Zea Mays
ggcgtaggggaggtcgtgacggtcacggcgatgtgcggatcgtctgcggggatggtcggagtagaccggtccacgtgcgcaggcgggggagctcgttggcgacgagggctctggcctatccagggcggtagagtgcaattaaactggtcagtgagcttcactaggtgctagggaaggcgtaggtgcgaggaattgaagaatggcttacccgatagctcggtctacgtgtggtggcgggcggctgaagtccggcgagggtgattctgctcctctggtgaggcaatgcctcggctcaagcttggataagcttcacagcctctcgagaaagctgtccaggggctaaggcgaggctgggggtcgttagaaaagactggtcacgacgaccgtgctcaggtagtgatggcgggcggtggcgctcgccttcaatggcgaactccggtgatctctggctcgggcggggctttg

SEQ ID NO: 4010 - DNA, 499 bp, Zea Mays
gggagaactccgatccgcaattaaccattcacaggccgaatcaccaagcctgaagaccccacgaaccgccccccggagtcaccgtccatcccaataccacgcgcgcgaagaagatccgcaccgccggtctctaactctctttccgtctacggttcccgttggtggtggctgggttctcggctagatggataagggagcgggagcggctgggttatataggggcggggcgattcaatcggccgagaatctcggcaatttagttgaggagcccccggattccggtgatcacgcacgatcgttatgagctcaccgagcagagcgtgcacggaaagggggaatcaacaggattccgtgcaggtcgttggggaggaagacgacgctgtccacgcgggtccacccgtcatcgccacagcacgaagtagcccacgcgcaacagaaccatgtgcggctgccacctcgggcccgcgtgtcggcgcacaggtgacaagctgggccgtgc

SEQ ID NO: 4011 - DNA, 1050 bp, Zea Mays
ccggggctgggatcatatccacaccattggctacccatcccacgcgtgcgctatcatcactcttccctcgcacacaccaccaggcaaaagcgggcagagacactagcaccgcggcggtgccatgactggaacgacagcgagcccgcccgggaatgctatttcctaatcgaactaggattataccaaattgggggcatgaggaagctacaggacaggcactcaccgggattcacaaggtaatttctcatggccacggcgcgctgcggattgttgatgaagttgaacaacggcgagccattcggcgagttctgaccgaacacacggccgggaagcaacttgccataactccataccttcatgcgatgcttccagaccacacgcagaggaccatggcttcatagattgagaattgagattgaggtcaagctacggcggcggcggtgctcaccgcccaaccctggtcgcagaggaaatcacgtgcgcatccacgtgctcccgcaaaccgccccaccgatttcaatccaagcccaagcggtagcaccgacacatcatgtgtgaggcggccgccatggcatcaaccattgcttgcaaggctatgctccgtggaggcactcccttacccgctcactccccgcgatgaccagggacctagccttcatatatacccggagtcggtgggagggatttcggtcccaagcttgtaacggcagacgagagagaaccggccagcccctgagtccgcgcccgaggaatccggtcgatcccaacaacaacacggtagatgatttctacggcagtgggttgaagatgagcctagcgaacggggcccacatggaagggaattgacttatacgcagcagggcgactcgcgtggagacggttagctcagctcgatttgcgggcggaggtcgttggggagatctggcatcaccggcagaggacccgattcgtgcggcatggtgaggtgaggaggatgaagcacgagttggcgctaaggctgacaaattggacccacggggcagtgtgagacgtgagggtgtaaacgggccg

SEQ ID NO: 4012 - DNA, 1247 bp, Zea Mays
caagacgacacgataactggtgactacaagtgaatcattcaataaataaataaatgtgtctcctcttaaggcttaccatggctttctacgctgccagacactctatcaggtgctccattatcaatccagacacaacaacatattgtccatgacacacctacccatgaacctgaattgagagagtatgatactgtattaattgagcctacacaaccaagcctagaaggacatatgggtatatacttttatgctataatataccggtatataatctcgttatttacctttacatcattaacacatttctaatgtctggtttacacatcagagcatccaataacaccacatgatttcaatattgctcaacataatgaatatactagaagtcgggaatttcatggagaaggtaaccataaattatgatttatattattttacctagaaatgttcatttctttttttaataactgcaaatagtgcatttgttttttaacacagatgatgcatttgaatcatatcgtctgcttgggtactccagtcataccgaagatccatatgactatgtctaccataagttgccagatagacaccatgttctgcgaaaaatacctgactgttgttattgcggagccatgaaatttcaatttgagccacacggaatgtgttgcagaaagggaaagattaaagtgcacatacctgatgttcctactgagttgaaaaggttgttcaccagtcagggagatgacgatgcaaaatattttagaaaaaacatacggttcttcaactctcatttctcctacaccagtcttggagttacattggatcaacgagttagcacagcagctaatacgggtatatatacatttcgtgtccaaggtgccttgtatcatcgtctcgaccatttagtgccaggttctcaaggccctcgtcatttgcaactttacttctatgatacagaagatgctacattggcccacagggcacagagatcaccagaccttgatattaatatcattaaaaatatcttgacaatattagagggaaatccatatgtacaaactttcaatagacttggatccattccaaatctagatgactatgttattgaactcaacactaatgtaacacctgaccaacgaaggtacttgactatgcatcacatttctttgttgtttacttgcagcacatttctttttgtaatacatgattttaacatgtttattctgcataaacaaggtacaatgcgc

SEQ ID NO: 4013 - DNA, 424 bp, Zea Mays
agtggatatttgcctagatggtcgaagttgagccattgatctgcccgagtgaaggtgatcgggtgctccgaccatcggtacggagtgggaggaccggtggttgccactaatatctggcgatcgttgagcttttgttgtcttctgttttcctgcgatccgtatccgctgaagatgacgttgacctccccgtcaacacgcgggaaggctccacctcctccctcctcctactgctggggttgtcgtggttctcctggtcctccccgcggcggaggaggaggtagaggttggaagggtcggccgtgtccgacggagtgcttgaagtccctgtagttccgaagggtgtggcgcatgtccttgtggtacgggcactgggcgtcgaggatgtcgtccagtgtgcgttcgcctccgcgaggtcctccccggg

SEQ ID NO: 4014 - DNA, 660 bp, Zea Mays
gtcaatcgcgacgcgcgcacgaccttctgggctctggcgtacacgacaccgcgcgaaaagccgctgacgccgggcccggagcaagaactggcaaaaaagagcgcctagttaccgagcactagcagaggcaagggcaaactagagtatagggaggaaggagtaggcggaaacgaagcaagggaagcgtaagcgttaggagacgaggcgccgagggaggcaagccgatcacaccaaacgcttcgtgctgctgccccgtctcttctcatcgtgatctcagggcagtggatcgatctcacgtcggaggcgaccttcttaggcgcgccaccgccatccgagccgagccgcagcgatccagatccaggtacccccttttggaccgcccctgcccctctatccctcgccccatcggcgtccgcgtgtcctcgtcccctgagacgccaccggcgtggagatggagtgacgatccgatcagatccgattgctcgttttctccgagaatctctcccccttttgtcggttgtgagctctgaaagtcgaatatgccctgtttccctccaatccatccagttggcagcttgtttgccgcgtggtggagttcgtactgatgtaggtgatttggtccaacttttcgattttatctgtgtgttcaactgagcctct

SEQ ID NO: 4015 - DNA, 623 bp, Zea Mays
ggttgagacactgacacgcggggcccacagaccagtagtatgctgagggcgcggggtgcactagccagtggatcacagatcaacggctctggttccatgaaccgcgcgaaccgttattcgcaaatccagaccgtcagaatagaactgaatggttaggctgggcgccaggggctttgccttctccggtcagctaggggcggcgcgctctacggacacgacgatgtcgtctctggaggcgaggcagaccggggctccttagggcgctaggggttggtctagatggctagagaggttggggatgacctaacaagcgatatggcgaggtcgggttgcatgaatggggctgaggcggctagacgaaggaggggagtccttggcggaccagggaatactccagcgagcaatcgcgcacgactaagggcataccaggagaaaataggggcgggattagatcagttaccttgagaggaggctcggggactctcgaacgacgtccggggcacggcgaggacacgggtcgacagcgggtgagctacaacggggtagagaaagaacttgtgagcatggattgagagagatagagggggagggggcgaaccgaggggtgtcccgggtcatgggtg

SEQ ID NO: 4016 - DNA, 315 bp, Zea Mays
atgtgcccttgagctcggctacctcgacattggtacaaaggactatcatccgcatgagcttgttgttgatttctacatgcttattaaaacgacgtttaaacgtcgtttaaactataaaacgctgacagaaagtgaaacgacaaaacgttttacgattcgtcgtaaaacgtcgcattttgacgtttaaacgcggtatagagtgaaacgccgcgtttcgggcgtttaatgcgtctgctgctagaaattggcccagccaattagaaactcctgcccagcccgcccaggccgccactacaggccgcactatcaccagcc

SEQ ID NO: 4017 - DNA, 397 bp, Zea Mays
cgggtataaggcaccagacatgtctagtatagcaccgatggaacaacgggtacccaaaggctcaatagtcggaaatggctagttaacatggaaggcacatgacacatccggtgacacattggtggcgcactggacatgtccaatgctgtacaaaattgtctaccacttttcaatgactttttgactttgggggctataaataccacccaaccaaccattttcaagtgtgggagcttagatacatttctaagaagttgagacttcattcaatatctcttagacactcaagtgcttaatataatcactcggtgtctaactagacatatcctagttgattagagtgaggttagcataatcaaacacctcgacgcttgtgtgccttactacaattgtaccg

SEQ ID NO: 4018 - DNA, 427 bp, Zea Mays
ggcgtggggaggaagacacacgatcgccgttgatcttctgatgagcgggctggattaaaacaaggtaacgcttcgcctgggctcgtccaccgccgtagatctaggatcgtagggccgctggcatgcgtaatatattaactgtagatcttggatcggacgattggagtcacgtaccggttcgagatggggtccgatctgatctaggtcgcacatcttcgattcaacggccagcgtgtgccgataccccttcagccgtgcgcaaattattaaatagaccctctggtttctattattcaacccgccatccacgccagttcaaaagtaatcatataggtcctgtatttcgcagtttagaccctgacttctctagatattgtgtccgcagtacatgggctattaggaaatagagaaataacttttaaaaatt

SEQ ID NO: 4019 - DNA, 365 bp, Zea Mays
ttggcgccataaaaaacgtacgggtatacacctagtgacacgcattaatactgggagtcggaatatcagatccatcatgaccttgagtaacagtgcattaatatatgaaaaaatgtccgtgagtcggtctagcacttagtatataacaacttgaatcgttcaacagaattgctgagttcattcatggagtatatatggacagaactcagagcaggcgtaggtctatgcctcactgacttgccaactcttgagaaaatgaggccaacgacattcctatttgccataactaacctatcgacctaccagctagatcaaattgcctgcataatccaataaccgtacagagtagggaacatagtatctac

SEQ ID NO: 4020 - DNA, 793 bp, Zea Mays
tggcagtggcgcctctcctagaagctagtaaagccttggatattcagaggtctgtcagtgttcgcccaaaacgcccttgccgagccaatcagcctgcttctcctgctgatgggcagaaaaagaagaagagacgtcttcaccgagtgtctagcttggatcgggatgctggtccttcgactcctgctgctgaggaagtgcccgtgcctgaatttactgaaactaatcccaatgggtgtgacccatctgacgctgaccccaatgggtgtgctgtccgtgttgctgatgaaaatgaggaggaagaagaagatgaaatccctctgattcggaagaacagtcggcgctacatagccagtggggaaagtagtggagttccttctcctgctttgtctgccctcattggtctacaagaattatctctggcgaactttgatcaaactcttgaagatatggttccagaggatctgttatcagaactggaggatggtgatgcaatggatgtttgtgctgatgtgcttgacgccgggctggggtcatcctgggcagcgtcccgcgcctcatcgaccttggagcgcggtcttgagggtcaggaagctggcttggattgccctgctcccatggaagtgactgagggaccttcagccttagaggtggttgttgtagagaactcggccttcaaaggtggtgttggcgctcacccagccctcgagggtgtttccggggatgattcggctcggatgggtagcgcaagctgcgacccagcccccgagggtgttgccggagatgatccggctcg

SEQ ID NO: 4021 - DNA, 861 bp, Zea Mays
gaaggttgtatggaacagcaaatatgagccaacatgagtagtatggtgcagttagattgaaaggtgagaaaccatctattgccaaaccgaagcggacatttcgcacttcaacagcaaagctggaatcaaaggcatctagtaccttccatgcatttgtatcagctgggtgcgccatgacatctggattctagcgtaccccttctttgtgccacctcatgtgtctggttgtattcttggagatgaacaaatgtttcaaccgagttataagaggcatgtaacgaatctacttacgtgctatctcggtcgtcacggccaagccatcgttgttttcaacttctacgaatctatgctcaccacatactgtaaacttcttctcactcatggtctccttccaaaaaatcatatagttattgtcatagacatcgattttttcgtagtccataccgagaccagatagcaacttcttggactcatacatgtcctttggcatcttgtgattctccggaagtacatcaatgatcaagttcagaagctccttgtagcagttgtttgagaatgcaaacttagacttaataattataagtcaagtcacgaacacaaggacggtcactttcgtgtgtttgtgcaacggctcttcggtagctttaaggagctcgaaaaacttctgaacctcaggcgtaggaggatcctcataattggagggttgaccggggttctccaaatcgacgggtagaagctcatggcttacatcgtcaagcatctcttccatcctatcgtagccccctcttcatgtgactgaacctacgatacaatacgaggaggtgggtcctcaccgtggtgcacccacacctcataacctgg

SEQ ID NO: 4022 - DNA, 703 bp, Zea Mays
agtcacctggaacaggttgaccatggggagtatacaccgcacggtgttcttggtggatttgggaagaatccaaaattagtgcttactggtgagggtttggggatacaggtaggtgcagtagatgctggaatccatggcggagccgaggaggtgctcaatttatagttcccattgtcggtggtgtccaattccacgaagttgtgctggcggccggaggaaagcaggggtactggagcaggggatgggtggcgttcaccgtggcgcttcctccggtgagcaccggttgaggagctacggcggttaccgatgatctagtgcggctaggaacgacgtggtgaaaagctttgagcgtggcacaaccgcagtgaggcacggcaactccggtgacggccatgaggccacgtcgccggtgaaaaagggcaggagacagtgaggccacagtatctcatactcatccgcgacgagatctttacctggtgaacgaaatccctacgcccgtggcacgaatcccggcgaagaggtcgccggcggtgaacattttgcgctggcggtctgatccgcacgagcactgtaccatggccaactccatcagacagcgtgacagagcattttggagcttcattttctcccagattcaaatggcaactctactaaagctctgcagcaaaattgtagagctataaaccagctacaacattgctat

SEQ ID NO: 4023 - DNA, 484 bp, Zea Mays
cgatgagtcacggcggccgccggtgagtaactccggccgagctcaggagatggtgccacgtacaagttacccttttcccggcgttatccatccttcaccgtgcatgaatccgggcggcgatcaacggcggcgagctgagctggcgttctgatccacccaaaacactgtaccatggcacatcttcttcagtcgcctgaaccggccacgatccaacccaattttctctggattcttgttagcaacagagcgatctctcttaataaaatttgttcactaaacatcagtctacaaacttactataggattcttgggtcaaaactgaacgaattcaaagatatagcgtgtctaaattggctcccttccaatgtaaccatttttatttggagttcagtttcagttttctgaaacagttctgacagagcgactttgagtagatttttctccaatttttgtataacaacagcaggagatgtctgcatcaaag

SEQ ID NO: 4024 - DNA, 595 bp, Zea Mays
ctacggtggtccttccccgccccacgcagtcgattcgccctaccgacctcttgcctccctatgcggctcctcccaccggcgtccaccgccacgatccctccctcggctcgacaccgctattgtgcctagcccctcccatgccgccatcaggctagggttggtcagtgcccccacactgttagcgccgccgcaccaacatctcctacttccctatctatcggcaggtctccctcgacacttccctgcacatggctagtgtcatccacccttgtctatggacgctcatttgtgttgtgcgcgactacccccttgcgcgtcgcccccacactgtctctcttgcttgcttgcgcaacgagcgtgcaccccctgttggtccccctcatgctacctcagtggtccactatattgccctcgtaggcatgggcgtgaacacccatgcccttgcagccccaatgccctccctactgcactgatgaaccttcctagcctctcaacaccgccgccactcatggccgccccctcctcggcctccgacgaactctgcccatccatcaacgccgaccactaactcctctctggtggcagcgaaatcccg

SEQ ID NO: 4025 - DNA, 736 bp, Zea Mays
aaaaaagaagaagagacgtcttcgccgagtgtcaagcttagatcaggatgctggtccttctgctcctgctgctgaggaagtgcccgtgccagtttttgctgaagctgaccccaatgggtgtgacccgactgatgcttaacccaatgggtgtgacctagatgatgctgaccccaatgggtgtaccgtccgcattgttgatgaagatgaggaaagagaggatgaaatccctctagttcggaagaacaaccgacgctacatagtcagcgaggaaagtagtggtgttccttctccagctttatctgccctcattggtctgcaagaattgtctctggcaaactttgatcagactcttgaagacatggtcccagaagatctgttgtcagagccggcagatggtggaatgatgtatatttatgctgatgtgcctgatgccgggctggagttatctcgagcagcgtcccgtgcctcatcgaccttagagcgtggtcttaagggtcaggaggctggtctggattgtcctgctcccatggaagtgggtgaaggtccttcagccttagaggtgtctgttacagagagttcggccctcaaggatggcgctagcgcttacccagcccccgagggtgtcgccggggatgatccggctcggatgggtagcgcgagctatgacccagcccccgagggtgtccgagttggttctccctctcacacttccatggatgttcacgtagggtcttct

SEQ ID NO: 4026 - DNA, 963 bp, Zea Mays
ttcctttccccgccggcccacttccctgcaccacctgccagttgagtgtcgtgtcgttgtgtccctggtacatgggacccagtcgtcggaagctccttcctgaagttcgttgcaacagcccgcaagcaacggatcttggataaatctctcccccaccgcctcatccatcgcattcacgaactcaacccagggagtatataagccaatgagtgcatgcccttgccatcaaccatgagccatcgagccccgttcctaaacgaaagctcatggggtagccgaagacttcgttgatgagcagagagaaaaattgctatgtgttgccaccgttccaatttggaagcatgcagtcaccgaggcgagaagaccgtgcgcaaggcgtcttcgagcatggagaaccccaagaaacaacaggaattgctcggcggagttcgttcttcatcgtcgccaagctgctgcgcagacgatccgtcctccacggaggtttgggggcgccaccacatatttgcttctggtctgaggctttgaagaatcacggatgcataaggatcatacctacgacgttgttggggatcgagaattgatcggtgaccaggaaccgctcaccggcgttgttgcacctccccggattttcggagtgtcgtggacagagctctacgttgcgtctacataggtgagtacctgccagtcatgtttgcctcgtcctttgcttcgggtagcaccagtcagctcggagttgggagcccgggaccactgtgcagggcttcgccggttaggctccgtcgctcggcgtggtggcgtcgccaccctgctcctatctctgttgggaggtaggagacggatccctggtcgttggatcgtgggggtgagggttaggattagagctgggtgtcctggtcatggagaaaatcaggaccattgatatgtagatggacggtcgggattagaaggtcaataaactctcgt

SEQ ID NO: 4027 - DNA, 535 bp, Zea Mays
ttcggcctagctcgttcatatcgaacagcttcccatcgagaacatagcaacggtgaggtggtcgttagcgtgcaccagtgtgtggcatattgcgaccttaaggatcttgtgcatgttatcaaagatgtagctgctagcgatgcggatctggaggtcgtcgtgcacctcgactccactaatggtggcaaacgatggcaggcccttcagtccatggtcgccagtcacccatggttgctgccgatccagatctggcccttcagtccatcagcctcgctgattaaggacttgcggtcgtcgccgtcgttaaacacgtcgtgctggccaaatgtgcccaccccaatgttgtactcgatctcgcagacatcgaggtccaagccggacgtgagcaacgcgggcacgcccggccacaaacgtgaatacttctcataggccatggaccaaggaccaacccctgcagacgacaaggaagcagaggatactgatgggattgagacgctccctgacggggtcatacaactgcgattggatgtcggac

SEQ ID NO: 4028 - DNA, 543 bp, Zea Mays
aaaggttggtttttactctacttgctctacttgcaaaggttgctatgtgtgagatacaagttagtggtaatgaaacaaatttaccaagtgttgatcgatccatgaggaaggggaagactccaatgaatgaatctggggaggaactgctaatggactctaaataaatttaccaagttgcatgataacttggggaatgaaattccccataacattattgctatttaagatatggtaattctatggaatattatatctgcacagctgagatgatgctccatctctacggtcatcatctttagcttaaggaaaaaaggtattcatttcatttaagtgacggagatgagagtgacatctcatcgccggtgagagtcgaagaatggttgagagcgaaacacgaggacacaataggttttgtgcagcagagaattgtctgcatttttatcaattgtatttaaccaaactcactaaaacaaagtacgcgcacatcaagaggtggctgtgtcatcccacacctcgtgatcaaagcgttgcacatccctttgc

SEQ ID NO: 4029 - DNA, 493 bp, Zea Mays
ggccttgccggcgatggcgctgaggaaggtggtcttcccggcgccggacgggcccatgacggccgccaccttcccgggcgagagcttccccgtgacggaccgcaggagcttcttcttgctgcccttgagcgtgagggtcaggtccttgaaggcgatctcgacggacaggcgcgtgctcacgtcgtggtcctgcgccatggagatgacgcccgagaaggtcatgttgtggttctcctgctgcatcgccttctccctctcgatctggccgtacgcgtacttgaagatctggctccgggtgtgcatctccttgcccgtcggcttcttcagcgccttgtcccctacctccaggttgaacccttcgtcgctctccgggttgtcgtcgatggaccgcaccatgtcggcgaggttgctgtgcttcttcccgcccgcgtcatcacctacctttgtggacgctccggcctgcagctgcgacgactgcccaccgccaccgcca

SEQ ID NO: 4030 - DNA, 625 bp, Zea Mays
gtttggaacggtgacccatagatacgtcattgagcaccataacaaggtcgtgtgtagggactcgttttttgtaggtcaccatgcgacaggtagactggagttgtcacaaggaagaggggttccagccactgctcccttcacaaggtgaggcatggcgttgtcgtgtattctgtgacacaatgtggaccaccaaggaaacctgatgttgccctccggagttcggtgcgcctatgcattaactgcaaacgagacgtatacctgcctactcaagcggcaggtgctacaactgaagtacatgagccgcacaatggctcgcgtgttaccaagtcgacacctttgactccacgcgcgagtgggctgctgccatcatgatcccccactgtagcacgtgcggtaccgatgcaaagggtgacaagcagagaagatatgacgttgtcgcctgagtatccctaggcacgatagcgcttcagcctacgccacaacctactcctgcgctctgcttcgattagacgaggcaagggcacgacaagctaggagatctacacaaagacgaggagaagatatttgttccccatgcacatctagccgacgcgctcgcgcgcaccacagtggtcgatggactcac

SEQ ID NO: 4031 - DNA, 536 bp, Zea Mays
aatgcagttgttacaaatagcatgtgaaggtgtagtgaaagacaaataaagaagtggaactgacatgctatcatagattcatagtatctgaacaatacgttgctgttaagtgtatgaaggctatgtactataggcccgtatggcccatgaggatctctctgtatatagctatctccagtaagggaggtcttctgcttctgtgttttatccaaggttagtaacattggtaccaaagccatagattagggatatgattcgactaatctgtcatactacttgtatgtgtgtgttatgggcgaagaacccagcccattaggggtccggggtaccatatatgtaatacttgcaatactgtagcctatctatcagtttagggtttcactttcaccaacagggtgtcaaagccgtcaccttcccctctcccccctagccaccgcccaactcccatggtcggcgctcctccacctggtagctcgctgcccctactctcttccctgctgccagccccatctccaccatggcgccgctgccaccaa

SEQ ID NO: 4032 - DNA, 2386 bp, Zea Mays
gtcagttgttggtagtttggctggtactgtgggtagtggttgtatgcttcttgttgatgttgaaactgtggttggaaagtgtggactacagccttcactggttgttctgggtagtcctttttccctttttctacatccatcctctctttgacctctttgtacgcgtgttagtctttggttgagcgactgcagctttcgtgaaatatgcagtaaggcttgtattcatgaggtggacctcgtccacgcccccttcccctgggggccctgccacctcttgccagctggaaactttggtcatagatgcgatgggtgtcttcgggttgttgttgctattgttgctcttgaatattgtggattcgggtctgcggtaaaggctgttgcgttcgcacccaagttttggagcttcccgggtgcaaagggtcctttggcttgcgttgtgcttcgactttgcaatagtggaggtcttcgggccgtgcgtactttacaaacagctaatataactcctagagggttgtcggtgggttcctagtgcagtgactgtataaatggctggtgcgcaggccgttggtggcataatgaatggcgattccatcctctactgacggcaattgagacttgagcgacatgaacttattgtagtaataacggaggctttcctctctagctgtcggcatagtgatagtttagcgagggcgtcggtctgtggtctatacccttgaatgttgaggaggaatttctcccaaagggcagcccatgagtcaatcatcagcgtaggcaacctagtttaccaagttagagcggggccctccagggcgatgataaaggactttgccattgtgttgtcgtctccgccagatgaagccactgcgacttggtaattcatgataatctgcgaagggtcggccttcccattgtattttggccagtttccgaccctgtagttgcttggccaaggcgtcgcctgcagcctggcggagagcgggcacctattgtcgatgaaattgaaagcctaaaagacatcattttgcagaggttgcctgacttcgtcaaagctgctcagccttacatggccttgtgaagggtgagtggggtcatgtgcctgtagttgcgaaatttcttgctcgagggccaggagatgctctttttcttgctggatgaggaggcggactctggcttcggcctcgctacgctgctgcttggcggcgatagcatctctttgcttctggagattggcattgtgcatgcgaaggcttttgagtaagagttgctcctcgatgttgatgccgaggtctcggctgtcctggaggtctgtgttgtcgtcttctagaggcattccgaatgggtgatgcgagtggcatgccgtggcgtcaaagcctgggggagccgggtagattcctcgtcaagtctggccagattttggctaggtagggcagactttttgggttcagcggacggtcttgtgagtcctctgagctggtggtgtggacttcgcactcttgctcagtggagactgtcttttgtttttgctttgcggtgtggccttcgcctagtgggtcggcagtggcctccgggttaggtggtggggaatggtcagaggcgagggcgaccttgccttttttggcggcaagaacaaccctggcgtcttcgtcgtttggtggtgggctagggcgggtgtttttcttgggaggcatcgtgggtgttgtcttcgtcgcacgaacgttgggcaccaaatgttgggcacagatacgcgtggatgcgctgtcaggtggacccaaacactcagaaagcaggtgagattttaggtgcgcgacaagacaaatggtagggaattgtaacttctcgttatgtgtgtcccatccctctacaggataggggtattcataggcctatccgggggtaggtggtccaaagtacgaccctgctacggatactaaccacagccgggggatatccagtgtaacggagtaattacagcgttgtctgtacaataaacggcgcacaccaaatagtgcacccgcatactacgctgacttgtgggccccaggtgacgtcttctggtggaccggtggcgtacaaggctgacttgtagtctttgtcccgagactcttcgcatcatcgctccctttgttgcgccttgccggatgatgatcctccgtcggcatagcggcgaaggcctcagcttctgctgaccccttgtggtccgctggatcggaggccccctctctagtggactcttcgccgaagaaagttgtcttagtcaaaggccccttcgccagtaggcctcatcaatcgtcagtcactgagtcgagggccccttcgcctgtatgcctgtgtagggttagcatgacaaaaagtatggtcttcgctctgcaatcgaggctctgtt

SEQ ID NO: 4033 - DNA, 372 bp, Zea Mays
atggaatatgaacaaaaatgtacagaaacttctatcaacatcgtgaagaacaacaaaaggaataggaaaatgtttggatacatgattagtccaccccaaccacaagcaaaagccccgaaacacatggatacccaaacagaagaatcaagccagactcaactatatgagatacggacacccagtcaaccctcaccccccgttggtcaagcaaaaagtagactcacaaagaactcaaggcaagaggtgcttgctattactacaaaaaaggaacatattattcgcgaatgccccaagaagcgtctagaccgactagagaagaaagcaacaaagcaaggcccaagcaataatccagaagaccaaccaatttataag

SEQ ID NO: 4034 - DNA, 542 bp, Zea Mays
gaagaatgagaaaacccccaagtcatgggaagtcaattgatggcttgacgaaggatcaccaaccggaacaacccgcaatgcatcagtgggaaccaattcagtgtcatcagcagaagccagaactctgtcatcaggtgcgttggcctctaaagcgactccttgacccaaggcttgggctatcgccatgcaactagaatgtggaggagaagaccctacatgaacatccatggaagtgtgggagggagaacccactcggacaccctcgggggctgggtcacagctcgcgtgacccatccaagctggatcatctccagcaacaccctcgggggctgggtaagcgccaacaccatccttgagggccgagttctctgcaacagccacctctaaggctgaaggaccctcagtcacttccgtgggagcagtgcaatccagaccaacctcctgaccctcaagaccgcgctctaaggtcgatgaggcgcgggacgctgcccgggatgaccccaacccggcatcgggcacatcagcacaaacatccatcgcac

SEQ ID NO: 4035 - DNA, 775 bp, Zea Mays
tggctgagccgtcagatcgagtttcaacggttcatattagatgtaccaaggcaagaagcggtacgctacgcccgcgcttggatcacgatctgacgacccatatttaataaaatttgaactacccaccgccatccgatctaagatctgatggcacagattcatcagggcgcgattcaatcttaaaccgcccatacctaaatctacggctgcgatccggtcttctaccccttgcaacgcagcacagcggaagaacaggggctccctgagctcgccggcgcgatgcgtagaggcatccctggtgctccaattcatggacgaacaggtgttatacaaaatatgaataagtgcaaatgaatgaaggtaaaaattaccggtgaatacatagcactgcaccccagccacggtggcacggtggcagcgatatgccgatgagaaattccccacgcgcagaacaccaatcagccgaggcgagctcccaatcgtacccagcatggcccggcgatgctcccacgcagtggatttggttccttggtgggggctggtgggcaatcgacgatcaaccgcggcggacagtagcgctccatttttttctctccctccccggatccatggcaacaccatggctacgaccctgtttggaggtcgaggaccaccgcacggtagcagcgaagcaacggaacctagttttatagtctggactccgaatcctacccaacgcgagaagatctcaacacccccgctgattccgccaggtgagcgctgcaacagatttggg

SEQ ID NO: 4036 - DNA, 417 bp, Zea Mays
cggaccttactcgaagggatctggaccccatccaagggacccggcatgcttacttgggagtcccggactgtattcgggggtccgggctgtgcgtacagggtccgatgcttcctcgtggaggtccggtccaactgattgcatcatgggatatatcatcttctctggccacatggcgtccctggagccgtccacgtggtggggtcggatgttgttcaccgcgcggctagagattgccacacgggcaccgtgccttcatactgtagtaaggggtacccctgattcagggtaccgacagtggcccccgggcctgcctcaggggagggtacgagcctgctggtggggccaaagcttgatcagcgattggcgcgccgcttccgtgcgctcgctgacataattactatcagtccgccttcagtc

SEQ ID NO: 4037 - DNA, 802 bp, Zea Mays
agaaaatgtcgatgtttatcgaacgacgaatatttgcacccatcttcaaccaaatgaacctaagaacttgctagcaaactaggcatgggaacttaccgtgaacacaccaggcgcaaaatagctcatacgccggtaaatcatgcatggagtactagtaccaaacatgcattttaaagtttgtcttcgtagctcggtcataagtccataccccttcctcccaagcacggaccaattcatcaatcaaaggctccatgtacacacccattttattcactgggtgtccggtaattatcaacgacacgaatatgttctgtctttgaaagcatacacctgggggagttgatggggataacaaacacgggccaacatgtgtacggggtagctttcattccatagggattgaacccatctgtggccagcgcaacacgtacattacgagcctcttcgactttctctcggtgaatggcatcaaagtgtttccatgcttcaccatcggatgcgtgcaccatcttgtcaggattatatcgtttgccatttttgtgtcatgtcatttgtttcgcggattccttggtcatgtatcaacgttggatcctcggtattaatggaaagtgacgtaggattgtcacggggatgtcgagctgcctcttctgtccatcaccagagtctacctccataaacctagacgatatacactttggatagtactttgcctctgcgtattctttcctaaatagcacatagccctttggacaagcatatatctgctcatacgtcatcttgtgtgcacggaggagtttctatg

SEQ ID NO: 4038 - DNA, 691 bp, Zea Mays
cttttattggttgatgtctcgacatgcctacttcgacatgcctcctttcttttcgcgaggcaagccccctgagtccccattcgttacgagggatccatctagggggcatgttccatcttttttatactacttctcccatatttcgttcaccgaaagggaagagggagcagtaccatgcttccctcgatggtcgagatcatggcgctcggtgagctccaaacgggtaatccgagtgagaccccggttcctttcgcaggttccagatgcgaggtccacaagggatcgtcctcatattcctatgttctgactcaaatagttgccgaccccgttcgatcgagtctgatggctcgttgcctccctccatgataaaccatcagtcagatgttcgttgggacttgaacacggtttagaagtgccattggcgctcgtgtgctagggtactggccgctgtgatgcccacatcataatcgcccctcgctctggggttttgggagaagtcacaaagtcgttatgggctgacattcgaactccaagttttacgggatcggtcaggccccctcacggccatgggccaacgagggtctactgagcctttcctagtggatgcgagatagtattgaatatgaaaaagatgggtcgagtcatcttacctagtcttggtctgaccgcagttgggtttcaacatcgtttc

SEQ ID NO: 4039 - DNA, 338 bp, Zea Mays
gccaagttaccggggctgttacaaccattactcgtcccgactgctttatggcaaattatctcgatggattttattgaagctcttcctcggtcctagaattatacatgcattttggtggtggtcgataccttcacaaatatgctaatttcttgcccttgcgccacccattcacggctctgtctgtggccagggtgtttcatgatcatatctacaaacatcatgggttgcctcagtcgattgtctttgatcatgacaaaatcttccccagtcatttgtggcaagagttatttcgtctggtagatgtttgtcttcgcatgagctctgcgtaccatccacag

SEQ ID NO: 4040 - DNA, 419 bp, Zea Mays
gctgctgctggaggagcttggcctccaacctcaacacttcacgccccacttcatccttcgggcggccatcttcgcctacttctgtgaggtgtccgtgggggcgacgcttcttccgccagcattcagacgaaagggtgttgtgcatcggccttccagaggtggaaagcgagctaagctgcggctccatcttttgcgtgagcttcaccagcatcccatggtacacctccatgaactggtctagctccaactccacgaggtgggaagcgagctgagctgcggctccatctctttggctttaatggcctcgacgtcgcctccaacggcgaccgctggtccggttgcggatactaaagacgccgtccgggaggtcgtacaagatgccgtggagacggcggccgcgcgcttccagcgtgacccta

SEQ ID NO: 4041 - DNA, 481 bp, Zea Mays
gtacagcagcgaaaagatcttctggttcagtgaacctcgtcgccggtgaccccgcgctcgaattcatgccaggcaccgcgattcgtgctcaacggagtacagataactgcttggggtaagaaatattgcattgaggatgaacttaggccactgttctgccccgatcgtcgtgtccgcttaactcacggccggttcaaataagctcgccggagttggccgcctgttgaaagattgccacgtgcctaggcgctctaccacgtcacagtacagtgccttggtgtgtccgttcatcatcggtgaccttgccgcggtgaaagccacacacctcttgcgccagtgctctcccctctctccggctgccagcgcgccatgcccaaattaggagccaccaccctcgggccctataaattgagcgtgccatcagcttcgctaggtaattacacacccaatgcaccaacccatgcctcaaattatccaccag

SEQ ID NO: 4042 - DNA, 552 bp, Zea Mays
gtcgtcatgtgggggggttgatgctgtcatctcgctggatgcccaaggtgaaggtcaggtctgtctctttcgcagaccccattgttaccgctgtttggccgcaggtggaatgtcatggactagctgtggatgatggaggcaagtctgatcccatgggcgctgatttgctggaatcagtgcacagccctgctacaaccttgagcaaggtaaacaatactgttgatctcgctgctgttttctcctcaattcacaaaggcttagacaacgtgccgatacattcccctagcgttaatctgatcaatctgggcacagaattaccagccagttccccagctgcctccccgaatgattttgcatttcacaatagcttaaacagtatccttgtggatggctctggcgtgttgctgggcgctgcccatccggccagcactcgtactggccatctggatggtttcctggagcctcatcgggtgggagtggatcgtacgcttgatttctccttgcctggtggtgatcgtgatggtagtctggatgcctcagccattctagctg

SEQ ID NO: 4043 - DNA, 889 bp, Zea Mays
atatatcctcggcgtcggaccaatcatctattctggggggaggtggggctggaggggtcttcttcttctctgtttggcatcctcggttggtggtcttcttctggattttcttcttgggggcgagcttccttagcttcttgtcatagtccatctttaaggttcgataggcctcgcgggtgttggcttcctcaccttctgctatgtcgagacactcctggagagatgccttctcttgcttaagctctttgacctgctgctctaggctttccacttgggagttcaggtgggtgcagtgggaggagagatcatcgtagtggttgtcgagggtgtggaggtatccggccatgtagacgatggtggggtcatcttctgtggggtctcctcctgacagagcctggagtcttttcctccaggtgggggtatttttgttgctgggtggaaaatatcaaaggggggtctcatagatttcttggctgtagttttggcacagctatttaagggcttttcgggcaacactctggcaagtgtctggaaagcggtgcccgatgaaggtgacttggaagggagggtggtttgggtagtttcggctttctctcaggtagactgccatagagcacttttctattccattttcgcggtattccttccagacatattcgggcttcttgtagatccccatgcgtagcgcgcaacttcgtagaaggtgaggaaatccttcctcctctgagcaataggatgtcctaataacccaggggccttccatctggtagaagaaaagaagggtccgttaatattggggaaaggagggagagtgttccttgggggtaaggggtgttttcttgttaaggcaacttttaaggtcagggttgcggtctacgaccagtcttat

SEQ ID NO: 4044 - DNA, 575 bp, Zea Mays
ggcggaatccactgagtcacggcggccgccggtgagtaactccggccgagcacaggagagggtgccacgtacgagctaccttttcccggtgttatccacccaagaccctgcacgattccggacggcgatcaacgacggcgagctgagctggcgttctgatccatccaaaacactgtaccatggctcatctatttgagtcgcctgaaccggccatgatcccacccgattatctctcgattcttgttaggaacaaagcgatccctcttaataaaagttgttcactaatcatcaatctccaaacttactataggattcctggatcaaaaccgaacgtattaaaagttatggcgtgcttaaatcggtctcatatcacggtgaccacttctgacttcaggttcagtttcagtttcttgatacaagcctgacagaataacttcaggcaagattatctctgaatttttctcaacaagtgagcttaccaccttaagcaaagttgttcttctataatcaggttacaattttggtgtggtgacctaatatgaattctcactattttgaaagctacacagccccaa

SEQ ID NO: 4045 - DNA, 579 bp, Zea Mays
tgaatctgtggcatgagcggtcctgtcagccagatgccctagctaaggccctagaggttaataagaaaagaaaacttcgacattcatcgaacatgcagccagtgattgcctaggctgagtcgagcgacgatgatgatgtggtggatgctggtttagtggatgatgtggaaggtggaggcgtggtgaagacagccaggtatgttgtggaggcaatggaggaggaggagaaggtgctccccttggtctagcgcgagcaacattctaaggctcagagtgatacttcatgtcttgttgcctcaacgaggatggtggacatctaaggtttgtctatgtcgactattgactgtatactagaggaggccattctggaggtgtttcaacatgagttacgtgaaatgaatgttatcgatgttcacatagttcactcggatgaagcatcctctgctggtttgttggttgggccagaggtaagcattctagtcccccggggagctcctgcattagtcggtcatgtcgccgtccaacagaaccttcttgacctggctttcttggatcacaagatcgacatgtagagggtac

SEQ ID NO: 4046 - DNA, 610 bp, Zea Mays
attccatgggcgggagcatggttcgttgcctttgggtggcatagtccttctgacgtcgtccgtagagtcgtctatagtcgtactccttgtatggcgtactgtatcgttcgctcatcatatagatccttgtagtgagtccactgctgacatcttcgtaatagtgtgcggtgggtctcgtgggttagtcatatggtgcagtggtgcatcgcacagccttgtctgtcgccatgatcctgtgtcacttgtcgcgtgcgtaggcatacacccggtatggtgtatctgttgcatcctttccggtatacgggttactgtagaaacttcggtgctgatatccctcatgaccggggttgactggttcaggtttgtgatgagtgattgtcaatgaagtagcatcttgggttaagtcatgtggattaacgggagcacgagtgtgtgtatgaaacatatctcttggcttgtggtacgttggtgtggagtctggagacggtgatcgatagcataggtggagcttatgggggttagtgtagaaggatcaagagcaatgaaggacgagcgttgggtcttaacgaagggactagaggagccgggtgactacacatggtggctgaca

SEQ ID NO: 4047 - DNA, 434 bp, Zea Mays
aacaatgttgacgggcagagtggcaggcgcaccgcgagcaggaacaagtgcgcggacagaggaatctcggtgtcgtggagtcgacgacgtgggctcggctctgggcagcgtcgcacgcaacgaaaggacgtagggagctcgacgacgacgataacaagtacttcgccgcttcgggtgacgcaaggactctagcaagctgagcagcgatgcagccacggaatctctggctgacaaagctccggtgaggcgtgagcaagggaatagctttggcgagcagatcggtgggcgatagcgtgtccactggtagagagcatagcgggacgcaaatgcctgagtcgtgggctagtgcacaggaaggcgagtagcggtggcttgagacgaggcagcacaacggtgattcggctggcgactggcgtcggtggacagggagtggg

SEQ ID NO: 4048 - DNA, 395 bp, Zea Mays
cgccacccaccacttcgtggaccttccaccgcaccctactcctccatgaccagtcccgccgcctactcctgcctcgcgcttcttcgacgccaagcaccaatagaagaagtaacaggtgcccttccctccgtcacccacgacgtcgacgccgacgatgtcggcgacccccccaacgtcctcatcgagatacagagatctatcggctgcttgagcattctagacgccacatgacgacaccgattggcggtgggaaaaagaagacggaggccacttcaccgtcgtcgcgaggaggagacgttgttaaactcgatgaacgcgacgacaggtatggctcccctccaccgcctcccttcccgcgtgctgcctttgtcttcgtctcgcctgctcccattccc

SEQ ID NO: 4049 - DNA, 760 bp, Zea Mays
gcctggcgctcgtcaaccataaagacgctgtcacttgggccccacttgtcatcttcttcgtccacgcccgcatacttgaacggtctcatgtgaaccgcgcgctgttacaaccgaccacgccagccagcctcccaatcctggctctactccgatataaagcccgaattccccctccctttcgctccctaggccagctaagtctcgtgccgctgtaagcttgcgctggggggtgccgtgtgtgggcgaagctgacgccgccgcaataccgccctgcgacgtgggcggagccctctgcaccgcccatgcttggtgagacccctccccttcatttctccttcgtgcccttgttgtaaagcacctctcggatcagattttgggggcatcatggcatgatgtaatgcagctctagcggtcgccgccgcgaccccagggtgacggccatgtcactcactaggaggaagatgaccctctgaccgtcagatcattgtggtgcggtctggattaaatctgggaggatgtaaacatcttgcggtgttgatgccctaatcgacgactgtgattaaatgagaatcacccttcgcgacatcagatcttggccatttgattgaaatcgggtggccccggttggatctaccagttatttataaagcagaatctaatctaggccatcggctggtgatccagtggccctggaatcttgataccccttcagcgtggcaattttgtagaagagccctcggcttattcaagaataaacccg

SEQ ID NO: 4050 - DNA, 407 bp, Zea Mays
tgacaaaatcgatggcaccactagagcgtgaagcggaggaggtggagcagactgaaccggaggtactgagataccagactgctgaagcataagagccatgaatgccctactctcagtccgatcctgcagaagctgctgctgaagtgcatcctgcctgtcctgcatattctgaaacatcgagagcatcctctcggataaccgggcctgctcggccgccaggtgagccagaatcgaagcaagagcagggtccatagcctgaggaggagcagaggcagcactagaactcccagcctcatgatcatgtgagcgtggaggcataggaggcggaggcggaggaggaaccccaaaatcatcatcatcatcatcatcagctgctgctgtaccctgagagtcaaactgtcgaagag

SEQ ID NO: 4051 - DNA, 446 bp, Zea Mays
tggcgaactactgattctcagacaggaacagtttctctgtcttctcagcgacagtatcagcgttgagacgatcttcagcggtgcgcagacgccccaccaattcttccactatcagattgttgatgttcagcaacgtctcaatcgacacagtgatttgattgtactgcttcggcagaacacgaaggatcttcttgacgacgcgagtttcatccacgacttcaccgagaccacgcagattctcagccagcaaattgatttgtaggccgaactcgtcaatgagctcgccattcttgaactgaatgttctcgaattcttgcagcagcttctgtgcatgtgattctttgatgcgatctgcaccctgccgcatactcttgactgcatcccaggcctccttcactgtcttctttgcccccagcgtcgtccacatctccttcggcactgaacgc

SEQ ID NO: 4052 - DNA, 1455 bp, Zea Mays
tgatggcccagtctgtatcttgtttgttcgccactgcatcggtggaagaggaggaagcggtggcacatcttcagaagaaccattttcttctgcatttccattagttggatgagaaggaaagatattgaatgacttctgcgttgcaccattgagcatccaatcaaagcttgagatgactgacggtgcatcatctctggagtcgggagctagtggatctccaaaaacttcagcactgctattgaatgaattcgatggttcctgatacacagcttgatgaaactcatgctttgtctctgtgtttacagttagttctggagttgtagtcgcagtggttgagctgcatagtggaacttccccattttctccaacaatcttatagctgccaagacacagatcttgtccaaaagtagcttttggatgtaaatagtactgtccattatttggcatgtcatgtttgctgttgattactgactcagttaccacattaggtagatcaatgcccttgaatgtttctgataatataacatgatccccttcaggtctgtcgacgaccttacatgccactgtatcatcttcatctgcgagggtgagtggagttatccagcaaggatcatccgattgcttggatgaaaccggtgaagagatactaccatctgaaactacttgctgttctatgtactcggctctttcatcgtccaacgcatatacatcagattcattgatttcctccatatcttccacattcacctgctccgtgtaaatgctgacttctttcaagtcctcacacttatcagatgtattctcagaaatggcttctgtatgaatgtccacatccacttccttgtcaagatcttccccaaacctctcttgagcatgttccaaaacatggttgagcactgccatagatgaattctcatgcagtgcagtacttgtacatccttctccctcttgggaactggaagatgtgatgatgcctaccaagtaggccatgttggagtcctgaaacccatttccttcatcaggggccgaatcatgtggactgtcagtaggtggaacatcatgctcctgcccatggttaatttcttcctgcgggcattttcctaaacccgcatcatcatagggtgaacctgacagaattttgtgcacagcatcactctccttagcttcaacagcatggtcagaaatttcctggtacttgacatcacgtcccacgccgtctgcttcaacgtcatataattcgctgtcttgagtgccatcatacctcagttcaaggagttgcttcgccatgtaccggagggaaccagagaaaggggcatgcttctcggagagctcccttggcagaatgccaacttttgaagcagtgagctccatgctgccaacatacttggacctcttgcttgctattttcttggagttctccttgacttccttggtcttcttagtaatatctcgtgt

SEQ ID NO: 4053 - DNA, 526 bp, Zea Mays
gcccaattgagcaccattatcaccgtgacgagtagtgctattaggatcaaaggttagaacccttgtgcaaggatgggttgcccggcggtggcgccgtcgcgtcggtcgtgagctcactgcggtctgttggccgagtggaggaagatagcaggatggcccttgatgcgtgaacatgcattccagattagagttggccgattccctttcacccctttatcgcgtgccgttagatcgtaatctgatggtcgagagttgatatcggttcggtgggcgaaacttctaatcgagaccgctggatcggtagttgatggataggattagatcgtgcgtacaccttcgtcacattaaaatccgaccgcacgttctgatctgggtggttcatactgaacaataccccttcggacaactcttttgcgtatgagcccctgaagaatcaagtatttaacccgaagttcactgtgggagtacactgagtcctagaaatcttgcgctaagacccctgagctttccagaaaatgaggcccag

SEQ ID NO: 4054 - DNA, 1151 bp, Zea Mays
gtcgcagtagtagtggtaggggcaggtgacgaagtcggtggtctcctccagctgccaccgcatgcacttgagtatctgcctcgtcaccgcgtcgccgccgccgtgctgagccgctctccacgccgatcgcccggcaccgaagagcacctgatcataggacatggtgggtggcagcgagcgaccgtttcttgacgtccttgagctctctgcccctacttgtccttcttcctcctcctctgctgcttcttgtcctgttcgctatatgcatgcctgcatttggtagccgccagtgatggcttgctttcggaggcaaccgctcaccttcctcctctccgctcctcctcttggaggccggtgtgctgctgctgttgcttgtaggaggagggaggggaggggagaggggttgcaagtttggaactggatagggaaggtttaactggcgacattgaaggaacttgccaagcgtgccctttaacgtgaagttttcaaacaccgtgtactaatcaaagcaaaggtgcccagcaaagatgtgctctggatggctgatgccattagcgaggattaatggggaggggggtaggggtgttttgggcatatggagctcatggtttgctgtcatggtggttgggtttgggtcgaggaggggatggaagctgagggatttgtttgacttcgtttccgtgtcatgcattggtacaagcagagggagggggagagcattagtagtttacatgtgtgcctaggcgttagttcaagtttgttggggggttgcattttctgagagaggtttgttggggtgtttggtgaggatatatatagaccaaatggacaattcagcgcctagttcgtcagtgcatgattaggcctgtatgattagcatctacctctagctaacacgctattcagtcttgcatatgtgtgtctgtggttcttcgcatgatggtgctatcatttggattccaaggcaacagacaggatactcgatcggcatgaggaattgggactcgggaaattatcctggtagtttgcgcaaagccagatcggccatgatcctggagcgacaaggaaggaggagtgcccatctgtcatggtatatttcccagtctgacgcgcatgtctgtctctgagtctgagatggtggccggatgttt

SEQ ID NO: 4055 - DNA, 611 bp, Zea Mays
agttactatagtcgatttgtagctggttggttgagctacaactttgttaaagacggattagtaagtattcacatgaaaatttgagatctaggctctgcaaagtggtatatcaggatgactgaatgaggaactgatggtacagtatcgaaatatctcaggttcaattcatctcgccgccggtgaccacgtgcctagattcacgccaaacgctacgattcgtgctcaaggaagtaccgattgttgctcggggtagtaaatatccctgtgtggatgaacttgagccgctgttcactccaaccgccgtgtccgcctggttcacgaccgattcggatgaactcaccggagttagccacctattgaccatgcaccacgtgccttggtgtcttaccacgtcgcagtagctcgtattacacatgtccggtgatcgccgtgagctcggcacggtgaaagccaccaatctattgcgacagtgctctcctctctctctgaccgccaccacgccatctcaaattcacgggccactgctcggggatcctataaattgagcatgccatcggttccgcaaggtagtcaagcaaccaatacatcaactcgtgcctcaaatcatccac

SEQ ID NO: 4056 - DNA, 446 bp, Zea Mays
gaaccgtttcttttgaaatttgatcatttaggtcatgacatataacgtgggtctccccttggagcaccggataccctgtctgtcctcactcgctgggcctgggcatcaccatgtgactgaccaccagactgctggtgctgtgcagtaactaccaactgatagatactatcacacagcagtgtctttggcagatagacagcgagctccatctccatgtgcagctgcctctcctctagcacggacgcagcatcaatgcctgctcagtcgctcagggcatattgccgtgtctccctacacggatacagatcaagcatgtctcgtgttcgtgtaagggtcccagcaagtatcttcgaggttaatgctgatgtcgtcaaggatctgaacatggctcatattatttctggttccaaggatccatgtccaaaggtgcctgccgtcaaggttag

SEQ ID NO: 4057 - DNA, 1031 bp, Zea Mays
acgagctgccaggtgttgttgtcgacgagggcctagtactcatccatcatcgtggtacgccagttggcattggccagcgcgctgcggtagttcatcggaatcggcaatggtgaggatgtagtggccgccagcccttcatagcgaacacgaggaatggcacccgtcatggtgcgggtggtacgtggcggcagtggtggtggtggcggagcaggcgatgccgccggtgccggtgagggcgccgtcggtggtgttggggcgtcaggaggggctgccggggcagccgccgctccggacagctcggggcgggggcgacggatgtagacccgtggtaaatggaccatgctgggtccaggcgggggcacgtgaccatgcccgcctggtgtcgaaggaggcgatccatgtgatgtcacaacgtcggggggtggctggtcatcactcgagtgagatggagtgaccacgggtggcgaggaggaagtcccacctgcaacaacagtagagcaaggcaccgaaaccatatcgtcgtcaaggagaaagtcatgggaggcgtgggaggaggcatctgaggtggctgcaaagggaaaagtgggtctcgtcgaatatgacatggcgagagatgatgatgcgacgtgtcgataggtcgaggcagcggtaacctttgtgcgaggggggatatccgaggaagacgcatgccgtggagcgagggacgagcttatgtttggaggttgcttgcatgttggggtaacagaggcacccaaaaacacgcagatggttataggttggcggttgattatgcagacgagtgtatggaatgtcatgctgaatggaggaggatgggcgcctattatggaggtagcaggtcgtcaggagtccctcggcccaatatgcgaggggtagggaggcatggagaagcatggtgcgaatggaattgttgagtgtgtggatgatgcgttcggctttgccattttggggtgatgtgtagggacaggaggagcggaggtgagtgccttgagcagcgaagaatttggtggtgg

SEQ ID NO: 4058 - DNA, 596 bp, Zea Mays
gagaaatcaggggcctcgggggaagatgtccaagactcagtgcatagtgaatatggacggcgggttggttttctggaatcctagggtttcttttgcaaaatggttaaaccaaagggtactgcgtaatttcagccgcccgatctaaaatcgatggtcccgattagatccagcgatcatgaaaccttggccgcacgatggaacttcaacgtctcagatttaaataacctatactgatttactaccggccgatcgagattggacggcgcgcgatcctcacccgaagcggtacgcatcaggctcaatcgcgaccgtaggtgctcgatccaacggcgagctcgtatttctcccctaccctcgaccagtgcggcggcgccaataatccccggcggcgcagcccgccggcgaggccacggtcggcgccctggtgctctaacccgcaaacctacgggcgctatgctacgagaagtacaaggcgaaagacgtggagaggaccataccgcgaatcgcgcagccgtaagccccggccacgacgcatggcggcaccgccgcgaaccatttgctccggtgcgcaattcgccgctactccagacaccacg

SEQ ID NO: 4059 - DNA, 672 bp, Zea Mays
tttagacactgctttaagtcaagttcttgagcagtaagcatctgcgtttcggcctttttgtctaaatcatcagccttcttaataatttgctctttttcttttttatatgcaccactggtattttttgcccaaccccttaggaattggcgtagtctttgaattttgaactgccatttttgtaggggggaccaacctctattctcatttttccaaacctgtgtcaccatatccgagaaaccttctctcagaaaccagtcgagctcaaatttaaaaggaggctgattgtttgagtgggttccacttcccgtgttcatgagcagtggagtgtggtcagaaatttctctcgtcaaagcttgaaccgttgtcaaaggatactttgactcccactcggtagtaaccaagatacggtcaagagtctcaaaggtgggtacgcttctagagttagcccaagtgaatttccgatttgacaatcccaattcccggagatccaagctatcaatgactgcattaaaaaggaaaggtcatctatcattgtagttgtcattatttttttcatgttgatttctaatgatattgaaatcaccaccaacaataagaggtaggttttctttggcacaagtttgcaccagttcagctagaaaagattccttcaattcatcttgtgcagcccca

SEQ ID NO: 4060 - DNA, 505 bp, Zea Mays
ttcttaggagccatcgtgggagctgttcggagcacgaacggtgggtgccaaaggttggaacataaatctgtaatccaaacactcaagagagaaaatgcaaataacacagtaaggcggcgagatgcttgagcagtatattgccaaagcgtgtccggagtgctacaggaccggggtatttataggggtagacggggttaggtaaaccaagtgtcgtaatgcccctatctactaactatattcccgccacgcactgtacatcaaggtaattacaggatagtgagtacggatccttaattacaccagatttggtaccctcctgggtcgcttataggtgagcccgctgagggcagatactttacacagtggtcgcaagagtgtgaggtctgacaggcatcgttgtaagttgtcatctagccctgctaaggctccaggcgtccgaggaaagtcccttcgcaagtgagcctgcatggttgacttcgccgccatactcaaaggttgtgttttc

SEQ ID NO: 4061 - DNA, 590 bp, Zea Mays
atcccgccgcgcacatatgtggcctcgtcgtgcgtgaaccccgggcgggagaccagcaatttcacgccgatgctcaccctgtccaccaatccatagcatgtcgtgggcgggcatactcactggtgtactctcggtaatatgctattgatcgcaattgttaccttccaatcttcgcttggcagcttttgggggatcgattaggccactggttcgtcgttgtttggtgcgccggcgaggtgccgccatggagattcctgttcaccgtgatggttgaccggtgagcaaggggatgggtctggtgccattggattgttggtgtgtggctgcatttggatggaggataaggcttcggccgggaatatctgtaccgtctgatctaatcgagcggttggtgtgagatgtggcgtcatgaaaatcctaaccgtgggtctcgggatcgacggtctaaaatgcatgccattttgatgaagctctaatctaatccgagccgcatttatcatatcctacggctgatactgggtgataccccttcggcccgccccttttgctaataagcccctgcacttaccagaaactagcccgccatccac

SEQ ID NO: 4062 - DNA, 689 bp, Zea Mays
acgatgcaaacattattctgctgccaaagagggagcaggctgacaggatcgaattgtttaggccaattagtttaataaatagtttcatgaaaattatcaccaagatcttggcgaacaggcttgcaccaagaatgaatgagatcgtttcaatttcacaaaatgccttcatccaaaagcgttcaatccatgataattttctttatgttcaaagagttatcaggaaactgcataagaacaaccaaccagctttattcatcaaacttgacatatccaaagcttttgactccctcaactgggcatatctcctagatgttttaggagctctgggatttagcctcaaatggaggaattggattgcatcaatactgggcacatcatcttctaagatcatgatcaatgggcagtcgacagagacagttcagcatttacgcggtgttcgacaaggagaccctctctcaccttttctcttcatcctagcaattgatccacttcaaaagatgattgagatggcatccgacaaaggcatcctaaaacgagtgctaccaaaaggagcaaagttacgatgttcgttatatgctgatgacgctggggtgttcattagacctgataagcatgattggcaagttctaaaaaagattctagaaattttcgagagatgctctgggctgaaaatcaactttgaggaaaca

SEQ ID NO: 4063 - DNA, 428 bp, Zea Mays
gtctgtgcgccgtcgcaggaccgaccggctgcatgaggattttcgtcgttatgcagccgagactggtcatcctctccctcctgggtcccctccacctcctgcccctaccttccccgcataccttaatgagtggcaccaacaggagtttggtgtgccattcattaccccggaggatgaggccgaggactatgatgaccctttctacacctcggatcctcctcatcctcctcctccctactcgggtcagggacccactcccggtgaccccaggctgtccagctctggtcactatcctcctcctccctacccgggttcaggacccattcctggtgacccgcggtcttccggctctggttaccatcaccaccctcctcctccacctcctcctcgtcatcgtacatctttggcatccggtttttctgtgggtg

SEQ ID NO: 4064 - DNA, 609 bp, Zea Mays
accaaaaaagagttaaaatgaattacttaggaattaaacaaggttctagaattattttatactaggaatccttttctttattaattttactcattttatttagcctttgggttgcggccactatttcataagagttcatagtttattttgtaaataccaggacttcactgtaatgttttaacactgacctggacgacgagttattttattgaaaacagagggtttcttatgtaaaaatacttggctgaaggggtattaccagatctgcaccatctgatctccaacggacggtccagattaaaatagccattatctgaaccagtatggaacaggggccacacgatcgacggcgtcaattgatcacgacgaaggaatgcacctgagttaatcatatccgtccttgccctgatccacggctctcgacacctccctataacttctaatcgcggccgtatgatagcagatcaacactcccgctcttttccccaatccggcaactgagcacggcgacgccagctccatcacggcggtgcatcgtcggcgtaaaagcagcctagctcccaggatccctactgcattcccgcgtgtggtgattcagagcgagatcat

SEQ ID NO: 4065 - DNA, 362 bp, Zea Mays
cggcagggtcgaacgatgcgcagaaaaaaacaaacgtacatctacgtcgtcagtagtgtgcctaatgatggaactgtgtggtccatgagactgtttggtttccgaagcctggggtaagcgcaacggacagctatcgtacactgtacacgtacctgctatgtcaggactcaggggtgagaagaaagtcaggggtgcaggcaggtgggctttgctcttgatacaggggtactgcactggtctggtcctggtcgttccggatggttctggaccgcgtggcttgttgcattgcactgcaccacgacgatcagatcaaccttgcccgccagtggtgactggacgtcctcatcagaccgcatgatggg

SEQ ID NO: 4066 - DNA, 647 bp, Zea Mays
cggggtgccagctgtgacaacctgacgagggtgtggtgtctgaggcgtggcctatggtgactgctaaacagggtgttggtatgattgttgcactcctcctaaatgagctggggtacccagaggttgagtataacgaggacgactgatgtagcctccctgtccctgagtgatagtctttctcttcatctcgcttagctaaacaggtatgtgttcaagggctatggtcttgtctagcagtttctggaaagatgggaatgagtgagacatcatctcatattggagtggcccgatgagtccctacaagaacaattcttgcttcttttcatcttcatcgacctcctcaggagcatatctagataactggatgaatttgtctctgtactcacttactgacatccctccctgcctgagtgagagaaacttcttcttcttgatcttcattaaaccagcaggaatatggtagtttctgaaattggttgagaattctgcctaagtgatggtgtcaatggcagcatatgctgcgcagtaagcatcccaccaatccacagcgaggccagtgaggcgacccaatgcgtatagtaccttctccctatcagtgtattgggcaatgttaagcaccttctccacgaacttcagctagtcatcat

SEQ ID NO: 4067 - DNA, 428 bp, Zea Mays
cacttatcatgtaggatctaagagatggataagttagagcaagaatagcctgggataagaaagtttccggtgagaaagaactccttgttgggtggtaatgcattggaagatcgagtttgacttctctttttttcttgacgaggttgatcttttccttttctagtcttggtctcattgagtcggggtcagggtatatcatcagagttggggcacatggttgaaatagttatgggtgagatggactacatgatgtaggtcaaagtttgtttgatgttaggtggggatagacagtttatgcaattcttcttgactctattggttggatcagatctcatgcatgtggctgaattggtttaaggcactagtttttttagtgcatgaggggtatggccttatcttttgtaccaacattaagtattttactctag

SEQ ID NO: 4068 - DNA, 481 bp, Zea Mays
atgaggttgtcctgaggggaccaccgctgtttttagcctattgaggaccttcgtcggccacagtggatacaattttatcttgaactgcctgaggtggggtatcaagaacagctctcatcacatttatcatctaatgtttcttctgagcattcccccgctaggtgctaaaggtcccttgattacctctgcttcggcagttccctcaacatttttcttttgtggctgtaataagcttgttagctctaatcctagaggatttaacatcttgaaagctaggggttcaatcattacctctagaatttctgtcacgccaatggaagttgccgaaggggtctttgctgaatacttcggtggagaagatctctcttcttctccgcggctagatgacataaacttccttttctttggcgccaaaggctccagtgtcaacttcggattctttgtcaaccttttcttcttgtccttctcaatagatcttttt

SEQ ID NO: 4069 - DNA, 651 bp, Zea Mays
cagttgagctgattccttcttccaatcttctaaaaagttggttcccttcattccgaaaggttttcggctgagggcgtctgctaccacgttggcctttccggggcgataatgaatctcaaggtcataatccttgatcagttccaaccatcttcgttgacggaggttgagatctggctgagtgaagatatacctcagactcgtgtgatcgatgaagatgtgacatttgttcccaattaggtagtgcctccatatcttcaaagcatgtactatggctgccaattccaaatcatgggtgggataattctgctcatgcggcttaagtaggcgcgatgcataagcaatgactttctcgttttgcatcagcacacaccctaagccttgcctcgaggcatcacagaagacgacaaaatcctgatgtatatctggtagtgtcaaaacgggtgcggtcgtgagcttctcctttatgatctggaaacttccttcacatttcggggtccacacaaacttatggtctttcttgaggagctcgatcataggtcttgctatgctggagaatcccttgataaagtagcgataatatcctgccattcccagaatgcttcgaacctcactgacgttggatggctgcctccattttgatactgcttccac

SEQ ID NO: 4070 - DNA, 641 bp, Zea Mays
attcaggtttgggataccgaatagcatcataaccgacctgggatccaatttcactagctctgaattctttgatttctgcgaacaacgaagcatctagattaaatatgcatcagtagcacatccaagggctaacggtcaggtagaaagggctaatggaatgatactggaagcactaaggaagaaagtctttgacaagaataaaaagtttgcgggaaaatggatcagagagttgtcgtatgtggtttggagcttaagaactcaatctagtcgagctctgcacggaaatactcctttcttcatggtctatggtttggaggcagtgctacctgctgatctcaggtttggggcaccaaggttggtcttcgaaagcatagctgaagcagaggctaccagattagaggacgttgacgtattggaggaagagcgatttaatacagtaattcagtcagctagataccagcaaaccctgaggcgctatcatgacaaggccatacgacatcgatcctttgtagtgggagacttggtccttcaccaaattctaacgggggaaggacgacacaaattgtcaccactatgggaagggccatttgtagtagcagaggtcactcggccaggatcatataggcttactcaaatggatg

SEQ ID NO: 4071 - DNA, 436 bp, Zea Mays
atagcatccccatcaaacaacgtagcaataaaattctttctcttacggtgcttgacatgcaagtggaaaaattttgtgttggcatcaccatcctcaagccataaaatccttgatctcatcctagccatagtacgcttcaggtaggataaaagtaaagaatgtttcttaagcttgcttttcagccaaaattcatcaggagtcaacaccctttcatcttgtgcaatttctagcttatgtgatatttcctttgccaatgtcagttgagatctaatgtgaccaacttgcctatcactccaagcttgcaacctcctggttgccttcttaagtttatggtgaagagtaagaatagggcagttcgcggttccaacagattcccaagcatcgtgcacagtatcatgaaatccctccaatttaggccaaaaagcctcaaaatgaa

SEQ ID NO: 4072 - DNA, 723 bp, Zea Mays
gaaaaccagggccaggtcttccactatagccgacccttccctagtcttgaccacaatgttatcgacgtaaatttccaccttatcccggatcaggtccccgaaggtcttgctcattgcccgaacaaaggttggcaaggcattcctcagaccgtagggcattacaacatgacagtatagtccatctactgtcacaaaagcagtatgcttcctatcctccttagccatccggatttggtggaactagagtaagcatccaagaaggataagaggtcacaccccgaagtagagtccacaatctgatctatacgcggcagtggatacgggtctttggggcatgccttattcaggctggtgtagtcgatgcacatccgaagcttcctgttggcctttggcacgacgactgggttggccagccacacggggtgatgaacctcttcaataaatccaacgtgcaacagcttctggacctcttctcggatgaagtcctaccgttccacggactgccttcgtggcttctagcttaccggcctggcgtccgggtaaacctttagctggcgctcgatcacctccctagggatcccaggcatctgcgacggctcccaagcgaagacgtcgacatttgcttggaggaaggcgacgagcgcgagttcctatttttctcccagatcccctacgatgtgggtggtctaggaggggtccgcgccgacctggatggtcttcgcg

SEQ ID NO: 4073 - DNA, 1148 bp, Zea Mays
gttgggagctagaattaatggatacacatgccattgactctgaacatgaagcagaagcatcagaaccaaggtcattgaacaataggcccagtgtcaggtgcgcttttcaactgaaaaaaaatacgatgaaacttttaccaagcctgatgtagatttatcagtgatcacctatcattcacagtggtaacagagaggtggtggtaggaaggaattcgaacactcctgttcatatcgtaaatacagaagatgacaacagcaagacacatggcattagaggccgaatcagtgctaactctacggttgcagtttctgctaatgttgatgtgtttggacccattcaaagtccttctgttcatatcatgaatatagaagatgcagacatcaatacccatgatattacaggccaagacaatcctgactctagtttgttgccaatttctgccaaggttgatatactcgctcccattcaatcttctggtgaaaagagagacactgtaagaaccacaaatagcccaaatctgcaggaagttaaagaaaaatatgttggtgcaaggacacaggaccttgcaagtggtgttctaggtcctcaaagcacaagcaaaatgcctgtttttagaaatcatgtagataccttaaatgggaccctggacgttctaaaaggccatacagatcatgtttctcgaaaatattctgccagccatgatcagactgatgttgctgaagtcttattgaccagtcctttgagaggaaatcagtctgtggacgagctcgattcatcaaaagttgacagatggcaacatcaggagaaggatagaccctcaggtagtcatatcacagcagctggttacttaaatgccgatgccaagctcaacaatcatgagttcaatccgaagcctcgtagtgattccatgtctaactacatcaagaacacaaataactataaaaagacctctcggaattcatttttacaggaagggtattcagttaaccatatggtatcacctcagagggctgaagaaagcacactgagaggttactccaatctttctacattagaaacaagacagcaaaaggttattcaacctgctgatgttcagagcattgcaggcaatgaaaatcctaagcgtgaggatggactagatggtgca

SEQ ID NO: 4074 - DNA, 490 bp, Zea Mays
ggaaattggagaagaatggagataaagacaggcctgcagtcgactgaagcagatcagggagagtgagtgtctgctgcagaaaaatcttctcccactatggactccagctgtttgcaagtgagttgggatagggataacttggtctcagggaggggttgataccttggaatatgccttggtgcccatgggtgagttggagaaggagtgaagctaatctgttgctgactgtgctgtgtgtctgtttgtgtgttggcacacatgcagtgaactaagccatgtgtttccctgtgtttgtagcctttgtggagctggggaaggctgtccacgtgcttttgtgcatgtagtactggtcttcaagctcacttttcctatggacatgtggagatcaaaagggtttatctccttgttctttttctttgcaaactaggtccagagaagtgtatctcggttttctctatgctcttcgaccaaaacttggtagtctagcgtc

SEQ ID NO: 4075 - DNA, 864 bp, Zea Mays
cctgggcgtaattggacttcgggcgctggaaggaccttggggctgggctggggcgtcaccactctcgctttttcactcgacgcaatcagaacgggaggtgagagaagatatctacaccggcggcgttcgtcccggcgccgggtcacttgtcatcggtggcgagcatcccctctccctagcgcactaacctccggtgagctcagtttccctttccctgtgaagcattctagggataatcttgttactctgcaaatcggtagtggcggggtcaggcgcgggcggagcctgggggtcaccggcactttggtggggatcggtggcaagcgctggaactcccgccatagagcacggtcggctgggtctggacaccatggggtagaaaaagtccagcaaccgttgatcaaacgctgtagggctaggattatatctaggggaagttggccctcagccgttgatcgtgcagggaatggcctagatcgaatcttggcgtaccccttcgagtcattaaatcagaaccgtgaatcccggatccgacggccagggttgctcgcgaggttgatggacgtcggatctaatctgtgacgttcggtgttgatccgacggcccagatccgtagataccccttcggtcgctcatttcacaaaagaacccctaccgtctttactaatcaacctgtcgtccagtgcaatggtgctctaaaactctggaatttttgtagattagcccttgtcttctctgcaaattgttgcgcaatccagtgaataagaaaaatagataaattgaattataaaatgaattattaatataaaaacaattgctagaatttatttaattcgtagaaaattcatttgaagtccaaattta

SEQ ID NO: 4076 - DNA, 659 bp, Zea Mays
ctaggtccaccttgaacgatgctggtctggcttcctccactcagacgcagaggaagatgcatgaacctcgtgtcatgcagctgctgccggtaggtgtggctgagagaccacagagtccgtctggcagcatcgctgaccgaagcagtgtaggtggataaaggtgtcagggactcatgagctgatagagtcctgaaccccctatcccctacatccatcaccctgacgtggatacgagtgatgtagtagcaagcccggggaggctcgcacactcgccttgtctcgtacaagggtcggacgtaggttcccaacgcatgcagcatgtcttgcagcaggttggggaagtgccccgtctcgaacattgatgtgtaatattcggtgacaggcccaaatcccatgaagtagtcctgctgagcatagttggcctcctcattgacattttcctcgtcatcctcgtcgtcatcgtcatcctcataatcatcccagagtcgtctgggtcatcgcctccgggtgcaggagcttgaatggctggtgcaggtggtgctgaggtcgatgacctagctgcgaaggccagtcactctgccaacggggtgggcgtcgacaaaagttcctccgagctgtcctccaggatgactccatgctccactcgaatgcgagggaga

SEQ ID NO: 4077 - DNA, 814 bp, Zea Mays
caagtttctagaattatttttatactagaaatcatttttttgttttttattctgaatttctctaaagattctggactgcagacacaaaaaccagggagctcggggtcccaatcataaatattaggacttataattccctatagcactccccggacgacaggtttatttcgaaataaggcagggtctctttaataaaatcgcccgcggcgaaggggtatcgatgatcgcggaccgtagatcgcttgatcagtggtcgtgatcagattacgaaccggtataccacgactgccctcagatctcgatccgacgcccgagacctaatgaaggcgtgatctatttcgaaccgtaggatcacgatctaacgactcccttttttaccaaaacgaattggtatcatctgatctaatctccaccgctcatcacccgctcaacggtccaccagttgtcttcttcctccatcagctcagcacggcggtggacgcagagttccacccagaccgcacaccgacacttgcgaaacattgacctacacacggatcctggccccggacccgaattaatcgaagtcccgaccatgctgaacctattgacctccatcacgccttggcctagcatgctaaaaagtcttgcacaacgcaccatggctccgcatagcgaccatgatggagagccccgacacagggcccccggcgccttcccaatttaatccaaagggcactaatcgtggcataggtgaactcgaaccgcttaaggagatggttaccgtgattatgggtgatggtgtggacacgagcccaaccgcggccatgcagtc

SEQ ID NO: 4078 - DNA, 660 bp, Zea Mays
atgtcgcaccatcttaagtcgttgcctacttaagctgattgctccgttagtagggtatagtggtcatcctaagccgagtaagcgtgagcatgtcgcaccgacttaagttgtcgccgacttaagccgattgctccgttagtagggtatagtggtcaccctaagccgagtaagcgtgagcatgtcacaccgacttaagttatcgctgacttaagccgattgctccattagtagggtatagtgatcacccttagtcaagttagcgcgagcatgtcgcgccgacttaagtcatcgtcgacttaagccgattgctccgttagtagggtatagtggtcaccctaagccgagtaagcgtgctaatttcaagtccaatcaaattgaagttaacttatagtcaagagtctgaatgcctttgaaaacgaaaactttattgatgatgaagtcccccgattatagagtacaatgttgcttcgagagcttttgaggcctcgctaaggatagaactttctaagatgctctatgttccatgagttccccacttccgtgccatccatttgagtaagtcggtatgattctggccgagtaaccactgatacaatgaatggcccttcccatagtggtgacaacttgtgccgcccttccccattagaattcggtgaagga

SEQ ID NO: 4079 - DNA, 447 bp, Zea Mays
gtaagtgcatgccctacctgtaccggatatcatgggcgtcgtgcggacatgtggcctattgctaaaaatttggagcgtgagaggaggagcaagatctccatgatgctacaaaagatgtgggaaggcacgacgcacatcttggattatcgtggtcatagacaccatggcagatgaagagggtgatctggaacgtaacagccatagcaagtaccatccatgttaccataagggttgtgggaagatgtggcataggccacgcacgttgccacaactgccacacgggtggcacaccttagattaccagggcctaacagctagcaaatgggcacgatgctattacagttgctctagttccatatcgaataggtgcgccacgtcccctgactctgccaactccctgaccgactagcataggaaactggctacacgacgtgtcgagaaccctgc

SEQ ID NO: 4080 - DNA, 479 bp, Zea Mays
aatgaccgccatcaaagtcatcatatgacacttcttctgggcatttcccccactgggtgtcgaaggacctttttctatctctgcttcaatagttttcctagcatctttcttctttggctgtaataagcttgttagctctaatcctagagggcttagcatggcgaaaggcaagggttcagtcattatctccaagatttatgttacgctaatagaagttgccgaaggagtttcgatagagtgctttggcggagaagacttttcttcttcatcacggctcaactctacaaccttccgtttcttagatatcgaaggttccggtgacatcttcagtctttttgatagccttttctttttgtcctcgacagatctcagtgcttgtattttcaagatgcttacaactcttttcttcttcactcccctagcctcttcgtcaagtctatcataatcaggatactcgaagccaagggcattcatcactc

SEQ ID NO: 4081 - DNA, 390 bp, Zea Mays
gggggtatttggtttgattcctgtttggctaagtaggagtaatcagtttttgattcttgagtgatgaagacttatgacatttgaaatgtttatccaaatgtcttcttgcacatggttgagtttttctttcttaatgtgtgctctaaacctattagtttgggaattaatactttgatgaatgtattggaactagtagctaattagaccttgtgtggttataatgaactcaataatgtgaagaaggtcagtagacatttatatctagtattattgagttgattcgattgtcttatgtttataagtgtgttatgagtgcctgatacttgcgttaggcctatttaagtgtaaaagatgcgcttgtggtacatagcaatatcttcacatctagtg

SEQ ID NO: 4082 - DNA, 578 bp, Zea Mays
attcatttgaagggaaggaggtatacttggtccaaccagagggatgctccaactcttgttaagctggaccatgtcatttgcactagctgttgggaagatctatttccggacgcttctcttcatagtaatgctaccacatcttcagatcattgtcctttgaccctcaaggtcagagatggctgcatggggaaaagacggtttcactttgagagtttttggcccaaaattcctggttttctggaggtggtgggtgcgtcctggagcatgccagttgggagctcctgcccgttggagcaagtgtcattgaagcttaaaaggttagctcgcgcattgcagtcctgggggcataaagaagtgggtaatgtgaggatgcagctggggcttgtcagagaagtgttgcataggctggaaatggcgcaggatatcagaattttgtctagtggggaagtttggttgctaaacttgttgaagcaacggtgccttagccttgcgtctcttgaaaggactgttgctcggttgagatcacggatccactatctaaaggagggtgatgccaacactaagttctttcattcgca

SEQ ID NO: 4083 - DNA, 589 bp, Zea Mays
tacccaataatggtcttccccattgcagtgtttgacatatttcaatctgtagcatgtatgcatctctggtgcacactgccgcaccccgacccgcatgcacaggaagcctctgtgcttcagcccacctctagtcaaaaccacggcacaacagctcctccacccaaagctgtcacaaactcacaacgtagctcagatgtactcaatgccaaagtcgggtgcctcagctcagatctactcaacgccaaaggcagcatcgagagatgattctggagctcagatagctcaaatcagaaggatctcttcatgcccaaatcgcaaccctcccacccacacacacaaaactaactgtacaaaataaagctccacctcacccaaatcacctttatgatgtagatctgggcagaattgaactccctacccaaaatagagcaacaagctatcaaatagcacattgagtactctgccaccaagcaagcaaatcgcagcaacagctgaggctgaatcgaatttgagaaacaacacagatttggtatggtcgaacaaatccaaggccagatggatctgcacttcgggtggcataggaggtgag

SEQ ID NO: 4084 - DNA, 1029 bp, Zea Mays
tgcaaaggtagctctgcctctatgcaagctacatgtcggaagttcgactcccctctctcaccaagaaaagaacacttgtgctatttccagtgaaataagcggtccgatgatggttgcagcgtgatatgcggccacagtcgtgtccttgctgttagtggcatatcctggatagttgggcttcatgtctgtcggagagaaaatcctccggccgagtggcagagtgcacctgccctgatcctaagatgaggagggggcttagggattgtctgattagctggaggaacacgagaacacaagggttagagtggttcgggttgccgtagcgtaataccctacatccactgcgagttgtattgtctgggagtctctgtgtgtatctgtgtcaatctgtccgtgaggctgagttagaactcgtttcagcccccatctaccatgtgtgtgtcctctcttttatagcccaagggaggcacgtacatggcgaccgagccccgacaggtgggcccagtaatctattgctatatatggagtaagtggagcgatagtttgtggagaacggatatcttctcttggtcgccgtgtagatcttctggattgtcgcgcccttgtcctatctaatcaaaacagagcctaggagtaggttgcggcataggctgaagcgctaccgctcgtaggggtgctcaagcgtcgtcgtcctgtcttctctgcctgtctcctttcgcctcggtaacacgcgggctacagtgggagccgtaatgacagctgcccaagcggcgtagggagtcaaaggtcttgcctcagtaacacgcgatttactgtgcggcttgtgtactgtggacacaccgcctaccactgtggcgggtaggtatacgtcttgtccgcagttaatgcagaggcactttacacttagaggctgacattaggctttccctgatggcccacgtcacgcgtcatggaacacgtggcagcaccgggcctcgccctgtgtggggagtagcgactgggaccgcccttcctcgtgacagctccgga

SEQ ID NO: 4085 - DNA, 803 bp, Zea Mays
gttctagtaattatttccatattaaatatccattttccattttatttattcagttttaaactacactggattgggcctcaatatctgcgaagcgcagggggctcggggataaaatttctaagacacagagtcctgcaaacaggactgcgggttgttttctcagaagcctagggtctctttagtatatatgccaaggcgaaagggtatctcccgcccggagccgtccgattagacgacagtgccacaggaccgcgggtttatttctggtttagtaaaggtctcatatgaaaatgcgcacccgcaaaggggtatcctctattatcaaccgcaggatctggatcttacggctcgaattagattgtcgcggttaaaggacccgcgcgttatatgaaccccacgatccacgatcaacggatcacagcgccccattcccagatcaaatctgcgcccttagatcccagatctacgtttacgatttaatgaagcctgaaacacgcaccaatcgtccgatcctgatcggacgttgcccattcattttcctttcaccggtatccttgttcgatctagaccgttggtccacagatcaacaatccagcacgtctctaactagcccgagccgtgatcaaatccggccgttcattctgtcatctacggccatgagctcgtcctcatcctctgaccacacgccacggcggcgcaccttcaacctccgactctctctctctcttctttttttccacggccgaacgccaacaccgtttgcgcaccacgcggcgaatgcattccactccgagcgcctccca

SEQ ID NO: 4086 - DNA, 450 bp, Zea Mays
gcggcttcaaacgtggtcgctggaaatgaatcagatgagtctacgtctaagttttctgagtttgatgactctgggagttcggttgtgtggacggaagagtcttcggatgagggcttggattactttgcggccttggatgtggctgaggcggaggcttctccgcgtgttacggatgctgaagttttgcctggtccgagtgttgggcgtaggcagcgaagggcggtggcgaagcgtagagtgagtgaattggatggtggttggcttcgtgtgggcaaggctggtaggcaggaattgttgtcctcgccggttggggcgagtataggtgagggggagttgcgaagtctttttgagggtgaggagccgaggataatgctatttaactatagggagatggggatcattccgaaggttgaaccaatgtaaggtgtgatgccctcgctgtacgcgtgt

SEQ ID NO: 4087 - DNA, 1323 bp, Zea Mays
tttgggacttcaggcgttcgctattgggatcctttttggtacttcgggcgtttctctgtctcacagcgtcgtggggtttcgggcttcttttggcggacacggggtcgattgacgattgaagctaagccacccgggttgcttggggatcctggcttggtgattggccgagttgactgaatcaggcgaaattgattccgatgggagttctgcgacttagtcccctgtcggggcttggctttgtcgcgaatcgcgatacgttgcgctttggcaagttatcttttgctacctccttgcgcaaaggtccaattcagatttgtcggcctagagcattgagctaattaattgttctcaattcctttgctgtttggtgggtaactaggataatcagcgacgaactgtagacgaactctttgttcagcgacgagtcatgatgatactggaaagcgaatccgttgggatcttgctccagagtacaggtaggcaggattccgtgaaaaaagtgggcagatgatggtaccaatcaccgtaggctcctaacgtcttctactcctaataaccttacctcggcttgtctgcaagaagaaaacctagtcatggtttgtcgggaagaaacaaattggtgcttcaatttatagccacagaatgcaatttcgcctttaaggacggcactagtctgtgtttttttagaactgaatggcaggagctctacctttttaattaagaagaagaatgtaatttatccagttttaaggaaaaccgggtccgaaacctatccagagtgcacaaactactagtctgtgttctctccatgacctagctagcacagagactagcacatttggacttggggagagaagagaaattctcatccattttatgtcaaatttcattatccatgagaggtaagccatcaagttttctattgtatcatcataggtccctgtgcttcaagcgcaatatcagtgcctctactgtacatatatagttgtacatttgagaggccattgtcatcccatacatgcagaatggagtattacatacatggaacatcactacaagtccatgtggatatttgatcatgtcatatgttaaatgcatgctgaaatacttggaaatggatgcaagctgtgtttgtggagaaagatatttgaaatgccatcacagacatcatgagagtattgtagataaatgtggatataaacaagttatgcaaatcattgttcctctcatttacagtaaactttgttcagctagacctctctctttttctctgcatacacttttctttttcttttcccttgtgtgtgtgtgtccactaaagtt

SEQ ID NO: 4088 - DNA, 503 bp, Zea Mays
gatcaactcgaccctacccaacaacttgacctacaaaacaggttacacaactaattccatctagcatatagctattgaaccctctacccatcttgtcacaaacccggatgaagacaccaaaggtcgaggaggaaaggatcaactgcgttaaggaaggataagagtcaagccaaatatggtcttcagccccaactcaagccttcaaagatcaagctagatcatcagatgaatcaagatccacaaatcttggatggagtcttcccttaccctactctgtcttacccaaacctatctatgctttatagacatcttttatcctacatgataaagtggatatacatatatatacccatgccttcataatcacctgctaatttgtgttataaacctgaacaaaacaaaatcttttggtattaaaaccacttagaaactgaaacatagactacacaccaaactagttgcatcctccttcttactaatctcgaggacgagattatttctaa

SEQ ID NO: 4089 - DNA, 970 bp, Zea Mays
caggaagtgcagcattatgtatttagacatagtatatacctaagtgcacagcaaagaaaccttatgatttggaatggagggaatagtaaagattaaagaactatgctctgaaagatggtgaataagaacatttaaaaagtatcttcagagtaaaatatacagcaagaatccaattcaggtaaggatacatcatacttgcagggatgcagtagcttggtctacgatgtacaaatgtggttgcaagacacagcatcaaagtggaatccatgccgtgagggacattccatacttactaaagacttcacatgattgaaaacacaaagcaaatgaaatttgttcgaaattaagagcatcacataatagattagttggaggtggtgttattatagttacttgagctatgactagcttagtggcttccatcaattctcaatttatgccaactgagcagactaatcgaagtcatggaacctaactactcatccacaacagtacaagcacaagcagcctacaatatctaagttcataaccccaaggatccaccgctccagtaagcaagaaaaggataagcttatgataattagtagatacatgacttagaaaaccatggagaagctcatatatatattacaactatagagtatagacttgtaatatcagaaagcaatgctatccacaatatatgtcatgccattcttaccaataaaccaaatgtacaaaggagacagaaatactgtgcccagcttcaagaatgacacatcggttcactttctgatttatctggacatgccttgaatagattaaagcaccgatatgtataacttatgtaatatctcaaatttgcaagagcaagcacaaagagttggaaggggagattatcaaaatggttccacagataaaagtattagcgaagtgtacgacaaaaagctatggggtatctaccattaaacactacctgcccagcttcaag

SEQ ID NO: 4090 - DNA, 585 bp, Zea Mays
agattctaggacgagtatgcaacaggagcgccaatgttcgacaccttgcctctgagtatcatctcgagccggctcaccaagtccacgacaggaattcttctgttggttacccgggttgaatcagccaagcctcggtacagataggccggatatgctctgtctttcagcgactaaatgttcttgaaaacaaagtcagcgaccacagcttctgcagtcagacccctttctttcaacaatccaactttagctagcagagcccctgcctcagccacctcctggtctgtgggggattcggtccagctcgaagtgcgaacatccggctgtctccctgaccgtggggggagggaattcccatgattctccacgatgaaccattccaggcgccatcccttgatgctatccttgagtgggatgtcgaggtaatcagtcttcctcccacagcgcatctccaagctcgcgccccccaccagctggtgctgccctccggccatccctggccgacagtggtacaaatacttccaaaggccaaagtggggcaaaacaccaagaaaggcttcgcataaatgaacaaaaacagaaacttgc

SEQ ID NO: 4091 - DNA, 754 bp, Zea Mays
aactactagtgatgtgatttttctataatttctcaattcattctccagcttcggaaaaccaataaactttgtcagtgtgttaaccactctagctccgtctcggtgaggaacacattctagcagctcttcgtctacaccaccaaaaaggatggcaccaagcttgtaaccacctgcaatgacaaactaccttagctcggacatgccctcaacgctcaactctccaccagccaggtgtcttaaatcgaaggccccctcctctctagaagaagccccaactttgttcaccattgaagccaaagctttcactacaactttcttctgcttcgaaaccttggttaccacaacttctttttcgaccgccttctcaggctctgattctgcgattatcctttcgatagcagccatggtagtcccatcagcacctctgttatctttggcttcctgacccgcctcagcaggcatgaccacttcaacattttcctaagcaatcgaagctttcttcttcacctctgctggtggggtcttgtcattacctctagtatctatgtaataccaacagataaagccgagggagttttagtaaccttctttggtaatgctgaaggtttcttgcatgcatggttaggcttcgtcactttctgtttctttgaggcacgggacttcggtcctgagtgagaggactccccttcctcagcttcttttctttttggattcttagccagatccttcttctctttcttctctttaatagacc

SEQ ID NO: 4092 - DNA, 390 bp, Zea Mays
catcttcctacccaagcaaggatagctggtcccgtccattttcgtagcatgtggcccatagagaggtaattttttgatatcatggtacactttattcatattgcagtttagtgaaaaaaattacttacacaatatttttgtaacatgcctattacttatgtgaataggtatctaatgagattgaagggttctgttcatacaaagagtcactgtgagggatcaattatggaatggtctatgtttagtgagtgtcttacattttgtgcttgctatttacatggtgagactcaattgaaccatcaagttagatatgacgaagattgtactacaactcctttcttccataccattggccaaggattggctgggaagtgtttagttaatttagac

SEQ ID NO: 4093 - DNA, 1207 bp, Zea Mays
gttcattaatgacttttcgtactgttccagctagttgtgatgatgaccattatgtttttctaggttgatttgaattttacaacattagttcactactagctagtctaggaagtatccatatatctcgattacctagaatgtcacgcccaaagaaagggtgcaaattacataggatgtcaattactgtttgttagcgtttgaagaaagttatactcttagatactggcaaagcgtgctccaagactcctttagtagaagacatgcctatagtggcttggataggagccaatctagcattcttgaggaccaagtcttgaactggcgaggtatcgatccgaccaggtcctaggaccttgcaaaggttctctggtactcctcaagagacccttggggtagcatgtatccagcgccacctactcccctaaccaagtcagcgcacaacgttggacaattgacataaagcccttgtgcatcgtatttatcgcgaagaatgacatagcggtcaaaagtgtcactattaccgcctgaggccttaggtgtacctgcaaacaccatgtgatgtgtatgggtaaaacagtcatcgtagccacacttggggctgtagacgtacccacaagcattataaaggccgtatgaccacaccaactaagaactatacgtactcaacggcatggatcctcacacttaccactacaacatgatatgtttgacactgtggcacatcagagacatgcaccgcgtatgactctatgactacaataagataggagcacttggacctctactagacggggccttctgcacaaggatgtaactttctccttatgttataaaaagggaagaatagagcaacataaaacgggagttgtaaaggttctagatgaggtggttgtgaaggttctgagtggaggctcacaactagttctggaccctcatatcatcttccagactagaaccacatctgactttgggacttcttagactttgaaagaactaggtcatacgctaagatatggatgcatagaggtcttaggatctctcaatagtctcagtcccactttcaggctcaacatcatctgagctttatggttttttcatgtttatatatatacagccaccatacagaggatgtagggtactacgccttggtggtctaaacctctctaaatcatgtgtgcaggttgccatgttagcgtcttgatcaggc

SEQ ID NO: 4094 - DNA, 410 bp, Zea Mays
aagaggttggatttggtgagctgatgaagctgagcttttcccaccagaggcagggtcctaacccaaaatatggaatatggattgccctgctgcttaccattattccgcttgcttctggccctgcgaggcagatcaatcaatttggcattgcaacctttgcctgcagtgcttctcttcatccgattgaggtccagaggatgattctggctcaaatgacgtccacagagtgacagttctgttgcaattccagaaggctgtgtgttcatcatcattatacaaaaccaaatggtgactggtgtcagatatcaaagagctagaagcatctcaagaaaagaatctcacaaaagaaaggtaccatcccttggctaggtcgtttgttcatcttctctgttctactaaattgggcgttc

SEQ ID NO: 4095 - DNA, 541 bp, Zea Mays
caggaacacagggggtcttgtgtaaaagtctctaagactcagcacgccactggactggaccgcgggttctaatctctaaacttataagggctcatctgcaaaccgcgcattccgaaggggtatggatcacttcaagccgtccgattagaattcggccgctaggattagacttatccccggccgaatcggtaccgatcgatcaccgcacgatctaaaactggcgctccagatttaaaacactagaagtccaccccgagccatccgatcaacatctaacggaccagatcgagccgcggcgaaagagtacactacttctaatctccaccgtccactaacggatctacggctcatcgatcatcctcctcccccggcggcaccctcacggcggcgcgcacccaatccacggcggcgccatcaccagagagtcccaaacccgtaactcgcgccttgaacttcgatcacgacagtgctacacgtagcggaggcttaggtgcgtccatggagcaggttcataccggagttagtgatgcgcagaatctcg

SEQ ID NO: 4096 - DNA, 436 bp, Zea Mays
taatgcactatctatggccttcagaagccgaaaaaagaagaggctaaatagagtttttgatgctattggatttatgtaccctgactaccgctacccgccacgggggcagaagagaaagaatacaacttctggaaacgtcgctgcttcggctgctccaagcgagcctgtgtcgaagaggaaaaagctgaaggtccttacccaccgaccgcgctacattggaccggccatagtgcccgaatttggcggtgagacctcttcggctattgaagccaaaggacctgctcttacgcagaggattgaagagccggctgcaatgccgaaggctgacaaaattgaagaaccgagaactgaagggacgaaaacatcagaagttctaagcccttcggcaggagtggaggtgccgaagacacaaaagggtctagcagcaacccccaag

SEQ ID NO: 4097 - DNA, 2206 bp, Zea Mays
gttaaattgaacatttttcttattcttctggagttctcagaagctaattttgatgaattagtgtcctcattcctcttttggtctctaaattcactttctttttttaacacctagtttacaagcaaaggatgataaatttgtatcctagtatccccctgagcccacttagagcacctgcatttttctggaggctaactcttccttaaagtcataataagttatttttttctcatattttctatcatatggctagcacccagcactagcagacctcatcacttctgaattattgctcagcttacttgcggaatagctggttatgattaccagtctgttaggagatggacaacattcaagaggctgggttatggacttgtcgagtgtgagaaagtaaaattatattttgtccttttcaaattattggacttttccccgtttcatgctgatgacctatatccaacttaccatcagaatttatgacacagatctttgttccagtgcatagaaatgcacattggtgtttggcactaataaacatgaaggataaaacattgcagtatcttgaatctcttgttggttggggccgtgatgtactggacatactggtaggcttatctgaccaaactgaaagttacactattcttagactagagtgcctgaattgcatggggttgcctttgcaaattattcatgtaatacttgtatatgttttttttgaaaggtatatataattgatattcattatcaagaaagcaaaattacaaagtacgatgttcttcataaaaggacccagcacaaaattaaagggcctgcaagatttctctattgttggattgaagcactacagttaaattttctgtctggcaggctagatacatcgtggatgaattgaaggacaagagtaacatagaggtagaacctagttcgtggactgtagtgtcagagtctttgcccttgcagcagaacgggtatgccttccttctagtactaatcaccataaaatccagcatgtggcgctgattgatttgattaaggaaggaattcatataaagtattaaattccagtcaacgcattactatttttcaacgtccaagtgttttctattttgaatccgtgttgtgcacattaatgggcaagcatgagactatctttgacattattctctcgttataggtgggactgtggcatgtttatgcttaaatacattgatttccatagcagaggtatcaaaccatctttcagtcaggtataagttgacatgtgaaaaacatacatacatatctgtaatttcagttgactagaaatacttagattgaggggcttgagttttgccatacttaaaaaaaaagaactttaacttgctgctatgaagcttaacctctgatgtaggagtacaatcatacactggtgtgcaacgtattaagaagtttctgtttagcatgatgtttgtcttaatgttgttcgcaggaacacatgatgtattttaggaaacgaatagcaaaagagatcatggcattaagagccgactgaagaacaccattctgacattgtctcaagtcaggtatttgctttcaaatagcagagatgtgattcttctaaggctgttggtgtgaattcaagtccatgtcgccacaccttttgtaggcttgtatttttttaggacctgattttggtagggaaaagaggggtaaggtaaaacaatgaaaaacgtaggagttcggaaatagttcggcaaaatggccacacctatgtaattgcattgaaactgactaaagctagtgcaaggaactgacacttagttttgttttgtgtttatttcaactcatatgttgtcgtggaaactaaagctagtgattgcacgactccccagtattaacatttcgtgagcgttttatgtatttgggaagtttttggttgcagatggataaacaactgtgaacctaggagcaacttcaaacttttcaggttcaaatcataaagctgtaccgagctggacacatgtctgcacttgaacaacaaaccaccaaccactacagtttctctatttctctagttagctaggagcacaaggcagaacattgaatgctgatagagggtagatcaccccatttcacaaaaacttgtggcaaaccaatagcaatcttaacaaatcgaatcatcttcccaccagtagaaatgtgactgactggctacttagatgcctaa

SEQ ID NO: 4098 - DNA, 409 bp, Zea Mays
gcattcttgtagcttacatccaattggagtctggggccctgaatcgccgggtcgggttactccgaccatggtggccgccgtgcgggtgggcggcgctgttgcgcgcgtatgttaggttggggaggggttgtcagccgttgatctctggtcgacggttgtgattagatgacagcgtaccgcttcgtgaagttgatcaatgccgtcagatggggatcagacgggtgttcgagcgcctcggttagtttgatccagtccgttgatcgaaaatctgatggctatttccgcgcgctggtttaggatatcggcgatctaatctgagccctaggattttgatcggacgcccagatttgagaataccccttcggcccggacgtttcgcaaatgaaccccccgattatttcagaatgaa

SEQ ID NO: 4099 - DNA, 334 bp, Zea Mays
gaaatttcaacgtgtggtaggtcagaccctgacttcacaagataagatgagttctcagggagctcgcaacacagcattagtagaagttgttgggaagcagactatgaaggagcaaccattgcacccaactctcaatatgcagaaaattgcagatggtctgagcaagaatactagctccgtgcacaccaaatctagccctccttgacgtccactcaccaggacaagttcaaataggagggcgtcggataacatctcttcgtaggatgttgctgctaaggggatcacaaatccacaagctagtatgaaaggtacgctccctgagaatttccattca

SEQ ID NO: 4100 - DNA, 554 bp, Zea Mays
tggagatcagttcctgatcgtggataaacggatcaacggctgcgatcccctggtccgaaccggtacccttctcccaatcacgcacgtctgattagcaaatcaacggtcacaagatcttcttccccaaggcgacagccaggttgcatagggccgagccccatcctcccgagcggcgtgagcacccaaggtggccgcgcccggcgatgcccaggcaccggtacagaaatccctgtgcctggttctcaatcgcccgcagacgacacacccatacctcatgaagtccggcaatccccctcgatgccccccagaacccagcgacggcagcatccccaccgaacgcaccacagcaaggcgaggcgaacaacgatggcagcggcttcaaggtcaaccccccagcccacactttgatttattcacggtgtttggccgacctcccagaccgcaccgcagagaaccacacgaccgaggcaacaccagtgatggttttctttccctctctctttcttcttgcgtggctaacttggggctgctaatggttggattcaataggaggc

SEQ ID NO: 4101 - DNA, 340 bp, Zea Mays
ctcagtacgcccctgtcgtggactgcgggttattttctataaagcatggggactcttttgcaaactcaccagggcgaaagggtatcgagttcactaagccatccgatcacgatcagaccaccaggattagatctccaccaaacatgaaatagtacgcgatggtcgttttccgatcatggatcaacggaccaaaaccacccacgccaacactcgatcccgaccactagatccgatccaactcccacgatttaatctggccaaagggtaagttgtttctaatcgtggccgcccaactagatccaacggtcaccagcccttcttctttcttacggtggctagg

SEQ ID NO: 4102 - DNA, 552 bp, Zea Mays
gggaagacattaaaaaaatcatccagcgccccatctggtctcgcttcggcctccaaaggccgaaggtggaaattgatgacgctgtcgaagcgtgtcagagggctttcaacactgtttgctccttcattggcacaagagatttgattcaagaacatatagccttcagggtatggccgcttgtggaaagctgggaactgccgaaggagaccaccgccgactctggtgagggtggtctggtccgactgaagtataccttcagatttagggagaaatttgatgagccgaacgacgactggctgaagtgcatcgaagctaccagtgatgagctgcttggagcatactccaaggctgaagataatgctctgtccgcagcctttggtggtcggggcaagaaaagattaaaagggtatttgatgttattggcttcgtataccctaattactgctactcgctgcgaggacaagagaaaaagaggaagattgctgctttggtcaccccagctgagcctgtgccaaagagcaaaaaggtgaaggttctgacccaccggccgcg

SEQ ID NO: 4103 - DNA, 573 bp, Zea Mays
ttggaacattaatatcattaaagagtgacatcatagggttgaagttgtagcaatagtatagctacttgattaaatcataacccagggtaaacaaggaaaagttttgaaaaggttggatacatctaattaggtaacccatcaaattatgcatgaaataaatgtaaacctagtaatcatgtgttatttgggatcaaacagagtatgtggggggggataggtccacttgccttactgatagaaaacatgtgttatttgggatcaaacagagtatgacagaaacctataaggtttaggtgttactggcaaaatatccccattgcgctagaatgtcagactataatgatgtatctgatcgatgaagaatctctgatggattacgatctttgatgcacttatgttacaccatcatttaagttgtaatgaataaacggttggagctagaatatgtactattacaactatagtatcccctaagtcctgtgaaaggacaagttatttgctttgcagaactatgtatacattgtggtgtatgatagaatgaaaggtgtagttccctagccccatccatcctca

SEQ ID NO: 4104 - DNA, 463 bp, Zea Mays
tcaggtccaatcctatcgttgtaagtgttgttcgtacattctcatatgtacgcaatgctcactgacccacttaattgaattatatcgccaccaatcaccgggaacaccttcacccatccgcaacattctcggttcacgcggacagagcttaataggtcgccattcatgcaattatgttggggaaaatcctctctgggtctcgaatttagtttaatccaaagccgggcactagtccttgccccaatcggccggcacagacagctcgccggagcttggccgtgctccacgccgtcggggaccgtgaaacgtaaaggaatagaactcgagggactttcttgcaaagtgtcagtgactctgttaaacattgagagaacccgttcgcagatagtaaaaaccccgaggcctttcctataaagttgccagcgcgggcgcgttttgccctggatctgggccgtctgggcca

SEQ ID NO: 4105 - DNA, 472 bp, Zea Mays
gtgggcatgttgcaccgccttaagtcgttgccgacttaagtcgattgctccgttagtagggcatagtggtcaccccgagttaagtaagaatgcaagtcaattgtaaacgaactgagtatctttgaaacctcttttttttattgatgacatatttccactttacagaatacatcgtcgtcccagcagttttgaaatacagctagggataaaactttctgaggtgttctatgttccaggagttcccaacttctgtgccatccatctgagtgagacgatacgatccgggccgagtgacttctgctaccatgaagggtccttcccataagggcgataacttgtgccgtccctcccccgttagaattcggcggaggacgagatctcctactgagaaggatcgttgacgcacagccttgtcgtgatagcgccttagaatctgctggtaccgtgctgattggattaccgcgtttagccg

SEQ ID NO: 4106 - DNA, 634 bp, Zea Mays
caagcttcatgggttgagccgatgagtatcacaagcatgtgtgggcgctaaaacatggacaaggagaacgagggcggacctagagatagctggccacggcgcgacgtcttacggtggcgcaaataacagatttgggggaagaacgaaattctccgactatggtggctaatcgagggcagggaggcatgctctggcttcgtgacaaccatgcggagctagcaacaccatcaatttatagtgactgggggcgatggcttcgaattttgaaaggggagaccggcggttgaagagaggggtgagtcaccggcgcgaactactgtggcattcaccggggcaatgtctccagcgatagacagactacccacgactatctactgcgacgtggtaactcttctaagtacgtggcgcggctacgaagaacagagaactccggagaggacacctcagtccatcgcgcggcaagtggcacattgaatagtccggtgattaggctccaaccctttccctgcgtgatctttcatcgccagctgttatccgcaaaccagggcgcacgaatcgcgacgaccggcgtcaatcgtggtgtaaggtcgccggtggcgagatacaatgaattagaagatctttttcaatactg

SEQ ID NO: 4107 - DNA, 558 bp, Zea Mays
ctttgatgtagtcggatcagtggctcatcacatagaaatcgaagaaaaagggccctaaagtcgctctgtcaggcaccctgaatcgaccgtggcatggtacaataactggaaaagatcaaggattcagagcacttcgccaccgatgatcgtgcgccatgatctgcgtgatggttgagatgtgtgcgtgctgtaacgtgaaaatatcgatggggagggtgaaaagaccatcgagggcgtgaacttgggccctgaagcaagcctgacgtacccacttgccgacgacgtggtcgtgcgaccgtcgccgtggtggccgccgattatcccggccatgccacgccatagaccaggttatcacgttgtcgtaggtcgtagtggacaacccatttactaccctgagactttaccccattgaacgccacgttagatgaactccactgactcatctcgacatcaccgtgagttcatccccgtccaaaattcggagcaaccgcagtcggcctctataaattgagtgccctccctgcttcgccttcttattacgtgcccagagcaccactc

SEQ ID NO: 4108 - DNA, 416 bp, Zea Mays
gacagaagcgtgggcgtgaagacttttggaccgcgtttcgcgcatgcagagaatgtgtgaatctcctgacgactcgctgacctcaaggaaagtcagcatgactccagcaaaggcgggcagactgagaatgtgtatcgcgtggtgtgtgtaactcatcttctgtcaggaataagacggaggaggggcccctacgaaaacaggagacgccattcagcagcatggccatcttctacctcaagaactccctgtaatcgcgaccaccgagtaatacacatccatcaactcacaagatgtagggtattacgccaagcgacccgaacctgtataatccttcgtgtttccttgtgcactgcacagaccatcaagttgtgatcgatctcgtcattctcccaaaagcactaaatggtataccccgt

SEQ ID NO: 4109 - DNA, 635 bp, Zea Mays
cttggtaccattgcggttgcccttaattctatctctactctctaaaaaggaagtaggtcgtgcatcttccctccttgggcccacctatagtgatacgcacaagcatcgctctgcattagttcgctctctcgcctcctctttgttgagtcctcccttcctacttgtagtgacaccagcactgctctacctttcatccgctcgctctcttgccatctctccacatctggctgacggtggcttgccgctccaccccaaatttgaccacacccttaccatcataccgcatttggcctcacctccctgtttccccttctttcctgcccctgtttccacctccttttgccacaccctcacctcctctttgcattcgcccacattcagtttgcggtggctcgtcgctccactcccgatctagctcctcctagtttcctttttcctttggatgcacttttgcctcctcttcacatccgtccaacagtggctcatcgttcacccttgatcgagctatgccactgccaccatgcccatgattcttccctgtcccatccaccatgtcacatccggccttgccacctcatcgtttccccttctcctttctcgtccctgcacccattcaccatgaagcctctctcacc

SEQ ID NO: 4110 - DNA, 663 bp, Zea Mays
cggatcaggaggtggctgaggcaggggctttgctagctgaagttggactgctgaaagagaggggtctgactgcagaggctgtggttgccgattttgtctttaagaacattcaaccattgaaggatagggcatacccagcctacttgtaccgaggtttagctgacccaacccgggtcaccaatagaagaattcttgctgtagacttggtgagccggcttgaaatgatacttagaggcaaggtgtccaatgttggtgcccctatcgcatactcggcctggaacttgcctccttccaaggcttttaatcattttgtgtcgaatccacctgtcgctgatggcagtttgggccttagagtgcgaccctctgctgaagaagttagtgctttggttgcttcgattggagaaattcccgatgatgaacggcaagtccactttgaggtgcctttggatcctaatgatgcagaaataagtgctatgcttgatatgctggccgaagattcttctgatgctgctcctactgggacattggtggtggcgcctctcccagaagctggtacaaccttggatgttcagagacctgtcagtgttcgcccgagacgtccttgccgagccaatcgacttgatctttctgctgatgagcagaaaaagaaaaagagacatcttc

SEQ ID NO: 4111 - DNA, 304 bp, Zea Mays
gttcaaggaagaaaagggctttctggccgtagatcatggatccgttgaccgtaggcatcatgttcgggcaggcagatctggcgcgttaatccgtgggtgaacggttcagtgtcgataaggtgattttaaatccaggataccgatagttgatcagacggatgtcactccatacctcttcatggggagcctgatctaatccgatccgtagattggtgatccaacaaccgagaaataaccataccctttcgtctgggtgcaattgcaaaagggacctcagatttcgtagtattaaacccatcgtccc

SEQ ID NO: 4112 - DNA, 805 bp, Zea Mays
caaaactcttgctatggagaaatgaccaactcctagttctatttctgagttaagaggattccttggcttgactcgatattatagaagatttctaaaagggtatggcattattgcaaaacctctcaccaacttattgcagcacaaagggtttcaacagatcaggcagagatggcttttcagaaatttaaaaaggctatgatgtccacccctggcctggccttaccagattttgatgagaattttgtggtggagacagatgtctgtgaagatggaattgggccagttttgatgcaaagacacagacccattgcttacttgagcaaggcattgagtgtgaaaaataaaggcatgtctatctatgacaaggagtttctggcattattaatggcggtggagaaatggagaacttatctttagagagttgagtttatcatcaggacaaatcataaggccttgagttttctggataaccaggtgttacattcagagtttcaaaggaaggccatggcaaaaatgatgggactgcagttcagaattgagtacaaaaagggaaaggaaaatcaggctgcagatgctctctctagggtggaaaatttcatggctttgcaatcagtagtggaagtaaaacctgtgtggattcaggagttggtaaactcgtatgttacagatgaggaggctcaggtgttgttgggccagttgtctgtccatagtcccaatgaaggggggttttcattacaacaaggtgtcattaggaagggagatcagatatgggtggctaacaattctgccttgaggactaaaatca

SEQ ID NO: 4113 - DNA, 796 bp, Zea Mays
aaaattttgaacgcacttccgcataccaggccaggaaaacaattgcttcagtctgtggtatgttactgggaacccagagtgacctcccactgcagagcaatgcatggctgtcatcacagtgtgatgtaatgtgacattgttgcctaaccatattttccctttgtacctgagcaaaccatcatgcaattcgaagtcaggcacggccacggggttgagagataacttggccaaaagttccttggactcagtgtcgtccaaatacccatccaggactgcttggcaccactgtggttttagtactgaaattgcacaacactggccattatccggggcccttcgagataaagcatcagccaccctattatctgaccctggtttgtacacaatcttatactgcatgccaagtaacttggtaaacactttttgttgccaaggcgtattgagtctctgctcattcaagtggatgagacttttctggtcagtgaagatcagaaattccccatgcagcaaataaggtctccattgctcaactgccagcaaaatagctaaatattctttctcatatgtggacaagcattgtgtcttaacccccaatgacttgctgatgtatgccaaagggtgcccatcctgtaacaacacagctccaaccccattcttacaagcatcagtttcaatacaaaactgtttggagaagttaggtagagccaaaactggggcagtgcttagggcctttttaactgtggaaaatgctaactcctgctcagcagtccacacaaaccacacacccttcttaagt

SEQ ID NO: 4114 - DNA, 272 bp, Zea Mays
tttgagccgcagatctatgaaccagcggtctgcgccacataccgattcataacacgcgtcaatctaatctggcgcgtagaagctagatcgggcgatggatatcgtctcataccccttcgaccgaagtaattttgtagaagagaccctagacaattagcttgtccatacgcagtccagggcattgataagatcattacacggggaccctggaatttgcagattagaccccacagacctccagattagtgcccgcagtccagtgggtgaataag

SEQ ID NO: 4115 - DNA, 700 bp, Zea Mays
ctagcgtcaaaaggattttgagttaattttaagttctcatcaattgacagatcatgactgtaaatatcagtttatggcgacatggctatttgcttttatggtcaacggatatacatgaacatgcaaatgacataagaattttgctcttccgtagcatctgttcacagcatcagggatacacatacaagaaactgaggcgatgcgcccatgccatcagattgaccaaacacatgccacaataaggacttaaggcccatttggtgcggctcctgcaccggcttcaccaccagctctgcggctctgctgcaccaaacgccctcgtgtggagtgcttctggacagcaaaaggaaagaacagagccagtgccattttcatgtacgctatggagcgagcgtggaggaaccacaccaaacaagcccttattacaatagagccaatacacctgtcacaacagagccaaataggggtgaaaacggggtgggtaccaaggtcgggtaccggatacgggtagtgaaataacccgaaattttggacaccgatacgggtatttttgttggcgggacgaatacagtcatacgggtactatccgtataatatacatactattttttaaactagccctaagttataatctacgtgtggagaaccccgacatactatgttttttcacttttcgaccataaaagtacatactattttt

SEQ ID NO: 4116 - DNA, 708 bp, Zea Mays
gaaagagactaaagtatcacagccagagcaggatcaatagcaggaggggcagcaggggcagcactggaacccccggtctcgtgatcatgtgagcgaggaggcataagaggtggtggcgggatcccaaagtcatcatcaccattagttgtaccctgggtctcgaactgtctgaatgcctcatccttagcctgaatatctggcactagatctggcactaggatcgggttcttaggggctggacgatatgaaccaaactggaggcgtgaggcctcgagggtgccctggaactgagacggcatgattagctgcgggaagatgtgacagaggtaatgcgcatacgacagctgacggcgagcacagagaccatccaaaactgtgtcctcgatctcacagataagaaagtcaacgacgtcaaactcagagtgtgagatcaaggcaccaagtagccataactgaatatgagtggtggcctctctatatcccatcctgggtagcagtgtccgtctcatcacctgatacaaatacttcgccgcaggggtgaagtcaactggagagtgtcgtgacccatctgtgaaaggaggtctcaacagggccacgacgtgagcagtggctggtgcaactccgccgtgagggcgacgaggaggatcttatgtaccatagcacaaactgtggagccgagtcgacgactctggaaatccaaagagttgg

SEQ ID NO: 4117 - DNA, 420 bp, Zea Mays
atggttacatacatacagcaagggcatcgcacattacattggctcaaccttcgggatgatacccatctccctatagttgaacaacattatcctcaattcctcacccgcaaacaggcttcgcagctctccctcacccacactcgccccagccggcgatgacaacaatttccgcttgccagtcccgtccacacgaaggcgaccaccttccacctcaccacgatgacgcctatcacttcacgacaactcactcaccctccgcttcgccaccgcccttcgccgcctatgcccaacactcgcacccggaggatcgtcatcacccattacgcgcggtgaggcctccatcgtagccacgtccaatgccgcaaaataatccaaatcctcatccgaagactcctctgtccacacaatcgaactcccaga

SEQ ID NO: 4118 - DNA, 392 bp, Zea Mays
ggtcgcgccatgcttttgtttgagcttggtatttgtttagagcctgtagggcgaagacgcggtctccgtcgatgaggtccttcgaagtaggctcatctacgtcggggacggcggacgcgactgtgcgtggtgacccatgttttatttcttgcgggttcatggcctcagatccatatagaaggcggaaagggtgaacccagtcgccctgcactcagtcgtgttcagcgcccagaccgcttcaggtaacaggtcggcccacttgcctttcttgtcgtcgaggagcattttcttgacggctgtgaaaattttaccattggcgcgttccatgactccgttggattgcgggtggtacactgaggcgaaggcaagcttggtgccaatggagaagcaga

SEQ ID NO: 4119 - DNA, 297 bp, Zea Mays
gttttttgcgcaggtgtaggttctttggcttcagtagccgaagaggcctcaccgacaaactcgggcactatggccggttcaataaagcgcggtcggtgagtaaggactttcacctttttcctcttcggcgcaggctcgcttggagcagctgaagcatcatctttcccagaagttgcatcttttctctttcgtccccgtagcgggtagcgatagtcagggtacatgaacccaatagcatcaaaaactcggttgagccttttcttcttctggcctccgaaggccgcagataacgcagta

SEQ ID NO: 4120 - DNA, 331 bp, Zea Mays
ccgaggtcgaggtggcgtcgcgcgtgggtattgaccgcgtttatacttgcgtattttgactacaacggttacataaatcgtcacagcggtgtggtctggtcggtgtggggtggtggtttacgatttatgcttgtataattcgatgttaacaactgcatatcaatcgggcgcgcagtgtttacgatcatatacacaacaaattatgatccatatgaacacgacatacacccaacgttttatacctcgtacatggcgtggttcttgatttatgcttttgtaaactgtttacgacactttgcacagttctttatgcttaatatgaacacggcat

SEQ ID NO: 4121 - DNA, 393 bp, Zea Mays
tgctcgtgctcgccgaagatctacggccacgttgccggtcgtccagcccaccagaagtcgcgccaagccatcccgagcaacgtcccgaggtgaggaagtcgttctcgtgcttggtttatcttatttccgccttgtcttagccaatttggcatcgctggagtttgatcgtgccggttcgccgcgcccgcgcggtgactggccgatttagccccgccatgtgctcctgctttggtccgtagtgttccccttacccaccggagctagtccaggccatagcgcgcccaaatcaccctccccgcggtagggattcctcaccggagttgccgacctgccaaagcacctccccttcgccgttctcccgcctccggccctgttcttgtggctggagtcctg

SEQ ID NO: 4122 - DNA, 644 bp, Zea Mays
cagtctaatcgggagtgtcacgaacgcaaagattggacctaaaatcagtaaataactgtacaggtaaccctttggtaataatgtcagcgaactgaagcgacgatggaacacggagcacccggacttgtcccaaagcaaccttctcacttacgaagtgaatgtcaatctcaatatgcttcgtgcgacgatgatggacaaggttggcagtcatatagatagcactaacgttgtcagagaagacgattgttgccgaagagatgggtgtatgaagctcctggagcagctaacgaagccaacaagtcagccacagcgtgcgcaacaacacgatactcagcctccgcgctcgaacgagaaaccgtagtctgtcgtttggaggaccatgagactaagttgtcaccgaggaagacacagtaccctgaagtagagcgccgagagtctggacagcctgcccaatcagcgtcggagtaggcagacaaatccgtaatgctgccagtgccgatgtgaagtccagtggagagggtacccttgacatacagcaggacccgcttgagcagcgccagatgaggctcgcgcgggtcgtgcatgaagaggcacacctgctgaacggcataggcgagattcggccgagtcagcatgagatactg

SEQ ID NO: 4123 - DNA, 619 bp, Zea Mays
ttattgtagacgtccacaccacactcatggtgcacggttctgcccgcagtgccttccactcccagaaccttccatcgacgccactccctgaattcctccatgccgctcctcgaaatcctccatgcccccgcgcctgaaattcctccttcccctcccagaaccttccatagacgctacgtcgtgatcccctccaccggccattcaaccatctgcttccaactcctcggcgtccaggttgtccacaagcacaagcagggggcccttccatacatggctcgccccgcagaggcaggggggccttccaacgatggagcacctcgccccgcacaggcagggggcccttccatccatgagagcacgcaagcagctctcccccttcctccgcgcaaggcagtccactcggattatccgcaaatcgtgcctgccccacggcgcccttccatctacggtgaaatcctctccctccgcgccagctcggcagatccgcaaaccgcgtctgcaaccacggcgcacttccatccacggttcgttcctcctccaccacaacttctccccctgcgccccatcgctggaggcgcgatcctatcctcgaaatcctctccctccgagccagatcttt

SEQ ID NO: 4124 - DNA, 651 bp, Zea Mays
agaaggtcgccctgcctgaggcctctgccatggcgtataggaggattaggcaccccattaacagttactcttgaggatgaagtataaaggattatagcaatccagtcaatccacctcacaggaaaacctaattgtcgagtaaggatatcaagtagtcccatcgcacagagtcaaatgcctttgcaatgtccagcttgatgaatagagttggtgagttgttacgctggaaacacctaatcgtgcttctcacagcaaggaagttctcatggatgctccgtgatttaataaaggcgctttgaaaaggcgagataatctcattcattctcggggccaaccgaagagcaagtgttttggtaataatattaataaaggaatgaattaggcttatcggcctaaagtccccgactgttttcgctcgatcttttttaggaattaggatgatgctggccgaatttattagatgaaggttacaacaacaaaggttgtagaaagcattcaccgctgccataaaatcgtattttatagtggcccaacaatatttgaggaaagagccggtgaagtcgtcgggtcccgatgccttatcgcccggcagaagatcgatgcttgctttaatttcatcctctgaaaaaggcgcgtctaacctggaaggtt

SEQ ID NO: 4125 - DNA, 569 bp, Zea Mays
cagagttgaacgtctaatgatggaactgtgccatggaagcagggagcgtgcgcgtgatagtcgtctcattgctgagttgtcaggagaggttgactatttgtagtgggagattgtggagcgggatagggctattgactgggctataaattcacgatctatagcctaggattgtgaggcgaatgcccgagcccgggtggaagagctaagcgtagccctggaaaatctacaagcgtataacaacactctacacgaggaagtccacgtgttgtatgaccagttgcatccgaacgtgtcaccggaggttgcacctatgggagccagaacatcaggagtagctagcggaggaccttatggggagttggatctctctggagctcgtccttccatgaacatcgcggatgatcgttctctcgaagctagcagtggagcgggagcagccaaggacgcgaataactagattagtatactaataggttgtttccttatgtaatctaaattaggaaaaatgagttgtataagttgagtatgtacaattagaacaagtttggaacaatgtaacagaggttatg

SEQ ID NO: 4126 - DNA, 571 bp, Zea Mays
tggggatcagattgccagcgtagcagcttcaccgccgacgaccgatctccgccacgattcgtgtcgtcgtcgtttcaatttgtgctcggggcaagtggataacacccggagtacgtcaccggggataaactaggccagtaaacaactccggccgccgtaccaagttcaccgcggtggaatccgataagtatgtcgatgaccgccgtcttccggccttgcaccgcgtgtctaagcctcgccaccgcatcgccgtgactcactttagctccccgttgatcgccggagtgaatgccacggcaggggacactaattcacgcacgccagtgctcttctccacctccgactgccgcgcgtccccactcaaattcccggccaccgccctcccgtagtataaattccgccacgagctccgtgaggtagttaagcatccagccaccaagaattaacctcgctcgttcatcagagtgtgcgaattttgaactttccccaaatccgcgcaagaacactgtaagagagaccttgtcgcggtcagctcagctcaggtccgatctcgccctctatgttgttgttc

SEQ ID NO: 4127 - DNA, 294 bp, Zea Mays
gacgacccaacatagacgtccatggaggtgtgggaaggagagctcacctgaacaccctcgggggctgggtggcagcttgcgctacccaccaaagccggatcactaccggcaacaccctcggggctgggttgtagcttgtgctacccaccagagccggatcactactagcaacaccctcgggggctgggttttctgcagcagccgcctctaaggctgtaggctcccctgtcacctccatgggagtcgggcaactcggaccaacgtcttgccattgaagactgccttccaaagtcg

SEQ ID NO: 4128 - DNA, 522 bp, Zea Mays
ctggaggggctttcttcttccgctcagtctgacatccttggctcttggtcttcttttggattttcttcgtgggcgcgagcttctttagcttcttatcgtaatccatcttcagggttcggtaggcttcacgagtgttggcctcctcaccttctgctatatcgagacactcttagagggacgccttctcctttttaagttccttgacctgctgctctaagctttccacccgggagtttaggtgggtgtagtgggaggaaaggtcgtcgtagtggttatcgagagtgtggagatatccggccatgtagagatggtggggttatccttggtaggatctctccctgacagggcctaaagtcttttcctccaggtgggggtatttttgttgctaggtgggaagtaacgaaggggggtttgaaaaacctctcggttgtaattttggcatagctatttaagggcttttcggacaacaatttggcaagtgtctgggaagcggtgcccgatgaaggtgacttggaagggagg

SEQ ID NO: 4129 - DNA, 510 bp, Zea Mays
gtgaccttgttaggcccgatattactaggtttgccacgttttttctcaccctggctagcatgctcaagcataagaatggtttgaagagtgtgtttattagtaacgaatggcaacaaagcaagttctccaccactcaagaaggcatccaagctgaaaatattatcctctctacagagttttggaatagtgttgagttctgtctacgagcttctcaaccaattctcattgccctaaggattgttgatggtgatgagacacctgttgctccggagattatggcagctatggataaagcaaaagccaccatcaaagaggcattaaaaaataagcgcaaattacttgcagaagtaatctcatgttttgacaaaaggtgggaaagtcaaatggagcagaagttgtacggggcagccctatttttgaatccaggcaaattctttgacataagggaaaaagataggaggcacgctgcaaggctaagatccacgtttaacgatgttatttggaagatga

SEQ ID NO: 4130 - DNA, 419 bp, Zea Mays
tgatgaagaccctgattgtacagtagtctgaagaagatcagcagatgcactgcacctcgctgccggtgacccccgcgcctggattcgtgccggtgatgcgatttgtgcctaaggacgcacggataacgactcagggtaaaaagatctcgcgcaagggatgaagttggggcactgtggccgccatgttgtcgtacccacttgccctgcggccggtccaggtgacctcgccggagtttgccgcctgccgctcgaatgccacatgcctcaaagctttaccacgtcacagtgaaccggcataggaagcctgtccatcgcctgagtcattgcctcagtgaccgccacggtagctcgcgccagtgacttcctcttctctccggccgccagcgtttcccttctaaattcagagccgccgctcaaag

SEQ ID NO: 4131 - DNA, 1047 bp, Zea Mays
aaggaagtcgggaatctttttctccatggtggtggagggtgaggctgccttgcaggtgtaggacatccggatggtgtgtgactttgccgacgtatttccagcagagcttccaggccttccaccggatcgcgatgcagctttcgaaatcaaactgattctgggtacgcagcctattcataaggccccgtatcggatggctccaaaggagcaggttgaattgaagcggcaattgaatgatctactggctaagggtttcattaggcctagcaggtcgccttgggcttccccagtactgtttgttgagaagaaggataaaagcaagaggttatgtgtggattatcgggctttgaatcaagtgacaatcaagaataaatatccgctaccccatattgaggttctctttgaacagttgaggggtgcccaggtgttctccaaaattgatttgaactctagttatcatcaattgagaattcgtgaggaggatattgagaagacaaccttttgcaccaggtatgggcattacgagttcatagtcatgtcttttagcttaactaatgcccctgccgcttttatggaagcaatgaataggatgttacatgagttcttggacgactttgtggtcatgttcctggatgatattctgatttattcaaagtccgaggcagagcatgagcggcatctccgtctcattctgggtgctcttaggaagaatcagttttatggcaaattgaagaagtgtgccttttggctgtccgaagtgtctttcctgggtcatgtgattaatcagcaggtcattgcggttgatcccaagaacatcacggctgtggtggagtggaagagaccttctagtgtctctgagattcaaagtttcttggggctcgctggatattatcgatgcttcgtaccaaatttttccagcattgctaagcctttggctagactcttggagaagggtgttctcttcgtctggtccagcgattgcgaggtcagttatcagacattgaagaacaagttggtggatgcccctatcctagctttggctaagag

SEQ ID NO: 4132 - DNA, 485 bp, Zea Mays
gcgaggacctcttcgcaatggcgcgctcattgaggtggtcaccactgctggtgagtcgtcgatgcagaggtggtcgctgccatcggtgctgaggtggtcgcctctgctggcgcgtcgctcggagctagctaccacgcggctctactggtgtggaggtagtttatacctgtagagtagagatggagctagggctccgcttgaaagcagataatacttttgctttttgtaaggtactttcgagtactatttatcaagcagtattagcacttatctgtgtactgccttttcttgttgtgcgtaatgttatgttgttgattcctccctagtacctgccccctgcctgggatgcagacttaaggtgtcgaggttggataccagcgcatctgaaacggttgtcaacaactctcgggaggcagcctcgccgggatctggatctgtacacaactttagccaaggagcattagtagtacacccatatggtccct

SEQ ID NO: 4133 - DNA, 305 bp, Zea Mays
tgtgtgtacaacaacagagcacaagaactgaagaagatcagatatccatcgacgccgcaagctagtacgtagtgccgcttgaattgtgttgtgttgtaccatattggcaggttgttggtgatcattgtttgcactacgtacatactacatatacggcatggcgagagggattgctgctgtgccggtgatgctcttgctggtcatagcgttcttggctgcctcaggaggagcatcacggccattggaggtcgatggcgatgcgttgttgttgtcgctgccgggaacgacggaagccgaagccgtcc

SEQ ID NO: 4134 - DNA, 724 bp, Zea Mays
gcgatgtcagtcggtgcaacaacgactatgtcactacgatgaactttgggcgtcgagcgatgaacttgatggcgatgcgtgagggccgaggcggcaggggtgagcttgggctaggaggtgcggcggtgagctccgggggctgaggaaaagtgggatcgagggcctgggggcgcggtgagaagcttcggggagtgaggagatggtgggttagggggcctcgggcatgggtgcgatgggagaatcggggcgcagcagtggggaactctagggccaaggaggttggcaatgaagaatggtgacggggcgaagagtaaggcgtgttggcgaggagctatggcggtggaggttatcacaacggtgggggaggttagcacggtttgagaatgcgtcgcggggaagaggaagctcatgcaaggcgttattgcctagctcggtgccaaggtctgtggtgccgagttagatgccacgtcgtacgccagaccagcacgttggagaccgacacgacactgttggttgggacctcgacaccataactcatagcgtcgagacttgttacctaggcgtcatgggttgtggcgccgagcaaagggttcaaaacgagaggaagtcgtgtaggggccaaacgtaaaaaatacaaaaaatgattaaattgcaaaaaaattagatggatccccgagtccccaaggtacacaagtcagagaaggtactaggaggagtctgtccc

SEQ ID NO: 4135 - DNA, 335 bp, Zea Mays
taaaaccgcccaagaggttgtccagctagttccacacatgccactaacaccatggagaataccacttgtttatccacctcatccatatccaccgcctacaaatccactatacacattcacaccaccatcatatccacctatatacctctccacatatacacccgcttactcaccttcttatccatccgtgtgggaagaagccacaatatccatataggatacctcaccacacggcttggggacaccgcaagcctaagtattcgataggctagctccaccggtgtaagaccaattggaaattccacaatctagtcctgacacgcaagatcagcagg

SEQ ID NO: 4136 - DNA, 833 bp, Zea Mays
gtatattacatggctccgcctcattaaaaacctcaccccccgggaggaaaagagtgcgggccggaatgatactgtttggtgaattacaagggcgtgttggccctgagggttcaaacaaaaaatttgcggagattatcgatattccaggaatgctctaggtcctcgccagatggcgttgttagcctgtacgcgctgggggacgccttcgtcttgacgatgaatggaccctcccactttggctctagcttgccccgcgactctatctgggttattcagacgagtacgaggtccccttcgtcgaattctcttgggacgactgcatggtcgcgccaggcctttgtttgagcttggtatctgttgagggcctgcaaggcgaagacacggtctccgtcgatgaggtctttggaggttggttcgtctacgtcggggacggctgaagcgcttgtccgtggtgacccatgttttatttcctgctgggtcatggcctccgatccgtatagcaggcgaaagggagtgaatccagtcacccggcactcggtcgtgttcagcgcctagactgcttcaggtagcaggtcggaccatttacccttcttgtcgtcgagaagcattttcttgatggcagtgaaaatcttgccatttgcgcgctccacgacgtcgttagattgtgggtgatatactgaggcgaaggcaagcttggtgccaatggagaagcagaagtccctgaagtcctggctgtcaaactttttgccattatcgacggtgagctcggacgggactccgaatcggcaaacaatgttttgctagaagaatttctgggcagtcttcgacgttat

SEQ ID NO: 4137 - DNA, 497 bp, Zea Mays
cgcgaaacgagctcgacatgtttgccaaatgggtactatctgttggtgatggtaccttgcctgctgaaagaagagcgagcgagcgtgaggctacgtggattacaatccctgaagatttgttgctccgggttgagggtgataaggtagttgcgcttgtatcaaaagtatacccagattttctgttgaactaccgagatcccacgtacctttcctcgtgtgccattgtttgcccaaataatgccacagtcgatgacattaacaactacgttctctcgcttgtccctggagacaccatccaatacctgagttgtgacgttatagcaaaatcatcggaacacataccagacttcgacatcctctaccctaccgaattcttaaactcaattgatgcgaaaaatttccctacccacaaactcgagctaaaaaagggtgccattgtgatgttgttgcgcaacctgaatcaaagtaaaggtctctgtaatggcacacgacttctt

SEQ ID NO: 4138 - DNA, 293 bp, Zea Mays
cccttgacgagttgggcaaggttcgggcggaggttgcggaattgcgtgctgagtgcgcagcacgccactatttggatggtggttctcccgcccctgtcgggattcagcaccttaccgttcaccgccccgtggtcgcttcgactatggtaccccagactgcaggacccgcatagatttggatccttagatcgacagagtcggagtctgtaataatgcttagttcagtgtcttatcctaagtcaattttggttagagttagtttgcttaacttatgttggatgcttgttatgatg

SEQ ID NO: 4139 - DNA, 797 bp, Zea Mays
ctcgaacaagctgctggcatgattccacccctcaatgtgtccacaccatccataattctgtcggtccaaacttttgcttggtatacgctcggtgggtggtgcatgcatctcccaccaagccattccttgtgcaccgtggacagccacttcggtactgaaataaaaaacatggactatagataccgagctgaggtaggtatgtgtgatcgattgagaaaaaaagatccaaacatgtgcctattggtagctagttgtggggttgggatgaccactgctaaaggctaaagctttctcccacatttagaatctgatcccagaccaacagcacttgactcacccccattaattccactggtcattattcagcagagcaacaactaatgtaacccacaagcatccagagaggagatcaggatggcatcagtctgccagcactaaaccaataaaccatgaagtttctttatttcataactgctgggcgcatcaatcacaaagcctcgccagaaaagaaacaatagcacagggtgcctgccatggaatagcctgacagttggtagaatcaacatattgtaaccaaaatcttgattattgggtcgctaggttccatggacaaccatgtggtgataaagttcacttttcaagaatgaccgctatggtacaagttctagaaaaaataacatcgaaacaattacatggtcgcatacctgtttcaatctgatggatatggatcacacacaataactcattggacagcatttctcgtatctgaccccctacttcgagttccctgtgcccag

SEQ ID NO: 4140 - DNA, 469 bp, Zea Mays
ttcgtagaaattctagtgtccggatctgttctcaatttcacgaacacacggctggacatcgttgggattccaccgggaggaatgagctttgctttcgggttgtttcctggtgctgtgggaatcgtccgctcacattttagtttagcatagttgagagagtttgctttgatctgctagtggcgtgatttcagctcaactactgtggttacttggcagagtcatgtttgcttttggttccatgcattttctcctgttcaatggtgtgataattgagtgattatcatgcatcgatgcttgtgtgtgatgtcgctttggtgcgagatacatttaagcatttggcatgcctttctgcgctagggtagtgtgggcaggcagcagaactcgtgatacttctgaattccttgcagtaaatgaaggtgttagtttgctcaattgagatcttgtctaatcgagttggatctgacaaatg

SEQ ID NO: 4141 - DNA, 568 bp, Zea Mays
cgaccaacctcggcatgaaggagacgaacaagatgaagaaatctaccagggcgacggtggcaccagtcgatgcagtggaatttgtggtgtaaggccatgtcattgggccaatggtgtgtggtagtagtttcccctatgatgtgtctccaaggaagtatgtgttcatggcttagtgttcggtggtctgttattgccaatagcgagtgtttgtgtcctttgtgtttctggctttggatttggatggcctgctttgtatggggctccccagcccggcacgccccccctctcccttctttgtatggcaccgtagttggtattttattttcaatgaatagatcagactgcaagattttatgctggaatgtgcgtgggttgaatggtgctgcaagacgtgccagtgtgcgtaatcttatttcttcctccggggcatctgtggtgtgtttgcaagaaacaaaaatctcacaatggaatgacttccttctgaaggaaactcttggtcaagctcttgcctcccagatagtgtgccttccggccaacgggactactgggggtgtcctgattgcagcct

SEQ ID NO: 4142 - DNA, 462 bp, Zea Mays
tccggatcccacgatacatactgggatgtgttgtctttccttgccacgtggcgccctttggcctgcccatgcggtggggtcaggcgccgtcctctgcgtggcctggggatgttgcatgggtgcgacgtcttcatgctgtagaagagggtacccctgatttagggtaccgacagtggcccccgggcccacctcaggaggggatacgatcctgttggcggggccagagtcttattggtggttggcctgctgctcctgcacgcctgttgatgcagttgctgccggcccacctatggtcacgccgacggccatgcccgttttcatggttgaccggcccgtgactctcgtacttagcgcgcactgctgggccatgcgcggggtgcctcgagtcgccgcactggttctgaaaacttatcttttcagttttccgcgacggccctgaggagtcgtggtattggcgcgagt

SEQ ID NO: 4143 - DNA, 569 bp, Zea Mays
aaataagtcacccaaagtgagagaagggggagaaaatctggatttgcataaacaccaaaatcagcccttagcaaagaccccatgtgttgactaagctacaaactccaaacctgttgaccctaattacaaaagatgtgcctaattacctaatctaaccccgatcaaaaggtgatctcgagaccaggccttttgacttgacttgacacacattttgcctcttgttcagtctgaaagacaaactagttttccctcctctatatcgcctaatccaacaagaaaaatcatttgacccccatacaccatagctaggatttggctgagatctggctcgaataagtgaccacacataaaataaaatggacaaacactcggtcgccaggtgtttgatgttggcaggcagaagtcaagcaggctctgccccccgtgcgctcccgtgcagttgatcggccaccaccgtgccccatgcctataaaggccgctcgagcactcagtcacccccttcattcctcactaagtccaacgcttaacttccctgagccattgcctaactccggtcagctctacgcgcg

SEQ ID NO: 4144 - DNA, 670 bp, Zea Mays
gaacgaatctgatgatccatgataatatagtccttgacacaaagcaacagcgagccaatgacgctggaagccaagttggtggacgaagcagcttgaggctcggggtctagctgctagctgttatagagtgagaaaaagggacagtcgtgagccaggttcccacacttttggaccaacaccaacacgggcagaccttaggggagacatgtcacgtcgagttaggtggcacgacctgttgtggtttgggctagcccgcttggcccatcgcctggaccaaactggcgggctcctattccgagtctttgtgggcctactgcactgtcctactcagctcagccgcgctatcaggacaataagtttgtccaagcaagctctagcacatgcataaactactttttataacctgacatatctccagactagtaaagtcaatgcatgtgccttgctgtcaacgaagatgccacttttcatcgaaataattccgcgaaaaaatgaaaaaatcaaagccatatttaaattatattgtattctaaatgatgtcacgttaaaaagtaataataaagatgaattttatttgaatgagacgagtgagtcaaacttaggttaaaaaagttaaactaattataaattgtaacggagcgagtacaagcaaccatgtcaaagtcaatga

SEQ ID NO: 4145 - DNA, 761 bp, Zea Mays
aaatctcctacgccacttctcggaatccctcatcgctcctttcctttctcggtcgtcaccccatcgagccctcgtcctcttcacgtcgtctcacaccccatcctctctccctgcatcgtagccgctagcaccgctccccatcatgtcctcttccttcccgcaccaacgatgctagcactgtcgctaggtcaattaacattgtcccaaactcgcccatctcttactcttagtccatagggatggcaattgtcataatttacccatgtgcttgcgggtaaaaattccatagggtacaattttgagtgtgagtttgtacccgtgggcacagggtgcggggttgattctcaacacaaagagttttttctcatgagtataaaaaagtcatgtttgtgatcgtgtacctgcattggatacctattaagctaatgtagaccacaacatgccctcaccctcgccctcgtgcgtgatgccttccgcggccccacacagacgcataggtctaccatgccacccgcgtcgtttccgtctcatccacctctacaccctctactgagacatccccatcgccgcgacccgtgccccgtcgtcgccacttccctcatcgcggtgtacaccaccatggacttcctccacgccgtcgtctcctttaggatgtgtcgcgcaagttcttcggtgatcggggggattgcgactcaactgcctccttagggtttgtctctggttacccgcgtgcggatccatcctccgctagagcaaaccct

SEQ ID NO: 4146 - DNA, 471 bp, Zea Mays
gcactcggctgattggtcggggcgggggcaggagtgggacgaatgaacacgggttgtctgaagggatatgtgggtgggcgaggagaagaatgatttgaattgaaaggtcggattaccaaccttgtcctcttttcaggtccctgatttgatctttcacccgcatatccttttgactttccttgtcccgcatttttggcttcaactgacagtgctgtactgacagccctgctttatgtgaggtccagacacgttgccatcttgcgttggagtctgtcattcagtcccctcatgaagcaattcttatttttcaagtctgtgtccacttgatcaatggcgtattgggagaggtgattgaatttattgagatactgcatcacagaatctcccccttgcttcagtcggatgaactcttccaatttcatttgtagcactcctttcggaacataatgttccctaaatgccagtttgaac

SEQ ID NO: 4147 - DNA, 302 bp, Zea Mays
catgtcgcgagatttccatgtgagtcgacacggttacgattacctgccaattgtgttacaacaccataaacacggcacacccccacgcgcaaccccaccatgatcccggtgcacccgcgcggcaaccccactacccgatcgcaccacacacgacgcaacaaatggatatgcagttgttatcagcaatttatacaagcattaaccccgaaccacaccccgaccgcgtcccgaccacaccactatgacaatttacacagccattgccgtcaaaatacgcatgcataaacgcgacacccccacac

SEQ ID NO: 4148 - DNA, 590 bp, Zea Mays
gtttaactggccgagactgggagtttcactagcactagaggatgtagaaacatggatcagagagacgtgaatggacgtgagaacagctggccagagtgtgatgcctcaaggcggcgttccggccgatttgggggaaatccgaatttcgctagctatggtggatgatttgaggcgaggagtggtgctctgcgcatgtaacaagaaggcagagcggggagggcactcaatttatagaggtcagcttcggttgctctgaatttgggacggggatgaactcatggtgatgtcgttcaatgtggcgttcgtctaacgtggcattcaatgtggtaaagtctcgcggcagtaaatgggctgtccactatgacctatggcgatgtggtaacctggtctatggcgtggcatgaccgagataatcgacggacaccacgacaacggccgcacgaccacgtcgccgacaagtgggtacgacaggcttgcttcaaggcccaagttcacctcctcggcgatcttttcaccctccccgtcgatattttcacgttacagcgcgcacatctcaaccatcgtgcggatcacggcgcatgatcatcggc

SEQ ID NO: 4149 - DNA, 553 bp, Zea Mays
gacaaatatgtcgacacctatattgcctctctagattgcaaaatggatccaaaacaaagtcctaggcatgagtgctttaagctctcttatcgggtcattgataaatgcaatcgaggctgaaccaataatcgcaaaatgaaagtcgcgagcttgaagtttggacatttatgggcactactgaaataatgtgtggtgaatgcgatggttcaagtgatcttgtgagagatccatcccacatatgtgttgaataaacacagttccgctatgtaatatatctggcaaatggtatgaattaaattatgcagttaataggattctgaagatccgtcatgagatcctaggaggacccatatctttgatttataaatatgcaacatataaatctcgtaccgaataatacattcctgacgaatgaacactcccctatgtagagataatatctcctagatgagattatagttccttgatggaacttttccagaagaaataaagtctgtgttaaacaccaaagtttgataatccctataaagggataaagacccatatagacccg

SEQ ID NO: 4150 - DNA, 466 bp, Zea Mays
ggccggcgtccatctccgatgtgctcccggtactagattctgttgctgaccgccttcgacgtctggatcagattcttggcgcccgcttggaggccgagggcagcagactttgccggtcggcaatagaatacgtcttgacatgcttccggagccacgatccggctgtctccttggggccagtcatcgcaggtctggtgccgatgccgaagatgctgctcatgagggcgtgcaggacgttgtggaagcggtggccgagcgctttcagcgggatcctactgacgatgagtagctaggcctgcgtggagaaaacgaggtttccgctgggaagcgggttgtaatataccattgatttcgtaagatactcttcaggtactacttactgggcgatattacaacttatctgcgtgccacttttcctttgttgtgtgcaccgttaccaacttcttccttggtacttggccccctg

SEQ ID NO: 4151 - DNA, 673 bp, Zea Mays
attccatgcaggacacagtcaaagaagtggcctactacgggattcgcggggagcaggtagccaaggccaggctcaggcgaggcgaagtttgttccgaggctgaggccagcttcgggcgagacagtgtttctccaggagggtgagcccacgctctttcatacgcgcgtcccatcaggagttggcagacgatgtggggggacaatagtcgttgtacctaggcatgcatcatcgtagttggtgaaagccgacaggactgcgatcctatcggtcatgttcgcctgcgacgttacgtggggtaggtacgcgcattgaatgctcatgtccccttggggcctttggctaaggcctggctcggggttgtcttccttgctcgagacgagctcgggcgaggcagaaatggtggttcagcggagagggacgtcggtcgggacaaggatttcccctagtatgtaccttgtccgagggcaggctcatgcgaggcagagttatgagtgaccgctgagaggggccttgggcgaatcgtggtttactatttcttgtcctcggggaatgtttctgacagtggtcttggggttaagcgcgttttaggggcgtaatctatgtacccctacttacgatacccgacatctagcttctcaaaatcaatggtgaaccaaacaccactgtacttttg

SEQ ID NO: 4152 - DNA, 591 bp, Zea Mays
aaagcactagtaggttacgtcaggcacgatgctgacgttagatagcgtcagactaaccaaacttctataagttgacacaggggcagttcatggggctaatatgcggcgtcgagctctcgttccgagagatttaggtcggcaatgatcaaacgaccaccacgatgagcttcagcaacaaacgtaaacaatagaacgctaaatcaggggcgcagaaccgtaccatgtacgcctggccacgcgaggctgagactttgatgacgtggtcaccagacacgcgaaactacacggctagagactagagtgttttcagggtatagcttgggggaaaatgaaggcagcaatagggtattgaagtcacccacaacgacttactacaagggtaaggattctaccttttctctcttcttattttcccccggttacccttttatatggacagcgccgcttcatacgatggctgagttcaaagattggatagaggtgtcaaactgggtgaggctgtcaattgcatgagcgcgagtatgtggctccattccaagcatccacgccggtcgcatgaacaaagcaaggcaggaatagggtagattttat

SEQ ID NO: 4153 - DNA, 603 bp, Zea Mays
gcgataagtaagagaccatgcttgaactaaggtgggagattggaggttttagataacgaacatagcgtaatcaccaaggtaagattgagagatcggaaaggtcaaggcaacgctaaacagaggcacaaccaaggatggagttgaagactcacaagcgatgaggaagaggatacgaccaagggaaaagtaggtaaagtacaacactcagattgagatggaaaagaggaggttttaaagggccagtataagataaacatcaaggtaagatatagaggtgataagggtaaatgtgataaggatgaaaagcataatccatggacagagtcaaggcaagactcaccaaatggtaaggtgaagaaaaaaatcaaggataagataagtgaggttccgacagaagagttgaagtaaaaattcattaccgaaggaagttacgaggaattaacgagatcaacaaggatgtgcgaaataagatggatgctcatggatcattgagaaacaagggtggtcaagggcatgtaagctgaaatgttttgaacagtcattagggtatgaaaataagcgtacataagaatataagagtatgcaagattccaaggatacgag

SEQ ID NO: 4154 - DNA, 697 bp, Zea Mays
ggcaacactaggggtccagcccacaagaggggaaagtcacaacaccagtgccaccacccctattgtggcaaaccctctgaatcaggtacttcaagagggagtactcagaggtatcgggctgttccgaagcccaggctggggttggtgtgttttcgttgtggtgaagcgcatcgccgtgccgagtgtcagtggagtggtaggtgctctatctgcagccaggatcacaaggatgtggtgtgtaggaggaatcccaatgggaaactcaaatgggagccagtgacttcttcctcttcgcagggcactgtcaacatgatgtcaagcgctgagcagcaattttctataccaccccctcaacagcaattctatatgcccgggactcctcagtttgtgcctatgcagggtttccctcagaacctagtcgcgcctactcctgcaccgaccactcatgtaccatcccagtttggagctccgcgtctgcctcatcctgcgactctgtggggttcttctattaatttcactccaggagcttcttcttccacgggtgtttctggatcatatgtgctaccctctgcggatggcagagagcagggagacgtggtgacaggtacagtctcagttgattcgtttgttgcccatgcactctttgactccggcgctagttattcgtttctttcggagaattttgtgtcgcgtgctg

SEQ ID NO: 4155 - DNA, 665 bp, Zea Mays
caagaggttgcagcaatgggagccggaccatctggagcatctagtggaggacctgatggggagttggatctttttggagcccctccttccatgaacctcgcagatgaacgttctcccaaagctggcagtggagcgggagtggccaaggacgaagataattagagtagtgtaatataagtggtgtccttatgtaaattaaataaggaagttgagttctactaatgagcatgtataattagtactagttggcataatgtaataaaggtggtttactttcgacatgtaataattcagtatatttttcttcctcagatgccatcaagaacgcgtgctcaagacggggcaggaacttcctatgacggggaggaaactccaaacccgccacatgtacctcctatattggctgaggctatcactgccttagttaatgctaccgctaacaacacacgtttcctgcgtgaattggcggggaatcagtttcagcaacatggaggcagaggtcaacctcacgggccccaagacaccacgtacttggaattttctgaaactcgtccaccgttttttgtcaaagcaaaagaaccattggaagtagatgaatgggtacgggtatggagcaaaattttggactggtctgatgtactgaaacccagaagcctctattcacc

SEQ ID NO: 4156 - DNA, 464 bp, Zea Mays
ttgacacctttcccgacatctctagcgatccccttcctagagcccctcagccatccaaaaagaaagccccctcccacaaataaaatccacccaagagagaggtgaggtaccattgtgagcattgtgagagggatgggcatctagcttctttttgctttaggaggaagagagatgagtggcgggtttctaagtcgagcaggaaggacatgaaccgcccctctcatggtgttcatgctcagcctgttcagagacgtcctgcgaggcctagaggtgttttgcctcttgccgctaggcctcaggcagtaagaccatgtggtggtcgtgcccgacaggatgctggtcatgtgctatatggccaaggaccatgtgatagaggctttggttcatacttccccagcggaccataatttccttcttgtggtgatcgcttcccttcggaaccgaggatatttggtgttttccct

SEQ ID NO: 4157 - DNA, 468 bp, Zea Mays
agcagccatgggcatggatgtagcttataaaccccagaacaacctaaccgcgcctacgacggggtcccagttccgtggcatctaccgagacgatacaagcaccggaggattcgaattaagggcacagggagcactagcaggatacggacgacgcgacgcttacatgaattggcatctgaccgactgagttttggtgggttgacaccagagtagttcaagtggcgtcgagcccatgttccaactaaactatgaccgtaaagactaaacggatacctcggtgagcttcaccagtttataaggacatagaacatggatgcatatacgttgaaccataccatagtcacctggccacgtgaggctgaggcgtcggtgacgtggtcaccaaacacgttgagtcacttgaccaaggaagttgggcgaatccaaggtatagtttggggaaaggaaggcaacagaactatgttgaag

SEQ ID NO: 4158 - DNA, 406 bp, Zea Mays
aagttctttaaaacttaccctatcatgtcatttaaggggaactaaagtcctgctctgaagaaactcttgaaaatgacaacttcgtcctcttttggttctggaactatttcctccccagcaaaccggacaagcttgctctcagcctccctgaaatagccaagtttcctcatcataaccatgtcatcctctgttacagtagatttcccaaactcaatgtggctaggctttgttgggcttagaatactgttatcttcttcactttcattgtcactttcacctccatctacaatctattcagcttcagcattggaggcaccttcggcagcaacttcctctaacacaaccagacccgaccgtttcattacttctaaaatttgtgttgtttcggtgatttcggtctcctctc

SEQ ID NO: 4159 - DNA, 629 bp, Zea Mays
ccacgttgatcccatcgacaccgataggtatgagagtcttgttgtgcaacgtgttctcagcacacaggttgcccaggccgaaaaaatcagcgacacactctattccataccaagggcgtcgtgcacgaacggtcgattcacatcatcatcgatagtggcagctgcaacaatttggcaagtacagctttggtagagaagttatccttgcccactcgcgcacacccacatccgtatcacattcaatggcttaatgatggtggtaaaataaaggtaacacgttcggtacgcgtccccttttcgttgggttcttattctgattatgttgattgcgatgttattcctatggaagcatgctctttgttattgggtcgaccttggcattatgatactgatagtttacatcatggtcgttcaaatcattattctttcatgtttaaaggccataaaataattatacatccaatggcccctgaccaaattttgaaagatgatcttactagggctgctaaaactgcacaacaagtcaaatcgacatcagccgcacctattaaatctgcaatcaatttgcactctcctatattacttgctacacgtgctgattttgatgatctccatgaagctcatatgcc

SEQ ID NO: 4160 - DNA, 439 bp, Zea Mays
cccctagtgatcatatgaatgactccgcgatacggctgatcggcgaagtcttcttgttttggggcgtgggggtgggggatgttctgatgttgctggtgtggaggtggcggtggaggcggtacgatttgtacttcctggtggtgttggtatgcgtggtgcggtggatgcggggcaggggcgtggatgtagggtggagggggttgctgataagtgtgcgcgacaactctgggttgtcggctggctacgcccgtgccatcctgtctttggtggccttcgtttctgggcagtctttggtttgatgggcgcagtcttcgccatggaagagacagtagaatcggcgcggcggctgcgcacgcccccggcccctgtcgcgagttccacttccgcggccctggggggatattcctggcggcgaggggcgtcatcagcggggtgctgg

SEQ ID NO: 4161 - DNA, 699 bp, Zea Mays
tacgaacctggtgttcgctgcctagctaagccttaggcgtcgtggcggtgtgctccttgactccggtctctgtagtcctccgtatgctctggtctggtcgcctatgctctacgtgagtcgtctttttgtcctatgtgtgtctcagctgactctccccttttatatgccaaggaggggtcagttgccggtagcttccatggaaggagttactacgccgtggtaaaacgaggcattctatctcggtaaaattgggcttgtcggcatgtgccttggttgtctgagcttctctggtcgtgctctttaaaactggctacacgtgggcgatgaagagcttcggcaccgtcattaatgtctctgcaccacgttgaccccttgcctccatagcctgggtctcggtgtggctcgtcgtgttgtgtgttctatacacgacaagcacactcaggcctagattttgtaggtcatgagtgggtcgcaaccctaggggcatgtaggtcatgagtgcaaggaggaccgactctcctgctgtggctcggtgtaaggcacatttaatgcggtcggtcacttatggcgggtaagttcgggtcaggcgtggaatccactcaagtggcttcctctcggttcgcctgaccctcttctggctctgccttgttcgatccctaggcttggtggcttgggactatccgggggtgggtcctcctg

SEQ ID NO: 4162 - DNA, 1538 bp, Zea Mays
ggatgccatgcttttccacaaaactagtggctataaaagaatgggatgctcctgaatcgaaaagtacagtagcgggagtaaattcaacaaggaactcaccgagcactactcccggagcttgctgagcctcctgagcatcgacgtgatttactcgtgcccttccttgatactgggtcttgttctgctggctgatggaggagggcgccttgggggcgggtgctgaggtattcttggggccattcactgagttggagtaagcaggtcctgatggcttcagctggggacagctgttcttgaagtgattgggatctccgcagtgccaacacgcattcgctggtggttggttgcttgcaactgagggggcttgaaaggagctctgactctgctgactgaaccgtgacggagtgggtccagctggtctaatgaagcttggtcccttgggtggaaatccaaatgatcgagttttctggtgccggtcttgctgctgtgctcggaggacatggaatttcctcttgagatggcctttttcttcttcctttgccctttccacttgcatggctttgttcgagaggtgcgagaaactgaggaagtcttggctggctaggatggtcttgagttctggtctaagccccttcaggaagcgggccatcttcttgacttcggtgctgacgtcatccggcgcgtagcgggccaactctgtgaatttgtgcacgtactcactgacagatcttctgtcttgagtcagttcccggaattcatcttccttgagctgaacgatcccttggggcacatggtgctcccgaaaagccgtttcaaactctgcccaggtagcatctctgatggtaacattgaaggtatcccaccaggctaaagccattccggaaagttgatgagcagccagttgaacacgctaattttccgggcatccgatggcttccagcttcctcttaatcgtgcgcagccaatcgtcagcatcgaggggattgctagatccggcaaacgtgggaggcttgagcctcaggaaatctcccatcctgtcttgtggtcttccaccattcgggcgttgattttctagacttcgagtgaggacctcgatgagtcgggtttggttggctagaacttgggctaaatctaggggtagttctggaggtgcagggaggtgagtctcacttccttccctaccggcttctctttcagctcttaggggaaaccctgctccaatcccggaggcggtaggcgtggttttatccaaatccatctgcgaggggggagagagtcactattatgcacatgccaattgttttcaaccaaattattttattcattacaccaatacattacaagcatacaactactacaagtcgtactacacgcgagcgttctctgaggtactaccgaactctttttctaaagtatccccaaattccttgagaaggtcgtcaaggctagctagggacatatcctcaatgtcggacaaattttctatcctggcaggaggtggtgctggaggagctttcttcttccgcccagcctagcct

SEQ ID NO: 4163 - DNA, 965 bp, Zea Mays
attcgcggatctcatttggtggtggtatttgaggacctggagatgcattatttgtgttcgcagtcaactcaaaatatatcctagctcggtcgcttcccttcgtaacatatttaaacaagtacttgatcatttgtgttttgttgcaccactcgacattaatatgtgcattgtatttttttgagcaattgcatattgtatggcaccatgcttctattgtccaatttgactccactttttactacgaacctaccattattttgtcttctataaagggtatagccaaaagcatcgatgacagtctcgtcgttggtacgtcttagggaatttcttagagcatctatcatttttcatgcatggaaacctcctgttgtaatcaccgcacgtaccatgttttatgattcgtccaccagagcatagcccaagggatcaatggcaacgtcaggtatctcagcacatataaaagcgtcgatggcacatgcgtcggtctccgaacgaccaccaagtaaccatagaaggcagtgtatgtgcggtaggcccctttttggaattctacggtgtaaatcactgcataggtcagactatagatgagagcatgcaaaaaatattaaggaaccactcaatgtgacaagttaagatgaagctcaccagcacggataggaccgaaaatcttagtttctctaatgtctgctatgaattcatcgaccttcatatggaagacccttacaacgatatcagaacgatcgcatggttgctgaccaggctcgaagcgcagtgcatcgactatctccttccatttagggttgcatgtgaacgtgacaaagagatctggtgggccgtatactctgcagatggccatcgcgtcctggtagttcattacatggtaccttcgcccgcctgtaaaagacgacggcacaataactcttccaccaaccggatctgcactcgtgagacccttgccaatggcg

SEQ ID NO: 4164 - DNA, 750 bp, Zea Mays
atttattcaatttcaaactgcactggattgggcctcaaattccagaaagcacaggggcttatctaagaaaactccccagactcagatgcaacccgagctggacagcgggttctaatccatgattcccgaggggttcatgtgtaaaacgaactagtgaaagggtttggatgattctcggccgcaggatcacacaccaacggtgtggattagatcgggcctcccaggtcccatcattgcactacgaccgttggatcaagtatccacagtccacggttcgtgacaccctattctccccatagccgttagatgaagaaactgtggatcggatttaacaacacccatagtcgactttcacccgtcagattccagatccatggtccacatctgatttcgcgaaaagtcatgccctggcctaatcacgaccgtcggttacttgatctacgatgccgaacccatcttcttcctcccctggctgtcaacacggcggcgcactatccccgcggtggtggttcaccggcgcccagacgatcaacgattgcgcacgctagtctccaatccaagcattgctacgcctactagggacaaagacgaaaccgagcaaggagtttataccgtaaatcgccgtgcagagatctctggcgccagagaatcgcggaccgacggtggcacagaatcgacggcgacgaaatcctaggattcccggtcaccaccgcgcccgcgagtacctctcccacgttcccgcgatgctcc

SEQ ID NO: 4165 - DNA, 585 bp, Zea Mays
ctagcttaatcaaatgagtcgaggagcatcaggggcatgtaagggttctgaaacaagagagcagaggacaagatcggacctgaaacgagctagccacggcgaggtcagtatgcgcggtgttccggaccgatttgggggaaatcccaaattggggctctctagtgagtaattggaggcacgagcgtgtggattggatgcttgaatacctaacggagccgagggtgtgctcaatttatagggcccttgagcggtggcccgtgaatttgagctcgcgcggtggcggtcggagaggaggggatgcactagcgcaagcgattggtggcatttaccctggcaagctcactggcgatcaccggatgagctaagatgagtcacggcggtgtggttaaagcactgaggcatgtggtgcaaggttgcgaggtggctaactctggtgagggtggatccgaagcgaccgtgggctaaccggacacagcggtcggagtgaacagtggccggagttcatccactgggtgatatttcttactccctctgcgttatccaactgcgtcgagcacgaatcaccacggcgggcgtgaatccggg

SEQ ID NO: 4166 - DNA, 751 bp, Zea Mays
aaaatggtaggtgtatctcaagtaaaccaaaccaccttcgctggaactggcagtagtctccttcgacatttcccagtcattaacgagcggccacaccttgtaagcaatatgctcctataccaaatccctggtaccgatgtaagtgcacacaatgttgaaagccatcaaacacgcttgtacttcgttcccacttgcaatttacagcctcctgatgccgaagcatagactcttccccattgagaagatggatgatctgatgtggtgtgacagagtatgccacacaaaggatgtgtgggcactgcaccccgaccaggttaggagagtgattgtttagtgcatgagcgtgttgtagcgtttacagactctgcaaagcgacgccatgacacacctgaccggtctagctcaaactaccaagacaaccctcgacgacaggaggtctttgtagtggacttgtcctctaagttggtggagaaagacctccaaatcgaacaaatgagtactcgcacccatgagctcgagtagcaagtggagatccaggataataccattgaggtcctagagaaccagctccacaacgtgcaggtcgagctgggtgagaccaatgctcatttggaaatgcaccaccaggagatgtagcaacaaatggaggtggaggaagacggtgaggaggaggaccttgaggagattgggccaccttctagcccggacaccgctcactctggaagaccccctttacctgagtctagtgccg

SEQ ID NO: 4167 - DNA, 601 bp, Zea Mays
ctcaaaagattctaccttatccttatggatttatcgtgttctaataggcatacctaccccactctatagtaacaaccatgatctagcctaaaataaatagatcttatctagttataccaatctgatctagatcccacctaatctaacatgagctaatccaaattgagttacttaagtaagttagacataaattagcccctgattctataaacatatcttaccctaaattaataccttggactaactcgtccgtaaacaacaacctaacctacatcataggttgcctaatccagatatcccaaaagcaaagtaaacattgttgggcctacccatccctagcaccgacaactatcttaaccatatgtcctaaacacggatggaaactctaagggtgaaggccaaagaagatcaacctcgttagggaaggagagaagtcaaaatcaaccttcagatgcattaccacccaacatgaagttcttcctcaccacaaacttttttcacctctagctattcatgccctaacctatccatcttttatcccacataataagtagttggataactatgctctcctaatcacccaccattgactataaaaaat

SEQ ID NO: 4168 - DNA, 438 bp, Zea Mays
gtactagaagatatgttaagagcttgtgctcttaaacatggtggcagttgggataagagtttaccatatgcggagttctcttacaataactgttaccaggccaatttgaagatgtccccgtttgaggctttatatggcagaaaatgcaggactcctctatattgggatcaaactggtgaaaggcagttctttgggctagaaattatacaagaggcataagaacaagttcagttgataagggagaacttgagaaatatgcaataaaggcagaaaagttaagcagatacctggagaaggtagttagagtttaaggagggtgatcacgtgtatttgaaggtgtcaccgatatggggtatgaggaggtttaaagttaaagggaagttgtcccctcgctttattggacccttcatgatcctcaagcaagtggggttggtttcc

SEQ ID NO: 4169 - DNA, 297 bp, Zea Mays
aaaatctatacgaagctcttcttctctttcccaagttgcttcatcttcaccgtggtgactccattgaactttgcacatctttataaccttattccttgtaactcgagtcaatgtatcaagaatcttgatggggtactcagtataagttagatcctcttgaacactaaggtcctccattggtaattgttcctcaggtaccctgagacatttcttcagctgagatacatgaaaaacatcgtgaacatccgcgagatgatccggtaactccaattgatatgcaacctctcccactcgctt

SEQ ID NO: 4170 - DNA, 626 bp, Zea Mays
agacaagttctctattctggtgggaggcttcctttttccgcttagtctggcatccttggctcttggtcctcttccggattttcttcgtgggggcgagcttctttagcttcttatcgtaatccatcttcagggttcggtaggcttcacgagtgttggcctcttcaccttctgctatttcgagactttcttggagggacgccgtctcctttttaagttccttgacctgttgctctaagctctccacccgagagtttaggtgggtgcagtgggaggaaaggtcgtcatagtggttatcgagggtgtggagatatccggccatgtagacgatggtggggtcatcctcagtaggatctcttcctgacagggcctgaagacttttcctataggcaggagtatttttgttgctaggtgggaagtaacgaaggggggtttcaaagacctccctgctgtagttttggcatagctgtcggagagcttttcgggcaacattttggcaagagtctgggaagcggtgtccgctgaaggtgacttggaaaggagggtgattcgggtagcttcggctttctcccaggtagactgccatagagcacttctcagttccattctcgtggtattctttccagtcg

SEQ ID NO: 4171 - DNA, 511 bp, Zea Mays
cgcttttggatccaaatccaacggtcaccattcattagactctacacaaatcctgtctgcatgatctaaactggatggcctggatcgactgaccgaagcggtacgctccagtacgatctgaaccgtccatcgccctttttacggtgggaaggactctcttccagcccggcacacggctgaccgcagaagacacaccacggtggcgccatgaacagtggatcacgcgcgagcgccaacgaacactaaacctagcacgactatgcgcaaaacggagagggaaggacaacgggtagtaaggaggtaatcgcaccgcagattagtcgcacagatgtccagaccacggcgcacggcggaacgcccaggactccacagcgtcggcgagcaattaaggaatggtcggacgtcttccgccctcccgaggtggttgcgcacaagcggcacaaccaggcgaagctccccagtcgaaccacagggccacggctgcagtgcagcgctcggtcgacggtggcgg

SEQ ID NO: 4172 - DNA, 393 bp, Zea Mays
gtactacactagcgcgtacgtacgtgtggaaaacaggtgaaaaaggtgagcggaaaatctagcaggattcgatcgacgatgctgcaggagctagctagctagctagtcagttgtgtggtggtggtcgtcgtcgtcggcgtcgtcaatgctccgcccgccattatcatatggctcatttttgtcttaatctattatctacttaattgtgagtgttacgttggcacctgacgagtgcatccggccttacgtttgcatcatcctccaattaataattcctccaacacatatatgcatcacagcacgtgacacaactttgtccattgcagtacgtagtctatactccttccatatatacgtaattaatgcagttaattatgagagagagaaaacaag

SEQ ID NO: 4173 - DNA, 574 bp, Zea Mays
gcgaaagctccaaacggggtaatgaatgaagttttttcctcgtcttcttttgccaggctgatttgatggtatccagagtagcagtccaagaatgacaacatagaacatccggcggtcgaatctaccacctgatctattctaggaagtccgaagggatccttcggacagtgtttgttgagatctgtatagtcggcgcacatgcgccaatccactttattctttttgagtacaagaacaggatttgctaaccacttaggatgtagtacttctctaatgaatcctgctacaactaatcgagctagctcagcacgaatagcttctctcttatcgggcgtgaaacgacgcaacttttgtcgcatcggcctcacctagggatagaccttcagtttgtgctcggccagttctctcgggactcccggcatatccgtaggctgccatgcgaatacgtctcggttatcttacagaaactggacgagcgtgccttcctatttgccatccaggctggagctgatgatggcagtcttgcattcgtcagtgaacctgaggttgattctctttgtttcctcagttggcg

SEQ ID NO: 4174 - DNA, 704 bp, Zea Mays
ccttaggcgacttctgcacggatagtcttcgcggaggacttaaatttttcgcacttgttgtgctagtccggctgcacccttaggcgacttctgcacggagttgtcgcacgcgagggtggctagcactgatcctcgcggtgactttgtattggtcgaatgtcgaagaccgtcgtcgcggtcttttttcgacgcatgtttttgcgggggatttttcacttgtatattacacgactccgcctcgttaaaaacctcaccccccgggaggaaaagagtgcgggccagaataacattgtttttgcgaattacaagggcgaatcggccctgatgagtcaaacaaaaaatttgcggagattgtcgatgttcctggagtgctccaggtcttcgtcgtttggcgttgcgagcctgtaagcgctgggggaagccttcgtcttgacaatgaaagggccctcccacctgggctccagcttgcccctggactctgtccgagctgttcggacgagtacgaggtccccttcgctgaactctctcgggatgactgcgtggtcgtgccatgcttttgtctgggcttggtatttgttcagagcctgtagagcgaagactcggtctccatcgatgagatccttcgaagtgggctcgtccacgtcggcgacgactgacggaactgttcgcggggacccatgttttatttcttgtggggtcatgac

SEQ ID NO: 4175 - DNA, 727 bp, Zea Mays
gtggttttaggtgaggagagaggtgaacatggtatggaatggagcatgcagtggtgaaaacttttgtcttgctcagtcaaacaacggctcatggttgactgtactggcatcaacctttgtccacagtccaccccaccatccaccattagcagggcatcaatcagcatgcatctttcttcctggtggcctctgcaagctctgttccgacttcatcgcctttcacctactcccattgctccgccattaattttttaccggatcaagagcaccttccttcctgtcctgtgcatcgaggaggagagagaaagagtatgtgcgtgtgagagggagcagagtcaagaacagcaagcagcccagaacccaacatacatttaagagggggatccaaaaaaattgcagtctttacctgcaccacccctccctaccacaaatttccctctctgctggaactggaagcagccgtggcatccgccgtttcttgcgtgcttcctttcttggttctcctactagctgtcatcgctggtactgaaccagcggagaagagagaggtgaaccacggtgatccccgtgctggacaccatggccgtgtcctggtaggggataagcaacccaggaaagcagcaaccttccgctgtgcggatcacaggagggggactgcgtggggaccagaccaagcatggaggcactggcggccgcattcgccaccggccttgtccttgccctcgcg

SEQ ID NO: 4176 - DNA, 924 bp, Zea Mays
cagtttcaacggtcgtcgtgcgtcatgtttttataaaacaccccttgaatttgttggaaatcaacccgcagttgcttctgctctccgcatggcgtgacccgcccactctgcaagaccgcaacagatccccgcccgccccgccgccgcttcgcttggataaggatgcatccacttcccattccccttctcttcatctttgggtcggcgatggttatctctatattccttatagatctgtcgcggttagcagcaccagccaccacgactccaagatgagcaaggtgcggtggcctcgctgctggcgctggcagtggttagagcaacctgtcgaggaagacctccatcctctctcctcctcgactccccaccccttgcgccgtgcgcgtaccactcaccaccggtcgtcaggggaagaaggtgtccacaaggccgcctgctcttgccggtcttgtggagcgagcgtccaacccgagcaggccagttccctttctcctcctagatgttcactcctaagtgctggaagagtaagtgtttttgttctttcatttcaaattttggctaagaactaaattgttgtcatccagtaaggtaggtgtgtacatatcactgatgttcatacagctgtgttattaactgcaatcttccacaatttcctttcataaagtaaattggagttctccattttgtcttcatccctactaacgccaactactgctgctcccagctcccatttctattttatattctatggatttcatgattgttgcttatcatcattttgcttttctgcttcctttttcgttttccatgtttgtgtctatgtgtgtgtgtcttggagactgttgttggacgtgtgctgtcaaataactatacttctgtttatcttccagtttccactctatgttctgtagtataggttacggt

SEQ ID NO: 4177 - DNA, 477 bp, Zea Mays
ggaatcatcgtccatcctagcgaatgggctcagcaaaccctcactttccgatgaccatgggtcaacatcagattccccactactaagcactaccaaactttggcacatcaacgatttgtcatttccattgtcaccaaaatatgcctgtgcaggcccaagcatcagaacctatgcagcagtcgactttaagtatcatacaaattaaaagcgctattgtaccacccctgctctattcattacacctacgcggaagtccgtgtcgtcgtagggtcttcagcgctgccttttatgagtgaagactgctcttcagctcctgcctcaactttggcatcttttcgagccaccgagctctctaggccggcgaggacctcaacttctttgtccctcatctcctacgaagacaacacaacaacgcattagacaatacaaacataaaagacacctttactaagggtgcaaacatacctgtgccagcgc

SEQ ID NO: 4178 - DNA, 355 bp, Zea Mays
ccgaaggtcacgttgttgctgaggtcgaagatgcccttctggctgctgatcatgacttggggcaggtgccagtggtgggggtggtggtaattgagcctaagaagcttgagagtgacttgctgaagctgcagaagtcgtaggctattgattgcctatgtattccgggatatatggagagtagcacgaagcagtatgcaggatctgcttcggctgattctgtcgtgcctcgacttcagcaattttcttttgcttttgaagcgtgacctggcacgtcctcgttgtgtgtcccttgtcctcgccacagaaaaggcagaacaatttcttgggctgattaccgtaccttcctccactgaag

SEQ ID NO: 4179 - DNA, 499 bp, Zea Mays
aaatagcctggggtaagacagtttatggtgagaagaactccgtgttggatggtaatgcatctgatgatcaagtttgacttctctccttccttgacgaggttgatcttgtccttttccagtcttgctctttggtgtctccatccgggtttgggacaagaggctaagatagatttgttatgtaggtcaagttgttgggtatggcagagttgatctaggtcaccaatttaggcttaagtaaatttggagtaaggtctaatatatttcaccagtattaactaacctatttaagtaagccacattcgattagcttagcttaaggttagcctttgttaggttagattaatctatcacattagatcagatctaggttggattggtattactatttgggcttatatcagatcaaataaatttggattagatcatggttgttacactagtgtgggataaatatgttatttagggcaagatgaatccataaggataaggtagaatcttt

SEQ ID NO: 4180 - DNA, 710 bp, Zea Mays
gaaacgattggtgattgctacgtcagggtgatggttctgaccaaagccccattctcgtctcaggtgatcatgaacttcgtttatcttgccgttggatcaggagtagcttcaaccctccgtaagtggatttgctcttccaacctagaggtatcatgttgatgacttttatgttccctagaggtatcatgttggacaatcgccggagaaagacaggcggcacgaatcagagccatgtatctcaaggcaattctgaggcaggacattgcgttctttgacatggaaatgagtgctgggcaggcagttgagaggatggcaggggacacattcctcatccaagacgccattggagaaaaggtactatatatatatatatgctttgagattatatattatgcaagaggtgaactgcaaacagataaacttaattcctacgggtttaataatatggacaatatgtacgactactattctagtaccgagtgaagattgcacccaaaattatctcatcaatttgggcatcgtttgatgctatttttttcccgaaaaccttttctgtcaaattctctttaggttgggaaggccatacaactcctttctactttcattggtggattcatcattgcattcacgagaggatggctcctggcccttgtcatgctttcaagcgtccctccgattgccattgccggtgcaattgtttcaaagttgat

SEQ ID NO: 4181 - DNA, 707 bp, Zea Mays
agcgactacactaaactctgtcacgtgctcgacgtcatgccgaaggggctgagctcgcactggcgctcctccgcgcactccccgagcgcctatcaggccgaccactcgcctacgcctataaagccctcccaaggtgcgcagcatcccactccgcaccctgcctcacttccccgagcaagtccccaactccggtgagctctacaccgcccgcccgagccaaccgagtgacggccgccgcgactaactcgccccagccatccctcgcctacgccaactactcggctagcctccccggagtcccgcaaagcttcctgagcccccaaactgagcgtaacctcactgaaagcgttggatcgtcctcgctggaatccgttcgcccgccggagcacgagaactgggtaagtcgttgcgccattgttaaattcctttggcacatagcttccacaacgtctagtgaaccttcccgagccatccaattgaactagaacgccctgtgtaggtcgggctcctcgccaccggtgaactcttccgcccccgcatgtgaccaggatgactccgaccaccaccgaccgccatccgaccatcgatgggttcgcctggacctcctcgatctccgagaccccttcgctagagctagaccgccgtcaataaggcccgccacccttttctctgtcgcggctactattccgatggggattggatcgcgg

SEQ ID NO: 4182 - DNA, 627 bp, Zea Mays
ggcaatgtgggccatggccccaccttaattttttttaatcccttatacctaggtttaggtacacaccaaaataaacaattttttgtatagttagcgtggacaaatctaatgaaaactaggttttgatctatttttctctcgacgcttcactgctcagtccactcttcacctgagccatttgattatcttccctagcgcaagctcactcgtggctcactcgcttcttcgatcatcgacagaccagtaagtcggtaacctaacccgccgttgtagcgcaccttgccttctcatcactcatcagctcgtcgactcatcgggatcctgcacacaacgttgatattttgcctcctagtctgcaccagcatatgggcaagctattagtgggaccatggcgtcacctgtccctcgctaactcattagagtcccaccgcatcgttgcaacacgacaataggtgtcgcttgccgtcaccgtcatctaccgctacctcgcctcctgcactcgctcctcctacctgtcgttgtctcaccaacgccatctcacgacaaattcgatgactcgccagaacaacacgccgatgcggctgctctgccctagtgcctcgtcttgagtcagttcacctattttct

SEQ ID NO: 4183 - DNA, 429 bp, Zea Mays
agaagattggataaggtgctaagggaaaggaaggcctactgtccttttccatagccattacaaaggtgtgggaccaccttgatgccccctaggcagggtgttgctgagtatggcagctccaagcttctgagcgaaaggctaagcgaccttcaccataccagcaaagtttgaatcactccaggtatcgcaatagccctcgctgaggtcctctaactcgattccccttcatagtaggacatcatgacgacgaaggctaggtagatcccttggcagaaggattcctctttgagctctcggaaccagtagtgaggccctcaaggctggaggcgacatttcagacctagacgaaggaggtgctctccttctccagcccctcaagacggctttgtacctcaacgaagttcccctcggcaacgtcaaatttctctt

SEQ ID NO: 4184 - DNA, 948 bp, Zea Mays
tgaaattcagaatgacagtgttttgagatgaactttgagctccattttgaaggggatccagtgactttttgtgaatacacattatagcaaagatatagatggattatagcactacaacttttgctataggtcactgggtgtgttgccattttaaaaatcagagaaaaagaagcttaaacattgtctgtcagacactctaaacaagttcctcgatggtacagtgcacagattaggacgccagcctggacagctcgacgccggtaacccctccgccgtgattcacgtcgccggcgtcatgattcgcgctcgggtaagtggataacgtcgcgaggttaaaagatcgtcaccgcccgtgacctggaagccactccggctagccgtagttcatctcccctggctcaccgcccgcgggtaaagtgctcaccgccgccgtgccctcgccgttggccaccgggtgtcttaaccgcgccaccgcatcaccgcgaccccctccaactgtctatcgatcaccggagttactgccacgccataggacacgtattcaccgcgccagacttcttcctcctctccggtcgcctccgctatccgctcgaattgagcgccaccgccccggggatctataaattgaccccgcagtgagcttcaccacatcctcacgcacttagccatcgccaattgctagcagtccctcaccggagctcgagaatttccaattctccccaaatcgggtttccgccaccgtaaagttcacctcaccgcggccagccttccccaggtctgctcattcccttctcattcttgttctagcacccttccatgctggtgatgctccccgacccctttaatcgaaccgaaccgcctgagatcaccgggaacgcaacactttagccgccatgctcacggccaccgtggccagagctacgtagttggtcttagctgcaattaggt

SEQ ID NO: 4185 - DNA, 456 bp, Zea Mays
aaagaaaagggagagggcagtagtgtggactgtggaggacggtgtggtgcttcagctttcatcatgctagatgctggtgtttgccaatcttaagcctcagtctgatttctgggcagttgtgtgttcgcctctgtggcagtttgttgttgttgttgtatcggaccagattgagagttgaattgtagttcatggcatcatgatatatagaaaccatagcaacacacgtgcatctaactagttaatgtattaagcaccagtaaaagaacacaggcagttataattttcttgttatctttgtattatcctttcttgactttttgtcattttagtttccagttatggtgtttttggtctgttcagtttaattcaattccatttgtgtttcgtgtaatgcaatgcctgcttatttggtgctgtttgattcacatatttgtaacgtgaacggtaaccggttaa

SEQ ID NO: 4186 - DNA, 894 bp, Zea Mays
gacagaccaatggcgtccaaatcaatagtcctttccctgtttccacactgcccaatgaggtttgtataaaactgatccactgctgctgccttttcgcagtggttggttaggatacgatctccatcaaccagcatggccacaaaattcttcctcttacgatgccttgcatgaatatggaaaaatcttgtgttcgcatccccctctttgagccatgaaattcttgaccttaatcttgccattgttcgcttgaaagatgacagcatcaaggattgttttttgagcctgtttataagccagatctctgctggggtaagtggtctttcatcatgtgccatctccagtctatgcagcaactccttagccaaagccaactgcaaccttacatgcccaacctgcttgtcactccacccttgcagtcttcttgctgtcatctttagcttcttctccagggtctggaaagggcatctgacagcttcgactgagttccatgcagaatgcacttcctcctgaaaaccttcaagcttgggccaaaaggattcgaaatggaaccgccgttttccaggcctattgtcactgagacccaggagcagagggcagtgatccgaatcaagtgacgcaacactatgaagaagaactctggggaaggttagctcccaatccacagtacaaaacactctatcaagcttaacaaggaccgagttatcttgttggttagaccaagtgaatttgcgtcctaccagcggaatctccttgaggcccaggtcattgatcaaatccctgaaacgacccatcatggctctattaaagttggagttattcttatctgatgttttatagatgagattaaaatccccagccaccaaccaagggccagcacaggctgttctgacatct

SEQ ID NO: 4187 - DNA, 547 bp, Zea Mays
agccaatctgttgttaattttttcgataagtggttggagatcagaccttttaacattcctgtaatgaaggggcagccctagatattttccagggaggctagagtactttgcagggaacacgtccattagcgttggccataatggtgccggatatcggattgggaaaatttctgttttgtcatagttgatctttagtcctgaacacccctcgaacgcgttgagaatccctttcagcacccccaagtctgatttgtccgctcttacaaaaacacccgcatcatccgcgtagagagagcaccgaagcttagctcctctaggcaaaacctgtccaagcagtccatcctgagcggccttctcaatcatccgatgcagcgggtccatcgctaaaatgaataggaagggagaaagagggtccccttgtcgaaccccacgtctgtgcttgattgcctttgaacgttgcccatttaaaattattcttgaggaggacgatcccaggatttcagctacccaattgcgccaattctgggagaacccacaggcccttaac

SEQ ID NO: 4188 - DNA, 355 bp, Zea Mays
tgaaccctccgaccaaccttcaagaattgtatcaacttttcgagaaatatgcctgttcacaggagctccaccaaaagaaagtcgagtcacaacagaagccaaaagagactccgcaaacaagtaggacttggaccaagccactgcagcaagacccgggatcacgataaccttcaaaaaagagcaaatgagctcgacccacaccgacccatgtaggagcctccaccttctcgtgataggccttcacgtttttcgtttccagctccaatgcagcagcccgctcttaagcagcctaggcctccgtctacgacttgcccataacatccttcagcttgcccagctaatgactgaggccctc

SEQ ID NO: 4189 - DNA, 1015 bp, Zea Mays
tatcgtgggggacactgatggtgcctgcactagtcacagacgcgaactgggtggctgctgtgtgggcccatagcggcggtcgtcttctttgagtctggaaccaggatagctcgagggttgttgtgaaccaccaccgggaatcacgggaccccaatccgtctcggcgtccacccgaccctctataaaacggaagccccgcgaccctcttgcccatcccatcggcgccccgtgatcggtgttgaggcatccaaccctgagtgcaccgccatggacccagcgacatccgccatcgacaaactccgggccctcggccatactaagcctcgatggatgccaatggtgattcggccaggcacctagaatctgtacgcggaatctttgagccaaaagaaggactaaagttatgaggattactcgtcggagttcggattcgcgggcaaactgccatgtgctgcgggtagctttcctctctgccttccgtcaatggtatgtacctccctcgagttcgcaatcagcctctacacgtatagcgtcagtcggattggggattcgggcagtggggcctagcttgaggggtagctgaccatggcaccaccgcgtctatactcgcgcgccgctgtctgtgcggtctggaggtggaggacgtcgtggctagcgtcactcgctgaatgaacggttcagattagttaaaccacgtaccgcttcgaggaatggatctgggccatgggttgcatcgaacggtccctggtcaatctcgcccacttaaaaatctcacccgtagattcagatcgggcggcactgggtgcgtaccgattcacttatatggcgatctaatctggaccacccactcatgatcggatggcgcaaagtggcacgtaccccttcggccatgcatatctttcaaaagaacccctgcagattttgtgattcaacccgccgtcaagggagggcgatgcctgtgtctggggaattcttgtagtttagcccctgacctccctggatttaggtgctcagc

SEQ ID NO: 4190 - DNA, 377 bp, Zea Mays
ctgaaacgacatgactcataaaccagacacacctaacataatactcaacataagcctctgttgtcggaccagcagcatctaattggactttttaacatctatctcgaatgcatagcgcagccaagcgttccttccttctacggtcttcagtgaagcaaatatatctttatactttttctcaatgaacagatgagtggcaaacaaatggaggtcgctgccttctggtgaaccatcatcgatcacttgttgcaactgcgcactaacctcaacacgcacagggtcggtctcagtagaggtgatggacttgttagtggtccttgaacgcgactcaaaagcctccacaaggcgtttcatgtactcttccctcgaattttttt

SEQ ID NO: 4191 - DNA, 690 bp, Zea Mays
acggaagagaacttccgtacagaaaacgtccagttcgacgtcgcggaggtcaacctcccttttaacgccatcattgggaggccggcgctgtaccggttcatggccattgcccattacgggtacttggtcctcaagatgccgtccctcgctgggatcctcaccgtgcggggcgaccgcaccgccgcactagcagccgtcgagaagctacacactctggcggccgagatcactcggccggacgacggaggaggaggccccagtactagggcgccctccaaggcaccgaaggtgcagccgtctggggcagacggcggacccgcgaagaccatccaggtcggcgcggacccctcccagaccacctgcatcgcagggaacctaggagaaaaataggaactcgcgctcgtcgccttcctccaagcaaacgccgacgtcttcgcttgggagccgtcgcagatgcctgggatccccagggaggtgatcgagcaccagctaaaggtttacccggacgccaagccggtgagccagaagccacaaagatagtccgtggaacgacaggacttcatccgtgaggaggtccggaagctgttgcatgctggctttattgaagaggttcatcaccccatgtggttggccaacccagttgtcgtgccgaaggcaaacgggaagcttcatatgtgcatcgactacacc

SEQ ID NO: 4192 - DNA, 1988 bp, Zea Mays
caaatattgtgttcccaattgcaagtggctttgtggtgggctgacatttactactgattttaaggttttacctctgggtggttatgatataatcttgggtatggactggttggagtgccacagtcccatggaagttcattgggcagaaaaatggttggagtttgactataatcacagaagggtgcagttacaaggagttcagcccaaaattcagacctgccacagtttaacctgtttccaattgggatctttgatcagacaagaggcggttgagcaactcttggaattacagggagtggagagtatggatacggccactgtattgattcctgagtcgatcaagcaagtggtggaccaatatcaacatttgttcgtgaaacctaccggtcttcctcccaagagggcaattgatcatgctattgagctcttgccaggtgcccaaccttttcggctaagaccttatcgttatactccacagcagaaaaatgagatagagaagcaagtgaaggaaatgttggacagtggcgtgatacaacaaagtttcagtccttttgcatcacctattttattagtcaagaagaaagatggtgaatggcgtttatgcgtggattacagaaaactaaatgcttatacagtcaaaaaccggtatcccatgcctatttttgaggaaatagtggacgagttgcaaggagcatccatattttctaaattggatcatcggtcaggttaccatcagatacgcatcaaggaaggcgatgagtacaaaaccgcattccaaacacatcatggacattttgagtacagagttatgccttttggtttaactggagctccagccacattccaaagctttatgaacagattactggctcctttgctacgaaagtgtgtggttgtatttattgatgatgtgctggtctatagtgctactattgcagaccatgtcagacatttgaagcaagtatttgagctgctcagccaacaacaacttcatttgaaacagtcgaaatgcctgtttgctcaagagaaattggaatttctggggcacatagttagcgctgctggcataaccactgatccaaagaaagtggaagtcatccaacaatggcctataccaaagtcgaccaaagatgtacgcagttttttggggatggcaggatactataggaaatttgttgctcattttggaatcatcagcagacctctcactaccttattaaagaaagatactatatttgtgtggactgaacttgcagatcagtcattccaggcattaaaaacagctttggcacaggcgccagtgttggccattccaaattttgctaaaccatttaccatcgagactgatgccagtgggggcggagttggggctgttttgcagcaggaaggacatccagtggcctatatcagtcgagctttaggtcccaagaatttgggcctctccatctatgaaaaagaatgtttagccattctttttgctgtcgagcattggcgtccctaccttcaacatggtgaatttatcattcaaacagaccaccagagcctgactcatttggatgatcagaggttgtctacaccatggcagcagaaagctttaactaagctgcttgggttacaatataaaatccaatacaaacaaggcagcgagaaccgggttgctgatgccctgtccagaagacccaatatggatcaagatacggtcactgcacaactgaatacaacatcagtatctactattacacctgattggttgctgcaggttactcaaggttatgaccaagacccggtagcccagaaaatattaactcagctagctgttggtgggcaattggcacattatacgatcactcaaggtgttattcggttcaaaggaaggatttggctgggcagtaaccaagagatgcatcagaaggtgatgtcggcattacacgatagcgcagttggaggtcattctggatttccggttacctacagaaggattaaatctc

SEQ ID NO: 4193 - DNA, 599 bp, Zea Mays
cgggaattgttggcctcgccggctggggtgagcgtaggtgagggggagttgcgaaatctttttgagggtgaagagctgaggataatgctgtttaactatagggagatgggtatcatcccgaaagttgaaccaatgtaatgtgtggtgccctcgatgcacgtatgtaactgtaatttgtatgatgagtctgtgtgccttcgctgatccagccgtgcctgtgggggacttgtgcatttgatctagcgcgtttattatgccggtccggctgcacctgtaatcggtctttgcgcggatagtttttcgacgaagattttcgcacggatgtgccttcgattttgcgcacttgttgtgctagtccggctgcacccttgggtgacttttgcacggatagtcttttgaagaagacttcgattttgcgcacttgttgtgctagtccggctgcacccttaggcgactttagcacggatagtcttttgatgaagacttcaattttgcgcacttgttgtgctagtccggctgcacccttaggcgacttttgcacggatagtcttttgaagaagacttcgattttgcgcacttgttgtgctagtccggctgca

SEQ ID NO: 4194 - DNA, 532 bp, Zea Mays
cggaaaaacttgatattgagctgagtggaagttacctgttaccaccacgttattctgagggtgcattggtaagcaataaccttctatggcttattttttcacttgtttactttgagcactgctcatttctgcaataaaacaatatttatttttattcggttctactagttcagatttttatattgtgccttgttatctctagattaaaaagctagaagaacttggaattgggaggccatctacttatgcatctataatgaaagtgttactggtaacatgacattttacttctgaactaatttttaccgtggtactgtaaggctatttgcgatgcataaagcatagttgatagcctttcctagtgtatatttttttgtcctttttttgcctttgatgcttctcatctaggaattgttagacatatgttaggctcacacggttgggcccttttatctgacggcttaggccttttgcctcttgtatatttgctaagatgctattgtcatgttgacatttgtgtgcactatatgtc

SEQ ID NO: 4195 - DNA, 551 bp, Zea Mays
tgatttatgctgcgatggctttggacctccctaattggaccatcaaagctattgacaagataagaagaggtttcctttggaaaggaagaaaacaagccaatggtggtcactgtttagtggcgtggggtaaggttactaggcctaaagatctaggcgggctcgggatcactgatcttcggcttttgagcgtgtcgcttcgagctaggtggccttggctcaaagaaccgatcactctaagccttggtcggtcctccctgttcaggcctgtggagcggtggaagccttgatcaatgtggcagttgtgtctcaattgggtgatgggcatgacatccttttttggaaggatcggtggctgaatggtagatgcatcggcgagatggcacctgaggtccttgagcatgtccctaagcgtgtcgcttccaaaaggctggtaaaagatgctctaacaaatctgaattgggtggctgatataaggggtgcgctttcagttagggcgcttgcacaggttttggatatctgtgacttgctggagggcttagttcttcatccta

SEQ ID NO: 4196 - DNA, 939 bp, Zea Mays
ctcggccaccccgggcgtgatgtgatgtccaagctctcccgtagtacctccgtttctagttgtaggggatcttttgagcacctctttcatgcttgtcagttaggtcgccatgttcggctcccattccctacctcctcttctagggcagcaggcattttttttatctgatacactgtgatgtatggacatcccctgtaatcagcatttctggctataagtactatttactcatactcgagatttctctcattatttgcggacttttcctcttcatcagaaatcggacacttttcccaccctgtctcacttcttcgcttgggtctccactcagttcggtagcaccatccggagcatccagtgtgacaacggccgtgagttctatatcaatgtgtcccgtgatttcttcctctctcgcggcgtccacctctgtatgtcgtgtccctacacatctcctcagaatggtagggctgagcgcatgattcgcacagcgaacgatgtcacgcactccctgctctttcaggcttcccttcctcctcactactaggctaaggccctcaccactgccacctaccttctcaaccgcctgccaaccaaggcggtgcccaccccactccttacttcgctctttttggcatccacccctcatatgatcatcttcgtgtcttcgggtgcgcttgttaccctaatctcgcttccactgcccctcataaattagcgccccgctccactcgctgtgttttccttgggtactccccagaccataaggggtaccggtgtcttgacctctcttcctacagagtcctcatctcccgtcatgtcgtcttcgacgagtcggatttccccttttcctcctcttcttccactacctctctcaccgacttcgacgtgtccctcgatctcgaccccgtgtcccccactgtcgtaccacccttcccagca

SEQ ID NO: 4197 - DNA, 435 bp, Zea Mays
ggccacactctgtggcctaaattgccaccctcctcatggatgggtaggtcaaacacaaactcagaaaaaggactctacatcaataacagagcacaataatcacagagcatgtaataattcagcaaagcagaactcagatagtcataacttaccaccggaagaaaaatccaagcagattaagaatgaggagctccagcattcacaacaacatcttcagcatcatcgcaacccagttcacaacaacatatgcttgtttgtcactcgggaaggatctctcaccccattatacagataggcaggatgaactctatccttcagaggttgaatattcttgaaaacaaaatcaatgagcacaacatcagtagtcaaacctctatccttcaaaccagcgacttcagctaatagggttttggctttagcaacctcagagtccat

SEQ ID NO: 4198 - DNA, 851 bp, Zea Mays
aaatgttctgggaggtggacatctacatcaccactcatgagcgagcctaggacctcatcgggaacacaaatcctgcacccccaacgccgaagaaagacataaaccagtagcaggacaagcgctgggacaagaggcctcgggagaaagtgcatgccgctgagctgctggctacccagctccacaccgcgccatgcggcggtgtacgaacactagacgagatcctcgacttccagtgtccgtaccacaaggatatgcgccatatcctatgaaactatcgggacttcaagaactctattggccacgaccaaccattccagctgctaccgcctcccgcaccatgaggagaacctgtcaagcagggtcaaccacaacaacagggaaagggcggtggtggagccttcctgtgcattgacagggaggtcaatgttatattcggaggccacagggcctaaaagaacaaaaggcaatggaagctcaccgatcggtaggtcctggtggcaacccacaacgcctcggccccgtatcggtggtcgaaacacgccatcacatttagtcgagctaaccagtggctcaacttcggtcaccctggcatgtaccctctacttgtcgaccccatgattcaagagagccgagtcaaagaggttctggtggatggaggcagcaacatcaatgtcaccttccccagaatgctccaggctctagaaattttgactgtcgaccttactcagtcaaacactccatttctttggcatcatgccgactgaggggtgtacctgttgggacatctcttcatgccactcacctttggtgccccagacaacaatcggaccgagttcctacgcttcgaggta

SEQ ID NO: 4199 - DNA, 1142 bp, Zea Mays
ccggcccccggtcgtagctgcaacgaccagggcggtggatcacggcttctggtagccgcgatcctccttctttttcttcttttcgtcccgagggacggcacccgagccgcccgactgggcagccccggcttgggggggacgagtgccatgcacggccctcagcggctctggcgcacttgtctgctagagcaaagagcgtggggacagtttccacatcatgtgtggctagcttctccaacattttcttatcacgtaccacctgtcgaaaggccgtgatgatggaggcatcgaaaatacgaggtatagtgcctcgtaccttggtgaagcgggagataaacgtctggagggtctctccgggttcctgcctcactgcatggaggtggggctccacaccatgttgttggtaagcactggcaaagtacgcaatgaaccgtgcgcagagctcttcccaagtgtagattgaccctggggcgaggttcatgagccaagtccgggcaggtccagacaaggcgacatgaaaatacgtcgccatcacaacggtgtttcctcctgttgccgtgatggcggtgacgtacacctgcaggaactccgacgggtttgatgttccaccgtatttttctggcaggtgcggccggaacttgggcggccatgacgtcgcacaaagatggtttgtgagggcggcgcagcccacgccggccaaggggacacccatttaggaccgggtgcccattggtgtctgtggtgttgtcgcaacaaaatcttgatcgagattgcggccctcgatgttttggcagcgttcgcgcgccctttccaaagagatccgggtgtcctctcccgtacgcctgcggttgagttctgcccggaggtcgtcagtctgtgcaccccttatggagggtgagcgtacagacgccgtcgcctcgcgttggcgccgggatgaccgaggcctggacctggttgaggtagaatgcgccatgccgagtaaccagtcaacgtcgtcacgccactgcttcatggcccccggtgaagccatggagctagggggtggcgtagcaactccctggccgcagacaacgtcgtaggcgctgccctcgacggagtccaggacacctgtgctggcgtgtgctgctgcacggcgtgtacaa

SEQ ID NO: 4200 - DNA, 515 bp, Zea Mays
gttgatgctactgccgccgtccactagaacctttctaacccggctttcttggatcatagggtcaacaagcagagggtacttgtcagggtgatcaaagttaagccactaatcggctcggcagaacatgatggagtgctccaaccactaatatggcatcgggtcactatgggttgccaccaggacctactggtcgattagcttctactgcctcttgctctctagggacccatgtcccccgaagatgacattgacctcccagtcaatgcgtaggaattggccaccaccatccccttcccgaggttgaggttgttcttgtgcggcttgctcccttcatggtgggtgcgacgacagtggttggaatggttggccattgccgactgagtttttgaagtccctgaaattacgtagggtgtggcacatctccttgtggtatgagcactgggcatctagaatctgtccagtgtccgagcgttgcttggggcatgtcgcgaggtcaggtcgccgaaggccctaca

SEQ ID NO: 4201 - DNA, 685 bp, Zea Mays
aaaaattctgagactcagttaatagtagcactagattgcgggttggaatccagaaaactcaagatctctttaataaatctacctggccgaagaggtaggttttgacgaggaccgcaggatcctaaatctacggtcaggattagattgctaacgtgacaaaacggtacgcagcgcccaccgttggattgcagatctacggtccgcgttctacataatcgagatcgatgcgcacccctcggatcttgaatctacggtccgaattcaaccgagcaaaagggtatatcctatctaatcagggccgtccgtgaacgggtcaacgacataggcactgtctccttcccttagccacggccctacccctcatcggagatggctacccggcgatccgagtcctacactaagctctcgtataacacagaatgtacaggggatcaaggccgactaaaagggtccatgcatgccttgaatcgccgcgcgaaatgcagtgaccaccgcagaactctagctcggcggaaattgctacaccgacgagcaattccgcgatcaccgcacttcctctctcctaatcgacactgcgagcacttccaccgcaccctggtgatgcttctcaaccgttgctattggcccgagcggcgtcggagacaagatccgaccaacggcaccgcaatcctctcctccacttcac

SEQ ID NO: 4202 - DNA, 275 bp, Zea Mays
gttggtagttaatatacaacgccaacagcgaggagaaagcgctcgtggtggttgcatggttggttgcacatgcaagaggtaagacttttttctttggttgttaggtgacatgtgggaagaaaatcaaatttacgcgcgaacacacaaaactcgtgctttaaaggagtagagacttgctgccttgcttgctagctcggacttcgcatatagaaatcaacacatggctgattcatgtgactatactaattggccaccacttcttgcttctcacggac

SEQ ID NO: 4203 - DNA, 602 bp, Zea Mays
gccagatctaaatcctatggacgcgattagatcaatcataacacgaagcggtattcatgcgcactggtccttggatagcgaacaagcggtcaggattaacccgcaccagagaccactgtctgacccttggattcgaaatcgacgttctggattcaaaagacctgaaaggattcctatgcctcagatctaaatcggacggtgcatttcttgcacccgaagggatacgttggcttctaatcacgaccgcccattgttagatcgacggacgatgtgcatcccccatctccggctgtccatccggtggcgccgctcggcttcccccgccggaaacccgccggggttctcccatctggtgaaccaaagctccatacctcgagctaataggtgcaacacgatgccctcactaccctgaatctacaagttgagcacaggcacccgatatttatcccagaatggctaaccacagcacgcacgaaccgcacggcggcgctacacgccggcgacatgcccaggtcgttccttgggccggattcccactggttacgagcactaacgaacgagggaggcaaggcaattgcatagatggggaaaaactcaccaag

SEQ ID NO: 4204 - DNA, 493 bp, Zea Mays
caaaggacacaatgcatcttatacttgggcttccaaatgccggtggtggaaagccattaggcattgacgaagttgctgctgcaaataatttaagggctgagcttgatttatccaaataagacttcagtgttgcagccctgcaagatcgattaaggaaaggaggcgatgacgacctaagcattagatatttcttatttttaaaatgtacacatgaacatattagactatggtgaatactgtgctacatgttccgatatatatgaatcttttgccaacgagaagtgcctcgataatgtgtttgagatgatgccataaatcatcacccttccatgagtaccagcagattaattttccaaatattaaaccaacccagatctccgcacacactagtcacatatttacaatagcataaatgttctgacgtcgtaataatgcatggtttatgctcttattcttcatgtgcatatgcagtcgtaaacaccgaacaaacttt

SEQ ID NO: 4205 - DNA, 500 bp, Zea Mays
tatattatctcagatagtgagtgagctagtacgacgagactggtgcttgttattgttggtgtgtttaacttgtccgctttaatttattttcagatcatcagtaggctttggtagtttgttggggggtctatctatcagtaggaccttggtgttgtacgtttagcactattatatttctctttgatgggagaggctgcctgattgttgtgagcttaaacactgctttgtgtgtgtttgtcattcagtggctaacatacatgcaggcgagagctctagctattgcagtcatcgatgtcaaatgaatgtgtgtgagcagtgctatgatcacgaacgaagcacgcatttttatagtcagcattaaggggaacttgattatatttgttattccaatcaacaatctatcctagcagccagccacaagcgtatcagctagcaatgccagtgtatgatcgagaaaagagttaaaagctcagacttgcgttgatcgatctcgttcatcg

SEQ ID NO: 4206 - DNA, 359 bp, Zea Mays
gtcaaattacacagattataaattatggtacatgtacgaatatttttgtaatcactattttttaatattcatttacaagttgcaaattgtgtgttatgtacataaaaataatttctttaaaaaacaagacttctaaatatctccactacagagcaaaccaaaatacaacccaaatacaggaagcagtttgttgtctattcctcttcttcctctcgcttcgtgtagcctccaatctccagcgacatggcaatccctcccatcgttccatcctgcaaggctagagctcgctagtgaagatcgaagctgatgtctgggcctccccaccaccaccatacttgttgtcaacggtacctgcgcac

SEQ ID NO: 4207 - DNA, 438 bp, Zea Mays
gccgaatagccaagtgggcctgtgaactgggatctcatgacatcgaatttcgatccttttcagtgggagatctcgtcctccgccgaattctaacgggggagggacaacacaagttgtcaccctcatgggaaggaccattcatagtagcagaagtcactcggccgggatcatatcgtctcactcaaatggacggcatagaaattaggaactcctggaatatagaacacctcaggaagttttacccctagctgtatttcaaaagctatcgggacgataatgtactctgtaaaatgggaaatatgtcatcaataaaaaagggcttcaagaatactcagtttgttcatgattgaccggcattcttatttaactcggggtgaccactatgccctgctaacgaagcaatcagcttaagtcggcaacgacttaagacagtgcaac

SEQ ID NO: 4208 - DNA, 716 bp, Zea Mays
attgggttcaacttcagcacggtcacacccattggaatcaacttcaacatggacaccaccattgggatcaacctcagaaaggacctctgctggcacttcatcgcaaaccggagcagaaggaccgacatcctggtccaagcatgacagtcgccgaagccgcctcttcttcttcttcttttcctcaacaggcgtagtcggacggctaacttggtgaggatgctttgggcgggtaccctcaggctttcggatctccactgttttgttaagctcttgtccaaccgtggtagccatcggttcagcatgggtcgagtcagaagattctccagccaacatactgagtacaacatctatttctgcatcatctagacttgctcgcatctcaaagttaatctgtctctcatcattgggaagatcacgaaggggagcaaccagagcctcaatgtcctcgggagagggtcgcactctaagacctagaccaccatcactagtaagagggttggacacgaaattgaaaatgacctatgaggtggcagattccaagtagaataggcaacaggagcaccaacatttgatatctcgcccctcaagatcatgtctagtcggctcaccagatcctcagtaggaattttcttgttggtgacccgggtaaagtcagtaataccactgtacaagtaagctagatatgccctgtctttcaaagtctgaatattcttgaa

SEQ ID NO: 4209 - DNA, 791 bp, Zea Mays
tggtttgaagtttatatatgaggtggatgattattctattttaagaacctgtttgctttgtggaggattggtaattctactggcagtatttgaatggcctttatcaaacttatgatctagttccgttctgatgattgtattgtgcaattatgggcacatttggttcttcacctattcttgctgggcaaggatttgatcttctcctgctgtgtttggatgtttggctaggattgccagcatttccccttgctacctgacacccgcagagagctaaaatagctctcctggctaagcaagcttcccggggcatgtgccgataaggtgaaacaatcttgtctgggaactagctgtatatttatatcgaagggattataagtattattgcttttgcgcaaggccatgcgtgctataatctctgttagcagatcagattctctgccgtcaacttgggctccgaatcagctatatatggctacctagcccctgattgatcctgattgagtctgattgatagctataaggatagctagagatatgaggggatcccgattggctccatcactatagatagggatatgaggagatctgatttgttttgtttctataaaccacacaaatctcctccctacatatatttaacctcagctctctcatctatttatcaaatatacatcagttcatctgctttcatggtatcacgagtctaggtttcaccctgctcacttccgctgtctagcgcgcctcatggtgctgcttcaactccctctcagcgcgcctccagtgctgctccc

SEQ ID NO: 4210 - DNA, 743 bp, Zea Mays
gtctgacgtcgtccccgtcttcgcctcctcgccaacgtgttcgccgtcttcgaccactggtgccgctccaattgctcaccggcgtcgtgatctccactgcaacaccgtcgctcgcgtgaccaggaatctccatgcttcgatcatcggtaagaagtcgctctgattgttcgctatgcccttaggatggtttagcgccgggccgtgtggttgggcaccaaaatctaggtgtggttcgcgccggcatgttctccgtcgatgggcagagcaccgccgtgtcgctggattgggggcggcatcaccatcaccactaatgccgactacctccattaggctctgcatcttcttattctctgtttgcaccgattggagctcgggttggggcgacggtggctaaccgacctgcttaccattgatggagccgccgcggtagaggtcctttgctaccgcgtgctcagtacagggacgaagatgattctgggagcgtggatctgggatcgtgcggcttatattagatcaagggatgcgttgggtcttggtcgtaggatcgcgatcgggcgtccgctatttggtaccggtttgggagagattagatctaatctggaccaccagttttgaatccaacggccacgagcatgccataccccttcggcctagcatatttactcatggaaccctctggttctaagaaaataacccgccatccattggtgttgtactctgagtctacagatttttaccccgag

SEQ ID NO: 4211 - DNA, 966 bp, Zea Mays
agagcatctacaatctatagaccttgaatcggttttcgaaatacaagagacggatgacaggatagtataacccggaatctttaaattataaatacggagctaagagacaatatatatatatatacatatatagggaagaggtaatggaagccctgggcttccgttagtgggggaagtcccagccatgacgtcaaccaggtcgcggtcggcccactgtacgcgagcatgcgtcagccatgcatatgatagccacgaatcctggatgagacgtgacaggcgatatacgcatgcataaatatatgtagaaatgtgcataaatcatgcatagaagaaatcttttggaccacgaatcacgggaacgaatattgtcatgtgtgcaccgtttacgactgcataacgttgtgtaacatgatagcgtaaaccatgcaacatttaaatatccaccggtttgagataaggaaagacgtgccccacattcgcgtaaataaaggcacagttacgggaggaaacaaattctcatttacagccgctcgtccacgttcgtatctgtgatattggcggcggttaacgactgcataacgatgcgtaaataaaccgtttacgactgcataacgatgtgtaacatgatagcataaaccatgcattatataaatcttgactggtttgatataagaaaagacgtgctgcataatcgcgtaaataaagggacagttacggtttgagagcattagtagaaggaaataaattttaatttacagccgcagttcgcgggttctgctcgggcggattacagcgtaaaacgtgagctaaaacagcgtaaatgagtacgaaatttagcgtaaatcatatatctattttgtaacagcgaatggggtccaaaaattacggcgtgaaaattgatcgaactgttcgatcgtgcacgaattttggcttggtcaaatttcagcgtaaaacgtgaaccaaaca

SEQ ID NO: 4212 - DNA, 435 bp, Zea Mays
gggaagaggatctctattcatcattccaacaagcactctaatcactcccatctttctatatgtatacatatccacatccaaggtcgctccaattaccgaacctagagcccaaaatcctaggtagtgtctccaagcatggggaacccccttgatatggacccatacctcatcaagctggtaactaggatcagcatcactagcatctttccattccgacatagtgagagtcacaccatgatttttaagagtgaagtccacatccaccattctctgtaattcctcaaccgaagggaaaaccaccaagaaggattcctcactatggggcaaagcctcccaagtccagtccttagtaatgaaacgagcccgttccgtctgcactgccgcaggcgtaagtttttccccggttactttgatgagggcagtcggggctggatc

SEQ ID NO: 4213 - DNA, 444 bp, Zea Mays
gaaggggctggcccagctcgtcagccagcccacgttaccctcccctagtgtcgtgacctacatctacatggatacatcagatggagtcatggagacccccgattcccagagctgctgctcgccatctgcctagtgtgagtgctccccatccctcctcatagattgcttctctctctcaatctccagatgtgccaccacccaaaacttctccctcctgctttttcctcactgctctacaccctcagatcaaccattgctgcagtccccttccatttgactgtgatgcagcaccggagacagcagggatcgcaacaattgccctctaccctctcgttctcccttcatccctctctttcactgatttttggtcgtggcaacccgggcgcccagatttccagcacacctcatcacctagtgtgacgccttaataccgatggcttttac

SEQ ID NO: 4214 - DNA, 819 bp, Zea Mays
attacttgggtcccaaggcattcttgtagctgctcccaaaagcgtgccacaaacagtgctcctctgtcagatacaacggtttttggaataccatgcaaccgcactatttgatcaacatatatttctgcatacttctctgtcttgtgggtggtatgcactggcaagaaatgagcagtcttagtcaatctgtccacaataacccaaatggaatcatggtgccttgaggtattgggcaatcctacgataaaatccatgcaaatgtcctcctatttccaagatggtatgggaaggggttgcaaagggcctgctgccttcaagtgactagcttttatcctctggcaagtgtcacactcggatatgtacttggcaatttccctcttcattctggtccaccaatataaagatctgagatcatggtacatcttgttgctaccagggtgcatggagaatttggaaaggtgagcttcatccaatatcttctttctgagctcagggtccttgggaacaactaatcaatctccaaaccatagaattcccttgctgtcctgccggaagcacttgtatttccctgccttctgcttgatcatttccttgataacctgaacacccttatcctcaatctgtgccctgactatctgctcttgcaatgtgggctctaccgagatataacttaagtcacccgaagaaacaacttccaggttcagcttgcacaattcatcgcacagggtggtaactcttgcatccatgctcatacaattgcactgggcctttctactcaaagcatctgccacaacattggccttgcccggatggtaatgc

SEQ ID NO: 4215 - DNA, 351 bp, Zea Mays
gtcgagcgagcctaggagtttgcagtgaattagggtattgagacaaggatcacctttttctgaatgaaaaaacttgaaaacggataagaacagtactgtggcacttatgaaacaatggcatggcatagtctttaacgcaagtaacatgtgatgttccgatcttgcttgacggctcatatgctgcacaacagtcagctcgaggactggtgctaggcaggctgaaaatgtttggtacaaacaacacagctagaagagaaattggctacggtggctgtatgtcgttgccttgaacattgaattgtgctccccagaaatgtcaaagaagttggcttgctggaatctttgggggca

SEQ ID NO: 4216 - DNA, 920 bp, Zea Mays
aatgtggtcagtcagtcagtcagtcacacatgcatgcatgcactgatcatcatccacaattatatgcgcgtgtcgcaagtgtgtgttctagtggtgtcgtgccttcattctgatgttagatggttcatggttgtcaccgagatttatctatgactactcactactggaaactagaattgtcctctgagtgttgatgaatttttctatgggttttctttttggcggtcaacctgatttccattgcataaagtcgtgggaatgataaattacattggagggatgttacatctcaaagcatagagaaggaagatacatgggggtagggagagagagaaacacaagcacagaaaagggaaccgtgtgggcatctgttctgcaggcagccagagtacgctcgagtgaagtcagctccaccctgaagatcctggcatttcttctcttccagaggtgccaatcaatagcatagaagggcgagagtggtgaaattttgaccgtgcaggttcagggtggggtaggagatggaaccttttgcagtcaggtttctccaggatctgaataccgagtgttgtccaaaaggtcgttgcaaagtgacagttgaatagcatgtgtgtggttatttctggtgcagtgtggcagatcttgcagatatcaggtctgtttggtgtggcgcctccaccaccacgcctaacttgcgacggtcaaattggccgccacaactatggcggttgaagtgcggcgggctgtgacggtttaggccatgcaccaaacatgtctatcatcctccacgatgcctttctttttgaggttcactcgagtctgtagcctatccttggatgctagccaagcaaaaaatcactctcgtgggagctttgttcttctagatgaaggcagatagggggcttccttgctttgggttttga

SEQ ID NO: 4217 - DNA, 655 bp, Zea Mays
tatgttggccgctcacccgatgccatatgagctagcaaaggagttcgacagattaagtctcggatttctgaacaacactcaaggagtgacaattgagttggaacccactctagagcaagacatcaggaaaggttagaaggatgatgagaaaatcaacgagatccaacagctgatcgtagatggaaaaggcaaggatttccgtgaagatgcagaaggagtggtatggttcaaggacagactgtgtgttcccgacatcaaatcgatccgggaacttgtcggtaccctaaatcaggggtaccccttactatagtatgaagacatgggcccgtacggtgatctctagccgcacggcgaacaacacccgactcaaccacatggacgaatcaagaggcaccacgtggcgaggaaaggtgacacaccccaggatgtatcagttggaccggacctccgcaaggaggcgccggacccctgtatgcatagcccggacccccgattacggtctgggactcccaagtaagcatgccgggtcccttggatggggtccagatccctccgagtaaggtccggaccacaacgaggtcccaggacaggggataccctggcgtaagtaggggtccggtactgacacatgtccagaccttatcctgtgtgctcg

SEQ ID NO: 4218 - DNA, 506 bp, Zea Mays
tggaggccatggttgccttgacaacatccaattcaagtaatcagtgaacggtggccacaacactactgagtactcatcaatcttcgccacaaaccccctcttagcatcatatacattggtgtccaaacatggaagcatttcacccgctgaatctgagaagaaagtgatgatgtacctttgtggcatttctgcaaacaccacttgggcgtccatggaagcaaacgaaggcttggctgaaatgaccatcctggtgactgacacgggcttgacctgcttaaccagctcgcgcgtggcgccactaaggaaatttgacaaacaccttgtgggcgagatggcagggtacgcttcctctgtactcgaaggcgcggcttgtgttcgaatggaggacggagcatcacggatggcatcgcacgaggccgtggtggaggcggttgctgcagtggtacaggtcggcgaagcgattgttgtagtcgaaggtgaagtagtgggcggcggtgatgggatcg

SEQ ID NO: 4219 - DNA, 656 bp, Zea Mays
gttttttgagtctgatgattctgggggttcggttgtgtggactgaagagtcttcggatgaggacttggattattttgcggccttggatgtagctgtggtggaggcttctccgcgtgtgatggatgctgaagtttttcctggtccgagtgctgggcgcaggcggcgaagggcggtggcgaagcgtagagtgagtgaggtggagggtgggtgtcttcgtgtggatagggctggcaagcgggaattgttgtccttgccagttggggcgagtgtaggtgagggggagttgcgaagtctctttgagggtgaggagctgaggataatgatgtttaactatagggagatgggtatcatcctgaaggttgaaccaatgtaaggtgtgatgccctcgctgtatgtgtgtaactttaattggtatgatgatttgtatgatgaggctgtgtgcgtttgctgatctggcggtgcccgtgggggacttgtgcacttgatctagcgtgtttattatgtcggtccggctgcacctgcttttgagggggacttcgattttgagcacccttgttgtgctaatccttgttgcgcactttttgtgctaatccggctgcacccttaggcgacttttgcacggatagtcttttggggtagacttcgattttgcgcac

SEQ ID NO: 4220 - DNA, 382 bp, Zea Mays
cgaactaggggcggataatgcccaataatgcactgcaatggactccatgccatctgcatggttggttaattagcttaggctatctcctacctcattttctagtttattgtcagcataccatcggcttcagtacactttgaacaccaatcggcaagcgcaggaacgaatgaagctgctgttggaaggatgggccgccgcgtgcgcaggcctaatacgcgggtgacgggagccgaatggatgacttgactaatgggccgtggaccgtgtccagtatattgttgtacaaatactcgataggatgctgctaatagagttgtcgaataacagaacaatattcgtccattccttctgttcttcttcctcggacctctcctgctctctt

SEQ ID NO: 4221 - DNA, 433 bp, Zea Mays
ttgaagactttattgtctccagtacatccagaacattaaccatcctttttcttttgggggtcactgctggacctttctgggtttgtggcactccaacttctgccggatgacttaaaatttctgatatttttgtcacttcatctttcggctcttcaattttttcagccttcggcgttgtagtcagctcttcagttttctgcgcgggtgtaggttctttggcttcagtagccgaagaggcctcgccgacaaactcgggcactatggccggttcaataaagcgcggtcggtgagtaaggactttcacccttttcctcttcggcacaggcttgcttggagcagctgaagcatcatctttcccggaagttgcatcttttctctttcgcccccgtagagggtagcagtagtcagggtacacgaacccaatagcatcaaa

SEQ ID NO: 4222 - DNA, 787 bp, Zea Mays
gaaatggcgaattttgttatgattgtgcccatgggctgtcttctcttagttgtatcaaaacttctattgtttaactgaggccagtatttttaaggcatcacctaggcaatgaggcactcgagggaacaaggtgtccctgacacctagccaaaagtatgagatccaatggggtatagtcataacggaggaaaatgatagggaacaaaccaggaaggccatgcatccacctcctgactcatcaatcatccccaccaactcgagtgccacatgggtcaccttcggcggcggcgactgatctagaaggggtgaagtggttaacgatagagatctatctgagggagcagcacaacgaggagtgagtagcagcaggaaaaggagggaatgagcagagggcaggctggcacgcacgcaaacgagagcagtgtgagggagggagatgcggtgtgctgctcctgtgtgtgtgtgtgagagagagccaggtccaggcagtgtctgaatgcatgtgagcgtgtgttgggtctccatgacctatttacatgagaagggtggttctcatgtaacctgtaagctgcggagcaatataggttgtgtttgtttcagctccatgacctattatcatattatgggaatttttgggtggcaatgatttgcttgctctgttctgttctgaggctctgagcaatctgtaggcttatttgatgcattattatcatattatgggatattttggtggcaatggtttccttgttctatttccaaggttattaaaacgataaaacatttaaat

SEQ ID NO: 4223 - DNA, 351 bp, Zea Mays
ttggtatgtagtgagggtcgtaggatcaaccatcaatggcctagttttcatttatgcaaggttgcatcgggaccgaccatattacgctcaacggcccagattcgagataggcgaaggggtatgtttcgcctaatcctgatcgtcgtttgcgaatctgacggtccaagggccttcttccaccccaccgtcgagccacggcggggccgcccaccaggcggaggtggccacgtcagagtgcatgccacaagcgcgccagagccccgattaagcaagtgacgaggtgcaaaaacgctcctgaaatcatgatggactagttgagggcgtgattacctcgaatcgagatggacaggg

SEQ ID NO: 4224 - DNA, 534 bp, Zea Mays
catttttcggcccgcttttcccgtgctaaacgggctgggctcggacaggttaacgagactacgggcttagatggcccagcccggttttctaaccgggcccaaaacgggtcgggcttcaccggccccgggcggggctaggccgggctgtccgtttggccatatctagtttaggcacacctcacagtccgttgtgcaccagaaactacaatgtgcactatacaatgctccggcttggcctcggctggctctacccctatccagactatctggtatgcaacgcacagtgtattgttcactatccggcatgcccataactgtcattttaaagcatttctctcacccaggctcacacgttagtctctcaaacctcattttgtcttcctcccactcacctcgtgcgcgctctctgcctgtgcttcccagcgctgtcacatagatctgctcaccaattccatgccaccacgagatccccgccttcgccctcagcgtccccgcaatctggtgaccttggcacgccattctccttacttctcc

SEQ ID NO: 4225 - DNA, 725 bp, Zea Mays
ggtatctctgagacagcggcaggaatggtactggcgcttgcagtattagcaggagaggacgtcggatcctcctcaggttccatgctgagagacaaggaattctccctgttatcacatgttgcatgctcaccattagtagtttggttagtgaaatcaaacacgtgatcatctaactgttccttctcaagaaaaggcacaagaccagatgggagaagtgcaatttcagcacggagacgggcaccgacattggagtgaagcgtagagaaagggaaaacttcttcatcaaagatgacatctcgagaaatgtatactcgcccggattgaatatcaagacacttataacccttgtgaaggttgctataaccaaggaaggcacactgcttagaacgaagttcaagtttgtggcgattgtaaggtcggagattgggccaacatgcacaactaaaggtgcgaagagagaggtagtctggtttttgttggagtaaacgctcaaagggcgtttgattatcgatgactttgctaggcaaatgatttataagaaacgtggccgccataaaagcctcatcccagaatttcaagggcattgaggcatgagcaagaagggataacccaacctcgactatgtgtcgatgtttacgttcaatgaccccattttgttgatgagcatgaggacatgatacatgatgaatgatgccgacttgggaaaagaaactatttaatttttg

SEQ ID NO: 4226 - DNA, 771 bp, Zea Mays
gcagcggcgcttgcgtcgaagggaaatggttacatgataggggagagctggatatgcattgtcatgccctaaccgcgtcttactcttatctcagcacttttcgctggttgctcacctcctccgtcctcttgtttaatgccgcaggttcgccggattcatcgccccattccgctctgggctaaggttccaccaggtgcgcattggcttgtcaaacgagccaacactgccctatgttttattcttccactgaccacagtggtaacccgcgtcactgtttttttggatgcaaatgcgataattttaatggacattggggaccatgttcttagcaatcctattgggctagtttatgcttctgtctgttgagttcattttcctgatcgcatatcaaccgagtctaggcactaggcagggagcagcttcaggaaacgtagccctgaatctgaaactagtacggacatcaattgttggtccttccatggttgcccggatctgtttatccttcagaaaatttgcaaacaaataaacatatagtatgctacaattgctgatgcctataaaatggctagcaaccgaatcttctgtctaagttccatgtcctgccagtggctctttaaatggttttgccttgttatgatccgttggttgcgcagtgtttcatttatactatatgctgataatttctacatctctttttatagatagactatgtctaaaagagtaagtacatattagattccactgttttaataacctcttcgggaaaatgac

SEQ ID NO: 4227 - DNA, 663 bp, Zea Mays
gagagatggagcatggagttgggcggcggctggagtcgctggactctggagagtggccgggtggtagagttgagcgagggtttcgcggtagagtggccgagtggtagagtttgggctgtggcctcgtgggctgtggctcgtgggcctgtgggtttaacggatattcggataattgggtatggatattaatttttcatacccatttaaaaaatatccacggatatcaagtgctatccgtatccgtatccatgggtacagactcgtacccaaaaccgtgcccaacgggttttttatccgcgggtacgcggataaatcacatccattgccatccctagaaggaaccatggatcatctcttcatgtactgctcctttgctcaatccttcttatgttagcatatttgggtccattcgagatcttggagtctcaaatccgaacttaggcctggacctgtttggttgccacaaattatgagaatcgccaccaagaacaaaatccgagaaaatccaagtgaagcttggtaatcgtagatagtctcttgtggcccattatccaaggttaaaaaatcagtgatttttggtttgccatatagattctataggtgggaatgtgggattctgattatcctctccaaccaaactcactctaggttgtcttctatgaa

SEQ ID NO: 4228 - DNA, 477 bp, Zea Mays
cttaggttttctatttctctggactgggtgcacgatatccagacaacacagaggtctcggggtaagaattccaagacacaggcaacaatgctcgggacggtgggttagtttctgtattctgcaggggctttttaacaaaataggcatggtgaaggggtacgggataactctggccgcccgatcaaaacccgacgggtgcgattagatctatcacatcatgaagcggtacgcgatccagtccctcagatcaaagaccaagggttaggatttaaaacgcgcccgatccaatccgttcccacatcgaagatccgacggctgaaacaaacccaagccgaagcggtacgctaactctaatctacgccatacatccaaaatccgacggctcacattcacccccccttcaggaaaccagcgcacggtggtgccgcctgcctatacggcggcgaccatggtcggagatgacccgtacgacaccca

SEQ ID NO: 4229 - DNA, 654 bp, Zea Mays
ggggggagtgagcgccgagaccccacacatctccacctgtcaatgatcatgtcattgatcctggggaggggagcgagtgtcatgttgccttgcccgtccccggaccggactgttggtagaggctgtcgctgacttgatcctggttagacggttgtgtgccggcacaccatgatctcggtcatattcctcttcgggccttatttcattttcgtgtcaatgatcgcgcgaagcactgatgttgctccatgcgtcttgtcggctgttgatggcatgacgcagatcgttcggtgggtgagcgagaggtagaagatgattgaccggttgagtgagcactcaccgatagccctctatgtctagggttcacgggaggccattggctatctacgctaggacccctccaacctcgctcggcgtgttcagcgctcgagcgaagtcggggtacaggttttgggcgaggagcgggttctcccgttggagcctagcatcttgttcatcttgctcccgctcacgttcctgagcatggcgacggtcacggtggcgggagttgcgtcgttctcgatgtgttctttcatcaggggtctcccccatctctgaagcctcgtcccgagagacgggctaagccaagtcccattctccggcctcatggtgtcgttg

SEQ ID NO: 4230 - DNA, 857 bp, Zea Mays
tacacaaaacaaagatgttggccataaaattgaagtgatggtgaccaaaaaggaagtgacaatcagatagcacatacaaatgagaccgtattatattgttatacagagataaggaaaacaaaatagatcacctgaaatttcatagacagtatcgggacctttttgaagacatcccgtaggctacgtcgcacctctatattgatgccgcgaccatcacgaatcatacactttcccagagttccatttaccccaaccgccatgttgattccatttatctatttgcgtgaatgaaaatgtcatgtaagcgaaatgcaatggatataatcagaagattgatatcgcatcccattgcttacttctgcatggagaacatcaagccttacagcagaagggtcagtctctttacctccatgccaactaaactcattccttactttcaattgaccaagatcaaactgtatataactgcaggaagatatcagcatcaatgtcattttttccacaacatcattctgtgacacttaatttcaaattattaacgacagcaagactagaaaactcaaactcagtacaaacacattagtctatctaacaaccaagatatttgatatatgtgggaaaccctaacccggatcatgttggtagtggtgcgaatgatgcgttcggcccagcctttctagatgtgtaagggcacgaaagacgcaactgaatgccgtgagagagaaaggagtgagaggcagagttgtgaactcgcggccattgtcacactgaagagcacgaaacgggcgacgtagctaggtggagatctaggcaaagaagtgggtgagggtggcgaacgtgtcgaacttcaaccgaag

SEQ ID NO: 4231 - DNA, 405 bp, Zea Mays
agcaggaccagcagacggacccgcagatgtatgagcacgagagctggaaggggctttccttaggcgccctgctggattgttgggatcaatccagaaaggggtatatgattgatgtcttgtacctttatcaaatttaaactgggtcacaacctcaatcatcttcatgataaaaggagcatgaagacatcccttcaatggaaagcatgcagcatgaatgatttcctgccaaatcatatcaaagacatttatactctctgagctgctgggtttcatgaatgagagcaagaccttgctctctccaagaatgttcatctgatttcccccttttggaatgagggtcatcctgcagagggagttgatgtatcgataatacttatgcatgtttgtagactcccaatacttccc

SEQ ID NO: 4232 - DNA, 570 bp, Zea Mays
ccccgcaagttagtgagggtatatcgtgggcgcacgcgggggtgttccatcatgtctgtcagagaccgtttggtactgtatgtacgatctagacgttgtttgatgatattgcatcttgtctcggccatcatgggccaaaagcgtcgtcccgggttccttccttgcgggtccgcttggcagggacttggtcattcgccccggctcacagacttgttcggcgggggtttggtcgttcatcccgtctcgtaggtttgctcagtgaggacttggtcgttcgtcccgcctcacgggcttgctcgacggggacttggccgttcgccccgcctcgcacacttgctcggtttgcttgccctggctcgtaggtagacctgatcatgggccaccggacccgaccaacccgacccgatcccgccccaaaaaacccggcctgatccgacccgaccaatgcaatgggcgggtacaagccataattttttacccgttataattcacgggccgggtacggggacccaaaaaccgtcccaacccgaaaaaacccgacccgacacgtcaaacatggaggcacgggct

SEQ ID NO: 4233 - DNA, 311 bp, Zea Mays
cgaagttgaggacaaagcatcatcttcggccctggtatatgtcccaagcaactcgtcgctagtagcctcaatgcatttcaaccagtcatcattcggttcgttgaacttctctctatatctgatggtatattttaatcgaactaatccaccttcgctggacccagcagcagtctcctttggcatctcctagctatccacaagtggccacactctataggctatgtgctcttggattatgtctcttgtgccaatgaaagcacagacattgctgaaagccttttgacacgcttcggcatcactgtcaatcgcca

SEQ ID NO: 4234 - DNA, 414 bp, Zea Mays
ctgcggattcgcggcgtagtcggtggccgaggctgaactcgggcgaggcggagaacttgcccgagggctaagcttggggtcggacgaggcggagaggtagcgcccgaagactcgtccgctcggcttgtcgtattaggtgtcccatcggagggcgtcaggcggcgtgcgcgcactgtttggcacaggcataatcataccgctgtgttagatgtgatcgctgtcttgtccaccactgtgcttcactaccacgacgcgggttggcacacgcattaaatgcgcatgtccccttcctgttttcgagtgcccttgtcctatctacttgaggtcggctcgggcgagacggactgggctgaggtggcctcgggcgaggcggagtgagtggtgtcgacctcgggtgaggtggagccctgctcg

SEQ ID NO: 4235 - DNA, 284 bp, Zea Mays
gaggctgccaatcgcccgttcccgagcgccaaacctaaattggaccgagctacgcgtagaggaggtcaaggcgaatccgttggtgggcgcattacctcggtatgaagcggtgacggccctgcccacgcgttgaggcggctcggcggtaccccgcagactccggtgagcaattccccacacaccacggcctccttctctttcctgggggcacgagcgtcttcccaatgtctcggcgatgcactcaggaagcaaaccagggacactgcgtgggcgaggtaacgatt

SEQ ID NO: 4236 - DNA, 490 bp, Zea Mays
ggagttatcacggagcgagagtacgagctccggagtagaggtccggcatccctgtcgaacactgctcttgacaacctggtatcaacgtcgcgtcgatccttccgatccaccgccgctgcatccccacccacagcgccaccaacaacccctccaccgtcatcaccaaccttcgtcgcgtccccctcggtgcatccggccatggctaacgaagagccaagcttcgctgacgttgtcaggatgttgcagaccctgtccgccgatgtggcgggcctcaaggcgaaggcggcctcgtcgtcggaagccgacagccgtctcgacggccagcaccacaccgatcggccgcccaggttccagaagctggattttccccgatatgacgggaagacagatccgctgttgttcatcaatagttgtgaatcctattttcgccagcagcacaccatgccggaggagaaggtatggatggcctcttacaacttggagaacattg

SEQ ID NO: 4237 - DNA, 1339 bp, Zea Mays
caacaatttgatgccacccgttcgccacccttgttttggccactaagacaggtaaggctgtttttggcctcgcgtgagctacaacacatgttttcatggccgaacaaccaatttagtgtccaaccatagtacactagtgttaaaaccatagtacacatttttgtccccggaggcctgtaaggctatttttggcgtcccgcgacacatgttttcttcgtcgaacaacaatttcatgcctcccgcccgccaaacatgttttggctactggcatgggaaaggttgtttttagcatctattgagctacatcacacaaaacacttaaatcctaaaccccgagccccaaaccctaaaccatgaacccgtaaccgcgaacccttagactaaaacccgacccccaaaacacaaaatcacaaatcccaaactccaaaccctaaacattaaaccccaaacgctaaccctcaaatcgaaacccgaaatctcgaatcccaaaagcctaagctctaaacctcgagccccaaacgctaaggcctgaacattgaaccccaaaccctaatttgtgaaccctatacctcgaaccctaaatcaaagacccgaccaccaaaacacaaaactccaaaccccaaacttcaaaccctaaaacacaaccctaaaaagtaatgtaaggctgtttttggcctcgcgtgagctacaacacacgttttcatggccgaacaaccaatttagtgtccaaaccatagtacactagtgtccgaaccattgtacacgcatttggccccggaggccggtaaggctatttttggcctcccgcgacacatgttttcgtcgtcgaacaacgatttcatgcctcccgcccaaactctaaacacagagccccaaaccctaaagcccgaaccctgaaccctgaaccctaaattgtgaaccctataccccaaaccctaaaacgaaaacccgaacaccaaaacacaactccaaacccaaaaacacaacactaaacagtaaagtaaggctgtttttggcctcgcttgagctacaacacacgttttcatggccgaacaaccaatttagtgtccaaaccatagtacactagtgtcactgtaaaccctaaactccaaaccccaaactccaaaccctaaaacacaaccctaaaaagtaaagtaaggctgttttgggcctcgcgtgagctacaacacaagttttcatggccgaacaaccaatttagtgtccaaaccatagtacactagtgtccgaaccattgtacacatttttggccttggaggccggtaaggctatttttggcctcccgcgacacatgttttcatcgtcgaacaacaatttcatg

SEQ ID NO: 4238 - DNA, 625 bp, Zea Mays
aggatcaaccacaagagcaggggtctctcctgcaacatgtacaagatgatcagtcccacgtcaaatggaatgagcaaagtgctcatggtccaaaatgaagatgtaatgccaataaaacttactgcaattggtttgtgccaaagggatacacgcagcagaatctgtctgcaggccatctcctggctgacttaatgggatcaaattggggccagattgagcatcaagaacagttggcacgtcatcgatagcacgatcaaagtcttcagggggacggtctactacaaccggacgtaccacaacctgcatgagttgcaaatgggtcttcatagccgaagtaacataattatcccaatccagttgacagtcaattgggatgactcgtcttatgacatttggtggatgaccaatgttaagcactccgtcaaccgcaatgtcatcatcttcatggtaacctagcttttgtttagcctttgtaaacacatcactcaaggagggtctaccattgaatagtatcggcacgtgtcacatgtcaatgaacttggcatttccatacggatcttgttccacattgcctccatgatataagctcaaaaaattgtccatctatttgaaacacgaattaaac

SEQ ID NO: 4239 - DNA, 1033 bp, Zea Mays
gattagtgaacatgtgtgtgtgtgccgtggtgcatcgtatttattgttgcactacgtggatcaagtgtctcgagtgcatgtcgcattatggttgtattcgtgacaaggaggtgtaggttttactcgattagaagtttggttgatgtggctaggaaatttgttttggcttaagtagagaggtggtggcaacgccaaagtagccgtcgctttctctatgtttataagtcaagtctatacacgttatgcgttccctaaattacgcttcacatatagtgtattttgtgtagtgtggattgattttgagtgcatgtgtcgcaagaaaggaattaatgcgcatataggcgataaatgggcgtattatagtggtggtggcgcaagatatttgattgaggtgtgcgggtatatgccataatatggttatactcgcaacgaagaaagatgtatgtcttgtataacacaacgtttagattgttgtcgtataaccgtgtgaaggatgctcccgatggtcatgtgactaaagggtgttgtagtggcgaagcgagaagtaagtctaatacttttaaatgattagttgataatgcctatcggcttcgtcatgatttttgtcgtatggcggatcgatgccttgtcgccgtagtcttgagcaattgtcggaaatgttctggtgctttaccgatggggttgaatgtacttgtgatgtattacaatagctgtgtgtcgcgcaagtacccaaaaatggtaaaatgtggtgtatgttggtatttagaaaatagtcacgtcattaaccaactcgtgttcagcaggagtcgatcgcgttaagtgattgcgatatacatattgtgtctcggagtgctataataatgagttagcagacttgttagatggttttgggttaagttcgaggtcacgatgaattgcttgttgtagtctaaatgcgtgtggttatggtcgcaggtaaaaatttagtagtgctcatgtggtgtctaagttaaaaggcgaactagtgggtgaaaagcgcttcgatatacatata

SEQ ID NO: 4240 - DNA, 661 bp, Zea Mays
acttttctcggagagatcgttggtgtagcattgtgattgctcatcggcgacccggggcaccacgggaccaccgtgccactggagttgaagcaccaccctcccaaaatacggtaatcggccaccctccatctgtttagcgctcgcctctacgtgggatgttgtcggtgggtgtaagggtttggttaagccatgggtcaattcgtgtctctggcgtggccgcgagcgggggaaattggcaccaccgtgctccatgtcgggaggtcagtgacggttggggaggccgttgatactccagcgaacggtccagatccaaagttgatcattcaccttgagttcgatctgggatcgttggtcacaaatcaacggttgtgattatattaaggcatatcccttggatccattaaaatatggatcgtcgaagtgcaagcggacagacccgatctggcatgtgcaccattcgggcttaataaaatcttggttgttggggctcaatccgatggctgtaggcgcatactggcttgggtatctcagggatctaatcctaacctctggcacgcgatcggacggcttagaacaaccggtaccatttcctcacattttacaaaagagaccccgcgcaaaataggaatcaaaccgcagtccatcacaggtttaagaagag

SEQ ID NO: 4241 - DNA, 1326 bp, Zea Mays
ttcctctcgcgctacccaaacaccgcacgccggtcacccatgcggcggcgcactcaccgccgtgaggcaaacccgagaaggacgacgccgagcccaaatccctattgcacgaaccaagcagagcctatggcggacacgatgagggcactgagagcaggcgaaaggcaatggacgagacaggctacacgaagcggcggggatgggcggagttggaactcaggcgagcaattccgcgacccaggggaccaaattcgaagcgcggttgaatgatacgcgatcatgaagtaaggatgggcacgtggaagggcatcataccggcgatcgagggacggcgaggtaggtccacgacgcggtgcgattccgcggcggcaggaggagcacggcaaggaattgccggtgcgcagatgggcaatcctgagtcgcgtgaccaaattaagctctcccccaaaccaaggaagctatagggcaaagcttagctggcgcagccggtaggaggctgaggttcccaggcggcgaccctgactcccccacggcggcgagaaaatcttgtgtacgaggaagaggaggcgagtggattaagcagacggacgagctctttatgcatacctggcacggtcaatgcggtccgagattggtgggcgagcatcaggcatcggagctccgagttccgcgggcgcactccgccatggccggactccgttgaggcgaatccgcggagcggttgaagcaactaacaacggggccgatttgtcagcgacacatcgcaaccgcacgcgccagagggacagacaactgggccccacgcgacagtgcgcggtcatcgccgagctcggaggaatccgttgaggaaggtgggaacgggctgacttgcgggccccgcggaccagaggaagggagggaggagcgagtgcggtggagaccgacgagtagggcccacgcgtaagtgagcgcccgcggtgggacttgggctggcgcgagttagatttccttcagtgggccaaattgttagtctgggcccaaccgcgcacagttcacttctctatttttttctctatttccacatttagatttgaattcaaacttaaattcaaacttctatggctcatcactgcaacttatatttgtgaaattaggggtattaattctggatatatatttatttatatatatattgtttatattttcatagcctttatcttttgcttatttccaaccataatttcaatttagggttaactctaacttctagtaattattatcttatatttttttatccttactattttatttaatgtgcaaacatataaactccaatatgatgcattt

SEQ ID NO: 4242 - DNA, 614 bp, Zea Mays
gtgtcaccaagccggcgtcaattcctcaccgttgctgcggatccgcagagcagcgtggcccgatctccttggcaccagaattggggtgagtagcacatcatcgcattctccatccttccctcttcgcgtagtacctatcgggatagccaatgcggtcctagatcaccagggcgcggtgcaccggtgaagttccgccgcaagcacgagagcggcgccgccgtgcgcgggggttggcaggagaagtgtcacgtgcagcgtgggatgggggatcgacggccgagatatgatctccactctcccctttgcgctagcttgatctggtccgttgaatagcaatcggatggctcggtgtgttgtgaggatacttcattaaacccctaccgtagatatgaaatcggatggttacctgtggcgctctgattttgcccgcacagatctaatctgggccgtagaattagatctaggcggccaggattgctgcgtaccccttcggccctggaaccttgcataagagcccctgcgtttagtcgaattagaaccctccgcccagtgaggagttttctgagtctagagttttcttacgccagaaccccctgacttttccagaaattggc

SEQ ID NO: 4243 - DNA, 654 bp, Zea Mays
agacgtctccttttctttttcttccccttagcaggagaagttggttgagtggctcggcaaggacgcttcggtcgaacactatcagacctctaaatatccaaagctttgccagcctctgggatgggtgctacagccagagtttcagtaggggctgcatcagaggaatcttcagccaacatatccagcatggcacttatctctgcatcacttgaattcaaaggtacctcgaaatgaacctgcctctcgtcgtcagggatttcaccaagtgaggcaaccaaagcactaacctcttcgggagagggtcgcactctaaggcccaaaccgctatcaccagcacgaggatttgacacaaaactggtaaaagccttggaaggaggcagattccaggctgagtatgcaacaggagcaccgatgttcgacaccttgcctctgagtatcatctcgagccggatgaccaaatccacagcaggaattcttctgttggtgacccgggtcgaatcaacgaggcctcgatacagataagctgggtatgctctgtcttttagtggctgaatgttcttgaaaatgaaatcggcgaccacagcttctgcaatcagacccctctcttttaacaatccaacctcagcaagcagagtccctgcctcagccacctcc

SEQ ID NO: 4244 - DNA, 565 bp, Zea Mays
ggcacaatggacaacatgaagtgttctcggcgatctaaggggttctagcctaattggtcgggtcgagaagcatcagaggcatgtaagggtgctgaaacaagagagcagagtacgagattggacctggagtggactggccacggtgagagattgttcaaggcagcggaaaactgatttgggggaactgagcaattcggggtttctagtgaataattagaggcatgggtgggtgtgttgagcgcaaaattacatagcggagccgagggtgtgctcaatttatagggcccttgagcggtggcctgtgaatttgagctcacgtggtggcggtcggagagaaggaggtgcactggcgcaagcgattggtggcatttaccgtggcaagctcatcggcgatcaccggatgggctgatatgactcactgcggtgtggttaaagcaccgaggcacgtggcgcaaggttgcagggtggctaactccggcgagcctatccaaatcggttgtgactcaggtgggtacggcagccggagtagaatagtggcaggagtccatccacggggtgatatttc

SEQ ID NO: 4245 - DNA, 508 bp, Zea Mays
ctcttgtggtcagtataaatattacaatgagcccccattaaataatgtctccatattttcagagcatgaactaccgctgttaactccagatcatgtgtgggatattttttctcgtgaggcctgagtgctcttgatgcgtaggcaataactcggttgtcttgcatcaaaacacatcctagtccagtgcctgaagcatcacaatacacatcaaatgatttggtgttgtcaggctgtgcgagcacgggtgctgttgtcagatgtcgtctcaaggtgtgaaaggcatcttcacatttctgactccaatcaaacttcacccctttcttcaataactcagtcatgggtttagcaattctggagaaatacagaatgaatcaccgatagtatcctgccaaccccagaaaactccatatctgccgcgcgatggtaggaggcttccaatccatcacttcttgtactttctcaggatcaactgctatcccgtcctgtgaaatggtgtgacctaagaact

SEQ ID NO: 4246 - DNA, 545 bp, Zea Mays
gcgaattacaggtagctgtggaggtgaatgaaagagttcatatcgatctaatggtgagccagtctttttggtaggcgacttgagagatatcatatcttacatatcgtttgagtctatcatcttctattgcgagtatgcctactcttcgagggttcggttgcttttcctccgagtaggtcactacctggtcacgtctaagatgtgtcttagagtctcgccattcttctgcgacaaacacacatggataatgttcttgtgtcgtattcttcgagcttgtttccctcttggcatgttgtcttgtttcgcctgcatgcgtcccgataatacgcactgttgggtgacttaccgcgggcctattaggctacccatgcatggaacatatctgtgttgcaatgacccatggtatatccttctcccatagccgtcgctagatccacgacggaagtcgaaaactatttctcaccggcgtcgacgtcctttgacataggatctatcgaatggccttggtacggccgtcgcgatgcagaatggcgagttactggcga

SEQ ID NO: 4247 - DNA, 487 bp, Zea Mays
ggcacgtttccttgaccccttacacattggtttataaggtattaaggttaatggccatcctaggtgtttccaacttgtaagcggtggactagaacagctatttactgatgtacccttttacatgttcaatatcaaaattgaaagcatttttatcacggtgtgcattttatgttgtgcagactgcaaaggcccacagtttttcagatgttgttcaaattaaattgaaatttactttcaaaaaaatgaacttaacattcccacacctttcagccctggcatgtatctgcgtttactgatcgagttactgctgctgttgttgtgtgtgttttcctgctttctttttgtattggtgttttcttctgcctattcaaggaaaaaaacactactatgcagtattgctctgaaatggggccatgacttgggaaatcgtctatgatttgtatcttaacgagttatgaactgaaaaagaagagtacacgtaatctcc

SEQ ID NO: 4248 - DNA, 556 bp, Zea Mays
atttgtaatacctaaatcgtgcaccgtaggttagagggagaatctcggccatggcgccgccgcgctaggtttcgcaccgccggtgtgttagtcggggtagggtgggtgtgtgttcctccgtccgattttgcttgggcggtctggattagatgggcagtgctgagtaaatcggatcgttgatctcttgcgcaacgactgagattagatagttcccatccgttcgcacgattgtgcagataccgttgatccacgatccctcggttcatattagttctagtttcattaaacagtggccatcggatcccgatccagtggctagtaatgcataccggttcggggatgatcgatctaatctgagccctcagtttctgatcgggcggctcagtttcgcccgtaccccttcactttaccagtttgcagaagagatcctagaaaacctaggaatcaacccgccgtccaatgctgcagccctctgtgtctgtggaatcttgcgccaggccccctgacctatccagaaattgaggcccagtccagaaaggattaaaaatagagaaat

SEQ ID NO: 4249 - DNA, 434 bp, Zea Mays
caacgataacacatcaaaccttcgtaaccagcgcaacagacgcagttgtggcttggtagttgggtacacgataagtacgcgcaacaggcacaacaggcgcaacaagcgcagctgtgactcaatagctgcgacacacatgcaatgccttcagggcgcacgaaaaatgtgtgactcggcgatggcggtccgactcaacgggagcgatccgattaagcgagagagcgacatagcaatcacatgacgcagccaagttcaaacgacacaaatattgcgtcgtgttgccagggcgcagtcaatattcagctaatgtcataactcagccgattaccaacgcagcctgatcggcgtgtctgagtacccactatacaatttaatcgttcaccgtgagtctgaaagctcaacgcaacacaaatatttagaacgatataaaaata

SEQ ID NO: 4250 - DNA, 830 bp, Zea Mays
cgcgggttgcaccaagggccaggaaggaaaactcgttcacgcgaagtgttcgagcgtgacctatccttcgctgggagggagtttcgtcgccaagccttaaccaacgccggaacctctggtgagagttttcctagccgcttctacattgttcatggcgtgtagtacttcgtaagctatgattctggggtctggtttgtccggggtgtcgtgcgctagtgggggggcatcgccgcagtacagcctcacttgtcgcgctgcctcgcgttgccgtgggctagctcgtcaccgcgtgtgcgcgtccctgtcgttgtcgttcgtctggaggtggaagaaggtgtctctggccgttggatctgtttaggacgggtaggattaggccatggggcgaggtcgtgtgggtcgtagatctcggtgtgtgtggctgtgatttaatcattcgtaccgattggggggcgccttgatttgtgtcgttggatgatgatcggtcgatcgggggacagtcgcagtcatctgatgtctccgccgttgatctcggatcgggcgaacacctgtgagtacctcttccggtggcttggatctaatccctgtcgtccatcttcaatcgtgcggtccagtgttcaccgtacccttttcgtcgtgttcttttgctaaagggcccctactgttttactaaattaacccgctctacagtagttctgaagtaattatcgtttggtccttttctttatggtttgacccctaggttttccaaaaataggagtcgtagtacatcgttgtctgttttatataaattaaactctaaaaaagatttatagcataaaataaatcca

SEQ ID NO: 4251 - DNA, 569 bp, Zea Mays
ccgccgtctctataagtctggtcgcccttttggcgaggaagactcttgttagccgtcgttcctactcatgttcccggcacaccacggacgggatccgacctcgggtgttgctgctgcacctgagagcctcgccggtgagggagagagagagattcgcagtccgccgttgccgtgttgcttgcgccgggctggtggggcggtgctcggccagagttatgcgctgggcgtctgggagttttccatcgcggactcgtcgtcgggaggactgggctccctcgtcgtgtgttgaagaccgaactggacgacgacggtgcgaggctgctcgttcttgtgcaaagccacggtaagccatccaccatgacgttcacgctactacccgcttcgcgtagcatctgttagcattatcgttcggtcaccaggggccggggacctgcgcgcgccggcgacccaccaccatggtgtgtgtcctggtttccgcagttggagtgacagagaaaggagacacgcgcgcgccgttggatgcgtcgtgggcgatgaagatttgacctgggtaacgttttacccgcggc

SEQ ID NO: 4252 - DNA, 559 bp, Zea Mays
aaaatttcgatgttgcgaaagcaaaacaagaaataagtgaaatggaaacaacaagggtgcagaaaaatattgaagaacttcgggattccaaaagaaaaatgctatgaagtatccatgaattgtgcaaagaaacttaaagatagctttgcaaaggtgggtgcatactcatcggagcaaagatttatccgaggcgatcccgaaggagttattcaatggattggcgaagaggtcgaagcttttgaagaaatactcagtgatcatggagatttttgtgccttcgccggtgcccgaggggttgcagcagttttggagaaaactggttgtgaacatgttaatgctgcagcccaggcagaagccatcttctctgcagacgatacgaaggaaccttcaaccgaagctactttggtgggcgggaagttctatgtcgatatctggatgaagggcgaccgtgagatggccgatgaagctataaaaaagagtgaaaaagaatctcacgatgcacgagtggaggcaaaggaggctgaagaagctgctgaacgcgcgttgattataggtatcc

SEQ ID NO: 4253 - DNA, 692 bp, Zea Mays
atttagagctatccccaaccgagttgaatattccttttaatcgatgcacacagcgggtggcgaaatccgagcacttattccgaaggtctttcagtgattcctgcagcttcgtactcttctcagcttcgacttcagattttgcttgcagttcttttctttcttgttcgaagcactctgatttttcctttaaagttgttcaagcattgagaagttcctcgcttaatttagtattttcagcttgtgcttccacaagggaacctttggctgcttgtagcaggaaatctttcttttcgagagaagcttcaaaatcttgttctccaagccttcgattattatttcattcttcttatcttcgaaatcctactgcactcttagcgccttacttagcagcatgctctgcgaaaacaagttaaggttagaacattttaatccatcacaacgataacaagaatctagacaaagatttcaccttgaaattggagtaaaataggctgtcgatgatgtgttgccgtcggtaaccacgaatgtccgactccagcttcgggaaaccaacactcctagacagagtgccgattattttcgccccggcgcggtcgcgaatacatcccaaaatttcttcgttaaccccgccaaagagcataaatcccggctaacagccgcaagatatcccatattctttcagctcctctttg

SEQ ID NO: 4254 - DNA, 785 bp, Zea Mays
ctgtcaagaccatccggctctgcgcagattccccccagaccactcgtattgcgggtgatctggaggaaaaataggaactcgcgctcatcgccttcctccaggcaaatgtcgacgtgttcgcatgggagccatcacagatgcctgggatccccagggaggtgatcgagcaccatctgaagatccaccctgacgccaaaccggtgagtcagaagcctcggagacagtccgttgagaggcaagacttcatccgaaaggaggtccagaagctgccggacgccggcttcatcgaagaggttcatcacccagtgtggctggccaatccagtcatcgttccaaaggcaaacgggaagcttcggatgtgcatcgactatactagccttaataaagcttgtcacaaggacccgtatccacttccacgtatagatcaaatcgtggattctacctccgggtgcgacctcttgtccttcttagatgcttactctagtttccatcaaatccagatgtctagggaagataggaagcatatcgcttttgtaacagtggatgggctttactgctatgtcgtaatgccttgcggcctgaaaaacgccttgccgacatttgtgcgggcgatgagtaagactttcgaggacctgattagggacagagtagaggtatacatcgatgacatcgtggtcaagactaagagagggtcgaccctagtggaagacttaaccctggtcttcgacaagctgcgggcaacacgcacgaagctgaacctggacaagtgcgtctttggtgtctcc

SEQ ID NO: 4255 - DNA, 636 bp, Zea Mays
cgctgcccgggatgaccccaacccggcatcgggcacatcagcacaaacatccatcgcgccaccatctgccggctctgacaacaaatcttctagaaccatgtcttcaagagtctgatcgaagttcgtcagagataattcttgtagaccaatgagggcagacaaagcaggagaaaggaacaccgctactttccccactagctatgtaacgccggctgttcttccgaatcagagggatttcatcctcttcttcatcatcttcatcaacaacacggacagtacacccattggggtcagcttcagcaggatcacacccattaggatccacatcagtcgggtcacacccattggggccagcttcagcaaattcaggcactagcacttcctcagcagcaggaacagaaggatcggcatcctgatccaagctagacactcgacgaagacgtctcttcttctttttcttcccctcagcaggagaagagggctgattgtctcggcaggaatgcttcgggcgaacactgtcagatctctgagcatccaaagctttgccggcctcagggatgagcgccaccaccagtgtttcagcaggagcggcatcagaagaatcctcagctaacatatccagcatggcacttatct

SEQ ID NO: 4256 - DNA, 608 bp, Zea Mays
gaggtggagaagttgcccgagggacgaacctgacgtcaggcgaggtggataattcacccgaaggctagacccagggtcgggcgaggcggagaggttgcacccgcgggccgaatcctgctttgagcgaggcagagagattacgcttgaaggccagtctgctcggcttgtcgtattaggcgtcccatcggagggtggcaggtggcgtgcgcacattgtagtgtagatgtaatcatgctgttgcgccagacgtgattgccatcttgtcaatcaatgtgttctactgccacatcgtgggttggcacacacattaaatgtgcatgttcccttcctgttttcgggtgcccctgtcctatctgcctgaggctagctcgagtgagacgggcggtgtgactacgacctcgggcgaggcggagtcctacccgaggtaggagactctcgaggagatgtctcggtttttgtgggtagctcggctgtcacccctcgggagtttcgtccttatctctctaagtgcgtctgttagggggataattcgggtatccctaattattacccccgacaaagaatttccattttccctagcaggtttttaatggcttcttgagagctag

SEQ ID NO: 4257 - DNA, 1082 bp, Zea Mays
cagccttgcactgtgttcgttttgaacatgtgttacatatccttggatttctagctaccatttcagcattctttccttccattgaacaattcaatcatttacaattctttcgctccctatatttcttcaacggaaatccaacctcgtatgcatattgactataaaaattatacgcctcgtccacgttactaaatgtcatatcgactttaggtatcaatcttatatcaatattgtccggctgcgcatagaaatttaacatttacgattcaatagcgactaaatctaatgtaatatagatacaacattacaaaaagtatgtaagaaaataatagtatcataattgggagaacttacatggctttgaagaatatgaggtgtgtcctgttcatgcgccccaatatgtctcatggggatgtgcttatctgtgccgaccatgtctgtcgattttgtgtgctcatcaatatgtccaggtgccctcaatgccgcgggggagtaacagatacaccctctgtgtaaccggtgatcgcagacgctacaggatgcatgtccattgaaatagacgtacatgttgatctatgcacaggcgctacaggttgcatgtcatcgccagcaccggtgctggacattttctcgccgttaatcgtcgcccggtgctctcccttccgccgccgttaaccgccgccaatatcacagatacgaacgtggatgagcggctgtaaattagaatttatttcctcctgtaactgtgcctttatttacgtgaacgtggagcacgtctttccttatcttagaccggtggagatttatataatgcatggtttatactatcatgttacacaacgttatgcagtcgtaaacggtgtgcacatggtaatattcgttcccgtgattcgtggcacaaaagattccttctatgcatgatttatgcacattaatacatatatttatgcgtgcgtatatcgcctgtcgtgtatcattcgggattcgtggctatcatatgcatagctgacgcaagctcgcgtacagtgggccgaccgcgacctggttggcgtcctggttggggcttcccccactaacggaag

SEQ ID NO: 4258 - DNA, 638 bp, Zea Mays
ggataatccaaaggctaatcctcagaaccccaaatcctagaagaataaatcaagcacaatggaatgcaacgctcgaacagaataactaactgcaaaagtcctactcgaacaaatcaaagcaaccctttcgacgaagcaacagagtgaacgaatcaaaacaagtaattcgatgaagcaactacattagctaaccaatcgaagcaataatccgacgaagcagcagctcgacgacgaatttgggtttggaggaggtcgggatatggcaggacgggtagtaccagtcaggcagtaaccgacgcggacgcgcaggaggaaggggcggaggtagaagatgtggaacccatggtcgtcgagctgctgcttcgtcctgcgccccaaatcagcagtacgtcgtcggtctccttgatccaccattctacaacagaaattgtaggggaatggatgtgctgattcaactggtcatagaatttttgtgcagatctcagcatataagtgcatgatctatggcaacgctactgctattctgctacctgaacctgtcgtactgctactcttctactctcttgtgagcgacaaccaaaggaagctcgttgctactactctactacctaaaccagtcgtgagcatcacattacgca

SEQ ID NO: 4259 - DNA, 663 bp, Zea Mays
tgtgcaaaaaaagcatggcaatatacatggatcataattcttaatagttggctgcaagagatagactcattactcccacatcaggaaccctagcgaggtacatcagcgtgtgcttaatggcacatcgcttgtccttgcgtagcctagtgaggaaggtgatggggagtactcggaggccaccacatgcgcagatcttagggacatggaggagggtgacgatgtggagcaaagggaggagaaggagcacaacacgcgtgagagggaagcgaggcatggcaacaacacgcggacgagagcgatggtggcgaaggcatcaacgagaacctagtggaggatgcgagaggggaagacgtctcctcatatgaggaagctggtgtgggcgagggggcagcatgtggggctatgggatggagtgatggcagcggcacagggacatgagtgttggtggcggaggcatcgatggctgctgacggaggatctggatggggaggtcatggggaggcgatgcagtgagtgaaaaaatggtggccgactgtggcctcgcgaggataggagagggtagggatggaggttttcacgagaaagtcggagaatggacggttgcacaaggccgatcaagtcgcacgaacactttcgttttttctgttgacatggatcgtccag

SEQ ID NO: 4260 - DNA, 783 bp, Zea Mays
gtttgactgctgaccacaatatgggatcaagttcaatgccctgtggtgtttcactcgacaacagagacagaggtatggctggggtacaaagtgaagggtccagtgatctcagctctgctggaagtatcaaaggtttggactgttgtgtgactatctgcaagggcagacttatctgcttgcccttgcctaaataaatcagtccaggttcaaagttttggctgtgtttgtgtgccggcgtgggtcaagggagctaagccacgtgtgtagccatgaggtgttggcgcctatagtggtatggataggctttgggcttcaaatatctgagcctagtgaagtatacaacttgtcccctaattgttactaggctgcctgcctgtttccctgtcaagagcttctgctgtttgatctatggatgccctacggtgcttcatctgattatataaattggagtgaacatgcagtgcatagttaaggtctagaggtctcactctcccctgaaaatatcaagtcgagctgtcagtttgggggaaaggaaatatctttatctctctgttgttctccaatttgtgcacacactgagataagtttggggtggacaacaaagggtctcgagctccagttcctgcagcagaaaatatcaactttggatccactagtgcctgtattcagagttcttatctgacccttttccctgtctatgttactagactaagttcagtgtctagggggctgattggttgcatgtgtgcgctcgtgcagggcccattagatacaagtttttga

SEQ ID NO: 4261 - DNA, 607 bp, Zea Mays
gtctgtagaaatatcccagattcagcccccctcgccgctagtgaccttgcactcggattcacgccggcgccacgattcatgcccagttaaacgcagataacgatccccgggtgaaaagatctcgtcgtggatgaacttggagcacagtagtcgctctgtcgctcatctacttgccggcgacgtggccgcgcgaccatcaccgtcgtgccaccgttcctcgcggttatgccacgacgtcagccatattaccacatcgcaattgatcccaatacacagcccatctatcgcctaaggccttgccacggtaacagccacggtcaccgcgccagtgactcagtccctctctccggccgccgcgcatcttctcaaaattagccgccaccgctaatggcacctataaattttcgccccactgagctccgctaagtaatcacacagccaacgcacccgcccatgccttagattgtccatcagagcgctccaattttgaagttcccccaaatcagttagaactccactgtgagtgagctcgccgtggccagctctctgtaggtccattcacgccctccttgctctcgtttcaatacccctgtatgctatagatgct

SEQ ID NO: 4262 - DNA, 595 bp, Zea Mays
ggctgttgaaggagtttgctgatattttcacagttcctactcaattgccacctgctagacagtttgatcatcacattccactggttccaggagcggtgcgccggtgccagttaattctaaaccctatagatactcaccttttcacaaggatgaaatagagcgtcaggtctgcattattgcaagctggattgatcattcctagttctagtccctttgcctctccagttcttttagtgaaaaagaaggatgggacatggcggttttgtgttgattacagacgactgaatgatctcactattaagaacatgtttcctatgccattggtggaagagattttggaggagttggtgggtacaatttttcacaagcttggacttgacaactggataccaccaaatcaggatggcagagtctgagcctctgaggaatataaaactgcttttaaaactcatcaagggcattatcaattccgtgttatgccttttggacttacaaatgccccggctacattccaatgtgcaatgaactcgattttggccccttttctcaggaaatttgccatggtttttattgatgatattctcatttatagtga

SEQ ID NO: 4263 - DNA, 705 bp, Zea Mays
ggcgtcttgagtggtttattatggaaaaccatggcaagtccctccccctcggtcgggaagacagccagatgtgcgcactccaagttggattgagtctcctactgccctagaagtaacagaggctaaggttctgcttgctgaagtctgtctgttgaaggaaagaggtctgaccgccgaagctgtggttgctgattttgtttttaagaacatccagcccctgaaggacagagcatacccggcttacttgtacagcggtgttaccgactccactcgggttactaataggacaattcctgctaaggatttggtgagccggctagacatgatcttgagaggcaaagtatcaaatgttggtgctcctgttgcctactctgcttggaatctgcctcctcctaagtcttttttcaatttcgtgtctaatcctcctgctggtgatagtggtctgggtcttagagtgcgaccctctcccgaagatattgaggccttggttgcttctctttatgatcttcccaatgatgagaggcaagttcattttgaaatgccagcgagtccagatgatgcagagatgaatgttgtgctcgatatgttggctggagaatcttctaacttggcccctgctgaaacaatggctgatgtaattataccagagcttgacagaatattggacacccgaaagcctgagggtactcgcccaaagcgtctttg

SEQ ID NO: 4264 - DNA, 480 bp, Zea Mays
tagggtcggactgtccaacaaaatacgctggacagtttgagatgactcgtggacggtccaattgtgtctagagccggtcgtgtgcctggctgcagcggttgtgatggtgacatgaatgtgtgcttcggcataccatacgatggctaggccaagggagacccatttgtagctgatgtgtttggcgtgagtgattccatattaggttcacatgaaggaaaactaggggcagtaggtttctcatatgaaagcacacaatttttaatagattcatctacgtattattttaacagttcccctcgttgttccatgaaagcctcaaaagatggatatggggtacttacattgggagcctgaggccgaggtagaagagatgtcatatcaatctccccttgatggttgattttctggtggcaatccactgtgaagtatgataggtacttttctgtcgccttttcacgtcgtaccttgagttgtcgccgc

SEQ ID NO: 4265 - DNA, 476 bp, Zea Mays
gttgaggaatgggtccaagttttctacgcctcagtctggatagaccctgatcaccagcggatgagattccggtttgagcgagaggttgttaccattcatgccagccagattcgacagttgtttggatttcccgagtcatcgactcgtcttcacagcttatgctatggcacctctgaccctcctcgtcacgctcacggcggtgtcgctccgggtacagctcacgtcgcggctctgttccgaccgcccttctcagatgggtcgcgacgctctctggcagatttcaccacagcagcaaagtttctatttcagcttatgagatggactcttctgccgcggatggggtacagggaggctaccacacatatccagctctggctccttggtgccctggtctcacactcagagtttgacgttgtggatttccttatttgtgagatcgaggacaccgttctggatggtctgcgtgctcgtcgaca

SEQ ID NO: 4266 - DNA, 527 bp, Zea Mays
gccacctcccgcccctcgtcgctattatggcccctactgcgcgattgtcagtatgtttgcgcccttgtattttgtatgcatcgggtgattcgagtgtcgccctcaagatagtcattgggttcgtattgcgaaaaccgagggtctcgccggagccctccaccgcggaatgccggcggcgccaccctagttcggccagcaggggcgtagggggttaatggcgacttctgggctgtccgatcgattttgggcgttcaggattagaacggcgtaccctttcagtcaaaagggatcgcggccgtctgattcggatttggcgctcgggactcaatccggccgttttaaattcagagcgtccatctcggatcgggtggccgggatttgataccggttcatcgcctgcggaattagatctgtgccatccatgtgtgatcggatggccaggattcaaggaaaccccttcggccagcacatcttgcgtaagaaatcctgtctttataagaaataaacccgtagtccacagattctat

SEQ ID NO: 4267 - DNA, 1057 bp, Zea Mays
ccagcttgcggtgccgacaggcgggcccgcccagccagcctctcatgtgtgcgggctagttgactgcaaacctggcatgtgccactgccgcttgaccccacatgtcaggtccttccgccccgtatgttagctggttgcttgccgtaaatgtcgcgccgtcgcgaccatgtcctcgtgcggactcgcgcatgccctggctacaaaggcgggcgtctctggtatctccgcggacctaattcccttgcctccgaaccgagccaacccctccaccaaaacactagaagccgacgggtgagctgtgagtgaaggagaggcgccaccagagaccggcgtcttcgccctcgttccacccgctaggatcactccgggaagaccgttgtagctcggcggcgttgtgggaaaggactctgcgacgacacgggtccggtgggggacaaaattgctcgtcggcatcaaggtttcgccgtggggcaccataagtggccttgcagcctcatcgtcatgcaattcacaggtgcgagtgctctaccggattcggtatgtccttaattacatatcgcacccaacggtagaaacttcagtgtacaggagggtgaatcgatgcgcgtcggcggcatctccgccgcgccgcgggcggcgccaccatcgtcaggctcatttggggggaagatgcaccttggccgttgatcagttcatggacggtcgtgattagattgcgcataacgattcggccaggtgcacgatgaccgtccggtcgggatcggatggtgggtactcgcattaggactcaataaatcttgagcgtcagattgggatccgaggaaccgcgctacataccgcttcatgggcggccagatctaatctggtgcgcacatcttagatcggacagccgaaagtgttgcgtacctcttcgcgtgtcagttttgcacatgagtccctatgttattttagaataaacccgccatccacaggaactattcactatgtcatagaaatcttaccccgagacccctgctcttccctgtattagtgtgcccagtccagatatttataaacc

SEQ ID NO: 4268 - DNA, 732 bp, Zea Mays
tttgagtaccactggtctacacgggttacagatgagcagtgggcggtggagggtgggttctcttgttgatctactggtggcctagttgctattagaaggctataagctatgaggtggtgatgggatgggatgagatgacatgacatgagatcgtaggggtacccactcatccttatatagatgacccgagggttacccctttacaggtctttgtgactatctaactctatttgaatctatccttttaacaaggcatgcattccagcttatccgaagttcagttgcccttcatatgagttatcttcgagtatctagctctttgggtatgttcaacctcactgcccaaggtatcagcactccttttgcgcataactcagtcgtcctgtattcgtctccctatgtcgagctcatctagcctatttgcggcccgagggcatgccttgctaggcaagtcatcgggaggcccatcaagcgacccatggagcgtttctgcgctcctactcgagatcggcttcaagcgaatcgcgactgcatctcccgcctgagcttggcctctggcgagtcggaatagcgtctcccgcccaaagttggcctcgagcaagttggaactgcatctcccgtccgaggttggcctcaggcgaatcgtgattgcgtctcccgcctagagctggcatcgggtgagtcgaaacaatgtctcccatccgagctggcctcgggtgagtcagaactgca

SEQ ID NO: 4269 - DNA, 353 bp, Zea Mays
gtagacgccaaaagatggagtaagacaaacaggagtgctcatctatccgatgttgtatgtaattattgtatgtgtgatctgtggactcagaagaacatacactgttggacgatcgagactcgtgaattggcctcatcagccctcatataatcttatggcagcacacagcaaacatccatccggtcgacgccatatgcgctttcgattggtttatactgtctcgctgccaagattccagataagatcgaaagagagaggtgtgtgcccagcgttgcataccgacgtggctacacacttcgccgtccgcaacttccccaagctatacttaactttccagccgcctgcctcgctcg

SEQ ID NO: 4270 - DNA, 349 bp, Zea Mays
agacataggaacataaactcatatttcatgcaaagagtaggtggaaggttgtacggtatggcaatgacaggccaacatgaatacgacatagcggtcatattgaacagcgtgaaaccatcagttgccaagccgatacgaacgtttcttgcattgctggcaaaatctggatcaaatttgtcaagagccttccatgcatcaccatctgacgggtgcaccattaacccatcttgtctgtccgtacaatctttatgccacctcatgtgcatagcggtcttcctcaagagaaacaaacgtttcactctaggagtgagaggcatgtaccgaagctgtttatgtgcaacctttgtca

SEQ ID NO: 4271 - DNA, 561 bp, Zea Mays
gttctgaagagtatgacgcatatccttgtggtacgggcactgggcgtcgaggatgtcgtccaatgttcgttcgcctccacggggtgcccctcgggcacgagagacgggtggtccagcggcatgaacttcttcgcggggcctcttctcccagcgcttgtcggtttgctggtttgtgtcacgccgaggtgcggacggagccggttttgttcctccgatgaggtcttaggcatgttcatcaacggtgatgtagaggtccacctccctgaacagttgtttagaagtggtcggcgctttttgtagtatggctcggacgaagaccgagtcattggatcctcggtagaagtcctcgattactgctgcttctgcaacttcgggaatacggtttctcatggtctgaaatcttttgaggtacgaccgaagagtctcatcccctcagcgcctgatggatttgaggacccatggctacgccggcttgttggagagagattggaagttggtgataaaacgccgactgaagtcgctccagtcgtcgatgcagtgtcggggtaggtgtcgtagcca

SEQ ID NO: 4272 - DNA, 316 bp, Zea Mays
ggaggcggagtgcggctgcaagctgcgcgtgctgcgcacttacaacggcggcgaattcacgacatctgagtttgtgtcgtactgcgtggatgagggcgttcaacgccactacgcgccgcacagcccgcaacagaacgacgtcgtcgagcggcgcaactagacggttgtggggatggcttgggctctcctcaagcagaggggaatgccagctgtcttctagggagaggcggtggtgacaacggtctacatcctcaatcgctcgcccaccaaggcactcaacgagatgacaccatacgaggcttggcatgggtgtaag

SEQ ID NO: 4273 - DNA, 336 bp, Zea Mays
cgccgactgtttttctgaattaaggggatttcctactcttcttcctcatcctcgtcaacaatacgaacaacacactcattggggtcagctctggctggattgcacccattgggatcagcatcatcaaggtcacacccattgggatcagctcgagcaggatcacatccagtgggttcagcatcatcgaggtcacacccattggggtcagcgtcagcagggtcacacccattgggatcagctccaataaaaagttccaccggcacttcttcagcagcaggagcagaagggccagcatccttatccaaacacgacactcgccgaagcctcctctttttc

SEQ ID NO: 4274 - DNA, 919 bp, Zea Mays
ttcagaagataagagaagtttttgtatcaaagctttgtgtatataaaatttataagaactcacatatcatattcttcctactccttaaaaatcatattatacagtgatttttcaacttgaatatcaatgtttgttagaaacttcaaagtccagagttctgatataaagctatgagcttcagcatacctgaggttttgcctcttgtctgactttcagggcaacagattttttatttgattcagatatggtacttcctccattacttttttcactatcaatgctggagttgaggttggtaattttcccgttgttgcttgacaccccaagcatgtaacgggaagcgacaactgtcttctgctctttgataactacctttctctgcaaattttccttttcactttcagacagatcagctgacttggaagttgtccgttgatgatccagtgcttccataactccagagggagttgacatttgcatcaaatcctttgggtttccaatgcaagggttccttcctggaactgggcggaccccaacaagaaccggaacaggtatacttgactggaccttctcaacatatataaactgtccaagttgtagtttgtttgataagatgagttcattgtcctccttagacaaggaaacataagttgagtgtgaagaatctgaaactttgataaagaacccatggtccggccaaagttctgaaccagttattgcagggactatgctaataacttggagaagaatggaccggtattctccacatactttgacatcagagttaatatgttttagaacctttaatagtattcctggagtaagagatgccattatcttggagccagcttattctttttctgtgaaagaaagaaaaagtaatagaagttaattttagatgcattatccaccacattac

SEQ ID NO: 4275 - DNA, 986 bp, Zea Mays
gccgactggggcaatgactagggtctctgagcggctgacacgcaattggatccatcccgaccattttccccaacccaatttcatctaaggcctattggtttgctcgggccacggtgaccgtgagcatcgcggcaagacagtcgcgttcccggcgaccagagggttcctaacccaattacgtgggtcggtaagcatcatagtcgtaagagaaaccttaaacgagggagagaggagtatgaactgaccggaaagggggctggccgcgatgaggttggtttcgggtggcggaaacccgaattgggggaaatccggaattagagctcgctggtggagggtttggggtacaggtaggtgcagaagctgcttgattacaagacggagctgagggcgcggtcaatttatagagcccgcgagcggtggccgcgaatttgggcgatgacgcgcggcggccggaggaaaggaagggcactcgcgcacatgaatctatggcatctaccgtggcagtcactccgacgatccacgaagaggcacaagggttcacggcgatgcggtggaggggctcaagtacgtggcacacgaccggaagacggcggttcactggcgagcttatcgctccagccgcaaagcagaaggggcagccacggtgagtcacctgagtgacctctagctcactagcggcagagattcttttacccgagaggttatccatccacctcgagcgggagttctggcagcgacagcacgaatcacggcggggagtcgtcggcggcgagatctttctgacgctggcgttctgatctgatcccggtactgtaccatggagagctgcattcagatagcctgacagacaaacttggagccaagttttctctcgatttccaatgaccactcatgccaagctctgtagcagagttgtagagcaatatgccatctacaacattgctatatggtgttgctacaaaaagccattagatcatactcaaaat

SEQ ID NO: 4276 - DNA, 800 bp, Zea Mays
cccggatataaacacggccgcgaccccctcgtcctcgctcgcaagccctgttcgccggaatccccgtgcccactaccaccattgttgcagatagatagccaccgtcgtccttcgtgctcagcacccaattggatccccgtgtgtggcccgaaggcttcgctcgagtccctggtccgttgtggtggcgattacggggcaggagggtgacaggagcgcgcccaatccgtctccgccgtcgcgcattcgcgggtcgtcgtggaccgaccgactcgacgccggactttgggtaaggacccgctctcctagttcgccttcggctcaatttcattccacgcctagcgtattagggtatggcgcactggagccatggatttgcttacgccggcgagctccgccgccgcggggagctgtgctccatcgccggggcgctgtcgggtcaggggaaagagcctggacgtcggattagagacgagcggtctagatcggatctgtgcgtaccggttcactagagtcgatctggagcgttggcagttgatcggacggagctggcgattaagggtgatggcgtgttgtgcaccgtcagatctggatctgaggagccacgctgcgtaccggttcgctttagtacggatttaatctcgcgcgctgaattcggatccaacggcccacatctaaggataccccttcgcgggtcggttttgttaaagagccctcggactttagtgaaatcaacccgccgtccattagtcactatgcactgtgtctcgggtttcttgccccgaggcccctgagttctctgg

SEQ ID NO: 4277 - DNA, 663 bp, Zea Mays
tcggcaccctgcgcatacatgcccacctggggtctggtggggagtcgcgggtgatcttgtgggtctacctaagctatccgtgcccttcccgggtgaagcaacccaccggagcaccagtaattgctcgccggtggccgggcgttgctctattatcgccctgcgtcgtggccgcgtcctctgctgcatcgaaacacggtaagaattccccagaccgactcacccatgcacctatgtcatgttgcacccgatcgatttgggaatcgtgttcccgtgcgccgtgatagggtagctcaccggcatgcgctgtcatgtgtgtggggccgccgcacggctggtttggggaagaagaaggtactcgcaccgttggatctccggccgatggaggagatttgatcccaaagtatctgttcgtcaaatgaatatggaccgttgatcgccgatcggtgggtggcaagcggtttagagctcataaaatcctgatggtcggattttgatccgatggccgtgatcccgtaccgattcggggtctgatctgggccgttggatctaatccgagcggctcagaattcaccataccccttcgccgtgccatctttacataagagccctcgtaaaactagctaataaacccgccgtcctcggcagtaaagaaacccttacaac

SEQ ID NO: 4278 - DNA, 641 bp, Zea Mays
ctttggtctcacaatatgagttcaatacctttgatgttgtcatcttgatacagaggacaccatagtaaagggtatctgatctcgtgtagtcgctctatgaccactcgatctattacctacttaaatgagggagattggcacatagagtacctagtctatcaaggagttggttgagtcccttatttagtttcccatctgcgagatgacttctgtgatagatggacaacaaaggagcgggatttgcgacatgcacaccaagcagccagactgacaaacacggattctattaatgagcaagacgagaccatcatggctatcgagtggacagagctcgctagtctatatgctcaacactacgacattatagacaactttgatgaggattacatgtcaattccatgaatgctctcaagaccatgactcgaaggcctttgaatccagctcagtaccacaaccaggagcacaagtagagccaacaagagtctagatcttagcttccattcaggctaagtacgtagtagagacagtctcaagtgcagaagcaacagtcaagatattgttgggggaagtccgactaggatgccctcgttgacacatggttgctcggttgtgtcatggtggatctcgtcaacatgtgtttc

SEQ ID NO: 4279 - DNA, 483 bp, Zea Mays
aaatacacgaggatttagtttatatactaatgcatattaggctcgtcccatatttgtcaaatacggaataaatacgggttcaatccggaaaaaaatgggatcccgcaaaaacggacggaataagccctctcccgtttccgtcccgtttccatatttttccgtaaatacggaaacggtcgggtcaaatgtagaaaacggtacgggtcggtacgggattttttccgtccgttttcaaccctagaagggatcgaaggccaggcgtccgtgtcccccctcctcacgcacgtacgtgcaggtccatgccagcttccacgcatgatgcccgcccgtcgcccgacgatgcccggaccccggcaaaggccaccggagagacgtgaggccacgctgtgcatatcatgacggggttcggtggttgcaccggcgtcggcgtggtgtggtaaccaaacttttcacctcacgttttgttactcgatcggctggctc

SEQ ID NO: 4280 - DNA, 339 bp, Zea Mays
caacaacataggtactagggacggatacggttccggtcggctcgaacgtagggggtcgagatgacagcgcaagaagaggtaggaggtgaagtggtagggcgaagcaggtagggttctagtcggcccgagggacgcatgggcggcgacacggttgggggcgggcagttggtcaagagagacggcgggaggggggtggggagggaagaagaagtagtagagacttcgtcgtcgctgtgcggtttctttggagtcgtgttgtgcgcgtgagagtcaaaaggagacttgggagagaaacaacgttcacgtgttaaaataaattgaacgaacaccatataacac

SEQ ID NO: 4281 - DNA, 336 bp, Zea Mays
caccatgcaggagctcctcggtcaggcaccgccacacgccggattcgagctcctccccacatgtcgcaagatgattcactgtgcactccgccgctctctgtcacgacgttgaaccatccaacctcgccaccagcggcgacctcctctttcttgccttcctctcctgtgtgccgaatcgtccctctccttttttgtgctggatttttggggtttttaccagagttgtttcctggagcttagccagaatcctagatgtgtaccccttaaactttaggtctctgtaatttcataatactgccaaaggttggggattttagtgttagtaggatcattttc

SEQ ID NO: 4282 - DNA, 813 bp, Zea Mays
caatgacgagaaccaagtcgggccctggcgacagcagtcacagctagtcccctcggtggctcgacaaggaggtagcaggccgatctagcaaggatggcatcctacgacgactagatccccattgtcttgacgaggaggtggcagatcgatccagcgaggaggcatactgcgatgacagaattaggcgacgtggctcaaggattagatgaagaggcggctagtgatggccgtggtagttggttccagcgaggagaaaacccctggcgtgacatcgtgatgaccattgtaagaacatttatgctatatctaacactacttatgctcaaacttgaagattttacgatcatgaataccatgccccagagatattcaggtctctcatgtggacttggtatttagtatttacgatgaccgcatgaggtcacacatacctgttacgtgggggtcgtacgtgacatcaaattgaccattgcaacaacatttacactatatctaacattgtttactctcaaacttgaggattttacgctcaaatctggctgtgcgcatgtgtccatagtaaccactgcaacccacgtccctcaccatataccatatttcgcgtgtacgagatcccatgatttatggcacattcgtaactgccataaaaatagatcccaataaaacgctataaaacaaattccatgatatatggcgtgatctgggcgtgggacatgggcgcgatgaggagaagccgaccggggggctttctgtaacaacatttacactatacctaacattatttatgctcaaacttgaagaatttacgattat

SEQ ID NO: 4283 - DNA, 628 bp, Zea Mays
ccgccggtgagctggatgccaccccggccagccgcggtacccctccccttgatcaccgcccgtggataaaggggctcaccgccgtcgtgccatctccgtgtccgccgcgtgtctctgtccatctaccgcgtcgccgtgactctctggggcagtcccatcgtcgccggtgagctcgccacgactgtggacacgcactcacgcgcaccagtgaactcttattcctccgaccgccgcgcgtcgtcgctcaaattctcggccaccgctcgcggactctataaattgaccgtgcccccagctcagccatgtactcaagcagctgctgcacccacctgcatcccaaatccctcactagcgagcacaaatttcggattctccccaatccggttctagaacaccgtgaactcaatctcgtcgtggccagcactattcaggtccactcataccatcttcttccccgattaagtacactcataggtctacaatgctctccgacccacgtaattgcgctaggagctctctggtcgccgggaacacggttgtctcgccgtgatgttcacggccaccgtggccagagcaagccattgggccatagatggaattaggttaggggaaatgctcgggataggtc

SEQ ID NO: 4284 - DNA, 676 bp, Zea Mays
tgcttttccacaaacttagtggctataaatgaatgggatgctcctgaatcaaaaagcacagtagcgggagtaaattcaacaaggaactcaccgagcactactcccggggcttgctgggcttcttgagcgtctacgtggttgactcgtgctctgccctagtactgagtcctgctctgctgactgttggaaggaggttccatggaggtaggtgccaagggaatcttggggccattcaccgagttggagtaggtaggtccgggtgccttcaactgggggcagttattcttgaagtgactggggtctccgtagtgccaacaggcatttgctggcggttggttgcttgcaacggagggtgcctgatgggagctctgactctgctgattgtagcacgatggagtgggtctagatggtttattgaagcttgttcccctgggtggaagcccaaagggtcaagctctctggtgacgttcttgctgatgagcttggagaacttggaatttcctcttgaggtgccctttttcttcctcttttgccctttccacttggatggctttgttggagaggtgagaaaagttgaggaagtcttggctggcgaggatggtcttaagctcgggtcttagtcctttcagaaaacgggccattttcctggactcggtgctgacatcgtcaggcgcat

SEQ ID NO: 4285 - DNA, 508 bp, Zea Mays
ctcggctgcgttgttagaggccgggaatagcaattggagggcatacttgaggtgctcgcctccaggtgcggtgaagagaatccctgctcctgctccctgcagcttcagcgaaccatcaaaatacattcgccatatttctgccgtttatggattgtctggaacttgctgttctgtccattctgatacgaaatcaaccagtgcttgagtcttgatggcagtgcgaggtcggaactcgatatcatgggatcccaactcgcaagcccacttggctattcggccaatggcttccttgttgtgaagaatgtcccctattggaaaaccagtaattacttatgactttgtgatcgtcaaagtagtggcgcagcttgcgggcagttagaagtattgcatataatagcttctgaacttgaggatactttttcttcgatgggcctagaacctcactgatgaaataaacaggatgctgtactggataggcatgcccttcttctactcgctcgactaccaa

SEQ ID NO: 4286 - DNA, 543 bp, Zea Mays
caaggcgtcctcaccttctatgaaagcgatggttgtgcaagtcggtgggctagtgtataaaggttgcttgttctcatggagggtttcatcataacgaacggtcggctcaaagatgtcaattacaaaaacccttggacttggagggaccatccaccgtccggacgccatcttcgttggggcgtccaccatttcgttatctcatcggagaacatggtttagctcaaggccattgaatttgtcctcaagtcgtcgtaccttcttgtagtacgctgccatcctaggatcacggcactccgaatccttcattacctgccctacgacaagctggaagtctccccggacgtcgaggcatcagatgcctagctcaactacgatatgtagaccgtttacgaggacctcatatcctgccacattgttggaggcttggaggcggagttgaacgacatattgtagttgatctcccgaaggcgagatgaagacgaggccaccgctagccccctccttcatcagtgagccatcaaagtacttgacctagtacttccc

SEQ ID NO: 4287 - DNA, 296 bp, Zea Mays
gagcattcacctggtcaaatgaacaaatgagtcctaccatgactaggattgataggttcttcgcaacaattgagtggcatgacctgttcccctcggctgacattcattccatgtgcaccatgacttcagaccactgcccgcttttattgcaaagccactcttcgggtactttctaccaagggtttaggttcgaatctttttggcctaagattgaggggttcaacgaggtggtccatcaagcttggaactctacagtaacctcaaatgatgccatacttcgactgcacgtaaagatg

SEQ ID NO: 4288 - DNA, 445 bp, Zea Mays
actcgcgagccaaagaagaggatacgatcaagagaaagaaggtatgagacggaagagggacgattttaaatggcaggtatgagacaaacatcaatgtaggatatagaggtgccaagggtgcatatgataataattaaaaagcataacaaatgatatagttaagacaagactcgcgaaatgacaaagtggagaaaacaatcaagggtaagatcggtaaggttccaacagaagggttgaagtaaagattcattaccgagtggagttacaaggaaacaacgagattactacaggtgtgcaaaataaaatgatcactcatggatcattaggaaacaagggtggtcaagggcatgttaactgaaatatttcaaacagatattgggacataaaggtaagcatatataaaaataagagtatgcaagattccaatggtacgagcataccaaga

SEQ ID NO: 4289 - DNA, 380 bp, Zea Mays
ccccgtcgagccacttcggacgagcagagccagggctatggcggcgcacctagattttccctctgccgttctagcgaccgcggtagaccggttcaatctttccccgcacacccacccgcggaatcaatgaagccctcggtgaagagatcgtggtgagcgcgtgcgtatttatacacccacagcggagtccgatgaacggcctgcgcgatttccacgggcttcagttcgcatcgagtccgcagcgcggagtagaaatcacggcattcgttagttggcagcagcgagcaaaggaaggagatacgtacggggatggcccaccggtaagtgactgaagaaggatgcgtgcttgtgccctgtgaagccgaccagcgggacccgtg

SEQ ID NO: 4290 - DNA, 831 bp, Zea Mays
gttgctggttgcaacttttaggtcttagtggttgctaggacatttgcatatcctctaaaagtttccaacgaaaaccctattcacatcggcccacccctaaatgcatcattttggtgggcactcgagccaagctcgagttgactccgcaaggtggatggggagatactggatgatcagttgaccaccatgccattgcttgcccctcccatgtggcaagcaagatgatagtcttcaagaaaaattgacagggttggtagtcccataatatttgacgatgttggccagaggtcggaatcattaaggaaactcgatgatgtggatggcatgggcaaacgcccgaggccccgagtgtttctttccactattgtggtcattgccccccatcaaggcttgtgcctcgagctagcttggcatgctctttggtgaaatgacgcgcattgaggattactcgctcgtcgcggatcctacacaaacattaacgcactggggtgcatgacaacgagggttgttggtcatcgacgactcgatcctagggattggcatcaacaacctttgttcgctagatgactccctttgagggagaggcagcatgcctggaggtgtcgtgtgagtgcaaggtggttgcatgctcaatcagccctagagctcaaggtacatggctcgagcttagggtcatttggctttatgatcgctcgcaacacttttgctattgcgatagtgatattttggttagcacatggaaaaaaattgtggcccatcgcttccccttgctccgacttcactataggaggaatggcggtgccctcctgtcccattggtacgacgttgttg

SEQ ID NO: 4291 - DNA, 534 bp, Zea Mays
cgtggccatcggataaacatagctcggtaaaaatccccgccgccggtgagctggacgccaccccggccagccgcggtacccctcccctttctcaccgccctcggattggaatctcatcgccgtcgtgccatcgccgttgtccaccgcgtgtccgagcctcgccatcgcatcgccgtgaacccttgtgcctcttcgtggctcgtcggagtgactgccacaatagatgccacagattcacgtgcgccagtgctttcttctacctccgaccgccgcgcgtccttcgtaaaattcccggccaccgctcgcgatgcgtataaattgagcccgcggctagcttcgtaacatcatcacccacccagccaccaacaatcgttagcaaccgtgcatctgagagcttgaattttggtttctccccaattcgggtttctgccgccgcagaatcatcctcaccgcggcaagattattctaggttcgttcatacactctggtcgattgttctagcgtccttaggtcctcctcaagcttcacgactcc

SEQ ID NO: 4292 - DNA, 403 bp, Zea Mays
ccctagttcaccacagtttggacacttgaacttgccctgaatgcttttcttaccattgtcattgttagttttcttttttccactacctccctcaaggcatcctttcatcctatttttcctctgtcgacccacagcgtgttttccaattggagcacccacttcttttgcggaaggaacttctggccaaaatgatttttcaccgataggtggaaccacccttgagtacgctgtggtgaaattagctacagagtagtactcatcgacaaaatcctccatcctgacatccctaaattcttgagctgttatcaagcacaatgcatggatacatggtttgcccgtgtgctgccactctttgcaagaacattcctgcagctgagcattgacaatgtgcttcgaatgcaca

SEQ ID NO: 4293 - DNA, 906 bp, Zea Mays
gtcctagccttgccaagcaggctttgtagtgtcgattcaaacgtccagtgccaccagttggagctgcagtcaactcagatttacaatagttacacatagcaacataacgagttataccgttctcaacagttttttcttctgcatatgcttccaacactctgctttagaaattccaccacttggtgctattggtacattgttatcagcaggtccatctgctacatccccatgaccatgaacaggctccatatcagtagttggggttgagacattgccaaccaatacaacatcttcaaacaactcatgttcaccatctatatcacgatcatccatgccaaaatctcccatgcttggggatagttggcgagggtcgatgtaggcatcatcacgactaggatttggttgaatggacctggattctgcacaacgtttccttgctgctggttttttctttcttatcatactgtatggtgctcagatcagggtgatttggctcggagttgggctctggttttaggtgttgtgggataaataaatgctgaatttatatgaactttgggcaccaactagctacagttcgatgaatgtatttatatccaatagataacatcatttaattatagcatcaacaaaagcaagaagaggaccttaggaagtggatcaacgtacttggatttcttgaaaacatagaacctaacctcacgtcctcacctataggctatagggctgcatgcgacgcttgactgcagagtgaaatgtggcgcatgtgcttccggctgggaagataatcgcagatccaggaagcggatataggggtacatccatggcgccatggaggcatggacgggagcgtcgacctgcccggcctgtcatccaaccatccggcaatccatcttcacctcgagc

SEQ ID NO: 4294 - DNA, 946 bp, Zea Mays
gacgcgtcgtgcacgcgtcgtgcggacggctaccagagctctcctctgtgtaatgcataataaaaggagaagcaaatagaatagaaaagctgcgctttcaggcagcaccaaatacgtgtgtccagtttgttccagaaactgtgtgtgtgagtgaagctcttcgcctctgctgagttcgagtgttcgccggtgccgttcagtgctgttcaggcctaacaattggtatcagagggttggtgatcgtgacccgcggcgcccatggcatctccaccgcgcccacgaggacgctccccgacacggaaggagaagggcacggactcaggcaccaagacgccgccgcgcatgcctactccgccacgccgaccacgcacgcgcgacgggcgtcgctcgcgcacccgtggtgcacgccatcagcgggaggtggtgatcgagcgcgtcatccgagagggcagcagctccggcaactggccgcagttgacgaagacaaactaccacgagtggtcccttcgcatgaggctgaagctgcaggcacgccatctctgggacgccatcgagttcgatgacgcggagtacgacgacgaccgcagtgcgctcgacgcgatctgcagcggagttccggcggagatggttcccgtgctggtggccaagccatccgcaaaggaagcctgggaggccatcaaaaccttccgcatcggtgatgaccgagtgaggaaggcgacggcgcaaaacctttgcgccgagtacgagacgatcaagctgcgagacggagaagcaatcgaggatttcgcgctccgtctgacgggaattgtccagcggctggcatcgctgggtgatcccgagccagacgacaaggtcgtggccaagtatctgcgcgtcgttcgaccgaggtacaagcagctcgtcatttccattgagacgctccttgacatctcccagctctcggtcg

SEQ ID NO: 4295 - DNA, 772 bp, Zea Mays
ctgggactcatggttaatcatgggcagagaaagatctcaactcggggataagagagcaagctatctccagactgttcaccgcgacacctgtcgcgcagtggacgctagtgtcctcgtcggagttcactggtgactataaccgcgccacgtgcttagaagatgtaccatgtcgccgtagctcgtggtaggtagacagttcatcgccggagtaagtacccccggggcgcgccacgattgttcgcaccaatgactcatccttcgtctcggccgccgatcttgctgcgccaaattggacaccaccacttaacctctctataaattgaaggccgggtcagctgcgctatgttatcacgaagccgaagcacccgctcccaccctcaatcgaacaccaaagctcacgaatttctgatttcccccaaaccgggtttccgccactgtgaaaacgacctcgtcgtggccagcacaattctggttagttcataccgtctgctccctcgtttcagtgtactcatgtgcctatgatgctcgtcggctaacccgattgaactagaccgccgccaatcgccgggaacgcgtggttctttggttcatccgcgcggtcaccgtggcgagaccaaattagatcatcattcttgaaattaactttgggggaacattggttaggacttgaattcggtttcagccgaagttgggcaccagtccttaagtaaatgatccggtacaagctcgccggagctcggctctgcgctagtcgccgtcggggacatcgggc

SEQ ID NO: 4296 - DNA, 908 bp, Zea Mays
ccatccttaatttctcctatcatgacgaggaccatcgacctatataggatggagcaagtcctattcaatcacttcatcattgttggagtcactgatattctttggctcatcgtcgtcgttgtcatcatccaccgacccccatcggtgggtcttgagaatgaattgcttccatagcttcttgtccctcttccttcttcttctcgtccttattattcttctttgccttagcgacatcacgatttgttgtgtgcatggccatgtcttttagtagcggtgtgtgggagaggtgaaaatgggagcatgactgcaaatcatagtccatgagaaattgatacatcaaaacatgaaaagaagagagggaaataactcactagatatgaacgaagctaggctcaggctacattttggggtgtcccacaatcgggaaatcctagctaccctatcacgtcacctctcaaatcctctgagcaatctcattgtcccaatgacacatgtcactgatcgagatcctcaccaatgagagactagggaacatctggtatatggggaacagacgcaccatcagcaatgcaaccattcgatcatggtacaccgtacacatcgatgacaccagcgctcgatagaccttagccgatgatgtggaggatgtcgtgcacacttgagatctccaaactacttattctctaggtctgcagcacccatcctcacgacatggcctctttgttgataccgcgccaggtgtaggttgggagaagcatgtcgaggacattcttgaggtagaaccacctcgagtgccaccccatgtttgatttggttgtcggtaggtgcatgtactccaaggcccaaatcccttagagatgaatgctagcgcatcccactgatagtgccacgacaatgcctgagtggcc

SEQ ID NO: 4297 - DNA, 358 bp, Zea Mays
gattgttggcgtgcgactgcgtttggatggaggataaggcttcggccgggaatatctgtaccgtctgatctaatcgagtggttggtgtgagatgtggcgtcatgaaaatcctaaccgtgggtctcgggatcgatggtctatagcgcatgccgtttggatgaagctctaatctaatccgagccgcatatatcatatcctacggctgatactgggtgataccccttcggcccgccccttttgctaataagcccctgcacttaccagaaactagcccgccatccacactcggcgtaaagtaattactaaaagatcctagaattaacaaaaacaaccctgagctctctggtatttgcatcag

SEQ ID NO: 4298 - DNA, 430 bp, Zea Mays
cggcgacgaagcatagacccaacacgcgcccgcccatagatagacttttgtccggttcccacagagccgctcacaacatcctctccagtcgttgtcccaatgctgccacctcactggtcttcgtccccacgccgccaccccaccccggcctcttcctccctatgtagtcggccaatgcttctccatcactgctcgtcacctcctcatccaccgtcatgccacacaatcctcctacggcgtgcctgacttttgtaaggacatattatggtagcacacgatacatccttgagatgctcgtcaacggcctttgccacctcaagtactgcaactacgactcctccgggatgccgtagagggctacaaccgctcctttatgtaaattgtgcctcagaagaatcgcactcctgccttcacaccaatatgttgttct

SEQ ID NO: 4299 - DNA, 738 bp, Zea Mays
gagacccctctggctgaacccagtccagtgcatcatcagcatccatgtgtgatcggttggaacagtttgatagataaagcagaagaggatttgaagaacacagtgtctatctttatggtcaatgatgtgcttgtgccagtcgctgacatcgcagatgcggtcgctcaaaaacttgaagtaaattatgattcgctaatcctgaggcaattggctcatggacatttcctgctcatgcttcccaccctccagtcagttgaccagctaacagtgagatggaacactattcgtgcatgcgccttctccctgcactgtaaaagatggtccaggttctttgggtcttcaggtgcaagtttgactatccctgtggaattcgagctaaatggcattccaagtcatgcctgggaactgtccactgtccgacacattttgaacccttttgcctgggtgcagaaggtacatgaggagactcttgagctcaagaatttggaggtctttcactgttatggttggtgttatgacctggcctcaatccctcagtctagagacctctggattactgattcgctgggaaatggaccaggcgttggaaggctatctcttgcctatcatgttcagattaaagtgttggaaggacaacgtgttgtcctagatcccatccaggtcccaacagatatggatggttctgcacggcaggggcggcgtttccgttcgcgttcgccaccaggggaccgtgatggt

SEQ ID NO: 4300 - DNA, 699 bp, Zea Mays
gcgagggtagcagccatagcggcgggtcagcgccaccttcatcgcgtaatcaggtaagaaaaccccccgtatgttcgaatcgacctcaattatacactaggaagtcgaaattggggcataggatcgtggcttgacggcgaatttcgtctggcggggttagtgcagccgcgaatcagagctcctccgtgggcagggcccagggcgcattgtttcgggattgtgagtcagccgtgtgattcgtagtagtcatgtgttcatggaaaccgagttcggtgcgtgaatggggtggggattcaccgtggggcgcgttgtcggacttctccaccgcgcggtgtgtgcgcgccgccgcccggggaaacggaggtaggtgatggctcctggtccgtcgatcgggattcatacggctaggattagtttcgtggtattccttcgctgcgtggatgtgagccgttgattccgtattgtgcgcatcagattagatcgggtctcattaaaccggggtcgtggatctcggatccggcggctagtatcgtgtaccgcttcagtgaagttagatctaatctgcgccctagaattctaatcgaatggccgacgtttgtccataccccttcgcgggtcagttttattaaagagcccctgagatttcagagaatcaacccgccatccacgggagctgtgctctgtgtctgcagattttta

SEQ ID NO: 4301 - DNA, 1818 bp, Zea Mays
gtgctccaaatgagattgccaattggggctataaaccaggatatcatcaataaagaccatgacaaacttgcgaagaaaaggagctaacaccaaattcatggcacactgaaaggtggccggagcgttgataagaccaaaaggcatgactcggaactgatagtggccctgatgagttttgaatgccgttttaaactcctcggagacacccatgcgtatctgatggtaacctgaagtcatgtccagactcgaaaagatttcagtacccgccaattcatccagaatttcctccaccactggcatgggaaaccgattcttaatagtcatatcattcaatttgcgataatcgacacaaaaacgccatgtaccatccttcttctgcaccaagaggactggagacgcaaacgggctcacgcttggagtgatcaaaccggatttcaacaagtctgccacttgtcgctcaatctctgtcttatggtgaggggaatatttgtagggccgagcattaactggtatggaccccggaagcaaaggaatgtgatgatcaaatggccgagatggaggtaagactgtaggtgcctcaaaaatatccatgaattctcccagcaacccttgcaaatctgtatgaatttcgttgatgctcactgcagtcacctcttccaacagagcaaacacccagatatcatttccgcgcaaccaccgctccacttgtaaagaagatacctcctgcaccacttgttgttgtggatgatttcccaccaactggacctcgatccctttgtccacaaaactgatcacctgagcttcccaatcacaatgcataggactgtgccttctcaaccaatcatagcctaaaatagcatcataggcccccagccctagcaccctcatatcattctggtatgtgtgtccgttggcccaccactccagtgatcgcaccattgtgtcactatacataatctctccatttgccaccctcactttacatgaagcacaagggtgcacggtcaggcccattcgatcgaccagctgcttgttaataaagctcgtagaactccccgaatccaccaggaccaacatgacttgattctgcagcaaggcgcgcacaaccatacattcgtcattggtagtaccgctgagagcattcagagacaagcgaaaattctcctcttcccctttttcctccaactcaatctgtgtcaatgtttgctctgataaggtcatacccaactcttcatcggtaagagcactcaactgcatctgcacccttttggggcagcgagcttgatggccgggttcaaatttgtcaccacaggtatagcacaaaccattttgcttccgatactctttcaccaatcgctctttagacaactcgggcaacgaaaccgagcttctactgtcagctttgggcacagtactaccaaatcgaccttgactgctagtcgagaagggtttatggcgctgtttatccaagattccctgctgaatactggctaataatgccgctcgttcaacagaagcaggcatatgagatttaaccggtccttgtaattcttgcttgagtcccttaataaaatgagccacatatagagtctcatccaaatcatgattgtggacagaagtggcatatcttgcttcatcaaacagctttttgtactcctccacagaccctgactgtctaatgtccagcaaagactgcatagcctgagaatactcctcggatccaaacttcaacagcaccgcgtcacaaaactcctcccacgaacatggaccatattgaatcttaaaaatctgaaaccacctcttagcattcccctccat

SEQ ID NO: 4302 - DNA, 510 bp, Zea Mays
acagaatgcgcgaggggcatgcagggagaagatcgcgccaccggtagataagatcattagtagagatagatttctactagtgttcctatattaaaggagctatttggttagttgctagattaaaggagcctatcactccagttagttgggtcggtcggcatgtatatatacggggagacgatcaatcaataaaggcaaccgagatattactcctctagtgtcctatctctctctcaatcaagcatgcggctaagggactaaccttgccagagaagacggatcaaggctaagaactacgtagccaaggtccagctacccgagggcttaatgcccttgacaacctggtatcatgaccccgacgatcctcgccttcccaaccaacctcaccacaagccgccgccaccccacctccatctgcgccgccaacatcttcatcgacatctgtcgcatcgtgtgccaccaacatggatgacgtcagtgacctcaaggacaccgccaagatcctcacca

SEQ ID NO: 4303 - DNA, 1405 bp, Zea Mays
gtggcatcctaccctttctacacttgccctttcaatataccaagtcaacgcgccacatggttcatcacattaatcaataataacctctcatgtatgctcgcatctttgagtgcatccgtacgtaggtagccattccctcgctcgtctcagaagccagctgctcctccgggttgactgggaactcaactgacctcgccgccggtgagcacgccgcgctgcctcgctcccctcctcgttctagctactacagtagtaggcttcccacctgaggcacttaagttgcacggtcgtcgcgttcctcatttcgctgaacctccctcctgtgcatgcagatctgtgcaggagctcgggtggcgttggatgactcggatcctgggcaatgcagccatggtgagccaccgacccatcatccatttcttgcacaggcccattcctacactgtgtcacagaggaatagttgatgaaagggatgaatctcatattatttaagctctgttttcgttttccctatctaaaatacctatgcaactccaaaagactctattctttctaattgatatgaatagagctttttctttaaaaaaactaccctgcaacagtttatttaaatagttatccaaatatattcatcttatatttcaaatttctcgctagcccaaggtataaaacgtaaatgactctctagattgtcaataagatattaaaaagttaatgaagattggaaatatatagaaaatgatttttatatagatgactttctaaatgataatttagaaattgaaattctcttggagatgctccatatggtaccgttattcatcactatagtaaccaccttaaactcacttaaacaaattgttaattaaattacgaataacttaacgatttggtaagtagctgattatcatctaggatgcaaaagttacggatattcagttgaatccacttgactaataaatcttgacccccacccccccggcaggaaccacccattgtacaaaacagacccggccaggggacagaggctggcggatggaggccggagtgacaacgtggcaccgagcaggtcagagcgccgagcagctaacaagagcaggtcagtaaagtacaacaccaaggccatctccaaccattttcccacatatttcccacatatgtattcttttctatactttctactctctctatcctaaacaaatatttgtttcagacttttaataggttcatataataattagtatgtgttttgtatgtgtctagaattctagactcatcgtgatccatttaaatatatacataaaaatcaagatctaaaatgaatgggacgaagagaacattatattttactatatctccctaaaagaaactccccacataaaggacatctccaaccattcactctatc

SEQ ID NO: 4304 - DNA, 845 bp, Zea Mays
cccgggcaacggagtccacgacctgacctccaaccccgccgagattttcgcaagaccagctataagacccgaccacctcccattgtccaaagcatcgtgcaaaaaccaccgaattcgcggagagggaggagcaccgccgccgactgttttccgttcacgccgtcggtcggggtcaaaccagtgactaggaaggttcgtcgcgactgggcaaacgtgttagcagcaccagcactggtggatgagcgcctgtcactaaggaattgctcaacggaaaaccacgaccaccgtggaccgcatgtcgctgtggactggtgttcctgtcgcgccactacaagtaatatgctccccttgtcgttcgcagctgaccactctccctgtagaaccgtttatgggaggaccgcgggcatcggggcgccgaattgcagtctccggcgagcatcgccaccgtggtgggcggctcaccgccgctgctggttctcggttggggaagacgtctctgggtcgttggatctcggccggacggtgatgattagatgaggaggtaccctttcggcgatttgatccgaaccgttgggcagatcagatggcccatatttgatcacgttacattaaatactgaccattgatccaagatctggcggccagtagcgcgtaccggttcacttaaatgggcgatctaatctgaggcgttcgcttgcgatccgatggccctagtcaaataccggtatataaaacactagatctaatcccagccctcgatatctgatcgtgcggctcagaatgacccgtacccccttcggctgggattatatgcaaaggagcccccgcaaaatcccatagccaac

SEQ ID NO: 4305 - DNA, 428 bp, Zea Mays
gaaaaaacgaccgagaggctagaccgagaggaaaagcaggaccgccggaggcaggattgccagaggtggcaaaaactcctataataactcccaagaggaggagaatggcaagcatgctggacgctgtcatggagacgacaagggctttaactcctacccctgtgaagaaggttgctgaaactgttatggctcgtgctaaaaccaaagctgggccctcagtgcccacagaggcagagcctgccgcaactgagcaaaaagctgagcaagaattcccatgtacgagcatggctctggagaaggtcatggccgaaaaatctaaatctcatgttcctgaagcaccgtccgaagatatagactttattattcgacatgcttcgggaaaaagctatctaaagaagaaattgcagaagccaaacactatgcccggg

SEQ ID NO: 4306 - DNA, 431 bp, Zea Mays
tggacatattagaactagggatctggtgcaagaatacttggcaaacagaaccttcccaacctctagcagatggggaatgccaaagaagaaggaaggggggaaagtatgaacttgtctgactcccttactgtttcaaattttagaatacatttaaagagccgtgcacgaagtggctagaattgatagagacaatgtgcaaggagattctagggaactatacaaagaaggaagaccagttgatgactgctgccttcggctcccggctaaaacgaaggttgaaccgagttatggatgctctcaactttgagtatcctaactatgaaaggcttgaagaagggggtggagggggaaaaagaaaaagggatgtaagtattctgggtaggcaagctactcgatctatcaagtaggaccagaaagcttcgaagaaacag

SEQ ID NO: 4307 - DNA, 655 bp, Zea Mays
gaaggggctggtcaagaaggaagatcgcctgaaccagagggaggcggtcatcacagaattccatgagaagctgaaagcctataacgtgatgctgaagaagcaacgggatgagcagatcgcgactgaggcgactctacaaaagctgcggcgggagctcgatgacagggctagcaacctctctcaccgaggagaacctcaaggcgaaggatgcttccctagaggagcgggcgacgaatctcgtctggcaggagaaggaccttgcctggagggaggagatgtgggaaaggcgggaaaagttgttggccgaacatgagctcgaggcagaggataaggagaagaaactggaggagaaggagcggacactggaggagcgggtccgccggttctaggtgacgcaggcagcgcaggtagcctagacggcgcaggcggttccgggctcccaggcggtggaggcgatgaagaagacgcttgaagatctccgggcagagcatcgcactggggtctagcgtatcaccgcatgggccgacgaggcaagctcgactctggtgccgctaggggtgagccctatcccagtgtcgaagcagtcggtgtccatctccgacgcgctcccggtgctagattccgctgtcgactgccttcgacgcctagatcagat

SEQ ID NO: 4308 - DNA, 446 bp, Zea Mays
ccctttcaattcttatatcgaggcagtaacattcagtggactggaattggtgctctgccaccacagtgtgcagctttagcatcaggaggtgatctcatggaggctttgctccattcctttgaggatattttcagggaacctcacggcctccctccatctcgccgccatgaccacaagatcagattattgcctgttactccacctgtggcagtacgaccatatcggtaccctcaattgttgaaggatgaaatagagcaacagtgtgatgctatgttacagcaaggtatcattagagaatgcacctccgctttttcatccccagtgcttcttgtgaaaaagtctgatggttcctggaggttttgtgtggattatcgcgcccttaatgacaaaacagtaaaggaaaaatttccaatcccagtggtcgatgaattattggatgaactccg

SEQ ID NO: 4309 - DNA, 352 bp, Zea Mays
ggtcgtggatcccttgatggctgtggagaaggtggatccctgaagggcgatgtatgtggcggagacggtgggccaccatgaggatgaggagaaggagggtcaaaaagaggatgaggagcagcgtgaagtttgaggaggtgatgatggatgtacaataggaacagcaatttgagaaggcggagacggtttggcctgcgacgacgactgtagtggtggatcaaccaattcgacatcccttcgaggccaaaggataaaattcttgatagcttgtccaagtgtctcgatacctccgggcccagggatgtctagcatgtcgtcctcggatccttggacgactgtcgtcacatctacc

SEQ ID NO: 4310 - DNA, 526 bp, Zea Mays
gtatatatatgtatgtccactttattatgtaggatagaagatgtctttagagcatagataggttttaggtaaggagtggggtaagaaaagacttcatccaagattgtggatgctgacttatcttggtgatctcacttgatccttgaagaattgagttgatgctcatcctttcttgatgaggttgatcatcttctccggtctcgtctcattgattaggagttagtgtatattatcgggctgggaatatggttaaaatagatatgggtgagatagactacatgatataggttaaaagtttgcttgatgttaggtggggataggcagattatgcaatccatcaagactctattggttgggttggtctatcattctttatttagtgtagggtgaagtaagttaaaacatgtggatagggtctaatctatttcacaagtattaactggaccattaagtaactcacttttgattcgatcatattaggttagatgtgatctagattagattggcatgactattttgacaaggc

SEQ ID NO: 4311 - DNA, 641 bp, Zea Mays
atcaactcaacatcaccagcaggaatcaaaaatctagtgtcaggtgcgccaacctctaaggcgactttctcgtttaaagcatgtgttgttgctaggccatcagaatgtggaggagaagatccaacatggacatccatggaggtatgagaaggggaacccgcctggacaccctcgggggctgggtcgcagcccgcactgcccatcggagccggatcaccaccggaaacaccctcatgggctgggttgcagcttgcgctacccactcgagccggatattaccggcaacaccctcgggggctaggtaatcgcttgcaccatccttgaggaccgagttctctacagcagccacctctaaggctgaaggattctcagtcacctccacggaaattaagcaaccttgaccagctttttggctccaaagaccgcactccaaggtcgacgaggcacgagacgctgcacaggataactccaatcctgcatctagaatgtcagagaaaacgtccatcataccaccatctgttggctcggacagcagatcttcaggaaccacatcctcgagagtctgatcaaaattcgctatggacaactcctgcagaccaacgagagcagacaaagctagagaaggaatatcactactctcc

SEQ ID NO: 4312 - DNA, 440 bp, Zea Mays
gaaggtgtgagcaagaaccttataacaaaatttaagctggcatgatggacaacaactttgatgtagttggataaataagttgtcacataaaaatttgagaaaaggactcctcaaattgctttgtcagacactcagaattcagtttggcgtcaacagtgaattgaacaagattgagttccgtgtgaccgctgccgtgattcgagctcgcgccacgattggtgccacggagacgtgaatcattgaagtggtaaaagatctctggctcgggtttagtgatcgagttgccgctctagccatggacaccatgtgtcctcaccatgcttcatccaccgccgtcgtagcaagccaccgaacgctccagtcgtccacgtaggtggttggaggctctcgtgttggaccgccgtaaagggttcgcggtaagtccgccacattcctggcct

SEQ ID NO: 4313 - DNA, 669 bp, Zea Mays
gtgatgcagccgagttagtccagagatgtgaagcttgccaattcttatcaaagcaacaacatttaccagcacagcaactacagaccatacccgtaacatggccatttgcgtgctggggactggacatgattggacctttcaagaaagctcagggaggctacactcatgtgttggtcgccattgacaaattcaccaaatggatagaatacaaacccattgcttctctaacttcagccaaggcagtggaattcatacaagatataatattcaggtttgggataccgaatagcatcataaccgacctgggatccaatttcactagctttgaattctttgatttctgcaacaacggagcatccaaatcaaatacgcgttggtagcacatccaagagccaatggtcaggtggaaagggctaatggaatgatactggaagcactcaggaagaaagatttcgacaagaatgaaaagttcacagggaagtggatcggagaattaccttatgtggtttggagcctaagaactcaacccagtcgagctctgcatggaaacacccccttcttcatggtctatggtttggaggcagtgctacctaccgacctcaggtttggggcaccaaggctggtcttcaaaagcatagttgaggcggaagctaccaggctagaagatat

SEQ ID NO: 4314 - DNA, 1611 bp, Zea Mays
gatgaggaaatcaaagacttggatggcatggagggctgctggctgcgctcgatgatgtcagtgtcaaaacgagagtggaggagcagtcgtcatgggtaggggttcctgttggtgaacccagcgctgcaaagactttgcactgttttgctaacaaagttcatggtgatgtgcaagtgtaagggtgggggtcgaatacttttgtggatgttttgtcggcatgtgtactaacactgacttggtacctacatagcttccaatgattaggcagatgttgagagattttggtttcccagacaagcgaaatagtattgtggaggctaacgagtgtgttacaccactgtcctattggagcccgtcgccttgcagcgacatggagcttttcttcaaatcagagacatccgataacgaagagggtttggatttctttgcgaagatggacgatgatccctctatggaggacttggattttttgttgcgttagacattgcatctgtgatagaggctaatgtcggccagggaccttcgagtggggctccattggccatggtaaagaagagatgagtcggtgtttcaaaatgaagggtagaaagcgccgatgcgtctaagcgtgggggaggtggcgttcgtagacaatgacgtatgggccttggtgggcctgcatcaaaggtctcgcttcgcgaagtgttgggtatgacgcccttgagtatttgcgaaggggaggtggcaaagttggacatgggttcttgtcgtgcttcgctgacgagggcgtcgagtggggtccccaatccttgtcgtatcggggagttgtagcttaggttgctctttgaaggcaaagagcttgagctgatgttgtataactttcgggaggctggtctcatttcaaaggaggagccttgcatatgtttgttttgtaacctaagggcgaagtctttgtagcttaatttggctatcttgaatattgtagttgactggcaacttggatgcggaacgctgccctcgcccctcttgctgaacgatgactatgttgtttgttggatccgaccgctcgtacgacttcgcacccttaggtgtactctcgcatttttcgtgttatttcggcagcacccttagtcgacttttgctaaaaaaatcgcgtctctaggactacttcacacccttaggtgtctttgtgcaccttttgtgctagtccgtgcacccttaggcaacttttaattagagaggatatatttttactggttaaccagtttgaaggcaaagagcttgagctgatgttgtataactttcgggaggctggtctcattccgaaggaggagccttgtatatgtttgttttgtaacctaagggcgaagtctctgtagcttaatttggctgtcttgaatattgtagtcgaccggcaacttggatgcggaacgctgccctcgcccctcttgctgaacgatgactatgttgtttgttggatccgaccgctcgtacgacttcgcacccttaggtgtactctcgcatttttcgtgttagttcggcagcacccttaggcgacttttgctaaaaaatcgcgtctctaggacaacttcacacccttaggtgtctttgtgcaccttttgtgctagtccg

SEQ ID NO: 4315 - DNA, 1145 bp, Zea Mays
gcattataaggaggcacgtggctgcacctcaaggagacaataaaaacggctataaaaactagttcatacataagctgtcaatataaaaacaaatattgatgcaatggtcacagatttcatatcctaagatatggaaacaaaattcataacaatatttcctatttccactcaaggatgtggttgaaggatattcatcatgtgtcttcctctgcattggcatcctcatcttcaatgtcttcatcatctgaaacgtcggctacatcatatgtgtcacgtggctgcattttgacaaccaagtgacatcctttgatcacattgtctttaacaaaaaagacttgagaagcttggctagctaatacaaatggctcatctgttcgaaggaggcacttaaaattgacactaacaagtccatatgtgtccttctttattcctctctttttattgaatatgtcaacccacttgcaacgaaataatggcacacgtcttccaccaagaaactgaagctcaattatctctgttaatacaccataatattcagcattgtcatcagttgtattcccttctgaaaaaacagccaccccactattttgtgtgcagcgatttctatcacgaatctctatacgatatctgaatccattgatgtcatagcctgcaaaacatgttgtgttttgcaaagggccccgagacaacgatagaaggtcatccatttttttcacttgtatcatgttcatacaaattatggatctgcaaagtgaaagtatatcaaacatatacacaatataagttaagcattgaatagagtcaacagtctgaattgaagcactgaaccacccaataaaatatgttaccttctccctgaaccattcaataaacttattgttccaggaggatgtaaattgcagcaatgaagagccctcaccgctgttgtactcactgcacaaaaaaatatcagcaccaacattagaataggaagtcaaacgaaaatatgtaaaaatctgatgtgtaaaaaaggattacctaataaatggttgcacctcgtagcaattcctgagaacatatatgtgagcctgttgtaactcaagaaactcaagatctcgagtcttgtgagcaccaagtggccttcccatgcaagaaaatattggtaa

SEQ ID NO: 4316 - DNA, 491 bp, Zea Mays
caagaaacaaggtatggcagtggagccgcttctgtcatctctccctcagcttccagcccgttcctggcccaagaactcgtccacggacatggctgcggcaagcatcaacaccgccaccacctcccaacctgccctccatgacctgcacggctgcacctgtattgttctatgctaattgcctaatcatccatggaccagcagcacgcatgagatggcatggacgtgtggtgtgtggtgccatggcggacaccagtacttccacggtgatacagagttggagattaagggagaaaggaatggggctatggacaactgtacctttatacgtattgcttggccacttgggagttgagccttccatcatacccctcaactttcctaccagccgcacggcggtgcggcaccacatgttgccgctcgagacgctctgattagagtcgaacatgacagaagggaggtactagggtctagggcagtagggctgcgccgag

SEQ ID NO: 4317 - DNA, 313 bp, Zea Mays
ttgaagttgtcgctgacactataggaggtagagttgtccctgacgctggaggagctggaactgtgtttggctttggaggagcaggctcaactgatgtagtaggctcaactacaagtacatgcggaataggaagagcaaccataggtggagcctttatagcctgagtgaccataaggttgggaactgagggatccatagtaatggtgatagcggcggcctaaatctctgaaaacagtgacaagtaaatctataggcagactaacagtcccaaccaactatgctggaataggttaggtgaaatctaaagtcgttg

SEQ ID NO: 4318 - DNA, 758 bp, Zea Mays
cgagcatgttgcaccgtcttaagtcattgccgacttaagccgattgctccgttagtagggtatagtggtcaccctaggtcgagtaagcgcgagcatgttgcaccgtcttaagtcattaccgacttaagccgattgctccgttagtagggtatagtggtcaccctaggtcgagtaagcgcgagcatgttgcaccatcttaagtcattgccgacttaagccgattgctccgttagtagggtatagtggtcaccctaagtcgagtaagcgcgagcatgttgcaccgtcttaagtcattgccgactcaaaccgattgctccgttagtagggtatagtggccaccctaagtcgagtaagtgtgttgattccaagtctagccgaagtcaattgataaccaatagtgtgaatgcctttgagaaggaaatcttttattgatgacgtattttccaattacagagtacaacattgctctgatagctttttgagtcttgctaaggataaaacttcctgaggtgctctatattccatgagttctccacttccgtgcaatccatttgagtaagccgatatgatcttggccgagtgacctccaacaccatgaatggcccttcccatagtggcgataatttgtgccgtccttctcccgttagaattcggcgaaggaccaagtctcccactacaaaggatcgatgttgtatagccttatcatgatagcgcctcagggtctgctggtatctagctgactgaattactgtattcag

SEQ ID NO: 4319 - DNA, 358 bp, Zea Mays
cgggaatgtggtcagttcttgtggagagccattatatttctacacaaactgctgtaactgctggattttggtgtggcgtgtaacggttagtggttactggttagtaaacactaggatagtggtcttatgtgaaatgtccattggatttaagcatcttgtattcttgtgatctcatatacatggatcgtgggtggtatcaggcattgtcaaccattgatacgttacatggtcctttactttctgcgaccatatttctgtttagcagccaagtgaaatcttcctggttaatttgttttatttggtgctgtagtttgtagttcattcttaagttctaacattgcgtaaaccacggagagat

SEQ ID NO: 4320 - DNA, 356 bp, Zea Mays
cgccctgccagatctgtggcaaggagggtcataccgccatccattgctggcacaggaatgacgacagctacaacactgatcctcccatggtggcaatggcggccacctcctcgaccaaaattgatccaaattggtacgtcgacacgggagcaacagatcacatcactagtgatctcgaccgactgatgcttcgtgaatgctatcatggtggtgagcaagtccaagtcggcaatggtgcaggtttgcagatcttaaacactggtcattctacaattaattctgttgatcgcccacttgcactacgtaatgtcttgcatgtcccagatatctccaagcatcttctttctgtccataaa

SEQ ID NO: 4321 - DNA, 2191 bp, Zea Mays
ggaaaccttacttaaggaaatatactaacagggaaataaactagatcatatctcttaattgagggaaacactctcctcatttattcttaagcaatctgctagtataggaacaaactaaatcatatctcctgattccttttgtttctgcggctccttctttccttttctgtgcctaaatcatatctcctctcctgattccttttgctgctgctgctgctcctttccttttctgcgcctttggtactgctgaccatagaaggagtctataacatttccccccctcctcaacaaacagctcgcccacgagctgtactgcaggaaactgacgcttgaagtcatccagctgctcccatgaggcgtcagtagcaggccgaccaacccaatgcactgggacttcccagacttcacgattcagcttggctttagtaaccttgttaggtgtagggacaattctgccatgaagaatatctggtaaaggaacaacagccactggcgggggtccttcaaacttcttaagtagtgaaacatgaaacacatcatgaatcttggcacgtggaggaagttggagctgataagacacattgccaatgcgccgcagcacttgatacggaccatagaacttgggccctaatttggacggagaggctgcagtgacaccaacagcagtcctgtgctgtaaacggagccagacctaatcgcccacgatgaactggacatcccgacggctcttgtcttgatacgttttcattgtcacttgagcttgaagcagtctttcccgaatttctgccaagaaaaggtcccggtcctgcatctgtcggtccacaaccaccactcatgttgtccctggtgaataagagaccatggtcggggggtctctcccataaaccaccttgaatggagagcattgcagggcagtttgataagaagaattatagcaaaattcagcccaaggaagccacttgagccaacttttaggccggtcaccggcgagacagcgaagatacataacaatcactcggttgaccacctcggactgcccatcagactgaggatgaaaagctgagctcatctgcagtttaacaccagccaagcgaaacagttctgtccagaaagaactagtaaagacagtatccctatcactcacaatggaggacggaataccatgaaggcgcacaatatcatcgaagaatgctttagcaacagatgcggcagtgtatggatgaccgagggaaataaaatgagcaaatttagagaaccgatctaccactgttaggatcacagacttgcccccaaccttcggaaagccttcgacaaaatccatcgagatatcactccagatttcggagggaacaggtagcggctgcagtaacccagcggggtgtagatgttcagttttattcctctggcataccgaacagccttgtacaaactctcgcacccttcgggcagctaaagggttgtagaaagaagaccgccatctgtgcaatgtcttctgaataccttcatgtccactttcatgtgcttcagctagcaaggaagaccacacagaagaggaagcaggaacaaacactttcccattatacaataataacccatcagactcagtccaaccaggaggagccgtcccattctgcagccctgctcgcagttctataccttggaaatcattagccaagtctgcccgaagtgtgtcaaaaagctgaaaaatcggggccgagatgctgtgaagggctgcaacatcttcatcacggcgggataaagcgtctgctgccccgttaagtttcccagggcggtattccaccgtgaggtcatacccaaataatttactgacccatgtgtgttgcggaatggtagaaagacgctggtccaatataaacttgaggctatagtgatcagtccgtaccgtgaatggacgcccccacaagtacggacgccaatgtcggactgctttgacaagaccaattaactcccgctcgtaggccggcagcttctggtggtgaggcgccaccactcgactgaagaatgcaatggcgccatccccttggtgcagtacggcaccaaaacccgtgccggaagcgtcacagtcgacgatgaagcgctcggagaagtccggaagctggagtagtggcgccatgatcaaggcttgcttaaggcggttaaaggcagttgtcgcctcttctgtccaagtgaa

SEQ ID NO: 4322 - DNA, 628 bp, Zea Mays
gccgtggttcttgcttttctttttcttcctgcctccgccctgggtgacgacatccgagtcgcacgtcttggtaacctctacctgtggtgctgagtgccaagcacgaccctcagcggctctggcacacttgtcagccagagcgaggagtgcggtgacgtcgtccacatcgcgtgtggccaatttttccaacatcttctcatcacgtaccccctggcagaaagcagagatgatggaagcatccgagatacgggggattgtcccacataccttggtgaagcgggaaatgaacgctcggagggtctccccgggctcctgcctcactgcgtggaggtgtgcctccactccgtgccgctggtaagcgctggcgaagttccccacgaaccgcgcacagagctcttcctaggagcagatggatcctggggcttgattcatgagccaagtccgggctggtcagatagggccacatggaagtaggttgccaatacgatggtgtctccacccgctgctgtaatggtggagacataaacctggaggaattctgatgggttcgtcgtgccatcgtactcctccggcagatgtggccgaaacttgggcggccacgtcgccgcgcggagatggtctgctaggg

SEQ ID NO: 4323 - DNA, 841 bp, Zea Mays
tggggtatgcaagcgcgccagccgttggatctcaacctgatggttgtgattagatcggtccatataatgaaccggtatgcgatcgcggccacaggattctaaatctacggtcaacatttaatgggacgcgattcaataaggaccatccgatccgcccaacggctcggatcaaatcaccgaaagggtacactctgctcttaatcggagccactacttccccgatcaacggctcaaaatccaccatggaaccatctactcttagccctccgataatgatcctatggcacagaagccatcttctacttccagcgcgaggacatggcggcggccattgttcccgcgacggaccctcgccgtcgctcaaccagtgttccccgaacacgcgccacagattccccaatctgaatcccataatcgatggcacactacgaatctgttgaaggattcataccgagggtgcggatgacggcaaggctggccacgcagatggcggactggcgacggagaacccgcttcgatgagcaattcccggcaccacagcgactttcctcttgattaatcctttctacacctccgtcagggtctggactaccaccgaatagctttgttggcgatcgattgatattgtcagcgcacttccgcagtggcggcccttcctagcccgcgcacccacactctggttcgtcccccccgacggctggggtggtttgggatgatttacgatgcatcggctcggcgcgccacaacttttatgggggaaggggagatccgagttggtcgtgacggcaacggtggtgcgagaatgccgccgcggcaatttcggccaggttgttgaggtgcc

SEQ ID NO: 4324 - DNA, 1185 bp, Zea Mays
gacactatctgattgggaacaaatgccacatcttcatcgatcacaatagtctgaagtacatcttcactcagccggacctcaacctccgtcaaagaagatggcttgaattgatcaaggattatgacctcgaaatccactaccaccccgggaaggccaacgtggtagcagacgccctcagccggaaacctttcgagattaaggggaccaactttttagaagattggaagaaagaatcagctcagctaaatgcatgtctgggagacaacggtagcctggaagtcaaaccaatgctagaagatctcatatgcaaggctcaacacctggacgcagagacagctagacttatggaaagagctcgcaaggagcaacatccagatcttaggacagatgaacaaggagttctttggctcaaaaaccgtctgtgtgtaccaatgggagaggcacggaaagtcctgctcaatgaggcccacaactcagcttactccatccacccaggaaccaccaagatgtacctggacctcaaaaccagatactggtggaaagggatgaagaaggaaatagcacagtatgtggcccggtgtgacacctgccagcgaatgaaggccgaacatcagaagcctgcaggcctgctgcaacccctcccagtacctgaatggaagtgggaagaaataggcatggatttcgtaaccggactgccccgaacgcagaaagggaatgattctatctgggtaataatcgatcgtctcaccaaggtggcccacttcgttccagtaaaaaccacttttggaggagccgcccttgcccgaatataccttaaggagatagtcaggctccatggcattccgcggaagatagtgtcagacagagggacgcagttcacctccaaattttggaaaggcctgcagctagcaatgggcaccaagttagatttcagcaccgcttatcacccccggtcggatggtcagacagaaagagtcaacaagatcctcgaagatctactaagagcatgtgtgttaatattcgatagggtttgggagtccagtttgccgtacgccgaattctcatacaacaacagccatcaggtcagcatcaaaatgtcaccgttcgaagcactgtatggaagaaaatgccagactcccctaatgtggtccaatgtaggggaaaggacactagaaggacccgact

SEQ ID NO: 4325 - DNA, 518 bp, Zea Mays
gtgacatgtttcatatctagatggttagtatcatcctttgtatactcgtgcaggtttccattaaaattgaaaaaactcatctcccacgatatcacatttttgaaatgattgtagtttaactgttcaagtgtgcataggctgctcatttggaaaaactgacttgtctattatttaaattgtctatatgcatgaagagtgtgaaaaccactaggatctatgatgaggagtttgctgatttgggatggggaagaggcgaaaatgagattgaggatgtgtttatcgttgttttgtaggtgataagtgcttatcaattgctatgagctactagcttaccacttctcgtagtttaggtgtttgataaaatgcatatttaaggacagattagttattattcaattcttgggtaatggagtaccgttggttggtccctacatagcatggtattggttctgtagatctaaatgagtgtcaagacagacaagattgacctaaatcctttgttaaatctgaaaatagag

SEQ ID NO: 4326 - DNA, 481 bp, Zea Mays
gtcgggtcctctggcacccgagctaggacaactggatcagctgcaatacatgtttgctcttctgatccttctgctgtgcttcgggcctgaaattttttcctgtccactgtactgtacatgtcaataaacgaggtatcagtatcactaacccctgaaattctaaataatagggaaatttttgggaacagcatcagtggaccaatcccatcagagttcggtagcctggcgaacctgatcagcctggacctgtccagcaacagcatctcaggagctatacccgcagccctcgggaacgccaagtccctgaagttcctgtgagtccgggaatacaatggttagtttcgttagttgccattggttctattcttgcatgaacgtttcttcaactctgtcggcaggcgtttggatcacaatcgccagacggggccgatcccaagggagcttgctgggctgcccaatcttggaattgtgtgagtactat

SEQ ID NO: 4327 - DNA, 659 bp, Zea Mays
gtcggcggtcaccgtgagcgatcctcgtcccagtcgccggtctagcccgggaaacctacccagaaggagggtctggggtggtagatggtgtgcaggagcgcgtgtgggcgcctgcgcgactaggctcgaggaatttctcgccggtgtgcatccttccgcctctcgtcgtggctggcgtatcacactgctccatcaccggtacatcctaactcaatcgaattaacctgctctgtagatcatgcagtacttgcccatgaaggaaaatgtgttctggggcgcgagatcagcttgcgccggtgagaccgccgccgtggagctttctgcgtcgtcgccccgctgattgagattagggtggttgcgttacccgtagatcagatcactgacggctcggatgaaagccgcgcaatagtatgtggccgggaccgttagatccagtttggacgatgcagattaggtcaacaaaataccccttcgttcaatagaatccggaccatagacagggatccaatggctgcgatctagtttctgtttgatccgcgcttgatctgttcaggaccgttcgtaggtaatctgacggcctaaacttcgccataccccttcgccctgtcgttcttgctaaagagaccctgggaaataaggtaatcaacccgcggtactgc

SEQ ID NO: 4328 - DNA, 313 bp, Zea Mays
gtcaggagcacgattgttattaccttgctggcggtgtggcataccttctatgttttgatgaagacggcgacgtaggcgcaaatctttggtggccgcttcatcataattaccttcttcatcaaacaccgcatcatcgggaagacgtggacgaggaggtggtggtggtggcggtgcttgttgttgcgtctccaacacagcaagtctgtcggcaatctgggacaatcgtcgatctagcctctcgtaagtcttgccaaggttcatgtcaatgaaggcatcatgcactgacttgtggaccgtctcctccatttgctcc

SEQ ID NO: 4329 - DNA, 716 bp, Zea Mays
tttgggaaacatgtttgcaaactcttggagttgctctaagtcaatactgtagactaccatgtgcccccgcctccgcctaatccacttgtgaaagccacccccgcgccatgagctgagaaagccatgagcgtgcacccgcctcccccgtgccccatcgtcgagaaagttgtcgcctcctcctactcagcctcggcccctggggtctggactgagcacacccaaaccatacttcgcttccaactaggccgcgacctcctgaacctccatgacacgtcgctggccaacgcctccctaacaccgcccatggccgccggtgtgcaactccagcaacgtgatcacgcgccaaaccagcaaaggggagaatcagaataggagcgctcaaactcatagataagtttgttaggattcagtttctatttcttttcttgtcaccagatccactccagattacagcttttatagccaagctaataaggccgggccattattacaaggcaaattaaccacattggcacccaaatcctggcttaacagcccatttacaactccacacaaatcaacacaaagattccatttgccataccagtagctgtactaacacttgcccctccggaagagcttgattgtccctaatcaagagctgtaggaaaccggttcttcaacacttcatagtcctcccaagtagtaacctcagctagcaaattggaccaattcac

SEQ ID NO: 4330 - DNA, 1122 bp, Zea Mays
tagcgaatgcccgacatcttcgtggcgtgtcttgacgatccttctccatcactgccgatacaacagcaccaacattccgtctgtaagggaaaattttcatctcacgagctaatcgagatgtaaacatgtcttcgccgcccacccggggaatcgtaacattcctaggccagtggcccccgataacctttagcattcacgcggaagattcccagagctcaggcgaagacatcatctcctcgggaaccgcgtaggtctccagcaaatccatagcaaaacgatcggaagccctccaccccttagttgctgtacctaatttcctcttcttggcggccgctctcggcgtagtttcccgtgaagggccctcgtcggccgttgtcatcacctttttcccctggcggacagcagcatcggcatcatcgtcccccgggtagccagcatacggcagacggttcaactcaaagacgcggttcaacctaacatttgaaccgcggatatcccaactcctcagagtctccgtcttcggcacatactttcctacaatcttcgtggcctcggcctccacttcacgcacaaacgcggccgggttgcgacctcgtaaatccaccacaaaggcaggacttcacactagctggccgcccagggtttgcatccgacggggggtcaattcgcccaatacccagccgtgcgccaagggccacactccataggcgataaattcctcaaccaagtcacgcccacaactcaggcgggcagcatgtcgaagggccccttcgtcctcgtcttcctccaccacctcgaatcgaggaaacgccacatagcagtgtgagcacagaatggccggagggaggctaggcaggtcttcgacgtcaccaggaggcacatagaaccaaaaattccaccagttgccccatttgttcctagcacaagggactatctccacgacttcagtcgaagtcttcccaatcctcggtgtgaatgtgcacgatccgaattatgctaccttatttcctattttcctcttctgccaatgcaggcaataatttttggcgaagacctccacagacggctgcccgccgtaggaagtaactgccagacatacttcgctagtgccaccatggcgtt

SEQ ID NO: 4331 - DNA, 425 bp, Zea Mays
gtgcaagaagattttaggaggcaagcgcgtgcatttggtatatcacccattactaattttccattgcatgaggtcgaaaccaaagaatacccacaagattcattggctgcaaatgggcatgcccaatcccagcctcattaggatgccgatgaactcctataacggccaaccacatcctccacctctatacgggaacaactcgtgcccttgcgcacaaccggacagtctaggcctgagaccagacggtccggcccagcgacggttggctctgtcccccatgacgagccatcgaagaccgcgtcggggacaatagacatgcttgaactgttcggctatatgtgcggtccgcgatagggtatgaggagcaaaacagtccaacacataggtgcagacggtcggatggtccgcacgggctttgcagacgg

SEQ ID NO: 4332 - DNA, 271 bp, Zea Mays
aattgatgaagccaaattaatacatacaccaatagggaacaatggttatttggacttgatacaagtgaagaaatggtggatcaaaaggtataccgttaatgatttctttatgatatacatgaaggtatatccgtaatgatggtatacatgataggttaggagtatcatcaattgaagaaagattgtccaacaccggttgagatggtttggatatgtacaacatagacctctagagggactagcgtgagttggatcctaaggtgcgatagta

SEQ ID NO: 4333 - DNA, 436 bp, Zea Mays
tcgtttcgttccagtttccgtggcgggtggttcgaatccccgatttgtcctccgcatgtggaagaagagtggtcggtgttgtctcgcggggtggtgacgaagatggatccgaaggggcgaaaccctaactgggaccgatggaatcagaaagatgcgcctcaaggatctcaatcgtggaacaagaatcggaatctcagctggagattgaagccgaatctgggcaaatcggatgtcaaggaagacatcggggcctcgtctgccggcgatggaggtcaatcaggtatcctcaaaacccctcccgcggctttgaaaaaagagattgagaatgtgcgtcgtcctttttgtcaaaagtgtggggttgatggtcaccatgctagagattgttttagatctttgtggtgtgacatttgtcacaaagaaacccacacgactgctc

SEQ ID NO: 4334 - DNA, 451 bp, Zea Mays
caatctcaaaaacttcagcatcatacttcacattttccaccttcacgtgcaatagcattctattaaaaccttaacaacatttcatgatactatgatagactatctcaaataaaattactcatctcacctcctatgtcaagcttcaatctataaagttatggtcagcaagtcgtgcaaaacattgtaagctgctggagatagcctaaacagtatagtatgcagtgcaaaactgtgttttgcacggccatatgcatattgctataggctaagagcactaaatcaatcaattagcaagaaagggcaaaaatacaacatgtacaaagaacggcgataggctacactgaacttaggtattatgcaatacagctggtgtctgctaactctaatgttgacatatttgtaaaacgccccttgtatcttacaccaaattgtatatttcatctgactaatg

SEQ ID NO: 4335 - DNA, 573 bp, Zea Mays
tggagctagtagtagtttctttcgacatctcccagtcattcataagaggccatactttgtaaggaatgtgttcctataccaaatcactagtaccgatgtaagtgcatactgtgttgaaagccattagacacgcctgcacttcgttcccaattgcaatggatggccttctaatgccgaagcaagaccatatgggacgctgaataatgcccctcacatcctccctctcactcaggtcattcttcacatagaaccattgtttcatgtaagaacccggccatttcttctgaaatgttagcacgggataacttgcctcagagcgaggcacgaagttgtaacacccaaagttgttatggtactgctccttcccagttgcctttgtctggtaagataattcatcaatattacagaagcacctaacatctggctctagcccttggctcctcatagcccaaatgaaaacccccactttaatcaaagcttcgggagtaagttgatgaaggtatatttccaacgtcttcagtacttcaaccagcatcttgtgcattggaaaacgaagcccagccttcatgaagc

SEQ ID NO: 4336 - DNA, 406 bp, Zea Mays
cggaaggtgcttcgggagtaggagcggcagctttttcaggcaaaatctgttctatagcttcttcctccgctgccttttctccaatttctgagggtttctccttggcaggctctgaaggctcagcttcggccgctagcctggctcattgtagctttggcttcggtcagttttgtttcggtttcaattggcactttcgaagccttggcaattttccctggagtagagcttgaatcctttaccgtctccagcacatctagtacactggccatcctttttctcttgggggtcgccgcaagaccattttgtgccttcggcattgtcacttctactgaagggcttaaaacttctaatgtttttgttccctcgattcttggctcctcagctttatcagtcttcggctcagcta

SEQ ID NO: 4337 - DNA, 380 bp, Zea Mays
gtcacagtggaccgacaacgagtagcggcgagtgagcgagcgcgaggaagaaagagagcaccaacggcgacaggaatgacgacagttgcaactgagaagcaaggaaacgtagagaaaaccctaaaatcaatggcatgacatttttatattccaaacccacattgaaatctaaaaaagcgcacaatgcaatgtcacaccaatcacgtcaccgcgccgcaacgatcatttcactattgcccccaagcatagcccaacttgcaatcgagggtagcctccgttcgctcttttagaaggacttcaggatcaactcatcaagttgagccattccctcaggagctaatgttgggacgagtgccaaatcagacctcggtcactctcag

SEQ ID NO: 4338 - DNA, 617 bp, Zea Mays
gatcccaatatagaggagtcctgcacttcctgccatataaagcttcgaatggtgacatcttcagactggcctggtaactattattataggagaattcaacatatggtagactcttgtcccaacttattccatgctgaagggcacaagctctcagcatatcctcaagtacttgattagtcctttcggtctggccatcagtttgagggtgataggccgaactgaagctcaactttgtatccatattctcatgaaagcttttccaaaatctggaggtaaactatgaacatctatcagaaatgatcttcttcggtacttcatgtaaacacacaatccgagccatgtataactctgccaattgagatcccttataagtagtcttgactggaatgaagtgggccactttggtcagtctatctacaatcacccatattgaatcataaccctttggggtgcgaggcaacctagtaatgaaatccatgccaatttcttcccacttccattcgggtacctttagcgggtgcagtagtccagctaatctttggtgttcagctttgactctttaacacacatcacacatagccacgtgtgcagccacatctctttttagcccataccac

SEQ ID NO: 4339 - DNA, 637 bp, Zea Mays
ggtttatagagctacaactttgatacagatggattaagtagttactacataaaaatctgagatctgggctctgcaaatcggtctgtcagatgctccgatgaaagtctgatagtacagtaaattgaataagatctcaggttcagcccccctcaacgccggtgatctcgcgcccggattcgtgccggcgtcgcgatgcacgcccagttaaacgcagataacgatcctcgaatgaaaactatggcgatggggatgatcttgggacactgtttcgccctggccgccgtacccacttgccttatggcccgtccagataacctcgccggagttggccgcctgccgctcgggtgccacgtgcctaggtgctctaccatgtcgcaataaatcgccttagaaagttcgttcatcgccggtggtcgtgccacagtgaaagccatgaatcacttgcgccagtgacctcccttctctccggccgccaacgcgccattccaaaattgggtgccactgcccttggacactataaattggtgccccaacctgctctgctaagtaattacgcacccagtgaaccagccctcacctccaaccgtcccccacaactccccaatttgggttttcccccaattttgttctctgcgcc

SEQ ID NO: 4340 - DNA, 500 bp, Zea Mays
gttacagagtttgtggttgttgttatcagctaagattaggtagtataatagcgctggcccggatagtgggtggtggcatcgttgaatcctgatctttgacctcagggagatatccctaggcatgaccttagttggttgtgcttggcaatggccttgctggaggcattgtttgttggtcaaggattgactctctgtagtgaaagcctttggtctggtcttcagtggttggaccatgacaacgatggtgtgtgtattatgttctccttggagatgttgtctttagagagtcttcgttaggacccatgttttgctatgttggtggtttgttatgaagacaacagagtgtgacgtagttcgccatttctagctagttttggttggtcttttatgtgagtgtggttgtgtacaccctagctgtgtagaggccgggagtcttcttagtccaattgtatcccctggataatttgctaagtttaataaagcttcattttttaaaaatg

SEQ ID NO: 4341 - DNA, 507 bp, Zea Mays
tgggaatattatttcccctagatctgattctacccgctcgatctggatcaacggctacaatttgatacaaccaagcgttatctaggttctaatccagaccacccatcacgaatctaacggcctgggcgatcttcctcccccaggtcggaactgggcggcgacagcgagcccctgcggcacgacggacaccatggccggcgcaaacaccctgatgcacagagctcccaaacaccgagacaacctaagcaaaacgatgcagggactacgacgaatgcggcagggagtaactcaccgacaagtacgcagcgtggaatccccaactccacagacgcgcgccccacggtgcagatcctcaccgacgagcaattctggccctcacacaacactacaccccagcagtgtctgcggattggttccttccccacttggcgatcacccggccctgcgcccgagccacggatttcgcccagggcgtagaatcgcagcggaggcggcggcgctcacacc

SEQ ID NO: 4342 - DNA, 564 bp, Zea Mays
gcgggttctaatctctaaaaccataagggttcttttgcaaaacctgtgccgcgaagggtatcgcaagatacgagttgttggatcggcaacaaagcgcccagattagatcccgtttgccccgaaccggtatgcgatgccgaccaccagatccaaaatctagggctagatcgcacacaagcgaatcattgtgcgcgagttgatcaaggccgtcggtcggtagataaacggccaagacacattcgccccgcagactaaccggagccgtccgatgcagatcccacgccccatggtcgtcttctaccaggcgacagcacgcgcgtgcgttaaaccacggcggcagatcgcccgagccgcatgcccctcgcccctactgtgactaaaagtgaaccccgacgagtgctacgcgaagccacagttatgccgaatagtagggaggagtaattacccgagttggcgcgacgagggagactaatccgcggtgatggcggatctccaggttcacgcatagtccggtgagcggtcccggcatcgcaagcgtccaatccccggtgaaacggtcacgac

SEQ ID NO: 4343 - DNA, 581 bp, Zea Mays
ctttttgttaattatatctccccttcttaaaagtcttctaacacttagttacataagactaaaggtaagctttaatgcaaaatttctccccctttgtcataaatctccaaaaaggatacaaagaatataaagggtagaaattatgattaagcaagatgggaacacactattatgaaaagggtcctgagatggcacaaaggtaatggagaagtgacatgaagtgatgtacctttgcattttacctttttaaggggagttccaaacttgtgttggatttacaattcatttgcaagctcttgttggtatagttgtgacataggtccaagatattaaatgaagattgtcatactaaatcgaaggtgacgcttgatacctggagtctagatgtcacctagcattttcttatcataacaagaggcaacatgaaaattgcacaagtgtggattatacaactagtgatcatgtatgaaaaatatcaattgaaaaacaccaattgatacaatttgatagataagcatatcactaatttcatattacattaagttctcatcaagttttattgcacacatatatatgtgttc

SEQ ID NO: 4344 - DNA, 601 bp, Zea Mays
tcatttttgagtactttcttcttttctttccacaaattctacatggcataaatgattcattaatccgttgaaagtgcttctatgctcctttgccgcgatctcccaccacttagcaatggaggcaacattggctttggaggacaagagaaagtttctcaatccagtgccctcctccagatgtcattagtgaatgggcatatgatagggacatatgtagtccaatttcctgttgcacatgatgcttggtgttgccgtcccctccttgctaggttgtctgctgttaaaactttgttttgaattagagtcccacacgacgaagttgcatttatttattttccgcttctgctttccaaaataggttgtgttacggctcaaaagaaccggcgaatcagatttgatatgccgacatagcggtgtatttcctattagccatcaatctccaagtgatagagtctgtgacctctggttgcagatttacgtcctggagtcatagccaaatggaaatactttccttaagttgaatgagtgattctttccagttggcttctaatccacgcattattcctcagctccaggctagctgatttgttcttgtacttaa

SEQ ID NO: 4345 - DNA, 396 bp, Zea Mays
aaaaactgaaacggattattttaggacggagagagtatttgataacaagaatccatacggaaccaaacgcagcctaattcctctcaaattttcgcacttactattggactattggcacggtggctacggttgcacgagcagaaactgtggagggaacaaacttgctggccgagcaggcacaaagagagttcaagtacctgaatgagaacgacagatgcttgtcaccgaactggtgcttgtccggagcggagcccagaggcgtgaggagagcattgacagacgtgacgtgacgtatggtgataactgatgcgaggcacagcacagtgagagtgagggatacgggcatacggcgaacatgaacctcggttttcccgagccgagcaggtccgatcaaag

SEQ ID NO: 4346 - DNA, 583 bp, Zea Mays
gcatttcatgacagtcctatgggagggcactctggatttccagttacctaccgccggattcatcaactgtttggatggccttacatgaaacaacaggtgaaagattatgtggcagcttgctccatttgccaactgtccaagcccgataggtccaaatatcctagactgctctagcccctccccgtgccagaacaagcttggcaggtagtgtcgatggacttcatcgagggtatgcctcgttctgctcatgctaatagcatcttagtggtcgtggataagttttcgcgctatgcccattttattccactcttgcatccttacacagctttcaaagtggcccagctgtttatgtcatctgtttacaagctacacggcatgccagaagctatcatttccgactgtgatcgcattttcaccagctctctgtggcaggaattgttcaagctggctggtacacagctgcgtatggggtcagcctaccatcctcattcggacggccagaccgagcgcgtcaatcagtgtttggagacctatttacgctatttcatccatgcctgtccgcacaagtggaacccgtggttgt

SEQ ID NO: 4347 - DNA, 390 bp, Zea Mays
ctctctactgcttccatggacgtccacattggatcgcccctagtccggtccgaggaggttgcagtgacgcacgtttctacggctctcgctggtcaaggcgctttagaggtcagctagccagacgccaggagcctgccgcctgctggtggggctgaagttaccccgagtcgtgctcttgagattgttcctgctgatcttccctcatcgagccatgcaccgactcttcctgcgttgggtcttcccctattcctttccaatcttcaagtgagtcaactttttgctctttattattcgtactggcgaattatcttttttgtttatctatccatgaccacaggattttgttgacggtgtatccgcccaactgagatcttgcggcgctactgttcc

SEQ ID NO: 4348 - DNA, 469 bp, Zea Mays
cgcggatgagcttgaagcattgttccgtcctatgccgtgcccacttgcgccagcgacgtggccaagcggccgtcaccggagtttgcacccttcaccacggttgcgccacgtctcaggccatttaccatgtcgcactaagccgctttagatagttgggtcatcgtcggtaagcttgcctcggtgaatgccatgaatcccttgcgcctatgctctttcccctcttcggccgccgcgcgtcttctccaaattagccgccaccgttcatgaatcctataaattgagcgtgccatcagctctgctaggtagttgtgcatccagtgaactagctctcacctccaatcatcccctatagctccctaatttgagactttccccaaatcggtcaggaacaccgtgctgtgtgagctcgccgcggtcagcttcacaggtccgatcatgccctcctagcttctgttttagcatccctgtg

SEQ ID NO: 4349 - DNA, 539 bp, Zea Mays
acatgacttatgtttgtgggtgaaacacatgttcaagcagacacatgttcaggcagagaatcatattacaaagtaaatgaacatgtcaggaattgtactgaacaataaagaacataaatgtattgcatggaaccacactgaattgtgacatactcaaggtgtgagttgaatgccatatattggtgaagacaacaatggtacaaaagggtcacattcctcagaaacgatacaaatagaatttgttaagtaaattaatagctgcttgagttgactcaacatcagtgggaaaatggaatagactggcatgggtaaggttaggcaactaacagtttcaaaaccttggttgcattggcaactacgggtcaactgatgtggttctactgtcgaccgtttgcatctcctacaaacatgacgcccaaatgtagggttccaagttgttccgaatgcccagaccaattagtgtaggtttggccatcccagcggttggtacagagaaaggttgttcttacgggggctaaatctgatgaccaagaccgtaa

SEQ ID NO: 4350 - DNA, 472 bp, Zea Mays
aaacgacccattatagaattatgaaccctggtgtttactgaaatcgaacttcgaagacatgtattgccaaaataggaccgcgatggtcatacgcttcactcttttggacctgagctcttgcaaacacatttgacctcagttgatagtgtgtttgccatgtgaattaactttcctatccctgctcattggatgcctagctcacctctatcttatgcgggttctaaggagtatggtggtccatttctagaatttcagcaccggtcaccacccctcgttccccgcttcccaagatccacctctattctccatcccactggtctggtcccccttcggagaggacaatgcaaactagggtgatcctgagctgactccatagactaccccggttgagcctacgtcgacgacctcaaacgacggacccaacatgtctagttccaccactagtgcacattcttcatccttatcttgtgga

SEQ ID NO: 4351 - DNA, 491 bp, Zea Mays
tgctgggcaagatgcgacccgagcggtgtcttgcgcatcgtcgactttggagggcagtcttcaatgtcaagacgctggtctgagtcacccgactcccatggaggtgactgaggagccctcagccttagaggtggccgctataggagacccagcccccgagggtggtgccggaagttacccagcccccgtgggtgttgctggtagtgatccagctctggtgggtagtgcaagctatgacccagcccccgagggtgttcaggtgggctctctttcccacgcctccatggatgtccacgttgggtcgtccccacctcggtccgatggggcgacggctgcacatgcttccacagttttaaatggactagtcgccttagaggtcggcgagcttgatgcgaggagcctgctgcctgctggcggggctgagatcacccctgatgatgcccttcagattgttcctgctgatcttccctcgtcaagccatgacatagctc

SEQ ID NO: 4352 - DNA, 867 bp, Zea Mays
gaaaaacacccctgaatctgcttcgtcagacagactgaaaaagatcctgatggtacagtgaacgaaaagatcttcaggtgtagtgaatgtgccatcggtgaactccgcgccatgatcctcgccggtgtcgcgattcgtgcgctctgagtgcagatattagccggtggtgaaaagatcttgactgcggatgaggtcgtgagctggccgccatacccacttgcctagcggccggtctagatgacttcgccgtaggtctgccgcttgccgcccggatgccacgtactgagaagcattaccacgtcgcagtaaactgccttaagtagcttgttcatctcctgagacactaccccagtgaaagccacgacagctcgcactagtgaacttcccctctctccggccgccagcacgccttcttcaaattggacacccaccgccgatagattctataaattgctaccccagtgagctccgctaggttattatgcacctagtgaaccagccctcgcctccaatcgttcaccatagctcctcaatttggaatttcccccaaatcgggttttctgcgccgccgagagtctctcactgtggccagccctcctcaggttggttcatgcttctctgttggatgttctagcatcccttaggtctcttgttgcttgtaggctcggttgattgaactaaactgtgctgaattgccaagaacatcatagtttctcctcagatcttgtcgtcgtcgtgggcagacgaactccgagtcggattcgtgcaattaatgaagggatagtgtcgctgagggtggaattaggtgtcagccaagttagggctctggtcgttgagtatctcggtcggtatgggttcgccggaggg

SEQ ID NO: 4353 - DNA, 489 bp, Zea Mays
actacatgagctcccaaccacctgatcaaagatctacgatgacgcgaatcctagccaaaacattattctaccctctaatcagggtcgtccatcgctggatccacgaccgcacgccccttcctcatcctgtcacggccagaatagtggtgtcgccgccccatacggctgcgagttcgcgagactgccaccccattccagcagtaggtcataactcgtgcgcgaactcaagaaaaacagagaggggatcttcatgagcttgatagaagagaccataccggcggtaaggaggccgaagcgagctgttcatggagtggggcgacttcgcggcgacgtggcaactatggcgagaaattcgcaccgcaccagggttctacacgtggaattggcgatgcccaaaactcacacaagtcccgacaaggcgcccggaccgccttcctagcccttggcaacaacaccagcaagacccacgtttgatggcaccctacgctc

SEQ ID NO: 4354 - DNA, 403 bp, Zea Mays
gtttagtgtccgaccgcacaccggggtaccctcgtggtgcttttgggtaggacggtgtcgtagattgtaactcgatggttcgtgccagaggcacgaggaagagagagtcaggtgattgtctgcaggctcgggccgcttgagaagcgtaataccctactttctgggatggctttgtgcgtgtagggtgtttacaagtggtgtcttcctagtggaggggtgctaatgagatgaaaataatgggatccccctaggccttatttacacgaccgtagggcactccccgcacacatgctaatcacactcttccaacttatctcctagctaatagcgaatagactccacttatcccgaggaaaacccgacatctccgtttcgagctatcaccggcgtttgaggacgtcgg

SEQ ID NO: 4355 - DNA, 324 bp, Zea Mays
tcagggcaatccccggtgggatgtgcgcagtcttcaccgtgaaagaggcagtagaaccttcgcggctgcggagctcagcctctgcctcttcctctggtgttggcaccgtggcccttttgtgtgggatactcctggcgacgagttgtgtcttcggtagggtgttggttggcgatggtgttaacgtgttgctggttgcggtttggcctgtcgtattcggactgcgctggtctgacccatgttctgctggactgcggagtgtccttgggtttccgctgagattctatcttgtgctgatgtagctctttggacctggcgtacttttca

SEQ ID NO: 4356 - DNA, 386 bp, Zea Mays
aaaccagggcccatccgcaattgccttatacaaggataggacggcaggttgattttactgaaatccgagggctcctatgtaaaaggggttctgcgaaggggtatcggcgaagatcggccgcccgatccaacgcggaggcccagatcagcctagtcctataaacgaaccagtatccaataacggccactggattcacgatctacggtccacacttaaatagatgagaccaaatccgatccgctggattccccatggacggtcccgatcacaaccctgaagcggtaaccggaatcgaatctccaacgtccatctgtgatcaacggcccacgcgcgtcttccccacccctatccgagccgggcggctctgtgcgcacacgacggcggcg

SEQ ID NO: 4357 - DNA, 675 bp, Zea Mays
cgggggagtggatttggtcgcggggtgaagcttatcacctgcgcctgtagccgtgcgacgtggccggaccgccggtgtcgccgtggtactccagcgacctcaattatgtcacgtcgtagctctttaccgcgtagtagtaaacgtggcacgcctaggcttgccacgactaagccaccagtgacctcccctctctccggccgccagcgtgcctttgcgaaattggacgccaccctgatggaacctataaattatacccccagggaactccgctaggtatccacgcatccagcgcacccgtccgtgtcgcggattgtccaccagagagctctaatttagagtttcccccaatccagttcttcgtgccaccgtgagtgagctcgccgtgcccagccttctgtaggtccgttcacaccctcctcgctctcgttttagcacccttgtgtgctatggatactcatcgacctagccaattgaactaaaccaccttagatcaccgggaacacctcggtttgtcctcagtttgcgccatcaccgtggacagagagattgtgagatagaactccgaaattggttgagggattaaggtcattatgggtagaattaggtgtcagccacacttgagcgccggtcattacgttttccagccggtacaggctcgccggagccactgctccg

SEQ ID NO: 4358 - DNA, 283 bp, Zea Mays
tttatccttccagtggacccgggggatatctgtcccccacagacctgcacaccatcgtgacagccgtgacctccccgacgtcatcgaccaccccaccgtagctctactgccgccggtaagcctcgccgccgtgatctttgccccggttactgttccagccagccaaggatcgtgggttagatataggataagtccagggggttatgcgtaaggtcactgactcatgcaaatagtagaccgagggctgattcgtgagagaaaagggggaagaaaacccagggac

SEQ ID NO: 4359 - DNA, 563 bp, Zea Mays
aactaaacgaacatgctatcgacgtgcacagcaggccgctgcatatagctggcttgtttgctgcgcccagggttctttggctttggctggctagattgtggtttctccttccctatcatatggagtaatacaagcttctagaacatgaacatcattacagagtacccaccatgatttgatcgatcgattgatgggaccggtgtcaccattagggcagatatacgtcccttgctcggtcgggaagcaaatggctcgtgccgtcagcccgtcatgcgtcaacaagacctgtgagccatggtaccgagaaaaccatctgtggtggcgggtcctggttaattaatgaggtcatcccacgtctacatgacgcgagaggtctttcagcgcaacatatatatagctgtcatagtactcctactgccgattccattttgtttgcagtctcgcatgtacttagtatcctcctcctctattaaaaagtactaataaagcccgcgtttttttttgtatgtgattccaaaacagaagaggtccctaggatcagtttaaagttagacatccaaatc

SEQ ID NO: 4360 - DNA, 618 bp, Zea Mays
ctgtcgcacatgttcaattagaaaatgggggcggggttagcaaaaccggacaactccggcgaggatggggaatggcgccaccgtggggggaactctgctccgccgtcggcattcgttccgcgggtgagcaaataggtttggtccgttgatcttgagagaaacggcgtagatcgtgacgcgcatcctgttttggtctagttaaatcggtgtcgtgggatctagatccaaaagcccttatcgcgtaccggttcaactaatgtagatctaatctaggccgtggaagtgagatcgtgcggtctacatagaatgctggtttatttacacctaagtctaatcctgggcgctcgcagtggatcggacagctcacgggagccgataccgcttcgccggctgatttgcaatagagcccttcgcttattagataactaacccgccatccagaggatactattcaccgagtctagagttttcttgcgccaagccccctgctgtctctggtaatcttgcgcccagtccagagccggctgtaaattgaataatgaattagaaatagatttttaatatgagaataaaccctagaaattgtataatccatagaaaattcatatgaaccccgaa

SEQ ID NO: 4361 - DNA, 729 bp, Zea Mays
tttgatctcaaccacaaccacaattgtctgaattcccatttgatacaagtaatttttgtatacacttctcacagatcagccactatgcctcacaattaacatataaacttgtggaatctaactaattaacatatattctctgaagattatagcaggaacacccttttgcttggacgaattgccttgtgtggttccaaaatataaattaggggcacacgggttgtgggggatgttgttttagggaggtgaatgtggttcctaaggtgagaagatggtcgcgacctagaagggaagggatggggatggccgctcctgctcccttttgacctaggaattacagaggggaggaggaagacgtggtggctggttaggaattaccgaggggaggaggaagacattgtggccgcccctgctccgtagattgatctattgacagggaacagaaggaaatcttgaaggagatctagtgagcttcgattcaggcggggttgttgtagatcgtgtcaattccttttctgtttacgcgcgggttgaggtaggtattcacgccaatcactgtggtcgtcgtgaaggaaaagttggattctatgtttaacgatcacagaggtcagctcgctaaccatgacatgtttttggtcgtcggctgggttggacagagcttgcactgtgccgccgagactcctcacaaccacatattacaggtggtcttcattttctggtcgttgataa

SEQ ID NO: 4362 - DNA, 644 bp, Zea Mays
gtaaaagggtctgtggaggtggttgtctatcatgtggaaaatgctaagcctatcacgtggaaaagacccctaactgtcgagaaaatggtccccggaacccactggtcagtaagcacactaggagaagggcccttagtcgctagggtccgtcggtcagttgggagaggcagatatgtaaaccctaaaaggatctgcccccagtcaaaccccgttgcaccaagcctagggtcgggactcgggcgtggcagaacctaacaagggaggccaggcatgtcgaaagggaaccactcgagtggataccgtgttggccccagatttactcgccataaatagacgatcacatttaaccatgcctcgcaccgaggcatagcgcaacgccagtacgcttcccactcatgacctacgagcacctcgggccgtatatcactcatgacctacgagcccttcggactacggcgtgttgatggcccacgcacccctcggcctatggcgcacttatggcctaccgcactaggcctgagtacgcagacctcccgcaaggcactacacgacgggatccgccgagacctaggctacgaaggcaaggggtcggtgtagccataatgatgacgccaaggaccatcgtcgcccccacgtcatccgcc

SEQ ID NO: 4363 - DNA, 343 bp, Zea Mays
tgaggtcgccacgacggaggacacgaatccactgcgttagtaatctcccctctctccggccgccagcactgctcggccaaattgagcaccaccacgtaagccctctataaattgatggtcgggtcagctgcgctatgtcatcacgaaaccaaagcacccgctcccaccctcaatcattcgccagagctcacgaatttctagttttccccaaatcggttcatcccaccgcaagaacatcctcgtcgtggccagtacaattgaggtcagttcaaaccttctgctcccttgtttgggtgatctcacatacctgtgatactcatcgacctgcccaattgaactgagc

SEQ ID NO: 4364 - DNA, 394 bp, Zea Mays
caaagcccgcacgtcttccctcaccatctcctcagcgcgcatcttgctccagctcccggccatggcactcgtaccggacccaaccctcgctcctcgctggtcgcgcgtgccaggctgctagccgcacaattcctcgccactctcgccttggctgcgctcggcctccacctcaagccgcgccctaggatcttcctagagcccccatcccctcgacaccggttctcagctccttcacctccctatgcttggtcgccgtccttagcgccgatgtccctcctcctccctcaactccggctgcgctgatctccatgtcgtggtcgcgtcctgctcagctctaattccccacggccatctctacgcgctcccttgacgtcgtgtgtcaagtccctgctca

SEQ ID NO: 4365 - DNA, 713 bp, Zea Mays
cggtaggtaggtcgaggatgctctggtgatggtggaacttgttctatgaagctctagaatggcaatgtgaacactagtggcaaggggagagagctatggtggctaggatcttgaagcgaggtgaccacagtatgctggggttgggatttatacgatcatgccatagattggagggagacaacaccaatggaatctagggaggagcgagggggaggaatggctagattgaatgaacattgtatccgttgtcgggtgatgtgcgcaaggacgacattcaggccttgcaggggtgagatcgacacagggggtgttcactattgaacaatgaacacgagcaggaggtcagggatgacacgtaggctccacactctagagggagagagggcgtgcattcatggattgcaactgaccagccggtcccacgtattagcaagcgtgggcatgggggactggcgttcggatgataaatgcggacctcgcccacgaccccctccctccgtgctcacatctagcgatcgtacgcattgaaacctcgaagatcggtgggtaggagattggtgagcgccaccacgacagatttgggcggtctgcactgtcgggacgctgttgttggggcagagaggatcactggtgcaagctgcttgcgatagaaacctcccgaggccggatcgtgagcagggcagcttctaattgctcgccatagtacgctttcc

SEQ ID NO: 4366 - DNA, 597 bp, Zea Mays
tgagcacataagaattctactgagctactacacaaatgacttcgctgttcactaaacagccatttagcccatttaaacactatttagacgccacacaatggctactcgtgtccattaatcagacacttatcctgtttaagtgcccatttagaccatttaaactgtcatttagctcaaataaaacagctaaaacataggtgaccaactccttaatgtttaagatatgggtgaacactgacctaaactgtactctccgaccttttcacttcagagaaaatgtccattccagcaatttactaccttctaagggcaagtttggaagcacggcaatctatccaaaacccatgtaaattaaagaccacaattcttttccagcctaagatggaaattgctgcttggatgaccggtgagctcactaaaactacacctgttttgggctaaaaccatcagggggaaaaaacatgaatggagatccaggaaaaaaacgagaaacatcaggctcctccagtgcatctcgcatgtttgtctcagcagctgcgatcgcagcccggttccccgagtgccgtctcaacaatggcgcccagctctgcgtccttc

SEQ ID NO: 4367 - DNA, 310 bp, Zea Mays
ttgttgaactgtttaaattttgatctcagttttgcttggcatctaaaatgtttgtgagcaagttgccgagaaaacctaatatactataggtgacacaacaaaattctacgtgcatggctgcattgacgttttcatgcaatattgtcgtttttgtgagcgttacgacaaaaatcaattaatgactattttggtgtgctgcaatttttgcttgtgctagtgaaattatttgagcaggagatgtatttattgagtccaatgtatttcttccttctatatagttctttatttgcattgcatgcaattttattac

SEQ ID NO: 4368 - DNA, 770 bp, Zea Mays
cgtcaggaggggtgggtcgtgctgagataagagctctacacactgttgtagattactgccatcctacacgctcgccttccacagtccacaccgagggccacgcacgagcgactgcacggtgggggctattgcgccgagaaagtggaggcgaggttgatagctgggagaactccccggtgatgcgtgtgacatggacgaccgaggggagggacgcgcgctccgcagttagggtccctaccaccataacctccgcgcgacgagtgcatcgatctggggttcagcttcgagccagcccccgcggagtccgtctgcgcgacatccggttgtctcaatcgccagctcccagatggcctcctccttcgcgggtctctccattgccgaccatgatctaatctctcgtccggtagcctcggttcgggcgaagcggtttgacggagagatggaggagtggtgtttgtggatcatccatgagtggggtgggggacgttggagggggcggtagcaatctcgggcgagcggggcacaacgacaatcttggtgggaggcgcgggtgaggtgtggacgacgcacgaagtgtgttgcggttgcggagggagaggcagaacctgagcaaggcagaaccagggagaggcagactactcttagattcttaataagtagtagagaatatccgtatcagaacatgtgggttcttttactactcatatccaatacccgacttaggtacccatcctgttctcacccaaaagaagaaaatatttgtatacgtc

SEQ ID NO: 4369 - DNA, 476 bp, Zea Mays
gatctaacaccacaggcgagataccccgaaacggtatacccagtctaatccacgccgtcggtgtaagatccaacggtcgtcgtgtctcttcccacctccagccagagacggcggcgctggcacagcccatggcggagccatcgccggagccgcgcaatccaacgccaaggcgcgtaatacatcgatccgagactcgcaacgcaacgtggaggaaatcacaaacatggtaggtaggatacttaccaacgacagaggcgaataggggggctgcccacggcgtactatagcccagccgccgtatccaaccctggcaacgaactctggccaactcgactagtttctcgacccgccaccgaagcgtacaggttgagcgtgatctggtgatgatccattgataggcgccatggacgaaacgccctcctaatttcccttcgacgtcagcagccctggcgacgagttccctacgcaggcgcgag

SEQ ID NO: 4370 - DNA, 674 bp, Zea Mays
gtcgaacacagatagcactcctcggtaaggaatatcgcgctgtagataaactccagccacttttctcaccgaccgtcgtgtcccaccatggtcaatcacgctggcatcaccggcgctcgccgttatccggccaggctacgtgcctcgacactttaccatgtcgcggtgagtcaccataaaccgctatatagtcctagcttgtcgccggtgggtctgccacggtgaagtccacgaatcaccgcgccaatgactcggttcccctctcgaccgccagcgcaattcgtccaaattaaacacgactgctcaagcacactataaattgagcacaccgacgggtccgtagggttgtcacgcaccaagccaccaagccgtgcctccaattgttcaccagagctcgccaattccaaatttcccccaaatctgctttgcgccaccatgaaagagacctcgccgtggctagctcgtcttaggtcctctcgtaccctttgccctttcgtttcagtgttctggtgtgttcctgatgctccccgaccccgccaattggactaggaccccttagatcaccggaacgcgttcgattgcccgtggtacccgctgtcaccgtggacagagcgtgttagagctctgttaatgaaattagttgaggggaaactcttgttagggcttgaattagg

SEQ ID NO: 4371 - DNA, 605 bp, Zea Mays
aatgatgagtctataaatcttggcaaaagagcatcggtggacaggcaaggtcttgatgacctttcttatgaaaaaactggcaaaaaagctagaaatgtaggggacaagtctgttaaagaagagttgagacttgaaaacattggggatatgatgtctcaaggcaaatcttctggtcgggggcctgacttgggtgataacaatgaaaacctgaacccggtatctgaagataaaggttatgacaataatcctataaatgaagatgaagagtttcatgagagtgaagatgacctcctgagttctcaagatttggaagaatttgccaaagatgatgaggggtgtttaccttcaagccaagaaaaaatcaacaagtctcctttgggtgctcaagctaaaggctctggaaaagctaaagctgaaaaacaagtaatgaatatggaagtggagcatggtgaaggcattaggaggaggagcagacttgaatccaatgacgacatgaagattgctgacaaagctgcagcgagagctatggctaaagatgccttcataaacaaaggtatgaactctaatcctttttctgttcttaatactgaaaattatgtacttat

SEQ ID NO: 4372 - DNA, 947 bp, Zea Mays
actattacttcttcagttgcattagaagcttctgcaagcattggcaaaacaagtaatgtaaaccaccagctcccaagttaaacagtattttttggagtgaatctattacttctctttctttcagaaaagtgtaaaagttagttaatatttttccaggtaacaatccagccgagatgggagcgctaaatgaatgcattcaggagttgcttgatggtattcaggttgaccttgttagttttccttacatattgcataatttagactaaatactgatgagccaagagctgagttaccaacattttgggctgcgttgttgagccttcacttgttttatatggttccttttcaggaggacttttatgctttggttgactgggcattcaagctagatccattgagttgcatatcaatgcatggactaacagatcggtatctttctggtcagaaagcagaggtctccggatatgtacaagtgttgcttgatgacttggagacaagaataacaattttattcagcagggtttgactctactattaggctagccttttttctactttggagagttcttccatatgttccttactctttcatattctggccagtgcagtttgttgatgatgcctgctaccagattgagaaatatgagcgtaatgtgcgtcaaattggagttgtgccctatattcccaggtctgttattatggcttcaatagatatacctgctataggttctctatggggtatacataactatgtttatctgaatgtgttcatattcttttctattatataggttctcacaacttgcagcacgtatggagcagtatatcaatggatccagggatctagttgaccaggcatatactaaaattgtatgaacttactataacattcaccattcaatgctaaacaccatttaacaaaatatacgccaactactgatgcattt

SEQ ID NO: 4373 - DNA, 981 bp, Zea Mays
atttgagtttgaatatttgactcaaaggtgaagtccacaaaaggattcaaattcaaactagagattcaaatgaaaagaaaataaatcaaaaaaagggaaaggaaactcacctgtgccgcagaccaacaattcggcctaaaccgaatgccacccgcgcgacccagacttctcctccaccgcgtgtaatgatgctctctgctgcgcgggccccttctgtcagccacactgtggcgccatatctcaaatactgactggtgggacctcccggttggtctctcgcgcctgcttcctgcgtctgtaccacggactcactgggcccacgcgtcagtccctaccttccctatccgcgagctcgacggtaacaacatctccgccatctacgcgcgtagctcccttccaaccacccttcgtgctcggtcttccgtggatcctggcatgcgccaaccccgctgataaaggggagagtatccccttgaccacgcgcgaccgtgaccatttgtgatactcactgccagagagagaactaatcgctgccagggacctccgtcgtcgtcctcggtgccctccatgaattggcaccctgtgcgcggtcgggtaggttctcattagctcgtggatcgcgttgagggtggtggcagggtagcggtgcggcttgggcaccatcaatttaacaccggacgtgagtttccgccgtgcgctgtggaaagcctgggtcacctcctcgaatcttggtgagtaacatcctccgcatgaccataccgttaccgcttcacgcttctgctttcaggttagagattaggggcggcatgtgggtcggggcaatcgccggccatggcgccgccgtgtcttcacgttgaggaaggaaggaggagatatcgtggtcgttgatctctcaagcaacggtgacgattagaattgatataccaattcgaccaggggaatctacactgttggatgacatcggacggatcagtagttgtc

SEQ ID NO: 4374 - DNA, 907 bp, Zea Mays
gagcgggaagcgtagggcaaggcctggacacgtgccggcaccggacccctactcatgccgggatcctcctcgtcccgagaccttgccaaggcccggaccttactcggaaggacccggggcttacccgaggcacctggcatgccctcttgggagctccggactcgtacgtacaggggtccggtgtccctctgcggaggtccggacccatcgatgcaccctgggaagtattatctttccttgccacgtggtgcccctcgacctgcccatgtggtggggtcgggtgccgctctccgtgtggcctggaggtgtcatacgggtgcagcgccttcatactgtagaagagggtacccctgattcagggtaccgacagtggcccccgggcccacctcagaggaggatgcgagtctgcaggtggggctagagtctgattggcggttggcctgctgctcctgcgcgcctgttgatgtaattactgccggcccgcctatggtcatgccgactgctacgcctattcccacggctgactggcccgtgaccttcgtacttaatgtcactgttgggccatgcgcggggtgcctcgagtcgctgcactggttctgaaaaacttaccttttcagacttccgcgatggccccgagaagacgtggcattggcgcaagcggtggtgcaatttttccgcacccggtaaccgacacgccggttgcatgacatgtgggcctgggcccccgggttggaccgccggttgcagcgaagctgagggggcgcacaaccgcggggcggttgtacgcttcttgcatggcagttcgcctttttgaccgctcgttatggcacagatgaaggggcgcttaaccgtggggcggttgcatgccccttgtgcggcggttcaccttcctgaccgctggttgccc

SEQ ID NO: 4375 - DNA, 607 bp, Zea Mays
tgaacggctgcgggcggcgctgctcctctccgcggcggtgaggtcgccggaattgaggcaggcgtgagctagggggtcccgaggtcgccggagttgggcagagaggaagagggcgccacggcaaactcaatggcagagaaggggccatgaatccacgggtagagaggggagaacggtggtaagaaggcctcgggcgggccagagtaactctggtgagccattccggccacggggaggggacttaaggcgcgctaaggccttggctaacttcagcagaggcaggggtgacacagggacctactccggtgaactagaccaggctaaatcggccggtcaccgcacgagcacggaggaccgccgcggccgagcaccgacgtaggcgaaattggccaaacacagggcgcaataggggaaattgggcacggggacggatgtctcaactcggggcggagctcggtgaggcttggggtggtctccggcgagctggatggccgggaacatgggcgcgggtctccggcggcggctggcaacgtgagcagagcgcgagagagggtgaagctgagcgaaatgaggcgaggggtgtgcgcggggcactagcggggctcta

SEQ ID NO: 4376 - DNA, 875 bp, Zea Mays
gcagggcggcgacgaagcagagctccaccctgggagctcactggatttcctccgcccagcgcactggcgtcaaaatccaaacgcgaacggtgctaaacattgggggaagaaaggtgaagtgatggatagtatccttaccggcgatcggagcgatggtagcatctctgcatctacccacggcgacacaccagcgcccgcggaggcgccgcacggtggaggccatgactgaccttggatctggcaccgagtcggccatcaagcagccggatccaatcccgacagagtcaatgacaagcagtaaacgaaggggaggcgagtggagattcccccaccatggcgtagactggagctaagcacagaggcggcacaggttctagcttcctagcgcactggacaagggatgaagagaaggggcgccaagcacagagcgatgaacggggaaggcgtcgcggcccccgcatttataccctggagcgcaactaggatcccggcagaaatcccttgattcacggatgctgatgcgcggcgacggagctctctctctcccctgcggtagtggtgagactcggagctacgcccaaaacggctcggaacctagggaatgggtctcgatatatactcgttgcagcgtacggtttccgggcagaagaacggcggccgcggtagtggagaccgagtcccccggaggattttgtcgtgctgttagcgctggacacggagaaaagatagggaggagaagaggatggctccgaccagtgggtccagataacagagggagaccacggctgggcaccacgaacggactccgcgcatcgcgggcgagtccagggcggttctgttatggggaggtcggcagcccccgaccgtgtcttaac

SEQ ID NO: 4377 - DNA, 506 bp, Zea Mays
taaataatcctggcagttgtgcggggagagacagaggatatacgaactcggaaccggctgtgtccggaggctggcgtctggcggcgcgccgtgtaaagaacctatagctaccttcaattctgagagcttcgagagaggcgacgggtgccgggagcggcgcccaactcctccccatatcagttgtcttacagttggtattcagagctggatcttccccacgattatttcaccagatcgaagacaggggcgatggcgccgtcgaagactgaggactcaatggcgcagctcctcgccaagattgaggaaggcaacagggagacccacaggcgtatggaaacgatgcaagcttctatggcaaacatggaagcgacggtaaaaggggtgatgaaggaacacggcgagttccagagatggcggccggaagtggagaagaaggtgtgggagatgaatgaagccctaaaagtcatccaagtcgccatcgagaagcaatcgcagaagcaaccagt

SEQ ID NO: 4378 - DNA, 286 bp, Zea Mays
gaaaaactcaccttgggccgaattccccctgcttggcccgccttcccttctctgcttctggcccaaatccgcgccacagcgccgacaaatggacccacggtgttagtcgctctcgcgctcgtgtggagtcactactgtaacacccctggtgttactataactaaaacttgagcatgacatcatagcattggcattgcatatgtttgacacacctagagtgcattcactaggcaaaaattttcaaacaagttgtattgtttaaagtgttttgcaaaaagaaccctgg

SEQ ID NO: 4379 - DNA, 631 bp, Zea Mays
ctcagctcaatgtcagtatggcccgggtcaagaatttgagtctatcaagtggaggagatgaccatgaccatcctcgccctcctaggaaggataagggcaaggcaatttagagcagtagagaggcaagaagaagcgcaaaatggatagatctactcgagcagcgattgcagcagtagtaacaactgagagagcagggtagagagggcaattacatattggtgttgatcatcttcctttctagatccagtgttggtcatcttgtctatgcactccctcggctatccttgatccctcccctgctccactagtttttgctccaccagcctcaactctgcttgccctaccaccccctaccacttccactactctagagcctttctccaccacacctactcccactacctccaccactcctaccactgctaccaccactccctcaatcactccacctataccacccctcacttctaggagcatgacgaggttgatggtgcactattggagggtgatctgaggccgttcgacctttgtcgtgccactacaacaagattacaaaggttcaaacacgttctagttgatacctagtttccagtacagtgagactctatagcaggcccacattttagttctt

SEQ ID NO: 4380 - DNA, 882 bp, Zea Mays
tcgcacatggatcactcaggttcgtgcctcttacgtatgggcccagaccgaccgtgctgtcttcaacctcttctccgtgatggctgcaacagaatccgcgtcagtcggcgggggctaccggtcatggcttcctcttcccgtcgcggacacgccctctataaaatggtcgcgccgccccgcatcccggatccctggtgctgaggcaatccaaagcgtagagtgaatcttgggtgcgctcgggagaatcgggggacaagatccactgcggcctaggttagttctgggtggtggtggagctcagtggatgaacatggggcatcagcgttagatcggtgaagctcgcgcgcgacttatttggacccggtgcagtctggtattgaaggaattgctcgtcggagcaggctgtgcgccattgtccacctcgcgtcatgggcaggcgtcaccatggtccttcccctggtaagaatgcccctagaatattcaccatacgcgtgctacgattaacttcctctggggtagtgttaggatgcctggtggggtcaattgcggggtctccggtgaatactccaccgtgcgccaaggcagcgccaccgctacgccctgctctcgggggaagatggctctattgtcgctaatctcgattttgacgacagggattagaaattgggtaccgtttcggtcggggtggcgtgtgccatccaattaagggtgaacacataggaatggatcacaggtgttttaaatcttggtcaccgattgaggatccgatggccacaggttcataatggttcatttagattggggctaatcagggcaattggtttatgatctagtggccgaggcattaagataccccttcgactgtgtggatttgcataagag

SEQ ID NO: 4381 - DNA, 399 bp, Zea Mays
ggcgtggcagtcggcgtgaccataggcgggccagcagtaactgcatcaacgggcgtgcaggagcagcgagccgatcgccagtcaaactctggccccacctgcaggctcgcatcctcccctgaggcgggcccgggggccattgtcggtaccctggattaggggtaccccttactacggtatgaaggcacgatgcctgtgcggctatccttagccgcgcagagaacagccccaggggtatctcgtgagcagttaaggtggcattctcggagacaacgccatcgggcccagaaggcgcaggacccctatgcgcacaacccggacccccgaagtaaagtagcccggagccattggatagggttcggaccccaccaagtgagctccagaccacccataacaagg

SEQ ID NO: 4382 - DNA, 844 bp, Zea Mays
ctcgtgcctctccttttggtacacacaggcgattcttgaaccaaagggctccttgttcatctgtactgaggtccgggagttgttccttgcgagctttttccacaagtcttgctgtctccgagtctaggcgttgagccttgcatatgaggtcttctagcattggtttgacttcgagactgccgttgtttcccaaacatgcattcagttgagctgattccttcttccaatcttctaaaaagttggttccctttattccgaaaggttttcggctgagggcgtctgctaccacattggcctttccggggtggtaatgaatctcgaggtcatagtctttgatcagttccaaccatcttcgttgatggagattgagatctggttgagtgaagatatacctcagactcttgtgatcggtgaaaatgtgacatttgttcccaattaggtaatgcctccatatcttcaaagcatgcactatggctaccaattccaaatcatgggtgggataattctactcatgtggcttaagtaggcgcgatgcataagcaatgactttctcgttttgcatcagcacacaccctaaggcttgcctcgaggcatcacagaagacgatgaagtcctgatgtatatctggtagtgtcaaaacgggtgcggtcgtgagcttctcctttatgatctagaaacttccttcacattttggggtccacacaaacttatggtctttcttgaggagttcggtcataggtcttgctatgctggagaatcccttgataaagcggcggtaatatcctgccattcccagaaagcttcgaacttcactgacgttggatggctgcctccattttgatac

SEQ ID NO: 4383 - DNA, 864 bp, Zea Mays
accttgataccttttcccactctcgtctaggacaagtttcctatgctcttctgtaatttctatcccactacgtcgcttgggtggtccctttgtgatgatggtgcccttcctaaactcctttctctgccttctgaaggggtgattgaagggtagaaaacatctatggcaatcaaagtaacatatcttgccaccagcactaagacgaaaataatatgtatctttagcacaataaggacacgtcaatctaccatgcacgctccatccagagaaaataccatacgccataaaaccatgaaccgagaacagatacacaacacgaagattgaatttctgcttcttgaagcagtcataggcttccactctttgccatagcttctttaactcttcaatcagtggttgaagcatcacattgaggcatacgccaggatgctcaggcccaggtataacaagacataggaacataaactcatatttcatgcaaagagcaggtggaaggttgtacggtatggcaatgacaggccaacatgaatacaacgtagcggtcatattgaaagatgtgaaaccatcagttgccaagccgatacgaacgcttcttgcatcgctggcaaactctggatcaaagttgtcaagagccttccatgcatcaccatctgacgggtgcaccattaacccatcttgtctatccgtacaatatttatgccacctcatgtgcatagcggtcttcctcgagagaaacaaacgtttcactctaggagtgagaggcatgtaccgaagctgtttatgtgcaacctttgtgaccaccttctccccgtcttcatttacaagctccacgtacatcgacttcccacattttaagcatttctg

SEQ ID NO: 4384 - DNA, 337 bp, Zea Mays
agcgagtgctctactctacccaaaaactctgggtggctgtgctgtcttcagtggctcagttccgccgaataaatcattcgccgataaggtgtcacctgaagctagaaaggtaataagctgcagctatgcttatgttttcagaactgcatcttgttgactcttgttacctaaatacgaactcttgtttcagacaccggtgttatggtttcatgggatggcagatggggtggtcctatttgaagcaggacatgctgggtgtgcatttttagaggagcttggcatgtcctgtgaattcaaggtaatacaggaagctgtagtcaatgctcacttttaaaac

SEQ ID NO: 4385 - DNA, 617 bp, Zea Mays
aaaatagtttttaaaggtaagaatattttattaaaagacattttggtttagatcatttgaaaagtttcactaaattccagaataggatttcagggtgttacatcgggcagggagattgagcgctcgacccggggaggctaagaccagatgaccgagtcatgcgctgatacctcggacagggaggttgggcgtacccgaagtgctagatattcggagacaactcaggttaagggcaactgaatgtcagataagcgtaaatgcatgctgcgttaaaaggaggatttaggtagagttgtatggcgatcacgacttgtaaagggataaacctctagtcatctatataaggacgaggggtaccccaacgaatccatctctcatcacatctcatcttgtcaccacctcatagcccattagccctctcagagcaaccacgccgccactagatcaacagaactcactctccatcgcccacgtctcatttataactcgagtacaccagtgatactcaaaatactcagcctcggcaggaagtagggtgttacacattctagcggctcgaacctatataaacccttgtgtgatccgacgtgcatcgacacgaaccatcaagtcgcaat

SEQ ID NO: 4386 - DNA, 357 bp, Zea Mays
aaagaattcaaaacaatagatcagcttttaaacctcaaatgacgtttctatgatattgactgcattgtattcacatgagtgagtattagagtacaactagtggatgaagacgtcattgggctagctaatgaccttttgtgataccaggtttcctataatcacctctattcaaggcatacctagatggtgtttatgtccactcaagtaaaacactacactttattatgccacattgtttctcaaaataaaataaagaccatgggaaatttagccaaattacgtaagagatctgtccaaacataggttaagtttgtaaggcaccttttttccatcatacagttgctaaaaagttggaat

SEQ ID NO: 4387 - DNA, 856 bp, Zea Mays
taccatgaagaattctgagataaatgagcctgaagttggactgtccgactgcttgaaatctgaaattcatattaacagtgggatggcatggagttagggctcggatttaaacatgatccagtgcaagtttgagcatgattcccataacaaatttgtagctggtatgtagcactacaactttgatgcagagactcggggatgtttccatagaaaattgggaggaatctggccctaaatcttggctatcagacacactgaataagcatcgccatggtacagtgcctggacagatcagatcaaccgctcccctcgccgccgatgacttcgcaccgggatcgttgccgctgttaagattcgcactcactggtaaccggatagcactcggggtcgcgtaaatatcctcgccgtggatagactccggccattaaacaactccggccaccgtaccatgttcaccgcagcggaatccgataacttcaccggtgaccgccgcctttcggccttgtgccgcgtggctctgcctttccaccatgtcgccgtgactccctatagatgtcccatcgtcgctggggaggttgccacgacggtggacacgaattcactgcgccaaggttcttcttcatctccggccgccagcacggctcggccgaattgatcaccaccactcgctctccctataaattgagccctccaccagctccacaaggtcatcagctacccagtctccgagaatcgttagcaatcattcgccagagctcgcgaattttgaattcgccccaaatcagttctccgccaccccgaaacccacctcaccgtggccagccccattccggtcagttcatcctcccctctccct

SEQ ID NO: 4388 - DNA, 676 bp, Zea Mays
tgctggcagagctgtttgaaatgagaccatgacaatggtggtgcatcacgctggagctgtccataccaggttcgggcgacccctgtcatgtgataggaggccagccagaccttctcttctatcgtgcgctggccgtcgaagaactggtcacaccggtttaaccactggatggggtcctccttgccaccaaacgtggcgaattccagtcggtggaaacggggaacaccgaccatggtggtgggaatgggttgctgggcacgtgctgtggaatgtttggcattggtggcagaggtgatggcgagtgcggcaagggcagtaggtggattggcaggggtgtggtggtggttgtgtatgcgggtgctggggtttgggtaggatgtggaaacaacatggtggtggtgtatgcggcggcggaggtttggattggctgcgggggtaaggatccctcagggactactgtggctggcggcaggccgccgtaccctggcatgccgtaggggcagccagatggaggtgtatcagctgaggttcctgggtttttttttcccgtgatgtgagatgagatggaggacatctgggagttgaactctcccagctggcgctgcatgtcggcgagcatcgtggtgatcaactccaacgatggcggcaccgtggcggaggccaaactatcgccggc

SEQ ID NO: 4389 - DNA, 749 bp, Zea Mays
gccgttctctgtgactcgcgcgacttgttacgctgttaggtgggccccgcatgccaggatcgcctccttcctcggctggtcgttgcacccacctcgcgagaaaccgggagcggaccttgcgaccgtggcgtcttggggataaaaaaccttctgggtgcccggtcgtgctatcctagcgtccgcaggcaataccgaaagccaacgccacctcgaattgcgcggagaacctgcgccgccattgtaggagagagcgccgccgtcagtgaggaacccatagtttgccgctgcactggaatctcgagctcaacgcgaccgtactcacgtcgagtgtccaattgggttcgcccggtcttgggaagggtggtcaactactttccgtggacgaatcgtgctccagcacctcggaatttcccaccggacttcgttcggcggcgaccgtccgccccacgccgtggccggcccccttcgcgacccaatcaacaggtaatacccttcccaattgattcactgcatcgtcccgtaggtatttccatcgtctgtgcgcgctttagggcatcgggtaggggacaggaccctgtaattccgccgccgctgcggtagaccggccgcgccgccgtgccatatgtgcgggggaaggtgatgatggttgtgccattggattcttgcccaacggtggagattagatagggagataacttttcggtggattggatccagaccatccatccagatcggacgggtgaaaagca

SEQ ID NO: 4390 - DNA, 727 bp, Zea Mays
aacttttgatcagtttataaaatgcaacagggttagtggtgctcccatgttaattacctctatgttttcagattcagactgatgacggtgtacactggtcagatcatatcagtgtttttctttttttggggtgtctgtttaactttttcaaatgatggtggttataaaaagaaaatacaaacttcagagcaggttgcttgccactttatgtgagtaggggagggaaaaggatgtcctaaacaaaaccaatagtaagaacaagatgatgggtgttgaccaagacatggaaaagataataatatcggatgactgcagtaaggttgaagctaagaagaaggtccacaccacatcccttgagaaggagaggaagaagaaacttcacaatgccagcactgggaagaacatgcaaagggatgatgacgaggagggggaggaatatgagtaactctgctactaaggtgaaaagcaaggtgtccagccaattatgtaaggagacgaatgagaaaaagatgaacaaaacataccaggggaagaagatgcagaatgctgacagcaagatgaaatatgacagtggagtaaagaaggttgggtactgaattccacagaaaaataaaaagttgatgcctcaccttagatgggatgcgtggaactgttgtgtctacgactggtcaccttcaaagcattaattctgcaaagataactatgaaccgggtaagtgcttgggaat

SEQ ID NO: 4391 - DNA, 930 bp, Zea Mays
cacgagggatggcacccgtcatggtgcgggtggtacgtcgcagcagtggtggtggtggcggagcaggcgacgccgccggtgccggtgagggcgccgtcggtggtgttggggcgtcaggaggggctgccgccgctccggacggctcggggcaagggcggcggacgtagacccgtggtaaatggaccacgctgggtccaggcgggggcacgtgaccatgcccgtctggtgtcgaaggaggcgatccatgtgatgtcgcaacgtcggggggtggctggtcatcacccgagtgggatggagtgaccacgggtggcgaggaggaagtcccacctgcaacaacagtagagcaaggcaccgaaaccatatcgtcgtcgaggagaaagtcatgggaggcgtgggaggaggcgtctgaggtggctacaaaggggaaagcggtctcaccgaatatgacatggcgagagatgatgatgcgacgtgtcgataggtcgaggcagcggtaacctttgtgcgaggggggatatccgaggaagacgcatgccgtggagcgaggggcgagcttatgtttggaggttgcttgcatgttggggtaacagaggcacccaaaaacacgcaaatggttataggttggcggctgattatgcagacgagtgtatggaatgtcatgctgaatggaggaggatgggcgcctattatggaggtagcaggccgtcaggagtccctcggcccaatatcgtgacggggaagtggatctttcggcacaagttccatgccgatgggtccctcgctcgccacaaggctcgctgggttgtctgaggcttctcccatcgcgagggcgttgactacgacgagaccttcagcccggtcgtcaaaccggccaccatacggtctgtactcagcatcgccgcgtcccgcacctggccgattcaccagctg

SEQ ID NO: 4392 - DNA, 454 bp, Zea Mays
agcagacatgaaatcggggctaccttgatcattttccctaacttaattgcgcttatgatcaactacggagctctggccacggtggtcgtgagtatcacggctatactgtcgtgttcccggcgaccagaggacctctagcttaattaaatgggttgtcgagcatcatagagctatgaaaaggcttaaacgagagagagaagaagatgagctgaccggagtacggctggccgcggtgaggttgagtttcgggtggcggagaatggatttgggggaaatcttaaattcgagctctcggaggcacggttgctaacgattgctggtgactgggtgggtgatgatgttacgcagctaggggagggctcaatttataggcggcttcgtcggtggcgcacaatttggtcgagcaacgcggcggccggaggtgaagaggattactggcgcgcgtgaatcgctg

SEQ ID NO: 4393 - DNA, 810 bp, Zea Mays
ggaaatgatacccggtccctaggacccgtcagtcagtgagtgcgctgaggaaaggagaccctgatcgctagggtctgttagtcaattgggagagtcagatacgtcaacactgaaaggacccaccctcagtcgaactccgcgacaccgagccagggttgggcgtggcggaacctgacaagagagaccaggcgtgtcgaatgggaaccactcgagtggatcccgcactcggtcctagactgactcgccataagtagccgaccacacttaaccacgcctagcaccgatccacagtgcgacgccggtccgcttcccactcattacctacgagcacctcgggccacataacactcatgacctatgaatccctcgaactgtggcacattaatggcccacgcacccctcgccctacgacacacttatggcttgtcggactaggcctgagtatgcaaacctcccgcagggcactacacgatgggctgtatcgagccccaggctacggaggtcagggatcagtgtagccataatgatgacgcctatgaacattgcctccccgatgtcatctgccatccctaattaagacgttagtgtcgatgtatcataggtcttaggctatatccaacagctctcctatcttatattcattttcaaatttcactctgcaaacagtgtcaaacaatatcatctataatgtcgtatctcttattttacacgatccaccaaagacagccttatcggtttagcactcacatgaaaaataaccaaatctttttctccggtggtgctctgcacctccattttctgcattttctc

SEQ ID NO: 4394 - DNA, 543 bp, Zea Mays
ctattctgcgtctggtgtgttcacggtatgttcccatgcctagtttgcaaggaagctctcaggttcatttggttgaaaaagggtggcaaatatttgtcctttgataaacattgacaatttctccctcctgaccatccattccgcctagacatcaagaactttatgaaaggtgtcgtagtgacagaccgcccacttgcaacgatgactggtgccaaaattcgtcaacagatagatggtattgccgcacgggaggttacctattcctaacgatgaagattacaacttagacccggacacatatgatggagagttcttccaagaagatgggctagaagggtgatttgagatagacttaaccgaagctatcggaatggacgtagatatcgaaatggttgttgatgaggaggatgatgaggtgcaaaatgataatgacttagtaatccttgaaggcaatgacattaatgacgaacttgcgtcttctgatggtgttgagattgaaatggttgatagtgatgatgagagttatgatccggctaaccccga

SEQ ID NO: 4395 - DNA, 608 bp, Zea Mays
tggcgccacagtgtggcagagggcgggtctgatgctacacgcggtactgacacacgggatcagtgggtccaccggtcagtgtctgcgcgaggggaaagtagagtgggaaaccgagtgaggctgatgggcaggtccccttatcgtggctatcgtcttcctcggtcgcacgcttagtgcgagcgccatggccagagccgacgactccactcgggcgaaggagggcacggggcaattgcggttgggcgggggggtcttggtatgactgtgaggtgtcgtcaccggtgatcacctacagataattgatggaacagagaaaacgggggagagagaaggagatgttcggcggggaaattcacctcgggtgaggcgcaatcgacggtagagcttcgtctggcggtggcggagcacggtcagggatgccgagcggaccttgctaggggcagattcgggcgcaggaggcctggcgatgggggagctccggcaagcttgaagaacggctgtgcgcagctcgggtgagtgcgtaggggcgaagtgaatgaggcaggggaagttgatgcgtgcatggacttgaagagggggtcgggacgacggttttgtgctgggaggcg

SEQ ID NO: 4396 - DNA, 461 bp, Zea Mays
cggataccgaccctgggcgatcagttagtgtgaagtccatccttcgccgtggatttagggggctggaacccggccgcgtttgtgcgcgaagtggaggccgaggccacaaggattgtagggcgatatgtgccaaagactgagaccttgcggagctgggatatacgcggttccaatgttcggttgaatagtgtttttgagttgaatggtctgccatatggcggctatccgggagacgaagatgccgttgttggcgaccgccggggaaaaagggtggtggcagcagtcgacgaaggcccttctcggggagcagtgccggctgcgaccactaagaagaggaaactatgtacaacagctgaggggttgggggcgtccgatcgttttgctgtggatttattgggaacttgcgtgactcctggggagaggatgtcatcgcccgagcgccgagaatcttccgcgtgaat

SEQ ID NO: 4397 - DNA, 467 bp, Zea Mays
ggaaattccaaattgaggagctatggtgaacgattggaggcgagggctggttcacgggttacgtaattacctagcggaactcactggggcatcaatttatagaatcccacgatggtggcgtctaattttgagaaggcgcgctggcggccggacagaggggaagtcactggtgcgagcgctatcgtggctttcactggtttacggtctacgacggtcactgccgagttttcacggcttacgacgagtggtgagatgacttaaggtgtgtcacaaccgagctagacggcggcacaacggcgacggtcgcgtagccgcgtcgtcggtgcaagtgggtacggcgacagggcaaaacagtgccccaagttcatcccctgcgcgagatttttcaccctacgtagttatctgcactccaccgggcatgaaacgcaatggcggcgaggatcatggcgcgggatcaccggcagcgg

SEQ ID NO: 4398 - DNA, 552 bp, Zea Mays
gacgaaggagatcacctcgacatgccacagaaaggtgaccagcctcccccacgcgtttaggaagagggggagccaggtggagcctagacccctcctgggagctacatggctcacctcgagtagctccgagaactacacaacaagctcggggaggaacaacaacagctgcaactactatggtaggcactagatagggaatacgctagcaaaaccctcgacggaggcacgtgcagaggcacgtgacgtccaacattgcatcatggaggacgtcgacaccaccgcacctgccgcccttaactggaccagtcaaagcctcacaacggttgcgatcttactccacaccatgccggagccctctaccaccgagtggtgccacatccacagcgaacttcgagagctcctagaatgcgccactgtccagcaggccaagatctcggcctctctcatctaggagcccaccgcaagtcactaggcgggatcctctcatttcaatagggaggcctctatccattctacacccaccagagagagggcacccacggtgcacgatcg

SEQ ID NO: 4399 - DNA, 583 bp, Zea Mays
tgaggatcttcctggtgcgagtactgggtgtaggcggcgaggggtggtgggaaaacatagtgtgggtgaattttcacggagcggcagacgccgtcgcctggggatggagcgtggccgacttcgagtagactgggttggtaaacgagatttgttgtcctcgccgattggagcgggcataggcgagggggatcttcggaagctttttgagggtgaggaattgaggataatgctgtttaattacagggagatgggtatcattccgaaggttgatccgatgtaataggcgataccctcgctgtgtgtatgtaattgtaatttgtatggtgatgtggcctgttggccgtattcgtacgcttgtattggtccggctgcgtacgtgggcgactttgtgcggagtgtctttgtaatgagagacttcgattaacgttattccggctgtgcccttaagcaattgttgcgctgagtgtctttgaataaaagacttcgattacgctcttgttgtgctgttccggctgcacccttagacgacttttgcgcggagtgtattttaaataaaagactagcgcacttgtgctatttcggc

SEQ ID NO: 4400 - DNA, 708 bp, Zea Mays
gtttggtgtctgagtcttagttggcatgtgttgtgaggttgtgtgcctctatagggaaggcctccctctcctttttatagaccaagctaagggagagaagggtacatctagtagcgaggggccaatcctaacgtcggtcttatcctttatttatggaagccccatactatattaatggaagccttgttattgtcagtatgttgtcttgtaggattgttagtggtgctgcaggcacccgcgtcgcttgtactgaatatcccgagcgccatgcggggcatgtgtgagtttttttaaagcttggaatgtgtcaggaagagaagcaggttctccatgcctccacatgagacctagaaagttgtattgtatgtcattgatcaccaaggtggtaatacaccgttgcgtacgtagtgggtgatttgggacgaaacactccacgatgggcaccacccatatcaccatagtggtcatggttgggtgtgccctagaacacgcatgttgctatagtaccacactggtgccatgtcttggcttactagggcatgatagtaggtagtgggtatgatgctaacacagctgcacttgtcatgtcgaataggtgtagcacatcttctgactccaccaactacttgactgaccatgacgtcgatggctggccacgcagcgagtttggagacatcccctatactgaatcttcatggggactgaaag

SEQ ID NO: 4401 - DNA, 377 bp, Zea Mays
aatgacgaatgtttcgcatcttggagatggaattctgcttttgttttgtacagcttgcgttttaatttgacttgggagaggccaccagtgcaccttctgaaccagagcccaggggagctaatcgattgctatatgcctgtttagattgtaagggctaactattaatcactaaactttagcctgtaaattgttagcttatctatggactaacaattagtccacaaatctgtgctaaagtgggctaatttttcatggaccccatggaaagaaatatgtgcccccgtcttcaccgtagatgtagagtttgactttttgtgaaagtgcaatgccacatgtagaatttgacctgtgtgatcgtgatggaaactacacgccaa

SEQ ID NO: 4402 - DNA, 425 bp, Zea Mays
aaaccactcactcttccagccagttcgccacttggtgcgatagctgaggatcagggccttcgtatccttgcgatacacgaagttataacaaccaaaattttcatgtagcccatcttctctggccttcgtttggtaacgcaactcatgcactcggcagaaagcttcagcatttggatccatcccttggcttccaagggcccagatgaagatgctgagcctaacgatagcgttaggggtcagctaatgaagataaatttcaaaattatccaaaacttctcatatcatctcgttcagaggaaaccgtaatcccgctctgaaaaagcttttgaaaaccactacttcatcatccttcggcgttggagtggtttcctctccagcaaaacgaataagcttcttttcaccttctccgaagtagcctagtttca

SEQ ID NO: 4403 - DNA, 429 bp, Zea Mays
ggttgcgccacgcctcaggccatttaccacgtcgtcgcaagccatagtgactgcccagtgaccgccgtagctcattgcccagtgatcgccacggcagaccaccacggtgactcactctctttcccgtccgccgcgcgtcttctccaaaattagccaccaccgccgatggaacctataaattaccgccccagtgagctccgctaggtagttgtgcatccagtgaaccagccctcacctccaatcgttccccacagctccccaatttgggatttcccccaaatctatccagaacactgcagtgtgtgagctcgccgtgaccagcgctctgcaggtccgatcatgccctcctcattcttgtttcagctctcttatgtgctcttgatgcatctcgacccggccaattgaattagaccgcattagatcgccggg

SEQ ID NO: 4404 - DNA, 388 bp, Zea Mays
cggatttcccccaattcgggtttccgccacccgaaaccgacctcatcgcggccagctcccttcccggtcagtccaaccctccctctccctcgtttaagctttctcacatgtctacgatgcttgccgaaccaccaatttggactgcgggctcaccaatcaccgggaacgcactcaattgtccgccacccattcggttcacgtggacagagcttgatagctcaccatttgtgcaattaagttaggggaaatgctctctgggtcatggatttggtttagtctaaagctgagcgccggtcttggccccctccggccggtctagctcgtcggagttgcgctccccacgctcaccgtcgtcggggaccttcctctgcgaagaaataaaaaccag

SEQ ID NO: 4405 - DNA, 734 bp, Zea Mays
cgagaggtcaaatgacgtgaaaacggcgtttgaacgataaaaagtgccataggaggtttggaattcgaattgaggcatgaaatgacatggaaatgagccgatacttcacaaataggtttatatgggtgaatatgagtggagtgtgtgcttggtttgaatttaggcgaagaaaaagagatttgggcactcggctcggaaacgatcgctcgaaacggggaatttggaaaaattaaagcctggaagatcggatgggtgtgaaattttgcgaatatgttactggaggtgttgtgaaggtgcctgaaaaatttgggttcaattggagcatttttggctggtttgggcatttcaccgaacacgtggtgtgcgaggatttagggttttagggaaatggctatttgaggtgtgaaaaccctcccgaaggagctaggaacctgcaggaatgttcaaggcacacagagacacacataccacaacttggtttcacaagatttcacagagatttggaattgacaacaagggtggaagagaggggcttcactggattgaatcagagagaagagagtagacagagggataaggagactgctcaccgagcgaggggaggagaggagcactggtcgaggtcgctggagagcaatggacgccggtgaggggtggtcgctggcgaggggttgagatcgccagagaccgagagagagagagacagagaacagagaaggaagtgccaggccacg

SEQ ID NO: 4406 - DNA, 386 bp, Zea Mays
tggtgacacgcgtaaaggtccggacgcgaactcatcctcaaactgagctttggatatcgccatgtccggctcccatacccccacgtcgtgtccagctcccatccctcccacatcatccctgtctcctcacctcgcgctcgtcgctcgtgctcgactcgctccaccagcccgccttgccgtggggcacgaccttccaccaccaccccttcgccgccgaccacgcgcttagagacgtctaggtcgtcagtgttggcgacctgctcctctgacacctgtggctccggcgacctgctcttctacaaccgcagccaccacaccttctgcctccccccaatcgccaccgaggtgcccatccagtcgcctccccatccggccacgccaccatg

SEQ ID NO: 4407 - DNA, 554 bp, Zea Mays
ttctaccttatccttatggatttatcttattctaataggcatacctatcccactctatagtaacaaccatgatctagcctaaaataaataaatcttatctagttataccaatttgatctagatcccacctaatctaacatgagctaatccaaattgagttacttaagtaagttagacataaattaggccctgattctataaacatatcttaccctaaattaataccttggactaactcgtccgtaaaaaaaacaacctaacctacatcataggttgcctaatccagatatcccaaaagcaaagtaaaactctgtttaaatctaattacctcatgtaccctagctatcctagctatatgtccttagccatatgtcctcaactcggatggcaactccaggactgagggccaaagaagaccaaccacgtcaagggaggataagcaccaactcaagtcttcaaagggcaaaacggaatcatcagatgagtcaagatccaccatccataatagaaactttctttgccctaatccttattaccgaaaccttctctacttc

SEQ ID NO: 4408 - DNA, 668 bp, Zea Mays
tggttccacacgtccccgtgggcaacatcatctacgactcggtcattggtgagaaactcttctgtcaagctcgccatgtccgcaggaggtaggggggtttcaaccaagttgttttggggcggggcactgtcgcgcgcagggttcatgccgccagcggatcgtgccctagtggggcttctctttccccccgccgtgtggcgccatcggttagggaagaaacacctaggagcgttggatcggtagccaatagccacgattagaggttgggtaccgtttcacccgtgtgatcgataacccttggatctggattgtatggatttgggcgtgtggtgttatgatggggtcgacttctgatccatgtcgttgacccactcatggacgattgggattagagcaatccttaccggttcgctcggttggatctgactcgctgattcagaatccaacgaactagattaaaacgttgcttaccgtttcggtgggaatggtccttggcgtcgaatcgtgatctaacggtctgaatcaggccccaagtcaaccagtcatgggttttgctaaagagccctgctctttatccatatcaacccgccgtcctattgaagcgcaaaagtaattacagagccacccatcttcttttagatagcaccctgggctttgttaaaattatg

SEQ ID NO: 4409 - DNA, 486 bp, Zea Mays
tcgatctctcccagctgcacctacgtccagtccagtgaggctgtcgtacgtactacagcggacgacgttactggacgtagctagcccatcatgaaacgttacaatctgtaggcgtccgtcgtcgacttcgtgatgaacgaatttcctgcagtgcagggactatactatacacactccgatccgtagctagcccatcatgcccactccaacgatccatctgcctagaaaacgcaaggcatcgaatgctcgacacgagcggccttttgcttctagtgtacgtatgtaccctgcttttggggctcacaacagtcagcactcatgatgcatggtgggcatattaataattagctaagaggaggaggaggtggtggactagataagcgaaggttggggaaaagcaaagctctcagcatgcatgctgccaagtacgtacacacatatatgcgtgtgtgtctatataaacatatataaagcattgtgccaagg

SEQ ID NO: 4410 - DNA, 537 bp, Zea Mays
caactgtcgggtgtgataattaggggtacccagattacccctccaaaaaatgcgctctggaaaggttaagacatgacccccgaaggaaagcagccgagacacctcctaacctgaggctaacatggaggtcatccctacaggcactgaggcccctccccaagggtcctacctcaaacaaatctctgtctcgcccgaagtcaccatcgctccgtccgtctcgcccgagcccatctcaggcagataggacaaaggcacccaaaggccggcgggggacactcgcatttaatgcgcacacctactccacgcagaggcacaggagcacagtgactaacaagacaatgatcatatccaggtgcaacaacatgattacgctcctgctacagtgcacacacgccgcctgtcatccccccgatgggacatctaaaacgataggagaagcagaccggccctcgggcgcaaatctccgccttgcccgacgccgggcgcgacctcgagtgcaatctccgtctcacccgacactaagctcggcctggggta

SEQ ID NO: 4411 - DNA, 756 bp, Zea Mays
ggacgatgggtcgacggaggagtgtccacagcggcacggagaaccgatttgggggaaaacggaattgctcagactatggtggatgaccgaccgaggttagagttgcactaggtttggtatgagggggcgaagcaaaagaggtgctcaatttatagaggttggccacagttactccgaatttggaagggatttggatggcggcagtgacaagacattgcactagcgagcacgccgtggtgctcgacggcatactaacatagggagagtaattctgatcatgccacggttacgactacgtggtaaaggaccacggcgtggcgcagtcgagctcactggcggcctatgacaaccacggttgtttggccacgtcgcatagcccccaagcccatccgataagctactgcccgcgacccaatccatctccccaccagatcttttactcccccacggttctccaccttgcgccgagcacgaaccgtgatggccggcgtgaatccagtcacggggatcaccggcggtgaggtgcgatatatctgaagatttttccttcaccactgtaccatagcgactgttcatcagagcgcctgacagagcagattgagaagccaaattctccaactttcatgtggagagctaccaattccactacatgaaaattgttgttcaacataccagctctgattttgttatagcaactacaatcaaacactcactggatcctacttgaaatcgccccaaagtttaccagagttcgtt

SEQ ID NO: 4412 - DNA, 571 bp, Zea Mays
tcacgttggtacgagtcaatacagggggcataacatcttaaccaaggacgtagatgcaacctaaaccctaatcaagacatggggatgcaacggatctggaaaagcgaataggagtagcgatgggggagacgaagatggtacctgcgtagacgccgagatgggaaagggggggaggagtccacaggttgacgacagcagagggagttcacgacagagttgccgctccgcggtcaaaaccctagcgctgtgaagggttacggagccatcaaaacgactgcggcggcggacgagaaagtagagaagggcggcatggatgacagggcttaccggcgaagacgacccgcgcggcggcgggagatgcgatgggaggagagctgcggcggcgatgggagtagcgatggggacgagagagctgaggggcagcggggtgcgaaccctacccaaatgatgcggctttctgcggaagtggcctgaggacagcttctgtcttcgcgtagtcggccggcttctcagcgacgcgcgtcagggaaaagcgggaggcgaagcggcgcgtttgggaggagcttcagct

SEQ ID NO: 4413 - DNA, 458 bp, Zea Mays
cggtagcggaggtcgtgcggcgggatgcgcggggaacaggcggaccgcgggcgtgcggaggtttcgctgccgcgtgggcgtgcgggagcggcgttgggtaggggagcgggggcagtctacagatgacgcttaatagttgtagagatgcgtgaacgccgccgcatcccagggaggaatcagtctagctcaaacggccctggccagatcctgtgtccacgcgcgtaagctagcaccgactcgcgagtctggtcctgcatgcgcgcatctggccgcgtaggcactgacggtggaccccactgcctagtcgtccgcttccccgagctcgtaacagacttcgccgaactcttgggagatccacgattcccgtatttgccgctaaccaaatgatagccaacttccccccatagcgccaggtatgagaaccttgggcgccatgcccctctgaccatcgcgtgctc

SEQ ID NO: 4414 - DNA, 585 bp, Zea Mays
tgcttctactgcgatctatctcattaatagacaaccatcatccaaactttctggtaaaacacctagtgaaattctttttgggacacctccacgatatgatcaccttcgagtgtttggatgtacgtgttatgtcttgttaccaccacgtgagcggactaaattgactactcaacatgttgagtgtgtttttcttggatacagtcctgaacacaaaggttatcgttgttatgatccatctactcatcgtattcgtatttctagggatgcgagttttaatgaaaattgccccttcttttaaaaccagtccactcacgcctcatatgtccgacagagtccacctcaatcatgtgtcttccctccattcctaatttttcatctgcaccatcatcttctatatccacacctgatatcctcattcccataacaccacctccatgttaccttcaccttactcttccaaaccacctgtcatccaaatctacatttgtcgttcccgctctattcccacggctagtcctgatactgatcatgttccagattcttatactaacaatattgagtctcatgttgtttttaatcagggat

SEQ ID NO: 4415 - DNA, 689 bp, Zea Mays
aatagatcaacaactttgttacaagaaggttaacaaattattacttaaaaatttgagatcaagaccctaaaacttgctctgtcagccacctgaatcaagttcccatggtacagtgacctgacgaagatcgccagatttagtgtatcgccgccggtgatcccgcatcgtgatcgtcactgccattgcgattcgtgctcagtgaagtgcagataattgctcggggtaagaaatatcgcattggggatgtgctcgggacactgtttcgccctggccgtcgtacccccttgccttacggtcggtccagattacctcgccggagttggccgcctgccgattgggtgccacgtgcctaggtgctctaccacgtcgcagtaactcgccttaacgtgtccgttaattgccagtgaccttgccacggtaacagccacagtcacccgcgccagtgactcagtccctctctccggccgccgcgcgtcttctcaaaattagctgccaccgcctatggaacctataaattgccgccccagtgagctccgctaagtagttgtgcaccaagtgaaccagccctcacctcaaatcgtcccccatagctccccaatttgggatttcccccaaatctgtcaagaacaccgcagtgtgtgagctcgccgtggcccgctctccacaggtccgatcacaccctcctcgct

SEQ ID NO: 4416 - DNA, 905 bp, Zea Mays
gaaaaacggtgtcgcgaaaatttctggtggacacagggggtcacagtggggctatacaaccgtaaaggaccactgatttactgcaaacaaccaatttggagagaggaggaagagacactgcgaattttggtttttattcaagctaactgaagaatcgtgagcaccccgctgtggctccttgcttaatttataggcacggcagtctggtgcttgatccacggccacgaggtgcgccgttagcgcacgacaaccacgtaaggaagaggcacagtgagatagagtggtggcgcgagtgacacggcgacaattaccacgccacgacgatcaccggcgagaagtctccggcaaggcgccgactaggctcgcggaaccgtgaatcagttcgtcattatcttgccgcggtcgatcctatctccaatccatatgatcccatccaaatctacagtaccactgatatttcgtgagccatggatcttcaccgttccactgaaccgatctcctttctttccccctttctcttgattcttattaagaacaagttaacctctattaataagagttattcaccagataatggtcttcatctttactataggatttatggatcaaaactgcctggattctaagatacagtgctcgcaatctggccatatttcactgtgaccatttcgttttggaattcagtttacagtgacattataatcagtgtgactaagttctgacagaacaactttgcatcactggttcttcaatttctgttcaacaacctagaaagatgactgtaccaaaattactcccctacataccagttctaactttgttacaaagagtatagtctacctcccctcggattgagctccacaaggttccaaagttggctgtttaccactgaacctctgaatttc

SEQ ID NO: 4417 - DNA, 608 bp, Zea Mays
gccgtggctaggctcgccgtacctcccttgcgcatcaaccgatcgggataagacctcgccaccggccgattaccgtcgcgcgccacgtccaaacgcactttaccacgtcaccgtagctcgacttgcgatgatagctcatcgccggtgagttcgccacggcgtaggacaccaagacactgcgccagtaactttctatttcctccggccgccagcactgctcggccaaattgagcaccaccgcataagccctctataaattgatggtcgggcctgttgcgctaggtcatcgcgaagtcgaagcacccgttctcaccctcaattaaccaccgtagctggagaattcccctcttcccccaattcggtcgactgcaccgtcgtgaatcgcatgctcgcggctagctgattccaggtctgtcctcgccctcgttgttcgtgtttcagcacccacatgtgcttgtgatcgttacctgcccagcccttggagcttgacttcacctaatcaaccggaacacctcgatctgagttcagtatccgtggtcaccgtggttaggcacatgttggcccgaattagtccaattagagcatgttctagggtcaccttgggtcgg

SEQ ID NO: 4418 - DNA, 796 bp, Zea Mays
tagaacatcatgtgaacatggtgctctaaaaagaacttgcgccacctgcattaccaatctgacctctgacaatccttttattttaggaattttggggcaaacatgtatggtaataatggatgctgtttactagtattacatacctggtttctttgcttcccaccatgtcttgtgggcagcatgggaactgtcctcctagcattgctagatgaagctactccagtaggctgattatgctgtttttgccgtacatcaacaggggctatactcccattccgtagaccacatagcacaacttttcccttataggagtgagaaaatccagtgggcatagcagagacaggaatagtgtgtcacagtaaattccgaagtaatcataacatggatacagggtcaacaagaaagaataaaatccatattacgtaggtctgcagattatgacatatgctgcaataggaaaggtcacatcggtagcatattgctttcctttcaaaactttgagaatcatgtagtcatgcattagatgcacatgcaccaaatttaagcttaactggaaagtgggggcaaaaggttgaggcaagcaaaattttcaataactgtcatttgacaacaaaccataaaatgatatctcaaccagttaaaactacaaagtgggaagaagtttaggtagattaagattgttaccgagtgcacaaatttcagggaaagaatgtcgcttttagaacgacataaccatgatgatccccttgtttccaaatcgatcagaccagcaccaaggtccgaacctagaaataag

SEQ ID NO: 4419 - DNA, 1837 bp, Zea Mays
ggagactcaatttatatgtttttcgagaccaagaaccccattgcgtcacaaggcgacattgctgctgccgtgagcaaggatgccggcacaacatggcagcagttgggtgtagtgttggatgaggagtggcacctttcttatccatatgtgtttagttatggaaacgaggtaaacattttattcgcgtattggagaaagttgtgcattattaataatcaacaaagaaatgtttgttctaatgttttcgtagctatatctgtttttctttcctttgcattacttgacagacttacatgatgcctgaaagcagcaagaaaggaaaccttaagttatatcgtgccgttgactttccccttaagtgggagttagaaaaggtccttctggagagaccccttgtagattcggtcatcatacattccaagggttcctattggctcattggatcagatttaagttcttatggtgcaaaacagacaggtgaactctttatttggtacagcagctctcctcttggtccttggagttcacacaagcagaacccaattcgtaatacaggcaacaggccaagtgccagaaatggaggcaggccattcatttacaatgacaatctttatcgcgtaggcaaagatcgtggtggtggatctggctataccatccaagtattcaaagttcaagtcctaacagaagatcattacaaggaagttgcagtcccatttgtgcttgacaaacccctcaagggccgaaacgcatggaatggtgcaaggtcccatcactttgatgtccagcagcttccatcaagtcaacattggattggggtaatggatggtgacagagtgctctcaggtgactcaattcaccatctgactataggctgtatgttttatggtgctgcttgcattttggtccttctacttggtgggcttattggtgcaatcaagtgcaccttaccacttagatggtatttaccacatactgagaaacggagtgacaactttgatatagagaagcaggtattgctgtgccataagcttagttggcttatctgcaatgtgaacaggttgggatctcttattggtgggaaaattaattacagagcttggaaagaccgagtttatatagcttttataatattggtatcggtagtcctaacttttttggggactaactacatctttggtggcgatggtgcagaagagccatatcctattaggggtaggtattcacaattcacattgttgaccatgacctatgacgcccgattttggaatctgaagatgtttgtggagcattactctaaatgtgcatcggtgagggagattgtagtggtctggaacaaaggtcgagccccagtgcaaggtgaattgaagtctatggtgcctgttaggatcagagttgaaaacaataatactctgaacaacagattcaaaattgacaaagaaattaaaacaggagctgttatggagcttgatgatgatatcatgatggcatgtgatgacttagagcgtgggttcaaggtatggagggagcaccctgatagaattgtcggatactatccacgccttgctgagggctggcctctggaataccgcaatgagaggtatgctcggcaacaaggaggttataacatcatactaacaggagcagcatttatggatcatgaactagcctttaagaggtactggagcaaagaggctgagattggcaggcagattgttgatagtttctttaattgtgaggatattctcctaaatttcttatttgcgaatgcaagctcggcaagcacagtggagtatgtaaaaccagcttgggcaattgatatgtctaagttctcaggagt

SEQ ID NO: 4420 - DNA, 350 bp, Zea Mays
cagggatagtcggtgttgacttcgattcccgatcaacagcggcggttgtgttcaattccaccagtgaggaagcttctcaggagaacgagggtgtggctgacgcaaggaattcagtggagctgcactagtgggggctaaccacattcacttgcgctcgggtgcggtccgacgagcagtggcgctactctggcagggcgtagagacaaattgagctggccgaggaggttcactggggcttagggaagctcctggtggcggttgctcgatggttggaaggctgtgtcggtcgggccacggtggccgactcttggctggtaggcctggatgtggcatcctcgactgttgtgaac

SEQ ID NO: 4421 - DNA, 481 bp, Zea Mays
gtggcttaccggcggcgaaatagctccggtgaggtgtccaaggaagtcgggggaagttacagcagtcacttcgaggtacgtgtcggcgtcggagatggctagagttggtcggtcctcgtgcgtaggtgggggagttcgtcggtggtgagtgattcggcctgctcatggcgggatggttcaatcggttggctcagaaagctttaccaagtgacgcagaggtggtctacgcgaggaattggaaaatggcgcagtgacttacccggtccatgatcgcctgtgagcggaagaagtccggcgagggtgattcgggttttccgttgaggcagggtctcagttctccttggagaagcttcacggctccacggggaagctatccaggggctcgggcgagactaggtgcctacggaaatggctggccacggtggccggtgatcgggtggctcgggcgggcggcgtagagctcgccggagctaagagctgg

SEQ ID NO: 4422 - DNA, 760 bp, Zea Mays
agacgttggtgacctcattgggcgggatttgcgactatggacccctggatttgtcaccggagccattgactcgcggtggagccgcccctcgtcgtggatagtgcgactgcgcgcccgattctcggtaatagttgcttgcccgaactcgtgttcatcaccgcattgtgtaggatccactcggttgaagttttaggcaccggagccatagtggagcctctctggtaatggcgcggccgtgggggagactcttcgcgccgccgcgggttggccgggggtagaagacaggtgggcaccgtcagatccttgggcaacggtccagattaggacgatccacatacctttcgccctagattagatcctggcgcttgattttggatcgggtggagcagagcgactccagaataattaaatctgcgccatagatcgcggattggacggtctgtgccgcataccacttcactggtgactcagtctaatccgcgtcgttcgtgcgtaatccaatggcccaccttggccgatacccgtacggttggttgttttgctaaagagtcctcggattttctataaaccaacccgtagtcctaccacagagtagaatgagccttaggaatatttaccctgagacccctggactttccagaaattgaggctcaattccgaatagtgttaaactagaggatttaaattttaaatggagttttaatatataaattagtgctagaacttgtaaaaatcatagaaaatccatacttggtccaaa

SEQ ID NO: 4423 - DNA, 344 bp, Zea Mays
ggggcatgagtgtgtgtatgcaacatgtgtctagtcttgtgggtgcacaggtgtcaagtatagagatagtggtcgacggtgaaggtgaatgtcatgtgggctcgtgttaatggaccaggagtggtgaaggagtgttgggtcttgattgagggactagagaagtcgaatgatgagtcgtggtggctaacaacttggaacatcgatgggtacaaggatatgatagagtggatcatgttactaacacggttgaggaccggtgaaacacatgcctacaacgtggggacatgtatagagtacgctatctatgcaggttttgtagttgagccttaaagccacccagcgac

SEQ ID NO: 4424 - DNA, 370 bp, Zea Mays
ttcatccttagctgaccgaaccaattgtccaattgttgtaacctctctctttccttgttctataaaagggggatcggggtaacatttagggggctaggatctagaaactcttgctcaggttggattagccacattcgattttgacacatacccacacaaaggctcgactcacacataggagattgaacacttgacatccaagggcaggcataaaagtggattaggactagtagactagaactcccaccaataccaagtgaaaagcgggagctaggaaggcatgacactcaattgattcttgagcttgtgatcttctccatctttgtgttcatcaatcgatgagtagcaagtggacagtgttttcaagtcg

SEQ ID NO: 4425 - DNA, 308 bp, Zea Mays
ccctatgcaagcatgtcaattgctgctaggtcgaccttggttatatgatcatgatgtctagatttttggaagaaccaacaagttgtctttcttgtacaaaggagagcgaatctctttgtttccattgacactggaggaaattctgaaggatgatctaaagaagaaacaacgagagagcgagaagcacttgagagtgatccacaaaaatagtaaggaagagtttccaaagccaaataaaactccacagcctccaataacctagacaccgggaaaagagggattagtcatgatgacttggaagggggatc

SEQ ID NO: 4426 - DNA, 436 bp, Zea Mays
ccccactctcactgtcgctcagccccactcgtcagtcgcgccccgcctcgctctctcgcgtccgctctccctcggacagatggccctcgctcgtcagccctttctcctctcccatgacctcaccagcgcaaacctcgccgaccaccaccctcttcctgtctcaccgccattactcctacgccagtgaagttaggcaccgctctgcccccagttcactgtgctcgcatcccttcacggcagcccaccccgagccgtctcatctacggtgctatgcaccatcatcgccgcccactgtgccccttgccggtgctagctggtttttggctgtttccctcctcgggcgcctataaaagagaccacctgagctccacctctcctcacactagcctcagccacccctcatcccttcctccggtctcaatcaagctcggtgttg

SEQ ID NO: 4427 - DNA, 339 bp, Zea Mays
atactcattagtacaactcaacttccttatttactttacataaggacactacttaaactacactactctaattatcttcgtccttggccgctcctgctccactgccagcctcgggagaacgttcatctgcgaggttcatggaaggaggggctccaaaaaggtccaactccccatcaggtcctccactagctgctctagatggtccggctcccgttgctgcaacctctggtggcacattcggatgtaaccggtcatataacacgtgcacctcttcatgaagggtgttacaatacgcttgcagattttaaagggatgcgcttagttccgctacccgggcta

SEQ ID NO: 4428 - DNA, 580 bp, Zea Mays
cgcctataaagcttaagcgtagattaattgtgcttaagcgtttgtagtaatatacaatataatacatatatttgcacagaaaacaggtttatttaggaattagtggggtacttacctagactagtggacatgtttttgcagccgtgctgcacgttcctagcttcttgccttcagcccttcaccaaacagtagtagcatcacctcagcgcgctgaccctggcgttctggataacttgaccagaaggggaagaggacaccgacggtcctggacagctggggaagaggacattggcagcggggaacttagacgggtggggaagaggacgaatctggtggtaggctggcagttctgttttcctcctctcacacgcgataccagctgctcccgccttctttcctattattcacgttctttcacgcaacagctcccgcccttcttttcacgtgcatctcttttcccacacatcttttacgcgcgctgagcaccgcctcagcgcgcgcaacgcaaaaaaaagcgccgcctacgcgcgctcaccgcggaaacaaccgcccagagcctaagcacagcgttaccatgctg

SEQ ID NO: 4429 - DNA, 512 bp, Zea Mays
cacgtgagcagcgtggcaccagaggaaactaatctatgaacaggtaacggagaaaaacaatggaagggaagggaactcaccaaggaagagatagtttcgccggggacgcataggggcgggttgctgcatggatgcaggtgcacaggttgatggacacggtgtagccttgcaagcagggattagtggttgcacggtagcggtggccatggccgccggcgtgtggggtagacaggcggaatggggtagacaccgaggttatggtggctcggccaaggagaggtgttgttcgccgattgctagatcaacaactgcatgcacattttgagaaaacgtcctagcaggaacacgacgcgccctccacgcgtgggttccatgcacctcgatcgtgggcacggaccatgcaaatggtgtgcagatgagagattcacgctgcatgcaaagaggtcgtttactgctagtgagaaaaatgcggtctctgatcaccgctgcatgtaggaaccgcatgtaaataa

SEQ ID NO: 4430 - DNA, 321 bp, Zea Mays
ggtacatgcaccatgcaatgaattatggatatatgcgtagttcaggtgtctcgccaggtaccatgcatagatacaactgcagtagcagtagctgcctgaactcgtgctgcaatgcaacaagatcgctgactatgctatggccccagagaagagaaggccacgaccacgaggcaagggcattaatggatttgtgatccgtaatattagtagctttcgaatatttatacttttatttttgaactaaaacaaaaaacggaaagagagctaacatcgtgattagcgtccaacaaaggtcgaagcacaggtttgcccgtgggtaac

SEQ ID NO: 4431 - DNA, 460 bp, Zea Mays
ccgagccggatcattaccagcaacaccctcgggggctaggcaaccgctggcaccatccttgaggactgggttctccgcaacagccacctctaaggctgaaggactctcagtcacctccttgggaattgaacaaccttgaccaacctcttgactccaaggtcgacgaggcacgagacgctgctcgggataactctaatcccacatctggaatgtcagagcaaacgtccatcatgccaccatcagttggctcggacagcagatcttcaggaacaacatcctctagagcctgatcaaaatttgctatggataattcttgcagaccaacaagagcagacaaagctggagaaggaatatctctactccccccactggctctgtaacgccgactatttttccgaactaaggggacttcctcctcttcttcttcatcctcgtcaacaacacgaacaataaatggtgc

SEQ ID NO: 4432 - DNA, 426 bp, Zea Mays
gcgacgcgggcgtctagcaccctggtaaccagtcacgtggatattgtttccgacttcttcagggagccgacctttgccctagcagcctctcctctcgcgcgcagcagtagccacgacgcccatgccgccgccacaggagccctaaaccccgttcacaaatctctcacccctacaaccaacggtcaatcctaggtagggctagggttcctaacaacctagtatccgaggcctctgttcctccggccatcgtgggtaacccaccagcagccccacctgcctccttgccctcttccctgccgtcatcgttgccactcgcctccaccaccgtgctgcccatcatcaccaccatcgcgcccattcagcccacctctggcgtgaccaccgcccttcccatgatgaccaacgagcagctgacggcgtccctcg

SEQ ID NO: 4433 - DNA, 672 bp, Zea Mays
cccagattaattcgaactggctaggtacactgctgtgccagtaaccgttggattcggttttaacggtgaagattttattatcctagatctaaccctggccgctggatcagagatccacgacccagatcaaaagatatcatggctgattcctaacggtccgatctagatcgagggtccggattcaatctcgaagggggtatgcccgggatccaatctcagtcgtacactctacatcctacggctcacactgattcacccccatcccaccctttttccttggcccgcatagcggcgacgccgtccagcatggcggcgccatggctgtgcatgctcagcaacggtcccaaggccaaaagtccaatcggagtagtactacgcgaggcggttacgatcacgagcataaagagataagtctcaccggttatcgcggcgtggagggcaccggccacggtgcagcacggaccgcggcggagcagaggcatcggagagcaattccagcggctacagggtccttccctctcccctgacgcccccataagcttccctgcatatcgccgaaccccaccgtacaccaatcgagcccccagcaacggtatgtctccaattagccgacggcggcgcgacgacaacccatccaccctccgccaacatcgatggtggccaggatagtca

SEQ ID NO: 4434 - DNA, 645 bp, Zea Mays
taaaattcagcttctatttacttcaaaaattgtcgcgttctagagactcgacttattctaacttatagcaagacacacttaagcatagtcacacaatagatgacgtgactgctacgtagtcatgccatcacttcaccccacaatcccaagtaacaaaataactctaaccgaacttggcatttagccgatcgattcctaacccatttttcataccaccactacacgacatgcctaatacgttaaataactcattcacaattcacctacatctttaccaaaacattcccccatcgcttgaaactcaacctaagcttcactacacaattttaggacatctgcttaattcatgaatatcatcgtcacacacactgactcgatttgaattaaccacacatgtctatcacatgaatgtagcatttcaacaaatatcctataacaaactaacttcatcacacatctttcattacaaacctacttgacttatttgaagtgtctactcgaaattttgagcacaatcatacactatatgcgaaaaataatttaacgaacgcataatacgcatcgtcatgacttgacctataaatatagagaaagcgatgactactctggcatgtcaccacctctctatttaagccaagacaattt

SEQ ID NO: 4435 - DNA, 613 bp, Zea Mays
caacgctgaccccacgatcgtcgagcccgcacttccgactcccacaaacctagcacacacctctaccattctcgccgctatcctcgtgcccccatccctgtctgcgactcctccgccattgtcgcgcctccacccttgtacgagaccccctccccccgcgaccgtcgagcccatgtctcccgccattctcatcgccatcgtctcgcccgtgccttcaaagtaagcccacaatcgccttccatcggggacatcacccacaccctcgtctgcctcttctctcgcaatgcctaccaatgccttcaccgcgtgcacatgcctcctccccacgatggccgccgaggcagccccctgccacatccacggcttcccctaccctctctggattttctccgctgcattactgatggctacagccaagccatggccgcatcgacatcgctgtctcctccactcagggcaccaccgccgttcctcctctccaccgtcaccatcaggaggtgccagaggggacctgcactgccgcgaggcatgcatggcagtgacgacgactaaaccatagcgagacagctcggggtgaggcagcacgtcgcgcccggcagtggcggcatcgctt

SEQ ID NO: 4436 - DNA, 525 bp, Zea Mays
ggaatgtgttcggttattctcaatcagtcgtatcctttatatttataggagagaatgtctgaacttgtttcaaggcaatatccaacagattctcatagataggttaggataaccacggataggataggtactcttgcctgtgttaatctgatcgcgggggtgcgaaccgttcaggccatagggtcagaccgtccggcagtgcctagatgctaaatatggtgctcaacaaattgatggctagcttctcctaatgcacgaacatatggtccaatcacgtagggttaacacaggggcatgctcaataggcagtctagattggcccatgactacccttaaattgggcgaaaaaagaggcacccctcatccagcccatctctcagcctcaactctcatgttcccttccctcggcctctcctattcacttcgcagcagcatgtacacgctgccgccctcgtagctcgtgcctcgcactacaacgctcccatagacaccgttcgccaagtcttgcttcgcagtaccaccagc

SEQ ID NO: 4437 - DNA, 819 bp, Zea Mays
gagtaaagctctatgtcatgagcaacagcgatgtcacagtcgctatgacctcgccttcgtgcgcggctcgcattgctccgcgtcgtcgtcgagtctccttgcaagcttgcggtttagccaaaagcttgtttgcgtgcgagcggggaacctcaacgaagaaagtaatgaagagtaagctgtcccttttgtttcccaactaatattaggtgatatattgtaatgcgttgaatgttggtaaagtttattattcatatgtagtggcatgagcgagtgtgtgaatcggggaaataactgagttatgttgattggacgtgatgtgtaaatttaaaaattgtaggtttgtgtgtagggtgtattattgaacatgtatgtcgatgtattataatagtgattgcgttagagtcgtttgaagtattttgaatgcatcccgaatatggttgcattcgaaatagggaaagagacatgtagtgcgctgaaaaggctagattgattttataggtcgtatgaaaaacgttctattaagtgtatacgtcgagtgtgctaaatggatcctacgtatgcagagtgtagtgtattggttaggcgaagagttttggaatagacgagtatgaggcgtgcagttaagtcgtgattgaagtgcaaatcctatgcaatgtgatgggattcgtgattatataggagttgtatttgttgatgtgatgagtagggttaaatatatatatgcttgtgcgaaggatgtattattgagcttgggtcaaaatgcgaggtactagtggtacgctaggcaggcggtgttccaaataaataaatcggttgatg

SEQ ID NO: 4438 - DNA, 310 bp, Zea Mays
gtttccttagacatttagtccgaggtagaagttcttgtgttagttaagaccaataatggacccatgttttggaatggtggtgctatatggggtaccttggatgttttgtttggagtggacgaattcgaggacgaattctttttaaggggggtagagtgtaatatccaaaaataatgttgccaaaggttgatcttcggtgcgtggatgtgggaaaagggttgtgggccgttggatgctaagtcagagtcatctgtggtgtcgcttcttttctcccgcaaagaaaaccctagtggtggccttttcccccttt

SEQ ID NO: 4439 - DNA, 636 bp, Zea Mays
ggagaatgctattgggatatgcaaggttgttggagggatctcctcctgttgttgtgtcccaaaaccatccacatccttcaacaaccaactctagctggttcacagattcatcattgttctcattcaatattgagaatgtcacgttttgttagaaaaaataatatgtattgtaagggacaagatgtgtggcacaatatattacatccatgctaggatggcaaataagtaaaggtttgtattttaaaacaaaatttaatatataacatggtattgcaatatttttattgtgacgatatgcttgaagattccacatcttgccttgttttcaccttatcatcccaattctttatgacccgtgttaatcgtttggatgtgttttccttcttgttgttgtgtgttgcattgtggctacatttgctaccctgacattatgtagtcctcataagtagtatgtttttattactcgtattgggactatcaaattttctaggcggggccaatatcacctcgttcatagttaatgtaccagaaattgtgataggagatgcaactcctacaaagggcgcaatgttaataatgaattaagtggggttcaaacagtgaaggttatcagttagttttctaacaatgatgatg

SEQ ID NO: 4440 - DNA, 618 bp, Zea Mays
accactaagtcaccaatacactgacagtccaacctttgagcagctgttacttcactttttatatgggatcatgtccatcattcttcaataaagttgttcaccattaggtggtcttgaattcctctatatactctacagcctaaaaccacatggattaggcataaatgggctccaaaaacagcaactttcactgaaattcagttttcagtaactgaattcaattcagtttcagccacaaatagtgcaactttgaacaagtttttctccattttctgtgtggaatcaagtcaaagacactttagtagatttgttcactatcatataggcttcaacttctctataaacaccccagcacaaaacaatacagaacagccacaaaccagctccaaaactgctatccacactgaaattcagttaatgtttccaatctgaaaattcagaaacacagcagcaccactttaaaccactcttttgcctggatttcaaatgtttctaggggcaagttgcttaataaagtttatactgctatagctcctctacaagtttgatatagtgaccattgaccaaaacctcttggattccaaactacactagcccaaagtttgcacaaaatactga

SEQ ID NO: 4441 - DNA, 473 bp, Zea Mays
aaagatatgtagagacaaccaggggctttagaggaaggttccacccaagacacaaagtatctacaattcaagccagaatgaagataaggttggctggtctcaggggcagcaaagtcagcaccaggaatcagaaacacaacaacaatcctcacaaagcaacttccgtccaccaactccaaggggaggaggagaggttgaaactttggaggaagattcaaaacatagccaagaaagttatattatgttttctgtggggagaacaagggtcgtactacaaatacctgctagattactagacaaaagcaaaaagaacgcactgctgctgctcaaaccactcagtcgaaggaagtgttcaacacatcctcacactatttaccatatattcctcatcatgttcagcatcaagagccgaagcctcaactttcagcctctattgcctcaaccaatccttcgcctaaccattgggtgcctcc

SEQ ID NO: 4442 - DNA, 475 bp, Zea Mays
ggggaactcaaatgtgataaatggtctatgagaaatattttggctgtgtgtttgaatgttaaattctgacagcatggaagcacacatagtctatagagaaatccaaatcacatctgttatacacctatacaaattttgaatatgcgacgactgtactaatgtgatgttttacgtgcattgtccaaaactgttgtaatgtggtgatttactatgaagcctagctgttgttattcccttgttagtagtaatgcatacctcatcatactaatttttattccagacttccacttagacatgtatcatatgcatgcttgtatgagggacacatttcttggtcagttttttcagaaacatgagaggattagtttcttctttaattgtgcacacttggattgcatcttagcaattttatgtctcagtgattgttttcttaataataaaatcaatacaattcatagacaatgctacttgcttt

SEQ ID NO: 4443 - DNA, 425 bp, Zea Mays
gtcgggcttcgagtggagctccatcgaggcacgaatgtcagtggctttgacggcgcgacgcagtaacagcgagcagcacagcaacatggcatgacgaccgtgaattctggtgatagtagcgtatgcaggcgagctagacacagggtcgaatctcctgacaacaatgatggtgagcgcaggcgacggtgctcagcacgagtacgacgacgatacaagagcgttcggcttcgatgatgttccgcgagcagagagtaggcaagcgacaaggtagctgcacaccagcatcgtggagtcatagagacgagggcagaccctgatgagcggggcatagggctcgagcggaggtgggagctgggtaggagaaggaggagagctcggtggggttttataggctggcgagggagaccgaggggcgtcgaacgttg

SEQ ID NO: 4444 - DNA, 356 bp, Zea Mays
tgacagcggaaaaacttaagggagtcgcgtgttccaagcgattcatggcggtataagccaattaaaggggtcggggagcatcacgggtacctgaggatactcaattgagggatcagagggcgtgagttggcttgaattgcactggccgcggtaaggctagttcacggtggcggaaacccggattggggagaaaccaaaattcaagctttcggaggcacggttgctaacgattgttggtggctgggtgggtgatgatgttacgtagctaggggagggctcaatttataggcggcttcgacggtggccaggaattttaacggcgacgcgcggcggtcggagataaggaagaatgctgg

SEQ ID NO: 4445 - DNA, 661 bp, Zea Mays
acgaagaagaacagtaagtggagaagtagagacttggagaggaagatgaacgaaggttcagagtgcagattacaaaagactggtaatttctccccctccttccgactgccctcgtccactacttaaggtgtactcctattacaaggccgaagcctatcagacagcccattcgaaacccatgactcgaacaattggtttgcgtagacgccggcccatcttccttccagcttaccccaaatggcagtgtactaacactcatgaagggcttttgcttggactatatccatatccaccctagaatggtttaacaaaaaaaccataggtagcttaacgattaccgaagatttgttaaaccgatttcagggtggatggtcttcaccacctgtctgatatactggtcggtctcgtttcgtttttcactaatcccgacttttgagccctgttagttgataacgtgcgatcaccaaatctacaagaaaaagcggcagaggtacactccatgcgtgtggtagctaaaatagattaatggctgtcagcgttcgaagagctatatatctatacatataaaaaaaatcaaaatagcttatataatttgaaacggagggagtataataaaatattgcttggacgacatcacttgtactggtaccttcccagccca

SEQ ID NO: 4446 - DNA, 477 bp, Zea Mays
gtgattctcggtcagtggggctcagcggggagcgcaagatcagccgcctgtttctagcgtggaagcgagcattggctatgtccagggtgttgggaatttctcgacggagcccaatcagttccaccaatccaccgctcgtcgtggtcgggatcggctgtggcgaaatgtgaggtactggaccattcgttgcattcgccagacgtagggcatcgtgtagcgcccttcgaattagtgttttgcgtgtggtaccgaagatttgagggagccgaacatggcgccaccgcaccgggaggctgtgtcgacggtgagtctggtggctgggggaagacaactttcgtgccatcggatccggaacggacgggcatgattagaagcagggtaccgtttcgttctgggaaatcctggccgtcggatcggacccgggcgatcaagattagatcatgacacactggttcgcggattaacctgatgtcgtcc

SEQ ID NO: 4447 - DNA, 811 bp, Zea Mays
tgccgcggtgtcaccgttccgacagaggatacccatgaatatgtcgtttacattccttttcttattcgcggtcgtgctcttcccgtctccccctttttctgcggcctccttgatttctacgaattgaacttgacacatctgaaccctaattccattctgtaagcttccatttgtgtacatctgtgtgaggcctttctcgggattctcccccatttcggtatctgtaaatacctttatcattgtcggcccgggatggctgggggacagcaccaactcgttggcggcgcaagcctggagcttcgtcgcgggaggaaagcatagtaccttgacattcccctcaaggacaacattaaggggtggtgccttgagtggttcattgtggagaatcactggaagtccctccccctcggtcagggaggcagccaaatgtccgcacaccgagctggatagaatctccgaccccttcggagataacagaggctaaagcactgcttgccgaggtatgcttgctgaaggatagaggtctgactgctgaggctgtggttgctgatttcgttttcaagaacatccagcctttaaaggacagggcctaccctgcttatttgtacagcggtgttaatgattctacccgagtcacaaacagaaaaattcccactgaagatctgatgagtcgattggacatgatcctgaggggtagagtttcaaatgttggtgctcttgtggcctattctgcatggaacctgccaccacttaagccattttctgagtttgcgtccaaccctcatgcttgtgatggtagcctgggtcttag

SEQ ID NO: 4448 - DNA, 624 bp, Zea Mays
gttcccggcgaccagagggcccttagtccaattggacggtccagcaagcatcgcagataggtgagagagcttaaacgagggagagggagggttggactgaccggaaagggggctggcgacggtgaagcacgtttcacggtagcggagaatggatttggggggaattagaaattcgtgtgtgctggtggacgatcaagggtgggagcgggtgctacagcttcacaactacatggcgcagctacgggcaaggtcaatttatagcgctagcgggcggtggccgtgaatttcgagcaagacgcgcggcggccgaaggtggagaagaacactgggcgcggtgaatacgtgtctagagacgtggcggttactccggtgagccacggagagcgagggtaagtcgcggtggtgcggtggaaagcgagagccacgcggcgcatggtcgggagacggcggtcgccggcgtgttaatccgctcagccgcaaagagggagagagagccacggtgatgtcaccggagtgacctccagctcaccgtcggcgaggggcttctaccgcacgacgttatccacccaccccgagcacgaatccaacagcggtggcgtgaatcacggcgaaggtcgtcggcgg

SEQ ID NO: 4449 - DNA, 410 bp, Zea Mays
cctctgtgtgccttgaacatccttgcaggttcctagctccttcgggagggttttcccacctcaaatagccatttccccgaaaccctaaaactctgccctccacgtgttcggtgaaatgcccaaaccagccaaaaatgctccaattgaacccaaattttttaaggcaccttcacgacatctccagtaacatattcgccaaatttcacgtccatccgatattccaggctttaatttcacccaattccccgtttcgagcgatcgtttccgagccgagtgaccaaatctcattttcttcgcctaaattcaaaccaaacacacacttcactcatattcacccatataaacctattcgtgaagtattggctcaattccacgtcatttcgtgcctctattcgaattccaaacctcct

SEQ ID NO: 4450 - DNA, 366 bp, Zea Mays
ctgcatgatgtcaattttattggtttcctttcttacatttgatctatcatatacatgattatgtattgcttaatttatatatttgttgggtggttggacaattaatatcatcgggacgaactacccgacaattatccggtacctacccgagtagtatctgttatccgtttcttacccgccccgattattacccggtcccgtcctgtatccgttccgaatcttaactaccggtatccggtctcgtatccgagagaaatacgttagggtaggatacatgatgaccctgtatccggctgtatctgtctcgttttcatccctatatgcgacggctgcgtcagagcttgttgtacacaacgacacttgcgg

SEQ ID NO: 4451 - DNA, 620 bp, Zea Mays
aaagcatggtaatcctctccgtatggtgtaaaatagacttgacatcggtcctgtagccaccccgttgttagcggccttcgtggaggagttgatgatgtcctttagtcgatgttatctaggctgaggtctggcttgggcgagacggaggttcctcccgagactttggtcaagcctgtctcggggcatgcatttgtacaggaaggggttagtgcacttgtcggagtggcttcctgagggattcacggggagttgttgccggggcagttggacgaagccgagttcgagcgaggcggagttttctcccgaggctgaggctagcttcgggcgaggcggagtttcttcatgagggtgagaccatgctcagacgcgtgcgcgtcccatccaaagtttgtttgagcacaatagtcgacgtaggtgagcaatggcctttattccgagacgtgcgtcatcgtatttggtgaaagtggatgagaccacggtctcattgctccctgtttgactgcagtgtcacgtggggttggtattccaatcatcgcatgaaatgcgcatgtttccacggttctcgcgacctttgattgaggctggggtcggagctgtcctcctgtctgagacgagctcgg

SEQ ID NO: 4452 - DNA, 800 bp, Zea Mays
gatggcttaggcagtcccattgcacatgatggactcaacgtcttcaactattctgtcgtcttctctagttttggctcttcagtcgaatttgtactagcttcgactagcatagcatgacctagttctgtggcaggagcaaccccttcactaagcttcggcacatcggccgtctcaatgtgtctgggtcggcgcgtcaaaactttaaccttcttcgacctcgacacactgaatagcatgggatagcaactttccttttcttcccttgctttcgcatgggatagcagtagtatgggtacacaaaccgataacgtcaaatgccatgttcaatctcttcttgccccgagcaccgaaggcagttgtcatagcttcgtcttcggccttcgagtatgctccaagcagctcatcgctagttgcctctatagcatctagccagtcatcattcagttcatcaaactagctcatgtatcgaaaggtatacttcagataggctaaaccattttgactggagccagcgacagcctccttcggcatttcctacccgtttgcaagtggccacactctgtaagcaatatgttcttggaccaagtctcttgtgctgatataagtgcacactatattgaaagctgtctggcacgcttgcatgccatttccaagtgcaatgagtggcctcctaatgccgaagcgagaccatataggacgctgaataatcccttttataccctccctctaactcaggtaaaccttcacataaaaccattcctgcatccaagagcctgtccatttttccgaaatgtcaacac

SEQ ID NO: 4453 - DNA, 394 bp, Zea Mays
gattttgctgtcagcagaacccccgtcctgtcattcggcgttactgaatcactaatctgtttgacttcacctcacctgttgttttcacgtgggttgttcagacttgtcacctgtgctctacaatactgctgaatatcttgaaatgtattcatacacgcttatccgtaggtaacattcaatatttggtatagcacgtccgatagtccgatgtgaaatcggggcattggatttggaatttattgcatgttctgttgggcctgtatgtatggtgtatctaccttgtactggtcctgcgatctgaggcattcactccagtttctgttttgtaagatgcaattcgggtcatgaacaggaagagccaactgcacggcttcattgcagattttgttctttc

SEQ ID NO: 4454 - DNA, 310 bp, Zea Mays
aacaacttcaaagatgggccttaaattttcaagagtagttcttctcaaagcaaaaactgcacaaatcctgattaaagtgtctatgcaccttaggttgtctccatcagcttatccatcttatctcttatcccatcctcaatttcaaaccccactatgtgaaccatgcagtctatagtgcaaaacaatattttgtacgaccatatatatgatccggagacagccttaaagaattctatcggaaagaccagcttctgatctatgtatgtgattcaaaatgtgtcctccctgttttatgctaacccagagcagc

SEQ ID NO: 4455 - DNA, 495 bp, Zea Mays
aacactatctttattctaattgtagccacacgatggagaatcaacagtcgacgcgataccagagtcgggatctaatctagccgccaaattaccgatcaacggtcggatgcagcgccacccttacccgacctcgagcatgggcgcgtcgccatgtttatggcgatgacccgtcggagttcaacaacccagcacccaacgatgtctatacccggggccagtggctctaaacacaatccagcgccaggcgaaaccgactagacccctgaatcaacgtttgaatggtggtactaccttgcccacggtgcggcacagcgccatggagccagagggctccggcgagaaattcctgacccgccgatgagtaattctctcccccgcggttcactatacttcaaggattggtcaacaaagacgaaggaagtggccatacctgtggcggtgctgcgatggagccaatcccctgtgcggggcagaatcgaggtgacgctgagccaa

SEQ ID NO: 4456 - DNA, 533 bp, Zea Mays
gaagccgatactcttcgataaggtaccggcaaccttcgcaccggtttggtctcgtatacagcctaacccttcatcatcaataccaccaaagagaagcgcccccggccgatatccacaagatatagcatactcttttaattcctctttttcagcttcagtcagctcctggccaactaagcttcggaagtcaaaagtctcatcttccgaggtatctccggttattcctcctttctcgggtttggcagccgtggtctcttcggtggctacagcagtttcttcagcggccatgtttagcagcattttatctatatcagcgactatgctctctaaattaataccttcggagttagcatcttctgctctggcctcttctgcagcagcctccgaaggtatagcttcagtagctgtcatgatttcaattgccggcatcttcagagttggagctcttggtggtgttgtttcaatcacttcagtcacggtaacaatcctttgtctttttggcctagatgcctttgtctttgtgggctcctttt

SEQ ID NO: 4457 - DNA, 345 bp, Zea Mays
acatcatcagccccattccgaacacacatcgcctaacgcctacagttcgcggtgccgtttacgggagaccaccttctaggcccgtactcttaaggtgtatggaatgcacggaaattcccaaagcgctgctaacttatctcggtccttatgtagcaagggcttgcctcctccagggtcggttgccaccctcaatggtgggccgctcactccatccacctctctcatatcaccatcgctcacaggggatgtctcagtcatcccctaattcttttacactcacacatgcttgcccctgccggtaacccatctctcatcactgttcccgctcatccccaacccactcca

SEQ ID NO: 4458 - DNA, 797 bp, Zea Mays
tgacatatgattgtacaaatagtcacatcatatatatcgagttgtggatcagtctcgatcattttgatgctggataaatccctgatcccgttgtacaaaggaataagaataccttgttaattctagttaaagtagatatgtttttataataaaaaagggagattgaatgttgaagtgatccagatcaactcaatgtctcaccgttggctagcaaggtgccacgtgtgtgtacctctcactctcaaaagctagacccaccgttaaattatttggacatttcactattttcgcaagcttacactcagcagcctacttccagcagcatctcgcgagttccttccgtcaaagaatccgagcgatcaagcgttggactgttgattttgtgatcatttttttcgtccaccatgctatcccaagactttgtcgaccaaaacacaaaggaagcacaagctacaacactgttagcacaacatccttcctatgttaaatatttttagatattttattccttttataaatatacttatatatacatatattgtgtatacagtgggcacccccatactcctagctacgcatctgctaggcaggttcaccatttgcattatgtttccccttccagagaaacgatatcacgattttatcaattttatttcatgcccacaccgtcaagggaaacactatatgatgataggtaggcatagaggagaagactaaagagactaaaatgagatgccctgctttgtttaaccatcttcagttgcgtagacagggggctagaagggcccatcccccaa

SEQ ID NO: 4459 - DNA, 437 bp, Zea Mays
gaactttgtcctcctctcccagtaaggtaaactaatcgcgctcgctcgttctctgatcgacggaggatacggcccacgccatcgacggaacacccagagcgagaaacagagctcgcccggcggcgtactcgccggcgagcagcagtgccgtaccccgctcgccccaaaactcaacacaggcagtgctacatgaagaaccgacagaggtaagtaaggtagatgaagtctcaccgctgaccaagacgcagaagcatccacccacggtacgctgcgaaggaaggcaaatcccggtcgtcgatgaggtgtcccgcttgccccgagcgcccaattgtgtcgcagaagcttttggtgaccaccggcgaaccttctggccagggatccgcgcttcaattgccgtcagcggtagagaacggccacgacggcgacccaccctcaac

SEQ ID NO: 4460 - DNA, 506 bp, Zea Mays
ttcgtcttcgtcttctaccgtcagatagccgcgtctctcctcatggtgcccacggtagtccttctcgagaggtaacttgatcgatcacccgctgactcctggctgactaaaagccacaaaaacaatcaaaaccacgtgggctacctcaaaatgatatgcagatgtgatttgttcaatctgtggcaggagaaatgcaagatccatgtcgtccgcgttgctcttcaagatctttgtgtgcgccttgatcgggtatgtaagcagtaagatgagcatatggatgtagctttaatatattgtgtaatttatttaggttcaatgagtgattgttggattccctcccccggaactgatggagaggaaatctgagaccgagttgttgttggatggatccattcgtcggtttccaggatcacagttagcagcaacctgtacaacgtgagcttgaagctgacgtcggtgacggtggtcgcagcatcgaccattgccatccccgtgatcactttctt

SEQ ID NO: 4461 - DNA, 360 bp, Zea Mays
tgagaattactagttgaagcatgaggagggaccgaatgacttgaagtatcttgatcatgagcatccatactttcatcattttgttggctttggtgattttcttcatttagggttgaagaggatggaatgacaaccacactattatcatcatcatcttctcttggctttatttcaccaatagccattgttttcatagcatttctcaaatgagctccaccaacatcgtcaagattatcgttttcatcttgagacccatttgtttcatcaaactcaacatcatatgcttcttcaataataccatgggtcttgttgaaaactctataagccttgctgtttgatgaatatccaagtagaaaacct

SEQ ID NO: 4462 - DNA, 687 bp, Zea Mays
caaaaaggaaaatagaaagaatagtgcttgcctgcgcttgggcctaatctatcagtctcggcccagatagccgcatcaccacggcccaacacaacccgcccttctgtgtttctctgagacgatggcgcgtgggccgcggaaacggattggtattccttgcgccgacgcaggggacccacaggtcagcctcacgaattacttggccaggcgcgatcgtagcggaaacgtggtgggcccctatggtcattcgctagcatgtcacaatggtctgcggacccggtatgccaacgagcactgtagatcttcccagtcaactgctcgccgatttcaccgccagctcgagcgcagctgcgcccaaccgacatctctgggctattaagggtggatcacgggttcttccttctctcgttgttttcccttaatccagaccgccactcttaccgtgaggaagaagggcgaagtcgcgaccacctccataggtccacctctgcgcatcatgagaatccccgggctacagcgttgggcggtcgaagaatcagtggaaggcatcaccactgcgtggagaatccgagcggagttctattgaatcggatttcaaccataccagggaagaatcgctcgccggtgcaggtgccctgcctccagcgtcgcgcttgccgtggtccgggatccttgcgccaccatcat

SEQ ID NO: 4463 - DNA, 903 bp, Zea Mays
agattatatttaatactcctgactagtattaaacatttaatgtgatagggctaaaatttagtcaagtggatccaacaggtcttaatttaaatttgatttgatgacgaaattagggtatttaaggactgcatcgttcttctctcctcttctttcatgcccagtgtagtcactggtctaagtcaagactcaagactagccgaaagatccaactcaagagatgacttgtcgggtatcgtaattagaggtacctggattacatccctaaacgtgcttaaccccgaggttgccaccaggcacattcccgaggacaataaggtataaaccacgattcgcccaaggcccctctcggcggtcacccataactttgcctcgcccggacctgccctcggacaaggtacatactcagtagaatcctcgtcccagccgaggtcctctctccccataactaccgtctccgcctcgcccgagcccgtctcgagcaaggaaggcatccccgaggcaggtctcagccgaaggtcacaggggacatgagcatttaatgagcatacctaccccacgcagcgctgcaggcgaacaggagcgacaagaccgcggtctcgtcggctttcaccaactacgatgatgtatgcctaagtacaacggctgttgttcccccacgtcacctaccaactactgatgggacacgcatacacgcattcgacaaagcgcgggactggacctcgagaggaaagtacacctcgcccgagcccagcctcggctacttactccccgcgaataccgcaggagaccactccttcaactgtgtcgcgcacgtctacgaatcccggtgcgggctcagtcacggcctcgggcagactttcgcctcgcccgagcacggcatcgacctcgttattatcaacaaaa

SEQ ID NO: 4464 - DNA, 404 bp, Zea Mays
aaacaagaccctaaaacaacacccacgtggattgagcaagaactaggtcaacaaacatagaaaccctacggcaaagcaaatcctgatgtcatcgtcgcatatacgaatcagccaacctttatttcctgcatttcctcctgtccacacaaaagtgggagcacatcattttaccttttgctccaagtgacaccatgatagcttactactcatcccgccatatccatccacacaattcacactgatgataaacaaattaaatgaagacgctttgctggagacgacagagcaaatcgattttgtgtagtctcgaacaacaacagagagggaccgggaggacataggaagacacacgctgagcgagctagctgaaattcgacgatgatttgatggcaaccaacgacatg

SEQ ID NO: 4465 - DNA, 635 bp, Zea Mays
cggtaacgcatgagtcatgatggatgcagcgcgttccatggcacaggtgtactgttggccaacgggaatagtcggacacgccgcctgcaagatggcttgggcgccgcctgccagttgagtggacagggcgcattaagtgccgaaggggcacatcatctgtcaacagggtagttaggcggcgcgtcttctccacaataaatgcaagggcagcgtggcccagtggtcttacgtcaggcccatcccgcaagcttacgtcacgcacagtaggctgcttggctgcaccagatcttcgcctggccacattgtgtggacaggttcgcaccaagctgggtctggacacatgtcgcctcggaccccttcctgagcagggtccaggtattctttgccccagaatcccgggatccggtggtgagtagtccggaccctactcagaagggtccgggacccatctcggaggttcattcgccacgtatgggggtccggcgctttccttgcagtaggtccagacccactgtgtgtatcccggagcacgtccctttccctggccacgtggcgaccccgggacagtcgatgtggcgcgactgcgaattggtctccgcgcaaccagagacctctccaccggcgtagtgccttca

SEQ ID NO: 4466 - DNA, 521 bp, Zea Mays
ccgccgatgacccatccacaccgcgattagcgccggggtcaggatgatcgggcagcgagcatctccgcgcgaagattcttttgctctgggtaagaccgccgcggtggagggcaataactccggctgccacgcgaccatccctcctcccggccatgtccgatcatcggcaccactcttctctattcgtccacgccgtcattgatttgactgctttacggccacggttggacgtggcaggcccgtaggaatgagtagcgcttgacatcgccgttgatcgccagctaaggccggcaatggttatcaccatggccacggcagtgcttcaccgcgcctataaattcaccgcgtcctcgctccctccattcaaatcaaccgagctcggtccttcgtcactaaattgtgaagctatagcacccgctcccactctcgattagccaccctagccagagaatcgatgttttcccccaaatcagtccgctgcgtcacccagaacagcccgcttgtggccggcctgctctggt

SEQ ID NO: 4467 - DNA, 887 bp, Zea Mays
tgaggtctttggaggttggttcgtctacgtcggggatggctgaagcgcttgtccgtggtgacccatgtttgatttcctgtggggtcatggcctccgatccgtatagcaggcaaaagggagtgaatccagtcgcccggcattcggttgtgttcagcgcccagactgcttcaggtagcagggtcagctcatttacccttcttgtcgttgagaagcattttcttgatggcagtgaaaatcttgccgttggcgcgctccacgacaccgttggattgtgggtgatatactgaggcgaaggctagcttggtgccaatggagaagcaaaaatccctgaagtcctggttgtcaaattgtttgccattatcgactgtgagctcagacgggactccgaatcggcagataatgttttgccagaaaaatttctgggtagtcttcgacgttgttgtggatactgcccttgcctcgatccacttggtaaaatactcgacggcaacgaaggtgaacttgaggttcccttgagccgtgggtagtggcccgacaatgtctaggccctagcgctgaaggggccacgtgtggcgatcagctttgtgaattgcgaagggttgcccgaacggggggaaaacttctggcaggctttgcacgacctcgtgacccgattcgtggcgcagattatagcgggccagtagaagccttgacggatcaccttggcagcgagagccctaggccctgcgtgagagccgcaagttctgatgtggacttcgcgcaggatctggatgccttcggtctcggtgacgcatttaagcatgggttggctgacccccttcttgtaaagctggccctcaatgagtgcgaagtcctggcttcggtgcttgaggcgcttggcctcgttg

SEQ ID NO: 4468 - DNA, 375 bp, Zea Mays
aaataaagtattttatgcacactccgctcataaacctagttaagattataagcaataaagacaatcttataccccaaacttcaacctctctatatgaaaggattgtggacctcataacttaagcttgaaaatgaactaggtgtcaggccttagaatatcagtagatactagtacataaaaaggggaacaaaaggtgacacagtcttatccataatggcataaataaagtcattcttttattagatgcacatgtttttggtggtcctgcactcctgtttatctctctaaaaaacttgaagtgtcataacaagatgcaaaagtagtactagtggcagagcttctcataggatgaaaggagcatgaccacccctgaac

SEQ ID NO: 4469 - DNA, 637 bp, Zea Mays
cggcggtgccatggccggggatccgccctcttcacgcaccaaggcccccatccatgatccgattgtcacaacacgagataaagaacattgcgaacgggtgggagtagattttaccaatgtttgtgaatcatacatggccgcccacgatgatatgcagagtcacggcggaaggattgctccggtgagcaatcaccgacgcccggtgcaagcactagatccgtctgtccctcgaacacccgtctcacaccctcacgaacgtccgggacctcgccctggcccctaaatagccctggaatcacagaacgacggtgaggctgcttcgcggcgtccaccaattccccacagtgcttccctaggcaccggttctgcaccagacctccatggtaacatcagcgcgacaccaagcagttccctggccccaaaccgaggcaacgttgttgctatctccgtgaatcaacggtggcgggcatggcttcacgcacctgattccccggcggtggcatgggcggccttctgttcacacactccccgcccggcgccgaagcagtcctcggctggatgggatggggtggccgcgagcttggctataaataccccggagtccgatcgggggatcaaccccaacaaccccgaggcg

SEQ ID NO: 4470 - DNA, 366 bp, Zea Mays
cgagattcggacctaaatttgtagcgtgccacttgtgtgcgatcaaataagcaacgctagtactctacgttacggcgcctaatcgcacatgtgcatggtcgcgacttgttaaagttgaggcaattatacaaacgtttcacccgggcaaagatcgaagaccacacatgataagtgggttcggcatttctaaagacctccagtccagcccggtcaaggaagatacggcagtcttgtataggtcggcccagttagaggaataggcttcgatcggaccactctatgaccaggcaggaaattgtggcccaacctgatatcaagataaaagcatcgtcggcccagttggagaaataggcctcacccgaaccg

SEQ ID NO: 4471 - DNA, 1709 bp, Zea Mays
cttttgacaccatgcatcggggagaccttgagataaacaaaatctccttcctcaaatctgagttctcttcgtctgttgtctgcataacttttctgtcgactctgagcttcaagtaacctcttgcggatcagggcaactttctcttcggcttctttaacaaagtcgggtccttctagtgtcctttcccctacattggaccacattaggggggtctggcattttcttccatacaatgcctcgaacggtgacattttgatgctggcctgatggctgttgttgtatgagaattcggcgtacggcaagctggactcccaatccctgtcgaacgttagcacacaggctcttagtaaatcttcgaggatcttgttgactctttccgtttgaccatctgactgggggtgataagcggtgctgaaatctaacttggtgcccatcgcttgctggaggcctttccaaaattttgaggtgaactgcatccctctttctgacactatcttctgtggaatgccatggagcctgactatctccttaagatatatccgggcaagggcggctcctccaaaagtggtttttactgggatgaagtgggccaccttggtgagacggtcgattattacccagatagaatcattccctttttgcgttcggggctgtcaggttacgaaatccatgcctatttcttcccacttccattcaggcactgggaggggttgcagtaggcctacaggcttctgatgttcggcctttgatcgctggcaggtgtcacaccgggccacatactgtgctatctccttcttcattcctctccaccagtatctggctttgaggtccaggtacatcttggtggttcctggttggatggagtaagctgagttgtgggcttcattgagtaggacttctcgtgcctctcccattggtacacacagacagttcttgaaccaaaggactccttgttcatctgtcctaagatccggaagttgctccttgcgagctctttccataagtctggttgtctcagcgtccaggcgttgagccttgcatatgagatcttctagcattggcttgacttccaggctatcgttgtctcccagacatgcatttagctgagctgattccttcttccaatcttctaaaaagttggtccccttgaccccgaaaggttttcggctgagggtgtctgccaccacgttggccttcccagggtggtaatggatttcgaggtcataatccttgatcaattcaagccatcttctttgacggaggttgaggtctggctgagtgaagatgtacctcagactcttgtgatcggtgaagatgtggcatttgttcccaatcagatagtgcctccatatttttagggcgcgcactatggctgccaactccaagtcatgggtggggtagttctgctcgtgtggcttgagtaagcgggatgcataggcaataactttctcattttgcatcaagacacaccctaagccttgtcttgaagcgtcacagaaaatgacgaaatcctggtgtatgtccggtagtgtcaaaacgggcgcggttgtaagctttttcttgatgatctagaaactttcctcacattttggagtccacacaaatttattgtcctttttgagaagttcggtcataggtttcgctatgctggagaatcctttgataaagcggcggtaataccctgccattcccagaaagcttcgtacttc

SEQ ID NO: 4472 - DNA, 562 bp, Zea Mays
ttcaaactttattgtgttgtcttcgcaggcgatgaacaaagaagatgtggaggacctcgccggccttgaatgctcggtggcccggaaggatgcttcagcggaggcgagagccgaagagcaagctatgttccaaggaggtggcgctgagggtcctgcaacggcagatgcttcggcgctggttgcaagagtgtaatagggaatagattgataatgttcgttttgtgtggtactgaagatcggttactgcacaggtttcgacgtcggggcctatgtaagcaaaccctgatgatgacacgattgatgatattttgaaggatggaaatgcggtgtttcttagtagtgacgcgtctggggaatctcatgttggttcatggtctttcgagggtggaaagttggggagccctttttcttggatagatgatgaatcctcggaggatgaattagattattttgtggcgtttgatttagctgtggtggagtctccgttgagggtcgccccctgtgaagagcgggtgacttcggtcggtgcaatcctaggtgggccacgggggcaaaaaaagat

SEQ ID NO: 4473 - DNA, 750 bp, Zea Mays
ttgattttcctcaatgggctttggagacaattgataaaattagaaagggttttctttggaaaggccacaaggaagtcaggggaggacattgtctggttgcctggggaagggtgtgcagacccctccatttgggagggttgagtatttctagtttaaaggaactatgctgggcccttcgtatgagatggttatggcttcataaaactgatccagaaaaaccttgggcaaacctccctatccaagttccaaaaaaggcagaagctttcttctccactgttttggtctctaaggttggaaatggagcacacactttgttttggacagataaatggatcttgggacagaatgtgtgtagtctggcgcctaggttatttgccatcattcctaaaaggattgcaaatagaagaactgtgcttgaggctctttccaacagaaaatggatatctgatataaagggtgctctgtctgtgggagttctagtggattatttgaatctttgggagcttctatcagaaatagtgttgcagcctgaagtggaggataagcatatttttagtattgcggcagatggtaaatactcggctaagtcggcatatgaaggcctctttgctggatcaacgtcctttggtcactatcacctggtttggaaaacctgggcacctccaaagtgtcggttttttctttggctggtggctaacaagagatgctggactgctgacaggcttgcaaagagaggcttggatcatccag

SEQ ID NO: 4474 - DNA, 954 bp, Zea Mays
atcacaggcacatgagcacacttaaacgagggagcagaaggtttgcactgacctgaatcgagctggccgcggtgaggtgcgttttacggtgttcttgagcggatttgggggaaatccaaaattggagcttacgggtgcaagattggaggcaatactgggtggtgtggtgcgtgatgatcttgcggagctgacggcgggctcaatttataggcctagtgagcggtggtcgcgaatttgaagaaggacacgcggcggtcggaggaaggggagttcactggcgcagtggattcgtgtcccacgccgtggcaattactccggtgatcaacggagagtgagagtaggttacggcgatgtggtggaaaggtagagacacgcggcggatggtggtgatggcttaacggcggtgaggaccttatccaaggaatcggtgagcaaggggaggggcacgacgactagccggagtggcgtccagctcaacggcggcgaagatttttctaccccgcgacgttatctatccactccaggcacaaatcacggtgagatgagcgcgaatctgggcacagctcgtcggtggcgagctgagttgttgatctgatctatttcagttgcagtactgtaccatgggacttcctcattcagttggactgaccgagcaagtttggcgctaattttattccgatttttaatggcaaccagtggatcggccagtaacaaagttgttgtctgatgatccaacaacaatcttgctatagcgaccatagccaaattcttattagatcaaggttgatttccagttcaaagttgactcagtaccactgttagcctgaatttcatacttcagacagcctgaaagttcaactttgagtgcacttttctccaaattcttcacaacaaccatgcttactctcttaagcaaagttattcacctaagatagatctacatagttgatgtgg

SEQ ID NO: 4475 - DNA, 451 bp, Zea Mays
ctcgcgaagaagtacacgccgccagaccaccaacctctcgcgcccggggaggacctcgcggaggcgagcgcacgctggatgacatcctcgacgcccagtgcccgtaccacaaggacattcgccacacccttcggaactgctgggacttcaagcactccatcgggcatggtcgacccttccaacctctacctcctcctccgccgcggggagggccagaagaaccacgacagccccagcagcaggaggagggaagaggaggagctttcccgcgcgttgacagggaggtcaacgtcatcttcggcggacacggatcgcaggagaatagaaggcaacaaaagctcaacgatcgctagatattggtggcgaccaccggtcctcccgccccataccggtggtcggagcatccgatcactttcactcgggcggatcaatggctcaacttcgaccaccc

SEQ ID NO: 4476 - DNA, 1732 bp, Zea Mays
ggatggtccaggagctattagtataggtattagtataggccccaaccgaaggtgttgggaggggagggtccaagcatcggtccaataggtgcttggtcgggagggcccaagcaccagtcgaataggtccttggtcgggagtgtccacgcaccaatccaatagggggttgaacgttagggtctaggcaccagtgaaataggcgcttggtcgcgagggtctaggcaccactccaataggtgcttggaagggagggtccaggcaccaatccaataggtgcttggtcgggagggtccagacaccaatccaatgggtgcttggtcgtgagggtccacgcaccagtcgagtaggtgcttggtccgaagggtccaggcaccagtgcaataggtgcgtggaggtgatggtccaggcacctattggagtggtgcctggaccctcccctccaagcacctattacaatggtgcctggaccctcccgaccaagttagttagaagaatattctattttatgacgccaaatattcctcgctagaaaattgaatatttacaccatgtgccaaccgcctacctattttgctctgcttggtgcgaaagcttcggtctcctcctgtccgtgtccccttagtcttctgccattcccgctatcgcggagcgcgcgggggtcatgcttgttgcctcacctactccagaggcgtcaaaggtttccgtctacttctcatccaactcttcgatcactttcttgatttttgccacggtggcggtgctggagctgaggtctaaggtttcgaacatgcggtagaagcaccatataagcctttccataatggaattccaaactagaagatggaatatttacagttagttagaagaataatccattttctgatgccaaatattccttactagaaaattgaatatttacaccgtctgccgcccgcctacctatcttgccctgtcgggtccgaaagcttcgctctcctcctgtccgtgtccccttagtcttccgccattcccgctatcgcggagcgcgcgggggtcatgcttgttgcctcatctgcttcagaggcatcaaaggtgcgttgctactcctggcaacttttggtttctcattttctccatggtttcttcctagagctttttccccaaccactgatggagcagcaggtgattcagatttatcgacagccgttggaagagccggacatgttttgggcgccgattgagctcagcatcgcgagtgacagccaccacggactacaggtacgtaacgaggatcgcctcctcgattacacttatccattggtcttcagttgaatctgggcaaaaatgatgtatcgtgagcgatgcctactgacgacacaccgatatgaaaagttgtatcatgactgataggatttgtttgccctgtccacaatatgtatcgtgagcgatgcctactgttctccgtgtgaatggctgtatcatgactgattgggttcgtcggccctgtccacaagttgtatcgtgaacgatgcctattgttgttggccttgtccacaaaatgtattgtgagtgatgcctcggacatcatcaccaccctaagccacaagacaccgaccctaaaaaaggtatggggtcttagacatcatgagtcatgatacaaccattcacattggtgtgtcgtccctgctgaggcatcgcttacgatacatcatttgaacagggccatgaaatcctatcagtcatgatacaacta

SEQ ID NO: 4477 - DNA, 640 bp, Zea Mays
aacatggttttttgtgagcatcctcaaagagtacaactcaccaatatatcgcgcgcagaatggatggaccaaagaggcatggaatagtatgacacaacatattaatgaaaggtttacatcagcaaacattgtagtgtcgcagttgaaggatagagagcaaaggctaaaaatggactacaaggttgtgaagatcattgtgtaaaatagtggctttggttgggataatgatctgaaaatggctaccactgtgggtggggtatgggctgatctatcaaagaatttacagagatgggatggtaggtcattccctttctatgatgatctgcatgagatttacaatggtatgagtcttcacttatgtcttttgccttaacacagattctactcattgttgaatttttttgtgtttatacaagtaaaatagtagaaaggaaagaactgtaggcgatctttagaaaaagaatgcaaggttgccaacaaaactggacaagaagattatgtgcagataagtacacctagtccaactattaatggtatgcatagttcatttttgacttattagaagatggtgctgatttgagcaatgaaaatgggttcaatattgacataaacactggtcaatatagagctttggaggaag

SEQ ID NO: 4478 - DNA, 475 bp, Zea Mays
caatttatagactccatcggcagtggcgtccaatttgaagaaagcgcgctggcgaccggagggagggaaagttactgacgcgagtgttatcgtggctttcaccgtggcaaagcttccggcgatggacggactcactactatgattcactgcgatgtgttaaagctcctaggcacgtggcgcaaagacggcaagcggccaacgccggtgaggatcatctcggccggccacagacaaagtgggtacggtgaactatccagtgacctggtccgagcttatctgggaaccaagatcttttactcccctcgattatccactttgcgccgagcacgaatcgcgacaccggcgaggatcgcggcgaagttcaccgacggcgcgatacactacatctgaagatcttttcgtgcactgtaccatggccatcttcgtcagtcgttctgacagcacgatttgaggaacaattttctccaattttta

SEQ ID NO: 4479 - DNA, 638 bp, Zea Mays
gagaaataaaaaaatggaaaacggccgctcggccaattaacctgggcggacagcttcctgcagtcacgtttcctctcccttctttttgtctctcttgcttgtggaccccacacgtcaaggctatttttttctccatcgttgcttccagttccagaccacacgaacgcgccgccgctcgcatggactcgtcacgcaccacgctggctcatccctgcgtctcctcgactgctcgccttacgtggagcgccttcggctatcgtttctcctcttctctccccactcacgtcctcattcaagcgaccgttcctctgcagtaacaccgccaccgcgccattaatggccaatgaagctctaccggcgtccgttacaccttcccacacctctacaaaactcgaccgtgcccccatagagccagtccccatccgtcccaagcccactccgagctccccagccgcacctccatcgaactccctcctccgtggcttggtcctcgccgttcaccgctgaccggagccgctcccgatagctgttgtgttgtcgacaccagagccgctcgccgctggagccgttaaccgtcgaccggaactccgaagtcgacgctgcgtcccgacgaccttcccccgacacctgactacctg

SEQ ID NO: 4480 - DNA, 657 bp, Zea Mays
agcctagcgcccagattagatttattacccagcgaaccggtacacgattctgaccctaagatccaacatcaacggcgcagatcatatttgccccgaaatcaccctcatccgcacgatctgacctgaacggtcctgattcccttgcctccaatcgttacgccaggatccaattacagctgtcgatgaacaatcctatggtacacacgacttcttccctccccagcgctacggacaaaggcgccatgcccgcatggcggcggatcacaccggcaacatggtacgaccgcacccaccgagactatacctagatctgatagcgtctaatcgaagcggaggttaaagcggattcatggatgcactacataccgccactaatgccgatgaagtacccagtcacggaagaaggggatccgaggaggattctggtcgacggcgagaaattgacgttgctccacagcctcacgacccaattgcttggcacatacggcttccccaggcgaagacaatactccaaaagccaactccgagagcagagaccccccagcgacggctatccctggcggtggcgcgaatctctctctctctcaccagcgaggctctcagtaggcgatggcggctaggttttcggtgatttggaacatggcgagcacggccgag

SEQ ID NO: 4481 - DNA, 586 bp, Zea Mays
tgcaccaaaagtttgccctgccttttttaaacaagctttgaagtgtcaattcaaatgcccagtgccaccagcagaatctacactcaactcagttttacaatagtgacatatagcaatataactttttataccatcctcgataatctcccgcttatccatatgcttccagcattctgccctacaaacagatggattagcaccctttactggcacatcaacaccaatatcccccatctgctggtaaggaactagaaccagactcagcccctctactaccatctactggtactggtaaggaaaaggaactagaaccagatacaggctcagtgccaccaccatctgctggtactcgtaaggagggactacaaacaggtcgagacccagggacttcaatggtaggggagaattcgctagaaataggattgctggaatcatctttcctactactacaaaaagcttttctacctgctaccctcttcctccccattgtagagcaaatgaatacagatctagcaagtgagcagcaaggaaactacggtactctagtgtataaataaagcacgagctcgagcacttactgggaaac

SEQ ID NO: 4482 - DNA, 462 bp, Zea Mays
ggtctattgatacgtacccgcatgaccttcacctttctcgtcgacatcgactactgtctatggactccacaactacgcaccacaagccaagagacatattgcaccaacacacttacacctcaattagtccacccgactcaacctaaaatgctacacttattgacaaccactcatcataatctaaaccacaatgacacataccactcatcataatctaaaccacaatgacacatatcaacctttgttcgcatactcttggacatagtaagcattaaacagttcactatgaaaacgcatgaaacatgctacccttaaatctctaatcggctgattggttccttgcacccgtgcagccacgctcgtgcgaagccggctgaccggatacggtcgtttcgaccgtacgagcggatgcagtcaattagtgtccaaatgacttattttgtatctactcgtgcagcacac

SEQ ID NO: 4483 - DNA, 778 bp, Zea Mays
ggatgttattcttgttgaagtacaagacaacaatagggttgtcataggccgtgcaaaaattcaagtttcatcattgactgatactcaagtatgtctaaacaaattcatgagtttagtgcaaatgtttcatgataattctgtagtcactgaaggagtttgtatttggacaaatttgaaaagcagcaggatgaaatcatcaggtggtggcctctatatcttgatgatcaagattgtgtcggaaaagttcagcttggtatgaatttatccatgtcttccaataactatgggtccgaaaaggttagttattctcatcttttctttctccaaatccatcaaacattgtgttaaccttgtctcatctatattcttataagaaaacatattgtattatcgttacagatgctgcaaggtggccctgcagtggataccatcatatatgacatggttctggaagcggcaatgagggctcaaaatttcaacagcaaaatgcttcatatcaatggtccatggatttggctgttggacgagttttctgattactatggaatatctgatgcatatagaaaattgaggtgaacaattgttttgcttgtgtatagtcaatgatgattggtgaatataattatacatgatagaatcacatcatatgttactttttacaggtacttgtcttacatcatgaacgtggcaataccaaccaaggattgtttggaacttatatatgaacttatcgttccagtcacaaaagcacgagaagatagaactttaacaagacaag

SEQ ID NO: 4484 - DNA, 495 bp, Zea Mays
ccgccgcggtgtttcgtgctcgacgcagttggataacggcaagggggtaagaaatatcaccccgtggatgaacttgagccactattcactccggccaccgtgtccgcttagctcacgaccgcttcagaaccgtcctcgccagagttagccaccttgcgaccttgcgccacgtgccctggcatcttaccacatcgcagtagctcgcgttaggcatatccggtgatcgccggtgagcttgccacggtaattgccaccaatcgcttgcgctagtgcatctccttctctccgaccgctaccgcgcgagctccaattcactggccaccgctcaagggccctataaattgagcacaccctaggctccgttaggtattcaagcatctaatccacctgctcgtgcctccaattactcaccagagcccccgaattgcttagttcccccaaatcagttttccgccaccgtgaacaagctctcactgtggtcagtgcacttcaggt

SEQ ID NO: 4485 - DNA, 847 bp, Zea Mays
gagaatgcttaaacgagggagagggagggttggactgaccggagtacggctggccgggtgaggttgggcttcgggtggcggagaacagatttggggcgaacgtgaaattggagagctgtagagagtaatcggagctgcgtgtgggttctctggacgcacaattacgtagcggcactggccgaggctccaatttatagatcccagaggtggcggacgtgaattttgagcaagacgcgcggaggccggaggtggaagaaagcaccggtgcatgtaaatctgtggctaacggcgtggcaatctccccggtgacgatgggacagccttaaggtgtcacggcggtgcggtggaaaggctaagccacacggtgcatggccgggaggcggtggctcaccggcgaggtaatctgcccagcctcaaagtggataagaaagccacggtgagtcaccggagtgacctccagctcaccgtcggcgaggattcttaccccgcaacgttatcaatccaccccgcacacgaatcttaaggccggcgatgcgaatcacggcggaggggtcaccggcggtgggattcttttgttgcgctcggtctgatctattggggatactgtaccatcagaagttcggttgaatgcgcctgacagccacagtttagggccaaattgctcctaaattccaatggcaacacacctaagtttttgcagcaaagttgttcttgtatggtagctctacaactttgttatagcaatccaaggtagattcccactggatcttagtctaaacggctcttaatgttggatcaaggtcactgtcctactgaagttcagtctacattagcctgacagtccaac

SEQ ID NO: 4486 - DNA, 561 bp, Zea Mays
ctgctattgcccctgccctcggttttgctgctggaacccaaccgcatgaaacagcaagctttgaagccagaaaacaagagttcttcaatggaatctccaagcattcttctgggattcttcctgttccgcgagctgaactgcacattgatcctccaccttccccacctgctgctcccatgccaagaagaagtcgccatgttgcgggagttggagtggaatttaatattcatgacctgggaggaagaactaccaggaaagtcatgagatccttgcatattatttccgagaatgagggaattagtcaggaagccttggatgaatatactcagcttttcaagcgccccctgacccgtagtgaggtggaggctcttgctgccctgtttgggtggagagcccctgagttggttccccttcagtaagggtgttgttttctggttggtgctgtaaactgtgtgtttcttaatggatccatccaaaattcttatttggaatgtgcgaggtctcaattctcgtgctcgccaagattcagttagagaattagctctgtccgttaaggctgag

SEQ ID NO: 4487 - DNA, 1046 bp, Zea Mays
agggtcacggctctattcccatgtctcaataacacttgcaaatacacccccgcgcttctattcctttacaacccgaagtccacgacgttgcacggcggagaaccgagctccggcgagctcataccgaccggatcactcaactaccggtgctctaattcggctgagacctaatttaacccttaacaagtgtttccccaagcttaattgctggattggagctctacatcagcctgtccacggtgacagcgggaacaacgaacagcacaacgtgttcccggcgatctaaggggtcctagcttaatcaactgggtcggggagcatcagggacacacaaggatactgaaatgaaagagcaaggggcatgagcggacctggagcacgctgaccacggcgagggcttgttcacggtggcggaaaccgatttgggggagcattgaaattggcgcgctctaggggatgatttgaggcacgagttgctagatgaggtgcttgactacttagcggagccgagggtatgcgcaatttagagtgtgcttgagcggtggccggtgaattggacggagacgcgcgatggccggagaggaggggcactggcgcacacgattagtggctttcacagtggcagactcaccggtgatcaccggatatgcttaacgtgacctaatgcgatgtggtaagatgcccgggcacttggcgcatggtcagtaagcggtcagcgccgatgaggaccaattcggccgaccacaatccaagtgggtgcggcaaactccccgtcgatcgggtccgagtttatctggcaccaagatctttacgcggtcgtgattatctccagtccagagggtacgaatcatagtggcgacgaggggtgatgtatctgaagatcttcttcaactactgtaccatgggaaccttattcagagtgcctgaccgagcatatttgggaatgatttgctctagaatttatgtagcaacttgatccatcctctataacaaagttttagccctataatacagctacaatcttgctatggtaaccatgctcaaac

SEQ ID NO: 4488 - DNA, 446 bp, Zea Mays
taaatcctacaggtcctgttgcgtaagtcaaaggatgaaggataccagttaatgggtccgatgagtgcactactgaaactccctagctaaggttgtgtgcaggtccaggtcccagtcgaaataatctcctgagggccaggtcaccaactctttcttcaatatactggcatccaggctcgacaagtcgagaccacatcccagaggggccaagtaccagggaagaagttgacaacaacacacatagcaaagggaaagtagcatacagataagttgtaatgttgcttgacaagtagtacttaaaagtatcttacaaaaccaaaatatgataagccgcttcccagcggaactcttgctttctctccgtagatccgactactcatcatcagatggatcctgctggaagcgcttggccaccacgtctacaacgtcttgtacgctcccctagg

SEQ ID NO: 4489 - DNA, 1099 bp, Zea Mays
ggggtggtgccaaagagggtgaaaacagagtgggatgggatactaccttggagggaagacagttgaggaggtaggtggccgtgttaaggtcctccacccaatagcgggtgggaagagaagcctaaaagaggaggcaacacaacatgttggtggtggtgcgaatcatacgctcggcctagccattctaaggtgaggtgtgagggcacgacatccacacttgcatgcgatgagagagaaaaaggtgcaagatgtggagttatcaaactcacgtccattatcacactaaacaacaagaatggtgtagccaaactgagtcaacattcataagcagaagtgagatagactaggaaaggtgtgggaattttagagaaggcgaaaggtccacaatagtgagagaagtcatctaggatgaccagatagtaccagcaaccggagatgctgggaataggggatgtccaaagatcacagtggatgaggtcaaatggacgagtagtgcgggacaaggaagaagaaaagggtatgtgaatgtgatgcccaagctaacaagcatggcaaagtgaggtagcgttgccgcgagaataaggaattgccggggtggcggagagcctagagaggacgtcgtggatggggtggccgaaacgacagtgctaggtggaggcagaggcggtggaggtgaggatgtaggatgtaacaacatgggcaaaggtggggtgggaagcgaatggaatataagggggcaaagttgttgcagcgagcaaccacaacacgagtagtaagatcccatatggtgaacccctagggatcaaactctataaaatagtggttgtcgtgggcggagtgctggcaataattatcagttatggctcactagaggcgtaggagtaggagctacacacaaggggtagagagctagtcactgacacggacgcagtgaagacacggtcgagcaatgtggggtcgacgttggctagagtaggggcggaggggctgcccacaactagtggggacgcttcggggcctcatggggtcgatggcggaaagagagacctgccggcattgggggtcaaggcggtcgtgccatggatgcagggaggtgaat

SEQ ID NO: 4490 - DNA, 367 bp, Zea Mays
cagtgctgtggagatttccgtatatcttttcttatgttgaaagactgcagagtcagatctgatatgtgtgtgctttctatagatgtctgaaaacatgcgcagatgtgcaaggcgtgctcagtaggagcagtaggcaccccaggaagatgcatctcagcagcagttgccaccgccacccccgatgaccattgagcagatgttcctgatgcagacccaagcagtccaagcaattggtcagaccctagcagcaatgtagcaggtgcagcagcagccacccccaccttagcctccagtgcaagtccagatgccacaagtgcccagagacaagcaggcagaattcatgaggggccatccccctgtctttgcc

SEQ ID NO: 4491 - DNA, 543 bp, Zea Mays
cccttgttctccttcatgcatccccattccattggaaagcatatgttgatggtttcttgttagtaacagtcgtgggcatactttagatgaccctgaacccaagtagtgtgtccatggctccatgcagatgggcggcggtctcaccacaacggcagggataaggatggagatagtaactcatgatctatttcttgcttaaccgaaaagagatataatcccatccttttataaatagggtcactaggctcataaaataaaccaatctctagaatcaatgaatcaactcaatctaatcttatctctaaatgaattaatttaagcctagtgcgcctggggctggccctagcatggcctggagctgctccatttcatggggccctaatggggcacatgacagtcatatgatgctcgagaagcaagaattgttcattgatgcttatctcttgctcttggttttggtgaaggcaccagattctactggaaaaatgtaaccaagaaatatggaaaggcatgaacggttgagacaagcaaggatccatggat

SEQ ID NO: 4492 - DNA, 478 bp, Zea Mays
gacaccacctccactccagcctctggggccatctaccacaacaccatggtccccgttcgccggaggttgggacaccaacaccctcgctgtcgcctacagcaccatggcgctggctccaccatcctctgactgggtcatcgactccggtgcatcctatcacaccactcccactacaggcatgctatctcactcccacccaccccttccacacaccccacctcgatcgtcgtaggcaacgggtccactcttcccgtcacctctgtaggtacctcggttctccctggaccgttctacctcaacgatgttctcgtagcccctcacatcactcacaatctcctttctgtccgtcggttcaccaccgacaattcttgttccattgagtttgaccctactggtttttctgtgaaggatctggccaccaggaccccactcgcccgatgtgacagcgtcgggcccctctacacactccggtcgtcgt

SEQ ID NO: 4493 - DNA, 434 bp, Zea Mays
tgtacgtcgtgtcgtgcagctatagacgataagtatggctaagtgaccacaaaactctctgagcagcgttactgaccgaagcagcgtaggtggacaacggcgtcaaagactcgtgggatgagagagtcctgaacctctatctccttcacccatcactctgatatgtagacggttgatataataacaagcctaagggggcttagaaacccaccgtgtgtcataaagagaacggacataggttcccagctcgtgaagcacattctgtagtaagtttgggaagtggcccgtctcaaacattgaagtgtagtgctctgcgataggccacatcccaacaaaaccatcctcctggtcaggctcattgttgttgttattgttgttgttgttggcatcatcattgttgttgtcctagttatcctcttcatcatcatcattgc

SEQ ID NO: 4494 - DNA, 417 bp, Zea Mays
atatgctcctggattaaatctcttgtaccaataaaaaagcagacagtaccgaaagccttttggcatgcttcggcggcttcgtcaatctcaatcttcggccttcggaggccgaagcgggaccaaatggggcgcataataacctccttaacatcctccctcgctaccaagtcgttcttcacataaaaccattcctccatccaatttcccggccatctcttcctaaatgttggtactgggtaacttgagttgggacgggataaatccataacaaccgaagttgttgtggtactgttctttacccatggcttttgtctcatataaaagttcgtgcatactgcagaagcactttgcgctcggttctagcccctgactccttactgcccagacaaaaatccccatccttaatatagcttcggg

SEQ ID NO: 4495 - DNA, 725 bp, Zea Mays
cgtggagcttatactagtttgggcagaacatccctacatccagtcttcggtggctcgcgctactcgcaccgtttttgctcaatgctcatagtaggggttacaagcgggcaagagagggaagaatatcccccatgtctcttatgcgtagctatacctaagaactaccggaatagagatttcaactaaaccttgggcatcgcagtggttcactctggcctccgtggtcctccgggtgttgtggttcgtctgtgtttcatgtgtgtcttgcgtgtatgtgtgcttctcttccttgtgtccatatccgacccttcccttttatagaccaaggtggggtcggttatcggctccttctcttagaaggagctataaagtcgtggtaaaatgagtcattccaccttggtaaatcatgcttgtcatcttgcgccctggtcgtctaggcttccctagctgtgtccttaatggcgggtggtacgggcggtgtggagccctagtaccatcattacctcctttgtgtcgtgctgacccttggcctccgtagcctgggtcttggcgtggctcatcgtgttgcgggtcctgtagatggcctgtgctaagcctaggcttaataggtcatgagtgcgccataggccgaggggctcataagtcatgagtgagtcataggtcaaggggctcgcaagtcatgagtgggaggtgtactgactctcctactgtggcttgtcgctagg

SEQ ID NO: 4496 - DNA, 382 bp, Zea Mays
taacagccgtgaatttgataattctcaggcccgcacattttttctttctcacggtattgcactgcgcatgtcgtgcccatatacttctcaacaaaatggaaaagcagaacgttcccttcgcaccataaacaacattctgcgctccctattatttcaggcgagtctccctccggcctactgggttgaagcgcttcacaccgcaacatatcttgtgaaccgactccccactaaaaccctcgccttctccacaccatacacctctctctactccacccaaccttcctatgatcatcttcgagtttttgggtgtgcttgttatcccaacatgtcagccacagcacctcacaaactctctcccttgtgacaccccaggtgtctattt

SEQ ID NO: 4497 - DNA, 459 bp, Zea Mays
tggattctggtagctctaagcgatatgctacgggtcccactcggttaatgacagggtaggggccgacaaaacgcggtgctagctttcctttcatttggaaccttttgacaccacgcatcagggagaccttgagatacacgaaatctccttcctcaaatctgagttctctccgtctgatgtctgcgtaacttttctgtcgactctgagcctcaagtaacctcttgcggatcagggcaactttctcttcggcttctttaacaaagtcgggtccttctagagtcctttcccctacattagaccacattaggggggtctggcattttcttccatacaatgcttcgaacggtgacattttgatgctggcctgatggctgttgttgtatgagaattcggcgtacggcaaactggactcccaatccctgacgaacgttaacacacaggctcttagtaaatcttcga

SEQ ID NO: 4498 - DNA, 429 bp, Zea Mays
gtccttcagaggttggatgttcttgaagacaaagtcagaaaccacggcttcagcagttaggcctctgtccttcagcgagcaaatctcagcaagcagcaccttggcttcggctacctctgaataagtgggggactctacctagctcggcgtgcgaatgtcgggctgcctccctgatcgagggggagcgacttgttgtgattctccatggtgaaccactcaaagcgccatcccttgatgttgtccttgagggggatatcaaggtattctactttcctcccccgacgaagctccaaactggcaccaccaacaagctgatgttgtcctccggccatatcgggccgacagttttaaagataccgccagagtccaaagtggggaaggattccaagaaaggcctcgcataggtgtacgaaaatggcaacttggaga

SEQ ID NO: 4499 - DNA, 631 bp, Zea Mays
ctggaatggattaatttggagttagaatgaattaaatatgaattaaataagttcttagtattatttttatacataataatcaattttcggattaaatctagatttataccagattagtggaccgcggccataaatttagaagagtgcagggtgtaaactgtaaattccagggaccccagtacaagagctttcccacggctaggatggcgggttgatttgagcaaaggccaggggttcttttacaattaggctacaacgaaggggtatcgttgatctctgaccgcacgattttaaatcgacggtcccgattaaaagaaccattcaccgaaccggtacactacaggggcccttagatgccgatccaacgtttcctattttaaataccaatgctccagccacagccgttggatagcagatcgatggtcaagcccgagctagtatgggatgatcacatcacacacgttgatgggttgatcaacggcttggatcgacacgaggcgaaacggtatcgttggacctaatcgggactgtccgtcaacgatccgacggccaggggccatcacctacctccgaccacgcctgcgttcagccccggcggcgcccctcgccggagttcgcgcaatccagccaa

SEQ ID NO: 4500 - DNA, 594 bp, Zea Mays
ttcggatacggaaacgggtattttatttggcgggacggatacgggtactacccgaatattggctctcggatacgggtaggatacggaatcactattacccggtcagtacccgaaaatcccgggtaggatacgggtattattcgggcgggtacccggtttctggatttagcttgggcctacttcctgttggctgttgggctgcttgatcggccggcccatcaagcatcaggtgtttagagtttagccaggcatccaatccagccgccgagcgccacacgcacacccagccctccaggccaggagtcacccagtcgaccgccggtccgccgtgacgccattccctgctcccggccgccggcgcccgccacgaacgtcgtcccgtctcctgtgctcccggccgccgcctcccgccacgaactcccgcccgccgctctggtggacgcactctcgcccgccacggtcaccggctcaccgctgcgctagcacttggcgcgtggacgaggacgagagcagtcgagcactcgagctcgagcagcttctggaagggaaggccgtcgacaccaccgcccccacggccccacctcactgcctcgc

SEQ ID NO: 4501 - DNA, 305 bp, Zea Mays
atccagtttgtcccgtgcctcgccaaccccgccattatccgttgtgccgtcgttcccaaacccctccgacaccatgagggacaacaatgctgccctgcaagcaaccctggacaccctagtcgcgtccatcaagtccctgcagacgtccatggaggccaatgcccatgctatcaagcgtctagaaaccgcgtgcacgccgtcagcgtcctcgtcgacctcctcccacacggggaccggggaacatcatcaagatcaaccgccgcgttttcagaaactcgactttccacgctacggtggcaagtcgg

SEQ ID NO: 4502 - DNA, 727 bp, Zea Mays
ctcaagtgggctaccctttgcatcgaaaaagggattgaaagtttgcgacaaaccggtggctgaagtcttcctagtcatcgatgtagtggtgagggagatatcagatccattgtagcgtgtcttgcccaagaacaatgagcaagtacgctatcatgacgtcctctgttgccccggcgacccaggtggtagtcatgtagacgaccaaccagctgtctaggtcctgcttgggctcgtacttgtcgacgttggagaccttgaagttcggcgaccattgatattgctcttcctatcacctcatctcttccacatgtcggtgatcgcgcaaagcgttgatattgctccgtgcatctcaccgactgttgatggcgtggcttagatcattcggtggatgggccaggggaagaatatggttcgtcgcctaggtgaggatctgccggtaaccttccacgtccggggtgtgcgacaagccgttggtgatttgagctaggactcccccgacttcactcggcgtgttcaatgcccgagcgaagttagaaaacatgttccgagggagaagcgggttctcgcgttagagcctggtgtcctgctcagcttgttctcgttcgtgctcctaggcgtggtgacgatcacgacgttgggagttacaacgttcacggaatggtatatcgtcatgggtttcccctacttcagaggcatcatcccaggagacggattgtgtaggatcctg

SEQ ID NO: 4503 - DNA, 661 bp, Zea Mays
actgattgactgtctcactctgaccatcagactgagggtgataaactgtggtgagagccagtttagtgttgagtgaggaaaatagagccttccaaaaacagctagtgaaaactttgtctctgtcagaaaccagtgatctgggtgtgccatgcagtttaaccacattatccaaaaacacttgggccacctttgctgcagaggaaggatgtttgaggggaggggggggggaatgagcatatttagaaaatctgtccaccaccactagaatagtgtcaaacccttctgatttgggcagtccttcaataaaacccattgtgagatcttgccaggcaccttgaggtataggtaaaggctgaataatacctggtggatgaaccctctccactttagcttgctgacatactgcacactgtttaataaagcacaccacatcagccttcaaacccttccaccagaatagccttctcactctgtggtatgtggcctggcctcctgaatgacccccacaacactgttatgtagggcatctataatttttgttctcagattagagttgcttgccacccaaacctgatcacccttcctgatcactctctgctgcaaggagaaacccttttcatctggactatgcactgctaactgagccaatagcacttgtgct

SEQ ID NO: 4504 - DNA, 599 bp, Zea Mays
aaaaaaagtccgccagaaatgaccacaaatggccatcagtgccgacggacgacgaagaatctgctaggaggagggctaggcaaaaggctgcccgccggcgtagctatgaatgaatattcccgaaacgtcagctcagtcacacaggccggtatcgcgatccgtgatgagccgaccaaatctctcatcctcctcttcgcgccacaggccacagccagtggatggcaaggttcaagtcaaccgaaagcttctcaagtgcgtgagctgaaacatgcctagtactgagaatactctgctagtggcggtctggcactggcagtgaagtgagatgcgtgagaaatgaccgtgaaaagatggcgtgctcgggtaacagaaagtctgaattactgttaacacgttaggtacccgatctatcatcataccagtagatcctaatcgagtggactggtacttgtttcgttatctttaccatcggaatgtctgagacgacccacacatgccgacctgccgttccaagcttgcaaacgcgaaattctttacatgacacggcgaccagagtcaccaaacccacccaatcgggaggaataaaacacgagcacaaa

SEQ ID NO: 4505 - DNA, 490 bp, Zea Mays
gtttgttttagtttttgtgtaaccgtatattcacaactgttctcgtttccactgtcctgttttcagtaaaaaaaaataataacagaaatggaagaaagttttttcggacggttttcgtccgttttcatctcttcggaacagtggatccctcccctcgttcaccccacacgtgtctggctccagagccgtggttacgaaacgctccactccgctccgctttcccagttccggccaccgagcatggcaccaccccttccctccgtctcccgtggttcgcgggcgctcgtccaagcatccaaccccagctccgtgcgtcgcggcgcgaccaccggacctataagtacggaacgctcatgtccgcctcttgctttcctacctctccgcccccgttgcctcccaccgccgagacgacgcggacttcgtaccctctcaccgacgtgtgcgccgctgtcttccccggcactcactgctgctggttcggctcccgaac

SEQ ID NO: 4506 - DNA, 375 bp, Zea Mays
gatatatataaatgcccgaggatgggcacgggcacgggaagcccacctgctcgccaccatcccatgttattgtcatcgtcgccgccaagcgccactagcgacatcgcatcctacgctacccccatcgccatgtgttgtcgccactatcgaccaagcccacgtgttgagccctcacgcctcttgctctcctcacctcctcacccaccgccctacatcaccctacactatcacggtaccccgttagtcctcgtagatgtgtagctgcatgccctcgtcgctcatccactagtgctgggtgcccatgccccccaccgccctatcccgcaccaccgcacccaccctcgatcgcgcccgcccaaggctgcaccactgcat

SEQ ID NO: 4507 - DNA, 496 bp, Zea Mays
gttgaaatgatcttcgttagaacgcgacctaaaaagataataataatagtaataaaataacaaaaatatttgttaccttgaagttagcataaagcaagcttccggcgatatggtgtcgttgataacggcacaggtccgcttctagcttcggcaagccaatgcttttggagagggttttaacaattttggcctcggtgcggttccgaaggcatcttaatttcccttcgttgaccccaccaaatagcatagcccctgatttatatccgcaagatatggcatattttttcaactcttctttttcggcgtctgttaactcttgtccaagcaaatcttgaaagtaaaaatctccttcttctgaaatttcatcaatttgctttttccccttttcagttgccgtgttcaccgcagccacagtagcttcttcttcagccattttcaggagtatattgtcaataacctcaagtgtggtttccaggttcgactcttcggcttcggc

SEQ ID NO: 4508 - DNA, 1120 bp, Zea Mays
tgtggttactatagcaagatcaaagttgaattatagatcaacaactttgttataggaggataaacaagttagcacataaaaatttgagatctgggccctgaaacttgctctatcagacgctctgatggtgatcaccatggtacaatgactgaataagatcacaggttcagcccccctcaccgtcggtgatctcgcgctcggattcacgccggcgtcgcgattcacgcccggtcaaacgcggataacgatcctcggtgaaaaatcgggcgctgaggatgagcttgagacactgttccgccctggccgtcgtacccacttgcctcacggccggtccagataacctcgccggagttggccgcctgccgctcgggtggcacgtgcctaaacgcagtacttcgtcgcagtgactcaccctagcatgtccggtcatcgccggtggtcttgccatggtgaagtgccatggtaaccctgcgtcagtgaccaccccattcttcggccgccacacatcttctccaaaattagccgccaccaccgatggaacctataaattgccgccccagtgagctccgctaagtagttgtgcacccggtgaaccagccctcacctccaatcgtcccccatagctccccaatttgggatttcccccaaatctgtcaagaacaccgcagtgtgtgagctcgtcgtggccagctctccacatgtctgatcacgccctcctcgctcttgtttcagctctcttgtgtgctcttgatgcttctcgacccggccaattgagctaaaacacataggatcaccgggaacgcctcggttcatccgtagttcacgctatcaccgtggatagacagattaggagctaaagctttgcaattaattgagggattataatcattaagggtagacttaggtgtcagccgcaccggagcaccggtcattgcgttttccggccggtataggctcgccgagtcgctgctccgccgtccatggccagggacctcaattcatgaaggaacagaaaagggagggaccttgatgcaaatgtcagtgacacaacggaatagtgcgcatgactccttattagttatttaattcgtgaaggaaccaacctcgcggccacgcgcgg

SEQ ID NO: 4509 - DNA, 563 bp, Zea Mays
tacatggttcgcatttggtttgccttctaaagtcagtcggagcgaactatccaaaccttggaagatatgttgcgtgcttgtgttctgtcttagaagggtagctgggaggatcatctcgcattggccgagttcgcttataacaacaactactaggctagcatcaagatggcaccatttgaggccttatatggcaggcggtgtatctcccctctgtgctgggagactttgggagagagatctttggttggtcctgattgggttcagcagacatctgagaaggttcgggaaattcatcagaatattttggccactcagagtcgtcagaagagttatgctgatgtgaggaggtgggacttggaatttgcagtgggtgaccaagtccttcttagggtatcacctactaaaggagttgttcggttcggtgtctccggaaagcttagcccgagatacattggaccgttcactgtcttggcctgggtcggtagcttggcttatcgtttgcaattgtcggattccatggcaggagtacacccggtatttcatgtctctatgttgaggaagtt

SEQ ID NO: 4510 - DNA, 464 bp, Zea Mays
agcccattttctattctaccgcgtagcccaactagagtgtggcgccgacaaccgggcccctctcgtcagtccctcatgcacgcgctcctgtgagtctggcgctgaccgtaagaccccacgcgtcatactctaagccatcgcgcgtgcacgccttgcgtttggatgaccggagccccccctctattgttcatctcccccactaacataacaacaacgccaccacgacagacccgcctggttctcgcaaccgccctgccagctgagtcggacctcccgtgcggagtatatacatgtcatcctgcccttgaccttggtgcaaagcgaaatcaccgaaccacataaccgccacgtgggagaaaaaaagccaaaaaatcgccgccaccatcaacacccatgtactccattgcccaagctctgtctaaggttcactgggggttcgcgggcactctcaaatcgttcgcacg

SEQ ID NO: 4511 - DNA, 427 bp, Zea Mays
ggacgctactccaaacttcccctacatactctagacttgtattagagagacaaccagcattagatccagtgccctttctttctacatacatggagagcacaccatcactcaacctcaactcgtgttggggattagccagatggataagctcatacggagctgctgaaaccaaaggcatggaagacactcgacaacctaccggaaaatggccgaacagagagtgaccggcacacatattcgaccagcgcgcaaacacgccctgccctgcacacatacagatttgaccatatccacctcaacgacagcagacagcacccacatgccagtgggccatgcgggcctgcacgttgagactcatgcgcacgcaacatggcgtgtccatgggcctccctcccgtcgtccgtgcacgtaatccagagcagctcgc

SEQ ID NO: 4512 - DNA, 659 bp, Zea Mays
cggaggtggaggtggaaccccaaagtcatcatcatcatcgtcagggactgcggtgccctgagtctcgaaatggtgaaaggtggtatcctcggcctgagtatcaatcactggagtaggtgccggcacaggatcctctggagctggatggtaggacccaaagaggaggcgagaggcctcaagagtaccctagaactgtggtggccgaatcagctgagcgaagatgtggcaaagatagtgagcatatggtagctgtcgacgagcatgtagaccatccagtacggtgtcctcgatctcacaaatgaggaaatccacaacatcaaactctgagtgagagactagggcaccaagtagccaaagctggatatgagctgatagagaaacttggccgctgtggtgaagtctgccggagaacgtcgcgacccatctgagaagggcggtcggaacagagccgcgacatgagctataccaggagcaactctgccgtgagggcaacgaggaggatcagaggtgccatagcacatgctgtgaagacgagttgatgactcattgaatacaaacaactgacgaatctgactggcatgaatggtaacatcctctcgctcaaatcggaatctcatccagtggtgatcagggtcgatccatacagtagcatagaaaac

SEQ ID NO: 4513 - DNA, 582 bp, Zea Mays
ctcttggcgacctcattgtcaggtgtgggagtccagacatcaaccaacctcaaggaaggagggggctcaaaaaggtctaactccccacccagcgcgcgtcccgcaacgtgagagggtccggcttccgcctcagcagggtgtgcaggcacactagggtgtaattgtgagtatagtacatggacttcctcatgcaacgtattgcagtagacctgcaggttgtcgacagttgagctaagttctttaattcgggcctgagcccttgcttccttagcacatgccagcaaacgggactgtactgcccagtcaagtgctaagtcccgatcagcaagctgatcctgcaggtgacggatgtcccttcttagttcatttattctatctccgtcggtgacccaagcatcggtcctgtgttgctgcgccgcttgaagtcgactcactcgagcttcaagatctcctatggggtcattactcccactgctactgctttcatgtcgaggggccagttgatgccggggcactccaattggtccagttgacttgcgtgccgttagccttgtgcgtggcggcatctttctaaggggaaaa

SEQ ID NO: 4514 - DNA, 664 bp, Zea Mays
gtgattttggtggtggatgtttggttgatgctgggcggggccatggttgtatggttgtgggtgccgagatcttcctagtgcgggtggagggcgtaggtggcgaagggtggtggggaaacatagtgtgggtgagttttcgtggagtggcaggcgccgtcgtatggggatggagcgtggtcgtctccgtgtaaaccgggttgataaacgagaattgttgtccttgccggatggggcgagcataggcgagggggatcttcggaagctttttgagggtgaggaattgaggataatgttgtttaatcacagggagatgggtatcattccgaaggttgagccgatgtaataggcgatgccctcactgtgtgtatgtaataggcgatgccctcgccgtgtgtatgtaattgtaatttgtatggtgatgtggcttgttggccgtattcgtatgcttgtattggtccagctacgtacgtgggtgactttgtgcggagtgtccttgtaatgagagacttcgattaacgttattccggctgtgcccttaagcaactattgcgctgtcttttgaataaaaagacttcgattaacgctcttgttgtgctgttctggctgcacccttagtcgacttttgcgtggagtgtcttttaaataaaagactagcgcacttgtg

SEQ ID NO: 4515 - DNA, 465 bp, Zea Mays
gccaactagccatccgaatgatgcttgggctcgtacttgtcgacgttcgagaccttgaagttaggcggccattgaatcacttggagtcgggggaaaggaccgagacttcgcacgtcctctggccgcccgacattcttctcgagcgcggtcgcggtggcagtccctgtgaggcgattaatgtggtgcgtcgtgtagcctctgccgagtcgatcgacctagtgttgggctattcgtagaggctgttgccgactatgtcctggtagcatgactgtgtgctggtgcgccgtggtttcgatcgtactcttcctaccgcctcacctcactcttgtgccagtgatcacacgaagcattgatgttgctccgctcgtctcgccgactagtgatgacgtatcgcatgtctggtgtcagatgggcgtgggaagaagatggttcgccacctgggtgaggatctgtcggtagctttct

SEQ ID NO: 4516 - DNA, 669 bp, Zea Mays
caagaactaaaaatcggagctatggatccaaaggtgcccagattgctcctccaatttatacattctcaaatgataatcatttccagccttctgttcctagctatggtctggtgcggcctcatgcatctaaaactgcacatgtttcatcaggaggtcatgttagcgctaagacttttcagagtaacccatctcagttttgtgttcgtgcaccaatgggatctcatggacacaggtaccgaccaccatcatatcctcagcctcctcctaacacagttgttggcactggtgtgcccctctcacggtgcgcctcgctgaacgctgaggctcagggaacacaacgcccacaagttccgccggcaggtacaatatcgaaggaatcacttgcaaatttggcacgtcggctgggattaccttattacaatactaatcagccattaggtcagcagtcaacgagcacatctcaatttctgcatatgcatcctcacgagatgctacctgctcaaggtgctcaaaacacgacctggcaagcttacgttaagaaaagtgtggcaacaacttcacaaatcgtgccttctagtgaacataattcgtcaattcatgcacctgggagcactgttcttccatctggttcagttcagatccagcagcctttgcgccaattcaaatcgg

SEQ ID NO: 4517 - DNA, 399 bp, Zea Mays
ctacttccaaacatgcatatttattgcagctggtgtaatatagttctgaccagagcacatgtatgcccttatttcctaatggtagacttctaggtctatatttttatccctccaaatttgaaatattgtttgtattaaatgcaaggattttcttttgtcttacttttgtcagaccctaaaagttataagattacttgtgtgcacgcttgtggaaccagctatgaactcaacacatgttttggacttaccacacccctaaccaacttgtctcactttcaggtttgccttatggataaggattatattgttatgacatgagcctagaagtactcaccccgttgtccacgacatacaccgaccccgccgccaccatgccatcaccactctagcgccatacct

SEQ ID NO: 4518 - DNA, 403 bp, Zea Mays
cgtgaatggtgtagtagcgagggcagtccatgacatgtggcggcactgccaatcaacacaagcgccggcgacaaatccacccagattcagctgtcccttacacctaatcgtcccgtgacaacatctggtgcctaccggcgaactcccacgaccagacccggccgcacagcgatggggaattaaggtattcgcctacgtcggagattccgcttgcacccatcgaagcagcggtggcacgatgcccatgacggggatatgtggcggtcggccggttgataggaggggcgcgacaggggctggttttatacccgcgcaatgggaggtcgaatcgcaaccaacccaggcgagattcgcggtggatttggttgacgatgcacgcgggtcacacagtcatcttcgttgc

SEQ ID NO: 4519 - DNA, 439 bp, Zea Mays
caaaaccgctaataaactcaagtacctttccctgccaggaaatgaatatagaaaactaaaaaggacggagcaacacaatatcccactccatcgcaagtacaaacagaccaatttcccacaggaaaagcactttagaatattccccagtagttgaacttggtcatgtcagccttggaaacagcagttgtcctgtaaatgaggtcacgatcacaaagcaacagcatcatcggctcatcctatgtaatcccgaaagctaaacatctatcgtactgtggcatctttgttcagttaggtggcgaataggcgccccgtgcctacacgggcagggtcaggcacggcagtattttgatcgggccagacagggcacgccgacctcgccgtggcagactacgagctgctagctcggcttgtcggaggcacggcaggcaatacagtggcg

SEQ ID NO: 4520 - DNA, 476 bp, Zea Mays
cagccgtgccgccgctgctaaccttgccatctcccgccttagtgctcgcctccgtgccgacccctctctggtctctcctcgcgccgcgggctctctgccagcctgcctcgtcagatcgccgccgccgtgggacttcgatgccagcgttccgcaccacaccatgtccaacctcgtccccatcttcacttctggtgagacctcttccctgcggttagctttggcctgagatttgtgtagagtgttgcgaatcggggagtagtgcaccagtgcgatgaatcgccgcactccggcgatagctccgccgtcgttcactggtgcgcggccgtgttcaggctgagggatgaagaacagacgcggaaccgtggatccacggttggacggtccagattagttcgggcataccgtctagggcgttggacctatgaccgtagatctgatatcctatggctcaaagcagatcgcattttattaaattg

SEQ ID NO: 4521 - DNA, 700 bp, Zea Mays
aaagagcttacgcaagagaaggtatccctccaggagagtctcagcatagtggaaggcgaggaagccaacacccgtgaggcctatcggaccttgaagatagactttgacaagaagctaaaggcactcgcccccaaaaggaagatccagaagaagaccactaaccaaggatgccagacagagaagaagaagaagaaggcccctctagccctacctccccccagaatcgatgactggtccgacgaagaagatgtatccctagccagcctcgatgatcttctcaaggcatttggggacaccttagacaaggaactcgctagcacctcgaagaacgccctcgtgtagtcttcccctgtagtagtcttatgcttgtaatgtgatggtgtgatgaataaaataacttggttgagaacaatttgcatgtgcatgatagtgactctcttccctggcagatggcttcggataaaaccacgcctaccgcctcagggattggagcaggtttcccccgaagagctgaaggggaagtagtgagagaagaaagtgaaacccacctccccgcacctccacccctacccttagacctagcccaagttctagccaatcagacccgactcatcgaggtcctcactcgaaatctggaaaatcaatggccaaatggtggaagaccgcaagacagaatgggggacttcttaagactcaaacc

SEQ ID NO: 4522 - DNA, 1031 bp, Zea Mays
ctgcatttggagggagagagaaaatagtagcgctagccgctaccgtaggggatgagatagagttaaccgttgaaggctttagcgtgctcctgtagcccctaccgtaggggaggggggcttccggcgggatgcgttgaacacagtcttaaccctctcttcattgcttaccaagccctcctctccatttcgcattcgtattttttaagtgtataaaggaacttaatgtctcgtcaaaatagcgcaactctagttctatttctaaaatagtctaatatctatggcaacgctacgatctcggagagagaaggggtggggccatcgacgatggtggtggtgcgagtgagggggaggagagggtggaggcgggagtgagggatgagagaggaaagatgatttaaataacattgagcattggattcgagtgaacaatagatatgagggttatccaacaatctgaaccattagttttgagggtgtgttatatatgggtacaaatgaaagtcgtctacagggggtgaataagcgaaatctaaaatttaaagcttagtacaaatgacacggtgatttgtttatcagagttcggtttccaaatgaaacctatgtctctgttaaggtgtcccaaatgattggtctctttcaactctctcaagcgattctaaaggtcgaccttgagtcctctctttactcgaatgagagactagagtctctgtgagaatctccagacgagttgaagtctctcgctagctttacaactgaatggaagttaaaactccaagctcaagagcaaaagaatggagcaacacactctcctctattactcacacaagacgctatgactatattttgctcaaatcactagaatgtggcaattgggagactttggaacaatggaggtgttgctctattgtaaggacttaaatgctcagctcttgtgattcaatgggtcgattggatgttggatgtatttatagtctccaacaaccaaaatagtcgttggcattaaatgctaaaatctacaatttctgtgtgtg

SEQ ID NO: 4523 - DNA, 1129 bp, Zea Mays
ctttagcatctattcagcaaattctgatgtacaggcagctgattttggaaatggcaaaacttgcatttgggttgatgttctagatggtggaaggggtgtcctgatggagtttgctcctttctttgaagattcatcgatcaagaaggtgcaataattttcctatgacctatgtcgaacaatttaatgtctatttttctctttctatgttagttgaggtcgtactctacactgtttttcctcacttttctatttactgttacaaacttgaaacaaattggatgtacttcactattttatccttgtcggtttcatgagatcatcaacatgacaaaattgcaagctttgggttagcaaaaccatacctggttaataacaaatgcatcacatgtgaactacttttagctttgttttttttgaattttctgaagtcaacatccatgttctcttcatcatgtaggtttggcataactatagttttgatagccatgtcattgagaattatggaatcaaaattgctgggtttcatgctgatacaatgcatcttgcacgcctttgggattcatcaaggaaaattgatggtggatattcacttgaaggacttacaaatgaccgtagagtcatggatactgttccagaggatttacctaagcctggaaagacatcaatgaaaaccatctttggcaggaaaaatattagaaaagatggatctgaagggaaagttgtatctgttgagccagtcaagaagttacaaagggaagacagagagttatggatttgttattcttctctagattccatgagcacattgagactttatgacagcttaaaaagcaagcttacaacaaggagatggatcttggatggttgtcctaggggcaccatgtatgatttctatgaacagtactggcgtccttttggtgccctacttgtgaaaatggagacagagggaatgcttgttgaccgtggttacctttcagagatagaaaaggctgctattgctgaacggaaacttgctgcagataagtttcggaaatgggcatctaaatattgtcctgatgccaagtacatgaatgtgaatagcgatattcaaattcgccaacttctctttggtggcattgaaaataggtat

SEQ ID NO: 4524 - DNA, 488 bp, Zea Mays
tgatagacgacaaatttgtttgtgtggtgctaaagatacagtttgaggcgtcaggcgtcagcatcaacactgcaaggcagtgccccttttcatttctcaattagaaataaaaaaaatgcaattgcagatgctcccattgctaggcataataattttctaactaaaaacgaaatagcaaaaaccacactgttgagctgattaccttcgtccacatcacatcaaacaatctcgcgaatcaccgttcctggtgaggcgatcgtgatttatcgcgtcaccttcgataggcatctcgatcagatgcccccctaatatctcatatctctgacaggccaaggatctctcagctcatctggagattgcttttgccaccgtggccgcacctccaccgctagcaggatcggcgctcgccatcgaacatttgaactgtagcacacgacacgtgaaaagagcatgtagcaatgaatcaaaacagaaactgggtaaggaat

SEQ ID NO: 4525 - DNA, 373 bp, Zea Mays
ctcctagcacttagagaatattgttagtaccaaaaacaatttactaagactagaatcataccttgcttttcctttttgcttctctttaactcttagctcatgtttagacaaaacaatatgtgttgagcatctaatcaccaaaacataatagaaatggcccgcacatttccctttcaccctgtgaccattgttgccgctgtcattactcctgctccgtccaccgttgccgccgccgctgtcgccctcgttgccaccgtcatagccactcccatcctcgctactaccaccttcctcctccttggagtcgtcctccttggagttctccttcgaagagcccccctccaaaaagtcctcctcctctgagtcatccgac

SEQ ID NO: 4526 - DNA, 353 bp, Zea Mays
aaaaatttgagctcaaacggagcaccgagcgaaaagttatgctcgttttatggaaggtacctcaaaagttatggttttcaaaggcacaaatcggcaggaaccgaagcgacagttatggagcacagggcctgtttagagataggatttgttttctggatatggtcggtttagatataagatctgttttgtggatatggtcggttttagagatagaatctgttttgtggatagggtcggttgtagagataggatctgttttgtggataggatcggttgtagagatatgatctgttttgtggatagggtcggttgtagagataggatctgttttgtagatagggtcggttttgtag

SEQ ID NO: 4527 - DNA, 486 bp, Zea Mays
ccggaccctgccctggaaggggtccggggacgacatgtgtccagacctagcctggtgcgaacccgaccacgcaacgtccctattccctggtcaggcggaggcctggtgcagtcaagcggcctactatgcatgacgtaagcgtacgggacgggcctgacgtaaagccgctgggccacgctgcccttgcatttattgtggaaaggacgcgccgtctgactacctcgctgacaggagatgtgcccccttcagcattaaatgcgccctgtccacccaactgacagggcggcgcccaagccatcctacaggcggcatgtctggctattcccgttggccaacagtacacctacgtcgtggcatgcgccgcacccaccataacttgcgcgttaccgagggtgctacagcaagatatcaatactgaacgcactgcgatatcatgacgcacggagattacacaagctgggcaagcagtagctccatccttccatt

SEQ ID NO: 4528 - DNA, 479 bp, Zea Mays
gttgacaatgcaatcatcaaggttacactaattgttcgggttgcgatgagtgattgttcatgagtagtgtcttgggttgagtagtgtggcctaaccggggcatgagtgtgtatgtgcaaccatgttctcaacttatggtgcatagatgtgcattttggagatggaggtcaatagtgaaggtgaaggtcaaggtcatgcaggttcgtgctgatgaacgtagatcagtgaaggacgggcactgagtcttgcccaagctggagaagctaggtgactagctatagtggctgacacttggggacgctgacaagcgtgaggatgtggtggagcggatcgtgttgctgacgcggtcatggactgtgacaacctcctaagatattaggctcacctacacttgtcctcgtcccaagaaccttagacaaccatgcatatacacccaatagcttgacaggacctagttcttgtatcttcctcaacatctc

SEQ ID NO: 4529 - DNA, 947 bp, Zea Mays
ccgattgctccgttagtagggtatagtggtcaccctaagttaagtaagcgtgagcatgttgcaccgtcttaagtcactaccgacttaagccgattgctccgttagtagggtatagtggtcaccctaagtcaagtaagcatgcagattgaaaataaatagttcgaatgcccttgagaatgaagtctttttattgatgatgtattttccgattacagaatacaatgctgccccgatagcttttgaaatctagctagaggtaaaacttcctgagatgctctatattccatgaattccctatttccgtgccatccatttgagtaagccgatatgatcctggccgaatgacttccgctaccatgaatgacccttcccataatggcgacaatttgtgccatccttcccccgtcagaattcggcgaaggaccaagtctcccactgcgaaggatcgatgtcgtatggccttatcatgatagcgcctcagggtttgctggtatctagctgactgaattactgtattcaatcattcttcttccaatacatcaatatcttctagtctggtaggttttgcttcagctatgttttcgaagaccagccttggtgccccaaacctgaggtcggcaggtagtactgcctccgaaccatagaccatgaagaagggagtgttaccatgcaaagctcgactaggttgagttcttaggctccaaaccatatatggcaactctttgatccacttcccgctaacttttcattcttgtcgaagactttcttcctgagtgcttccaatatcattccattagccctttctacctgaccgttggctcttgggtgtgctactgacgcatatttgatctggatgcttctttgttcgcagaaatcaaagaattcagagctagtgaaattggatcccaagtcagttataatgctattcggtattccaaacctgaata

SEQ ID NO: 4530 - DNA, 463 bp, Zea Mays
ctcaccgccggcgacctccctgcgcgaagattcgcgtcgccgccgtccggattcgtgcacggtattggatggataacgccggggaaagggtaactcatacgtggcaccatctcctgagctcggccggagttattcaccggcggtcaccgtgactcagtgagctctcgccgcgctgtcgcacatgctttgattcgcctcactgtgcctcttccttacatggttgccatgcgttaatagcccacctcgtagccgtggatcgatcaccggaccgccgtgcctatatataggacagggagccaccacgaggtgctcgatgttcttcaagcaagcttgagtacaaccaggaattcgcactgccctctccaccttctcccaaatcgattgcgcacagtgaaagcacagcctcttacggtcctatagcctcgatcccatctcccaatttcgcctagaaccgccgcgacac

SEQ ID NO: 4531 - DNA, 538 bp, Zea Mays
tgcagggcgactgggttcacccctttctgccttctatatggatcggaggccatgaccccgcaagaaataaaacatgggtcaccacggacagtcccgtcagccatccccgacgtggacgagcccacttcgaaggacctcatcgacggagaccgcgtcttcgccctacaagctctaaacaaataccaagctcaaacaaaagcatagcgcgaccacacagtcatcccgagggaattcagcgaaggagacctcgtactcgtccggacagcacggacagagtcctagggcaagctggagcccaagtgggagggcactttcatcgtcaagatgaagacgtcccccagcgcgtacaggctcacaatgccatccggcgaggacttagagcattcttggaacattgataatctccgcaaattttttgtttgactcctcaaggccagctcgcccttgtaattcgcaaaacaattttattccagcccgcactcttttcctcccagggggtgaggtttttaacgaggcggagccatgtaatatacacgcg

SEQ ID NO: 4532 - DNA, 579 bp, Zea Mays
tcgggtgagagtttcgtgtgcgaggttggtagatgcttgcgtcagccatggctccgccgtgggaagctacgatgccgctgactggacaacggggaatgggatgacagatgagtggggttgctctggtcggttgatcggcatggacggtgcagattaaaacaagcataccgctttgagccaacccggtacggaccatggatctgttgatgtgtggctcgggttggttcccttcgtgcttacaatccggttcgtcagatcttaatccaatggctgttagcgtaacggttcagtattggatccggccatcgattctgattgggcgaatggaaatcaatccgggactttaaaacctagaccgttggttctcgatccgagggtaggcaatgcgtactgcttcaatttatgcaagatctaatctcggtcggggaaaccagatctaacggccagggttcctagataccccttcggtcgggtatttttattaaagagacccccgagtttaatctattcaacccgcagtctggccttagtcaaaactaattacatacaggtcctgaactttgtaagaaacaccctaag

SEQ ID NO: 4533 - DNA, 609 bp, Zea Mays
gcgatgaattccgatgccccgactaacccacgaaccctgaaactccgcaggagcgattcacaagcaccgtagaagctctacgacccctaggtgacccactgcgaaccagaagaccacacttgcaacatagccatgcgacagtgctctcgtatttccccatctcggctatggcggtgatttttgttcctcggacgcgtgagggagcgagaggaaggggatgtgcggagtcggcgcattgggttttatacctagggagactcccagatgggttgaagtccggcaatggggggaaggcgagatctgcgcgtagctcgcaacaacccgaggaagggatgatgatgacgatgcgggtcccacgtggcagtgattgaaggcgcaggagcacacacggtttggtttcgagaagatctcgggggggggggggggcaagcttctaccaagaggatccaccccgccagtggctaactggctttcaggcgcacacaacaggatccctggtcgacggggcccacatggcggaggaagtaaaatcactgatgtgctggtgcttgggccacgcgggtcgaagtgcgctgacagcgagatctcggcccagaaacaggtttgtcg

SEQ ID NO: 4534 - DNA, 2010 bp, Zea Mays
gatgaagtgtgcgtacttggagaagcggtcgacaacggtaagtatgatagacttcttgtggaccttgtggaggccctcaatgaagtccatcgagatattgactcacctaggacgacacgtcgaggggttgtaggaggctagctggctatagggtctctgccttgttgcactcagcactagcatgtgaggcaagtgggcatgtagtcctgaatgagcgtccggtcgtgggaatgtagaagtttgctcgtagccgcttgagtgtcctcatggtcggttgtatgggccaatgcaagtacctggtggtgtaggtcctcttgtgtcggcataatgatggcaagccatgaaagaggacgtcggtcacgtgccacaactcccaaagggttgcatcctagaactgctaacagagctggcctacctccgtgtcgtctgttgttgttgtgcaaatctcatcgaggaggtggaacaagggcctcaagatggcgtgtatagcctggcgatgtcggcgtcgtggtgcgagagggtgtttgttgtcttattgaggcgaccggggtgatactccatggtgaagtcaaagtcgaacaacttgttactaaactgatgctgggggactatggataatcgctgatccagaaggaagttgaggtttttgtgtttggtgtggatgaggaagcgacaaccctataagtacgaccgctagtatcggatggcctgcttgaggtggcgggcgacgaatggcttcctaaagaactccagggggtggttccctagttaaggattggatcgaagctgacacccgacgcgtcgcagttgacgatgatttgtcgatcgaagtctagcatccacgggactagtccaatgggcagggagtgcttcagtgcttggtcgccaccatgacctcaagtgtataggcaaatgaatcttcacataggagctgtgtcaggggcaccacgatcatctcgaagtcttggatgaacttccggtagtagccgatgagtcccaggaagccacacacgccctaggccgagcgtggcttgggccaggaggagactacatccaccttgttgttcatggtgacaccgttggttgagatgatgttgtcgaggtaggcgaccgatggctccccgaaggagcatttggaccacttcaattgaggtcgtggatgcacaatgcgtcaaggatgtggtgtatgagttgtaggtgcttggaccacaacaagctagagataaggatgttgtggaacaatacgagcacagacctacgtaggaaggacataggatgtcgttcatgaggccctagaatgttgttggtgtgttggagaggtcgatggacatgacgaggaacttgaagtggtcgtggtgggtgtgaaacaccgtattatcaatattccttgagtgcatccgtgcctaggggtagctagactgtatgtcaagtttgttgaagtatcgtgtgccatggagctcgaagtggccgtggtgggtgtggaacaccatcctcaatatcttttaggtgtatccctgcctaggggtagccagaccgtaggtcaagtttgttgaagtaccgtgcacgatggagcttgtccaggcgctcgtcaaccaataggatcgagaacatgtctttagacggcaacgtcatacagaggcccttgaagtccaaagtatggccccagagtccggaggaagtcaacgccgaggacgagatcgaagccatggcaacagacggagaagtcctcaaggctggtgcacagacaacattgtgggtcatgccttcataggggacctggccgccatttggcgctgtacgatatcgctagtctaatgcgacgcatgaccctgcactgatgaagttgtgggtcgtgttactatctaggagcgccaagatgcgatggccgtggatgtagatgtggaggtgcacggtgtcctttgggtggacgttggcgatcgcgtggagggagacaatcggtgcgtcgagcacctcctcgacagccaccccaacacctatgttgttggtgac

SEQ ID NO: 4535 - DNA, 490 bp, Zea Mays
gttagccctaaggattcaaacaaaaaatttacggagattatcaatatttcaggaatgctctaagtcttcgctggatggcattgttagcctgtacgcgctgggggacgccttcatcttgacgatgaagggaccctcccactttggctccagcttgccccgtgactctgtccgagttgtccggacgagtacgaggtccccttcgttgaattctcttgggacgactgtgtggtcgcgccatgcttttgtttgagcttggtatttgttgagggcttgcagggcaaagacacggtctccgtcgatgaggtccttggaagttggttcgtctacgtctgggacggctgaagtgcttgtccgcggtgacccatgttttatttcctgcggggtcatggcctccgatccatatagtaggcggaagggagtgaacctagtcgcccggcactcggtcgtgttcagcgcccagattgctttaggtagcaggtcggcccattta

SEQ ID NO: 4536 - DNA, 333 bp, Zea Mays
gggaaataaggtccgctatccagttgatgacatcacaaggcatgtgtcatgcacactagttataagatatgttattaacaatcagcgtacaaagaaagtagccataggccttgcgatcccaggacgcaagttccatggaaacgacattccagaagaatattgcagggtagaagtgacgacagtcgtccaaggatacgaggacgacatgctagacatccctaggcccgaaggtatcgagacacttggacaagctatcaagaattttatcctttggcctcgaagggatgtcgaattggttgattggtcgaattcgtcgcaggcccaaccgtctcc

SEQ ID NO: 4537 - DNA, 793 bp, Zea Mays
aattaacttatttttttgtaatgttcttgctcgccaggtgcctagactcataaaggaatacattgaggaagtatctactcaactgaaaatggtctgtgattctgattcagatgagttgcctctcgaagagaaactcgcatttatgcatgagacaagacatgcctttggtagaacagccttgctgctaagtggaggtgcttcgttaggatcctttcatgtgggtgttgttaaaaccttggtagaacataaacttctgccaaggatagtttcaggatcaagtgtaggctcaataatgtgttctatagtagcaacaagatcatggcctgagctggagagcttttttgaagagtggcattccctgaaattttttgaccagatgggtggaatctttcctgtggttaaaagaattttgacgcatggcgctcttcatgatataaggcacttgcaggtgcttttgagaaaccttaccagcaatctgacatttcaagaagcttatgacattactggtcggattcttgttgtcactgtgtgttctccaaggaagcatgagccgcctcgatgcctaaactatttaacatcacctcatgttcttatctggagtgcagtaacagcttcctgcgcttttcctggactttttgaggcccaagaattgatggcaaaagatagatttggtcaaaccattcctttccatgctccattcttattaggcatggaggaacgaactgttgctccaacccgccgctggagagatgggagcttagaaagcgatttacccatgaagcaattgaaggaa

SEQ ID NO: 4538 - DNA, 360 bp, Zea Mays
tctggtggttgtggtacagccacttgtcgagcgaggccttttcggcgaactcgtacaccaggaaggcgtagtccccgtcagcgcctatggatatgccggccagcttgatcaggttggcgtggttgaccatctgcatcatcctcagctccgccgacacgtcacctttcgctggcttcaccgcaaacacctccccgtcgagcttcgcccggtagtacgtgctgccgatcttgcaccgctcgtcaaggttcatcgtggcctccacgatctcctcttccacgaagatgataggcttgtcgatgaactgcgacacgcccgtgagcagcttcccacctttcatcacgtgagcgaaggaattgctgc

SEQ ID NO: 4539 - DNA, 565 bp, Zea Mays
cccgagtcggctgtacgtgctcgacctcaccatgcccccactggtctgcctagcggcatacacaggggaggatgcgtggcggtggcacgctaattcggccacatgaacttcaccgcgtcgaggaagatgaagaaggaaggcctagtgcgggggttacctgcgctatcgcaagtggagcaactgtgtgaagcctgtctcgccggcaagcatcatcgggcatctttaccggcaatcttctctagcattcaactgaaccattggagctgctccacggtgacctgtgcggtccaatcaccccaaccacaccgagcgacaatcgatattttctcttgctcgttgatgattacagcaggtacatgtggctgacactcctggcatccaaggacgcagcaccgggcgccatcaagcgagtccaagcggtggccgagcgcagcagcgaaaggaagttgtgcgccctgcataccgatcgcgtgggagagttcacggcaggtcacttcaacgactattgcgtcgagctcggcgtgaggcatgaactgactgccccatatacaccccagcaaaatgg

SEQ ID NO: 4540 - DNA, 602 bp, Zea Mays
gcggtgacggtggcgggtacaatggcggcgacgagagcgacaacagcggtggcagcaatgttagtggcgaggcaccaccgacataaatagtagctgtggatggataggccacccttcctcaaaatgatgaacacaaaaacactgacatggaggtcaaagcatctattgatctcaggctaaaactagaaaatggaaaaatggataatagggttttctaaataagagcctaaatgagatagccaaagagatggctatccacaacaacccacccatctatttatagagggttatttcacttgtttaaattacccctagattcatagagcctatccacttagccgggggtgacatggaccaactcctgagatttttatctattggccatgtgctccacacgaagttgcttcgcctcaatgcaccctttcgatgatgccacgtgccgccttcgattcctgttggaaccgcaccaccgagttttgaggccaaaactcggtgaaacccaccatcaatagcactcggtggttttgaggctcaaccaccaaaccgtcatgagtagtgcactgcatgtgcgtcccccacgtcctagacatgtgtcccgccag

SEQ ID NO: 4541 - DNA, 896 bp, Zea Mays
ttctatactaagtctgaaattcagtgttgagggctcaactttggagctttgtatctttcaaattctagggtttttgccctaggtcaccacatcaaacttgtagatcaaacaaaggagaacacttttgcttaagagtgtaagtctagttgttgtgaagaatttggagataatcaccctcaaagtcaggctgtcaggacatcttaagtctgaatttccagtaacagtgaaattaggcagactttgaacctgattttgagttggattcggtaactattttatggtaagctccatggcaaagttgaagattaactgtaggtctataactttggtacagagagctagcctggtcaccacacaaaatcaggagtaaatcgagctccaagatgctctatcaggtcgactgactgaagaaacgccatggtacagtgctcagatgtggattagactgccagcgctgtgtgctcaccgccggagacctctctgcgtgaagattcgtgccaccaccgtctggattcgtgcgcggtatggaacggataacgccggagttagatagcgcatacgtggcaccctaccccgagtccaaccggagacctcaccggcggccaccgagtcaatcgttttccaccgtggtgtcctctgcaccgtgattctacttcactttaccactcctctacgtgctaggcatgcactaaagaagttatccatggccgggaagtgatcgccggaccaccgcggctataaatggcccgtattcctcggcgaggtatgaacatcacacacaccagtgagttgaaccgaagcaaaattcgcactatctctttctcctcccctcaaattggttgaacgcggtgaatcagtggttctctgcgatcaaatagccccaacgtgaccccctg

SEQ ID NO: 4542 - DNA, 476 bp, Zea Mays
gtgaccatgggcacgcgttcctgcttaaccatggccaaattgagctaacgggtgccacggtaagcttcactagcacatagagcaataaaaacaacacatgaattggacagagtcttacccgagtggggctggccacgacagagctgttcacggtggcgcgacggactgatttgggggaaaccagcgtcacggcgtgctcggttgaaattgaggtcggctcttggggctatacggcggcaagggattctagttttaccgtgctcaaccaatttgggaggaggggacagaggtagtgcgaatttaggcatcaatcaactcactgtgtgtgcgaagttcatacctcgccgtggaccaccgtgctatttatagccacggcgacccggcagacgatctccggccccggatagctttgctagcgcatgcttaccacgtcggtagaagacacagtgagggagatcgcggcatgggtgacacca

(The sequence listing continues in the following parts.)
